United States Patent Application Publication US 2015/0376612 A1 - sequence listing, part 42

SEQ ID NO: 100166 - DNA, 1640 bp, Homo sapiens
gtcataacaagcatatacttagtgctttaaaatatgcattgccaaattgcattcccaaggcccaaatttatactcctatcaccaacataaaatattcctttcctcaaacccttgcaaaggctgagtattgtaattgtttagtccttatcagtttcatgaatcataagttatatcttattgtttgtatttgtatcaacttaattgctaatgaagttgagctcttcttttccacaagctcattaggcatttgcatttatttacaatttttaaattgattgtgaatctggattttggatccagataagcttgattatcttctcgtttgcattttatattttctcattcaagaattagttttggcatttgtataactcatttggcattgttacattacttaacataatttcctttattattctcaagaggctggaactcttttatgagtcatttattcatttattttttaaggatgggaatgatgttatattttctgaatatttgcgtgttttggaatgtcttggttgacatagaatatttgggtcaccatcttttactctcagactctgtggacattgtcctgtcctagtgtttggttgactgagttccttacttctcttcgtccattcctctgttgtcatgcagtcttttattcacccaacatatagtttgtcagtgtcttagcgtcctgcctgtccacttgcatttagtggtgtggaagggaaggttagtgcccttgttatggatctcctttcttaaatttccctgagggtcgatccttcccttatgtactgagcctttcgttagctgatgggatgaaggattgtagcccttctgtaatgttttttcatattgtcttttctgcatctgctccgctccctccttttacagttcctatcctacagatgactggatttcctgtgttgaatttccaagtttctgctttctgcttatcatcttttcctctgggtatcagaaaaatgacatgaactgatttttctgaatcattagtttggttttctgtagaacttgatctgttgttaaccacatccactgtgtgtgctttctttctccaatcaatttaagttgtttattaaagtattatgaacataattcaatatcacataatacctgaaggtgtataatgaaaaataacactctctgcctgttctccgccctcaatccttgtcctcttatccataagcaaccagcttgaacatattttaagcaatttctttatgtattttttctctatttctaaataatgaacttttgctatttcttgatttattaaaatttgacattattttttcatgctgctatacagatgaagactcaacactcttcactccctactactttccctctctccatcattgttatgtcattatttttaattgattcaataagcaatatttattgtctggactctgtaactgttatgcaccacaaagctgtgttatatcctataatctttgttgctgttgttcagccttttgcttttctgggagtgtgttcttctctttcttttctccttgaagccttggggaatgtacttctatttactcctcctgctcccaggccttcgctccagtgcccctctgtggagcccactctctggaagccttattagctcccatgtg

SEQ ID NO: 100167 - DNA, 1081 bp, Homo sapiens
aggaaattcctcctaacctgtggcagaatagtcaagagaaaaatatttttccatggaaaagtaatactacaaagaactatgtaacaagcagctctgtgtggccatttctcagattttaaaaatgctagctttttgtcatctttgctccagatcattcattcctacttaaagtgctgctgcatgaactgtttgttaccaggccatggcgaaacaaagaacaaaactgagacggcatcttactttttaaaactaaaattgtactttctcagcatctaacttggacctgttcatgagtatttatatatgtgtgtatatgtgtatgcacactcactgtcacccagactggagtgcagtggcgtgatctcggctcactgcaaccttcattttgggccagaatgaagtcagctacaccacagagctcacagttgagaagaaatctctcacaatactttgctgatgaaggaagctatgtactgatttacattctgacacgagcatcttactgttgctggtccaggtgtcacgtgcattttgtggagtgcactgattagtaactctgctctagatctggttttgttcttataaagttgatggttacagttgaagcctgtatatattcattccactaagatcccattatcctctttcccctccatgttaactagtgtattgaagttggcgtgtattcttccaggccatactgtatttgcatgagctcactagctatgtagagtattattttgtgttagtggaatcctactgtatatagccttctgaagctaaatttgttttgtataacatgattttcaagatttatctattttttttaattaaaaaaaattttttttgagacagtcttcctctgtcacccaggctggagtgcagtgacatgatctcaacttactgtaacctctgcttgctgggctcaagcgatcctcccgtctcagcctccccagtagctgggactacaggcatgtgccaccacgcctggctaacctttgtattttttttttttttttttttttgtagagacagggtctctctatgttgcccaggctggtctcaaactcctgagcccaag

SEQ ID NO: 100168 - DNA, 1050 bp, Homo sapiens
aggccaggtgtggtggcttacacctgtaatcctagcactttgggaggttgaagtgagagaatcactcgaacccaagagtttgagaccagcctgggcaacatggtgagacccccgtctcttaaaaaaaaaaattagctgagcatggtggtgcttgcctatcatcctagctactcagaaagctgaggtgggaggattgcttgagtttgggagttggaggctgcagtgagccatgattgcagcactgcactccagcctgggtgacagagtgagaccctgactcttaaaaataaaatttaaaaaagatacattagttgtaattgggcacagtggcaccagctcccaaatggatacacagacgagaggaacagaatggagagctcaggaagggtggattgttggttcatagacagttttaggggaggggactggacagtgagtcctgttgtcctcttaactgttccctcatcactgtgttttcctgctagtgttgtgcagggagacaacagcactgtggtgaccagccttggcttatgtatctcacgtatgcatgggacactgaagggtgcctcgaagggaagggacgtcacataaaacttccactcccacccctccaaaacttcatgataattcacttttgttagtggtcagttttggcatcacaaatattgctggtgcttctgatttatagtctgtccagaaatccttaatccaaagaggtgaaatgtgctaagtgaagacagggcacagagtggccctttaagatactttttcagttgtgctagttaaatgggtcaagcagtaattcagaaactcatcgaggtcttctttccatcctgctaacttttgggtgacagtgagtaagttctatggtttttcttctattggaggaaaactcatctccgtcagcagtgctttgtggaaggcaggcaggtagaagtcatggtgcctggaactggccccagcagcctgggcagggcgggggcaggcatgttccctccccgccatgtttctgtgttttctcaggcttctctggatcacagggaagcatga

SEQ ID NO: 100169 - DNA, 1046 bp, Homo sapiens
tgtgtcttctctcttttctgggtaagtctgaccagagacttatctattttattgatctttttatttttattttttctctcttgcctttttctgtttgaaatgtcatcagtttctgctccttattattctcttccttctctgcttgttttggatttactttgcttttattcttcaatttcttaaggtagaaacccagattattgatttgataacctttttcttttgtaatataagcatttaatgctgtgaatttccctctaagccctgccttaggtgaatataacaaattatgatatgttgtgttttcatttacttcaaagtattttctattttgcctggtgacttctctttgatgcaaaagccatttagaagtgtgttcagatatttgccttggtgtcttttgctctaagaatggagttttaatgaactggagactctttgaggagaaggtatttgggtttgtacatggcaacatggcaggtttttcagtgaagtgatgcactgatgctggtgtcactgtatgagcttgaaaacatatcttcagctgcttagttactcttatatgcctatgctaatagaatctgaaggcaaacattggaatccttcttaataacgtgtcttctttggtctttttagtgtgttatcattgggcagaactggatcctgaaaaattcaagatgctaagcacctacactactttaagaatttggaactgaaacatgaagaggaagacagaaataagaatttgggaacctgaatagctctgcaaaaaacaccaaaggaccgttttatcgttttctgttgttgctgtggtggagtgatgcagtgggcactgccggtgggccagggggcgggtgcgcatgtggtagaaggtgtgcgctcgtgcctcccccacagaaaggctttgttggtttctaccacatcttggcttgcttttggaacaggctggcccagcatcatttgtcatcaagtccactgtggtgtattctgcgtgtccatggcgggggttctccaatacactcacactgtccatgttctttttattg

SEQ ID NO: 100170 - DNA, 1650 bp, Homo sapiens
acaatggtttaaacctctagatttgaagtcattacatcccagatgcagaccctggccagctccctaagctgtgtgggcagtgaggtcccagaagctctgctgtttgagttatctaagcagggttttacagagtgaattcaaattcactttaaagctacttgaacctacatgtcgataaactcagttgtagggtttggcttgctggataactgtcatgtttctccaccacagcattttattgccaccaattaatgcttattgaacagttgcagcctgtccttgtagtaaggggtaacgaggattgcatagagatacgacctaaggatcatgacatttggatggtggtaaaatgctaaaggcctttgttggtcacagcccagttcctggctcccattctaaagggacagagacataccagagagtgagcaccatgtggtcaagttgctgaagggtctgaaaccgtaaaggaagagctgaaggagctggggctgtttcatctgggaggggaactctaaatgtttgaaagatgtggaagagaagctgggtcaggaacaaaaataggagcaatgggtgtaagttgcatcaacgtagattctggcattctaacaacatgattcaaaagtggaaggtgatgttgggagcttttggtgtttgagcagaaattctgagcctatatgtgtgaggggggatctttgattaattaaaacatcttcctcacagtatgcaggaacatggtaaaagaaagcatttactacttttgtaaacattttggattgaagagaacttttccatcatcctgaaaatcactttcaactcctgggatcagagaaatagcagtgaatacaccgaagtctggcctaagagggtcagatctaaccacagggccagattatagagaaaaatgaaagctcaagaagaaaccccataatatctgcagctgcctcaaaaaggtggttaatttccacccccacctacactcctgaaggtcctttcctagttgctttgaaactaatggctaaaattagattttgggtggcattcttgtggagaataaatctctcagtctttacatctctcccaacatctctgcctccttctttctgcttatttataaagcatactgcttattgtccattaaaacatcatttgaatgaggatgggagaggagaatcgtaccatgtatggcttttctgagaagccttggcagatcacagacccaggactttaaacagagtgctgtgccgataacactgcatagcaggacccatttaatcttgcctttggtggtttactttacaggagaccaagctcttgtggctacacaaaacatagaccaaataaaggcatctttgggggctggatgtccatagcagcacctcatggttagtggtcccagggagggcattttctctaccaagcagtgtcctggctcagatgggtgccagctggcatatatatggacaatttggcatttcattgatttgatcataaggaacaaatagttccgcaaacaccctatttcctttgatatggtaacatttgagtaactccaaagccagagaggcaatcttttctatctctggtttgtcagattttctgccgtttttcagccaggcactttaagaattcttaatttgttgttcgttattg

SEQ ID NO: 100171 - DNA, 1088 bp, Homo sapiens
tcaagcgattctcctgtctcagcctcctgagcagctgggattacaggtgactgccatcatgcccagctaatttttatatttttagtagagatggggtttcaccatgttggccaggctgatctccaactcctgacctcatgatctgcccacctcggcctccctaagtgctgggattacaggtgtgagccaccgcgcttggcctctacagggtattcttagtgtgaattgaagggcaggggaataacttaggttagtgtttctcagcccttatcgtctattaaactggtgactagcagtttaaccttaaccccaagagaggaagaggggcatctgcagtcagaaagcagtggaattggaaaccagactgtgaggagttacctttttggtgagcttctgtatttgcggagtcctgaattgaatgacttttcaaagacagaattagattcccaagaggcaattactgatatgctaatgataactttgaggggaggcctgggaacctggaggattgtctgactgactttgggatgaccatctgactttgctctcatgactcaaatgagcaatcaaggggtttgtaaacacataaggcttttgatgtatactcaaactgttctccagaaaggttgacttgacttctaggcgtgtgtgagagtgctcattgacccatctcttcatcagcaccaggagttgtcatggaaattgtaggtgaaaaatatgccatattgatttgtgttgctttattaccagagagagagagagagaataaatatgcttaatttgatatttgtatttcttttgtaaattgctcaaattatttgtttttttcttttgaagttttaaaaattgatttttgaaagttcagtatgtatgagctattatttttatacttcaagctacatctaattgccattgccacatttcccagtccaatataataggaaactctggttaggtgaattacatctaattattaagtttatcaagcaattgtctttcttatgtggcacacttttttttttctagattgaattttacttgtaagtttgagtggataggtgtgtttttgccattcagaaaactttaat

SEQ ID NO: 100172 - DNA, 1002 bp, Homo sapiens
aagatgccctagacagcttttggtgcaagaagcatgagagacatgtgaagcagacctgcaccccacttgttgtctggagccaagcccacccaagcccagcccaggtcagccatacttaagcccaaatgcaggtgcgagaatgaaaaataaatgcttattattgtttttgatgtgtttgttacttagcaaaagctgactaatatacagccctaatttactctctccactgccaaagtcaccgttgtgaaacacatctatcctgttactggtatacgatgtccaatttattccacaggataaactcctaaatatttaccctgccctgcatgtaagccaaccttgctcaacctcagtctaccgttcctgtctcattccgtcatgactctgactcatttgacattcagaatacttgaagggctgaagcaggctttggtctttgaccagtctaaacctttgcttctttctctctgcctggactctcatctcacatctgcttcctgccttgtcaattcctgctcattcttcaaagcctgctcaaatgccaccactctgaagccttgcttttctctcccaaaagcggccttttgctgtccccataataatgctgtttgagtgttcatttcaaggcactgcagcagattgtgtctatgacctggcctagcccaatagcttcagggaagtgattctactttattcatgcatgtgttccttacatctatggccaactcatatcctggcatacaatggatgctcaaaacaggtaagtgagtaattttaaggggcatcatttggcagcctgcccttctaggcactgcagtgagcttgtggagagtagattaattcagagttcacattgcaagcagtgctgctgtggttctcagagtaactctgccaggaaatgagttaggtgtgttgaagacttacctgtcctgctccagggcagatggttagtggcatagtgccatagcgggagcatgggactgcaagtcgagagccagcctg

SEQ ID NO: 100173 - DNA, 1035 bp, Homo sapiens
tcctccaggtttcccctttcctgttggattggggctcatctgatgacctcatctaaattagttaaatctgcatagaccccatttccaaataaggtaatatccaatgctagtaggggtgagaactccaacatatctctttgtggggacacaattcaacccataactaggtgtaaaattagaaactgatgagatatccaggaagtgtgaccagtgcacacaatcagaaaatagagtcaggcattctcagcagtaaatagctattccaggtcaaagggctgggtgtgagttgcctccatcttgtcttgttctgctgttgttggggaggccttagcaccttctgaggtgggtgaaagcagagaatgggagctgaaggcttaaagaaagggccaagcgaggtgggtggttcctgagctttgatttggtggcgtgctgtctattagaccaccctgactggtttctgtgatctctccatggtactgctgagtgccaggtacatctctttggaggtattgatgcttaatgaacggcagcttctccttcctgctggctgaggtgcatgagaggccaaatgactgtatttgggagatgtgcggtacaatttcaaaatgcctgataatacagtgatctggttacaatcactattaaaatcacatcatggattgtgataataaaaataaaataatatatactagatgataaatattataaaatattatatatatataataaagataaaggaaatatgtttagcttcatataaaaatcaccatcatgcccttgatttgcccctgaccagcacccagttcccatgaccttggagcttcctgcattctgaccctgagcttctgtcccatggagcaactgtgtttatgggctgtcaaccagctaccataggcaggggatggaggcctttataggctcctctcttttatctcacagggaatttttcaagacagagctcaggtttctgaactcaacttacataatgcatctaaaatgacataaatatgaatgtatctcacctatcacccccga

SEQ ID NO: 100174 - DNA, 1050 bp, Homo sapiens
agctgcctgctccctgtaggtggctcctaatcttataactgttgttccaatctgcctcctcccatggggtcgtaggactctcagggacatccaactattgcctggttccctgccatgtgcttcagtcccctctatgcatccccatgggttgttgttcagtctgtgctttaatatttttgatgaggagaaaatcacccagtcccaaagtgctagccagagattcctcacctcgagttgcaatttgtcttcctctaatttctctcctttggttctcctcttatctgtcactgagcaagtctaattccactcacatgacagaggcttccctgctttttcttttctccaagtcaatcatccaagactccttcaaacatcttttcctaaacatggtcacatatttcatttctagctacttcttgacgggccctaattttatcacgtttttatcaaaatgtggcacccagaattgaacagaaggcttgaaggtgatctggcctctatagaccatcatttccctcgttgcagatgagttgttttctgaatatagacttattcatttgtctctagtaattcttcaactgccttttggatttctcaatctggatctccctagaaacctcaatttattcaaaaatgaaataatcatacacccaccgacaccagcaactgccccagtcttacaaggctagcaagtcaggttgcctgcttcccactcagataacttgatctctagccttattaattagggggcagctattactccacttggctttcattctctatttgtgtatgtgggtttagggaaggggactttttatcctgatacagaatatccatttattcctgttaatttttcaactaatgttggatttttcaagttgggcttaacttatctaaatctaggataagctgggctctgtggcttgcacttgtagtcctatctactctggaggctgaggtaggaggatgacatgagtccaggaggagttcaaggccagcctgggcaacatagggttaccccagcagtaaaaaaattaataaaaatagaat

SEQ ID NO: 100175 - DNA, 1235 bp, Homo sapiens
gtagtgaacaaaagaggcagagtactttctcctaagaggcttccattcgagtgggagaaatagattataacaattgggcaaatgaatacgtaatacatgtcaggttataataggaattacaaaatgaagtaaaacacaataaaaaagtagagacaggtgcataaaaattctggaaggatgtactccaaatgattaataaatagacctgtagcttttaaaatttatgtcttctaaatgttctgtaacaaacatgtattttttaaaaaaatgaaaagttattttaaatatataaaaagcactgggtttgaatgtcccacatgattaattgtgtcacctgttgtatcataattttattaccaaaaatactgaaaaaagttcaactggaaaataatacatagtctttattatctggggtgtggtttcaacatattttaggaatcttgatatctggaaatataaataaattatagaaaactagacatgtttataaaatgccttccagatgggtaatttgaaatgatgaataatctcttccggtcttggtaaacagcaaaatgtgctaaataggtcagaatagaaaaatagtcgtatcacgtgcaagaaacagagaacaaagcattggagcccaaaatgctatttctaatgctgctttgttttgttatgttcttactggcaaatgaagggcaaatgtgtgtttacgaggtcacacaataaaatataaagtgaaaatttcagtcatttggttagcttggcccaaggagactatcaggcttggaaaaatcagacaaaaataaatcatgttaagtaaggtccaatccagccgcttgcctggggctcagctccctggggtgtttggacccatgtttggtaggtggacgtgaggtcgcggtgcacacttgccctttcccctcctcccaccccctccccagtgcttccacaagtctgactctgccttgtcactgattgactttgccttccaaaatgagatgacatgtttattgtctaacatcatcactgattacgacaacaatcactcacaacaactggtgtggtcacacaacatctcaccccagatgtccacctaaatcctccacctctcatgtgattaaagtcattcaatctctggtctatagtaattttatattttatattttggagacagggttttgccctttcatccaggctggagtgcagtggcacaatcagaccgcactggaactcctggaactcaagca

SEQ ID NO: 100176 - DNA, 1034 bp, Homo sapiens
tccaagagcaatcatctctcaaatggccctggagcccacagcttcatagctggagaagtctactgccttctctgtttttgaagccaaggaccaacattatctaccagctttgtccagccctctttaattctcctgagtgcttgaaggtgatcacaaataatctcacatgcatttaacttataaccatagtgtggcagtgagtcctccagattggaaaagaaaatgcctatagaagatccaggtacgcccttatgaccgccaaattgacttcaggatccagtcccgctttttaatgctggtctcctcttcctgtcttacagcctttaggtgttcagctgatgtaaattaattgctcccattgtcaaggactttagtaggtttgcttttctttttttctttttttttttttttgctgctagtcaaccacattgtgttccaaaagtacctttaaaaaggtattttatggttttatttagctttgttttatttgtaaaatacccttctcctgggctgtaggcttctaggcattattcacacagatccagcacactgtttggggtacacttaagcctctagagcccttacccatatttgcatgctgcccagctgtgagttcattgcaaaggtgcagactcacctgcttgtgatacctctccctcttagctactgacttatttgtggtgtcagaaccccattttcaagaacttcccattctgtttgatgggaacgagggcactttttatagactccaactcacctttaaactttgtgaaatctctgtttgtaaaccacaaaatttatcagcacaactgagtttcccattcctagcttttgtgaacataaggatgacataagaatttcctcttacaatgcctctcacttccacttccccaatcagttcctccccgtgaatcggaagtaagttgagaatagcagctccacccacagctttctgatccttctgagggctgaatctgcccacaagttaggtcaagtgtgtgtcagaaatggtttttatcacagagacactatga

SEQ ID NO: 100177 - DNA, 1108 bp, Homo sapiens
ttctcctcttgggacccttgtgtttctctcacactcactccccatggagtctggatggtgtgcccctctctctctgttttagcactgataagcttgtcttttaatggtttcttatttaattatgtccctcactggactatgagcatattcagaacagaaaccaaactctgattcacctttacatccccatagttgagttaatgaatgactaagtgaacgaagaaaaaagccataaaagaggtggcacagcacataaccaactgcaagtttttgcagataacccaggaaagtagcaaattaaagccagggcaaagaacacccttctttcactattacaaatcctatgataacattcggtcaggtctaaacccacagccagtctttccttgttaagtttagggttaacagttccccttatgactttatgaggtagaaaatattcagcagagtcaatcaagaatgtgtcaaatgtcctgctttgatcagtctccgggcagatgtcacactattccttctacccttcttgatcctgtccacctcctaaactcctattcttcctttaaagcctgtctcaaaagtcccacctccttataggtttccatgaccctccaacctctagagaaaattgatttctgcccagctgcactctactgtcattgtcagcctttgctatgatatgttccaccacagcccttccccttgacaaagattcttggcttgacgaaactttagtcaggctcctgaacctcctcctaggtgcttctgagcacttccttataaaatctagttttaacaaagaaccctgctaagtaggttgagcaagaacgccctgccctcgatatctgatcaccctccatatctgatcaccctccatatctgatcaccctccttatctgatcaccctccatatctgatgatcaccctccatatctggtgatcaccctccatatctgatgatcaccctccatatctaatgatcaccctccatatctgatcactctccatatctgatgatgaccctccgtatctgatcaacctccatatctgatgatcatcctccatatctgatgctcaccctccatatccgatgatcaccctccatatctga

SEQ ID NO: 100178 - DNA, 1317 bp, Homo sapiens
ccggggtcattcaaaggcccagcccagcagcagaggcccaacttgagaggccctctttggtcatgtctcacaggttggataagaaggtgcatcacgattgtgtttcagaaacagaaaacctgtcattatatttcagagaataacagaagagctctctgacaccacaaagactagacctgcgactagctttgaagaaactacattgctgaaatctggctataccgaatagatgaaccagtgggtgatgattcacttgacctcagctgagttccctcaactattggtctcttcttggcatttgaaaaagtattcaattttcaaaaattctgtctgccaagcaaaatttttcaatcattcagaactggtccaactgcacatctcaggcctcagggattcccagtaatggagttttcagatttttttgtttccagataagtggaaattcattcatctgcatgcacagtaacaatgtactgtggacagagattgcaggggcatgaaaaataatggatagaatcaaaaaccacattttagtcagtaatttctttttttattttttttatttttatttttatgtttttttgagacaaagtcttgctctgttgcctaggctggagtgcagtgacatgatcttggctcgcggcagcctccggctcccaggttcaatcaattttcctgcctcagcctcccaagtagctgggattacaggcatgcgccaccacacccagctaattttttgtatttttagtagaggcggggtttctccacgttggccaggctggcctccaactcctgctagtcagtaatttcattgagcaaatccttacatggttctctggatgctcaaaagccatagagatgaatgttgcccccttggcctcccagcagatcccctggactgtgagtagacggaacatcacctgcccactgtccagtgagtccacatccccacaatgtatcagcccacaggcctctcagcaccttgcagtggaaacagcagagcaagtagagatttagtcacagtgacaatttactcataatagtattgcaaagcatgcctcacacctgtatctggatgtgtcttttgttttccataaataaattcttcatagacactgacacctggagaggcctcagagcatagaaacaatagcaccatagaaaacaatgtaagccacagatgtaattttaagcattctagtagccacatttaaaactttaaaaggaaaacaagtggaattaatgttaataatatattgtatttggcctaatatatcaaaatatcatcatgtcaacacatgatagatataaaaaagt

SEQ ID NO: 100179 - DNA, 1048 bp, Homo sapiens
tcccagcactttgggaggccgaggcgggtagatcacttgaggtcaggagttcaagaccagcctggtctctactaaaaacacaaaaattagccaggtgtggtggcgcacgtctgtaatcccagccactcgggaggctgaggcaggagaattgcttgaacccagcaggtagaggttgcagtgagctgagatcatgccattgcactccagcctgggtgacagaatgagacttcgtctcaaaaaaaaaatatatatatatatatatataaaatatatatatatatttgctggatgaataaaaaaatgtgtagcacacatctgtatgcgctgcctatatatggttcatttattcagccagtattgattccacacctacaatggtgaggccagccctgggcaccgggtatgcggtgctgggggaagcaaatcagaattggagaaacttgaacttgaaggatggggatgaggggcagggctactcacattggggtagggaaagtcttcctgaaaaggtgactttaagctgaactgtgcaggagagaaagagacgaaaggaagagcattcccggataaggaagccacatgtttaaaggcctggagtgacatctgaggctctgagggagaaaaagggtggcaagtataatgaatggcaggccggaagggcaggaggggcaggatgccagtcatgccagccaggtgaacactgggattccattcttagtgctatcggaagcggtgatgggtatgaggaggggagtgccacctatgtgccaccctcataaagctcacccggcattagcactgtgtctccatccatcaaccaagaaaaccaaagtgcaattaaaatcttccctggagtcactcaaaggaggccagagccagcctccccatcagcacaacttgaaatcttgacattgagttgctgttctttctctacacttgcttcttcaggtgccaagcagctctctcaaattgaggtagccctgcccttcctccccatccttcaagttcaagcttctccagttctgatttgcttcctctatctctccca

SEQ ID NO: 100180 - DNA, 1058 bp, Homo sapiens
cgagtatttataaagtgacttgaactttacaattaaaagattatttactttgaaaagctgtataaatggttatttaaaatagttgtgtggcttctatcaagccattagtcatctctgagcctcagtttccccatctgttaaacggacataatattagtattgtgcaaaaataatagaattattgcaaggattagatgatagtgaagtaaagcacttagatggaggctggcccatctgagcactcaatattaatttctgttattaattttttatcataatgatgatataaggtaaagtcaaagatgctatgaagttgcacgagcttattaacacaaagcaaccaatgtaaaccaagtaatttgttttaatgccagatgtgaataagttgttctgctttttttcctactttataacctccttcgcatcaaccttgatttctatagttatataaacctttgtatttaaacaaagagatctcctggataagttggaagaggagaaagaaaaaaacaacttgggctggggaatctgatgattgtggggtcagcgttaacttttggcctcagttttaaccttgggggactgttttcattgtttgtacctctgcgttagatttatctttgtccctggccttctaataataggtaatcatttgaattcaataagatctgatccagcgtcaggaattccaaaggccagagagacaactcaactatttcttttgctttttcttttgagacagagtctcattctgtcactcaggctggagtgcagtggcaggatctcggctcactgcaagctttgcctccagggttcaagagattctcatgccccagcctccagagtagttggtattacaggtgtgcgccacaacgccaagctaattttttgtatttttggtagtgatgggatttcgctgtgttggccaggctggtcttgaacccctggcctcaagtgatctgcccaccccagcctcccaaagtgctgggattacagtcatgagccgccatgcctggcctaacttaactatttctgatcttatatgtaagtggacccat

SEQ ID NO: 100181 - DNA, 1924 bp, Homo sapiens
tccgagttgcatttcaggaggtcaacagtggttgcacaggaaagaccctccttgtgagaccttacatcaccactgaggatgtgtgtcagatctgcgctgagaagttcaaggtgggggaccctgaggagtacagcctctttctcttcgttgacgagacatggcagcagctggcagaggacacttaccctcaaaaaatcaaggcggagctgcacagccgaccacagccccacatcttccactttgtctacaaacgcatcaagaacgatccttatggcatcattttccagaacggggaagaagacctcaccacctcctagaagacaggcgggacttcccagtggtgcatccaaaggggagctggaagccttgccttcccgcttctacatgcttgagcttgaaaagcagtcacctcctcggggacccctcagtgtagtgactaagccatccacaggccaactcggccaagggcaactttagccacgcaaggtagctgaggtttgtgaaacagtaggattctcttttggcaatggagaattgcatctgatggttcaagtgtcctgagattgtttgctacctacccccagtcaggttctaggttggcttacaggtatgtatatgtgcagaagaaacacttaagatacaagttcttttgaattcaacagcagatgcttgcgatgcagtgcgtcaggtgattctcactcctgtggatggcttcatccctgccttccttcctttctttttccttttttttttttttttttttttttttacaaagagccttcatgtttttatatatttcatagaaatttttatagcagttgcaggtaaactgtcaggattggttttaaaatatttttgtaactttaaaatattctataattatgcatgtgattttaacatttaatattcaaaaataaatctcttgctggatttgagagtattgcatttttaaagtctctcttctgtaactggatgttttggcaactttgtggggagagactgctggatttcttaaagcaacgtattcctgacactggccacagaatgcctttggaaatcggatgtactgttctcttgttcacgtttagtggtgttttgctgttttgttttttaaacaaatgatgctgagaataaggagagaaatgaatgtagagagaggtagagagagaaatatgaactctaacaaaggactgaggagtgcagtctgctggttcaggctcttcaaaagatgtagaaaaagagatagaaggaaccacctatgcttaaaatactgtaaatatgcagtgaggtttggcaaaatctattccatgtgtgatttgcttgtagaaacaattttgaaagccccttgaggaaaataaaaatcaagaagaacacttttctcccttttccatacaaattaaaacttaacagcatcaaattattgggaccagaaaccaagtaatgtataatgtggcttttgttgagttaaataagatgctatataatggagaagaatttgaaaatgcacaaaaaaatcaatctacattatcagaacctgcagtgaaattaaacttatgttaaataaaaccagtttgcaggtgcacaaactatgagggtcttgtatccacgtaacacaggtagttacaaaaacatgttattgtactgtgtaaagatgcatagtcatctcatttggttggctttgtaccttgtaccttttttagccttggcttttgttgaactagaaccctcagcacatactgtgttgtacttttgtaaatgattttttaaatggaattttgcacataatacattgtaatactgtatgataatcatgtgtgaaaataatttttgaaatatcctttggctgtttttttttttctttagagtaagaatatattcatgcaccacgcagtgtcatggacagatgaaatccgaaccagggttt

SEQ ID NO: 100182 - DNA, 1043 bp, Homo sapiens
ggagtgcagtggcacgatctcggctcactgcaagctccgcctcccaggttcatgccattctcctgcctcagcctcctgagtagctgggactgcaggtgcccgccaccatgcccggctaattttttatatttttagtagagatggtgtttcaccgtgttagccaggatggtctcgatctcctgacctcgtgatccacccgccttggcctcccaaagtgctgggattacaggcgtgagccaccgcacctggcctaactttattgttgttactgctgacggtggtgatggcggtgatggtggtgtgtgcgtgtgagttgggagtagctcattttccccagtattcaatgctggtcaagagcatcatcagggcccatagccaggggtgactttcgccaagaagggagaagggagcaagggaggttgcaaagacgtcttgctagcttcccagtcacgggcagatcgaaatcctaagaggaaccatctctgcctgcacaagagtctaaaatagtatttcccaaaaaggaattattatttaagtaaaagcataattatagtcagtgattattttaaccactttcctccacctttttccccttttactttattatattcacgaatttatatgtccatttatatcatttaacaggactattgtttaaaacttggtgctttaccaagaagaatacagaggttgacgtgattaattctttttatttctgatgtgcgtgcttccgatttctcaccacttctacaaattatgagagaatgcatttatttaccagattgcagtttccgtccattttatctttctcactcccatttttctctgcagcctattgatgtacgatcatatgcagaaaagacttatgcatctattatctactgaaagaaaaactacagaaaacaataaaatgctagagactctttaaccaatcagaaaaaaatacgtaagtgaagcagctacgacatcacaaagcttctatttttcgctagcacatgaaaatatgagacctgacaaattgcaaactctcattgaacagatag

SEQ ID NO: 100183 - DNA, 1132 bp, Homo sapiens
tacaaagagggtattcacattctcaacaaaggtatttcacctctctttgcctcagtttctgtaaaaggtgcataatcatagcacctacttcattggattattatgaagattacatgagttaatatttgtaaagcagttataacagtgcttgccacattttaagtgccatataagtgtttgttaagaaaaataatgaaattaagtatcttgcattttgaaggatcagaatctggagatgtagagttaggagaggcacagccctcaatcatagaccttagcacaaatggctctggaggggtgatgtttgctcatagtccccgatgagcagcttagaggagatgggtggggctttggaagccgcctccctttcctcttattgtcttgcttcaaccagaaaagtctacatgttgacacacttgttttatgggttttaaaaataccttttagggctatttacattcttaaagactttttaataaaaaggatatatgcacattattaagaaatcaaagacttgtggaaatgtacaaagaataaagcaacaaatcattgaaaattttgccacctgggaataaaccatgttaactctcagataatttcagtcatctctctatgtagattaaggggagtgagaaagagacttttacttaaaagggattctaattatatatgttaatagattatgaagtataaggtattactgtacttgacttttttcttgaatttaacagaagaaaaacaaatcaaatgaaaatgaaagagtgccaggcgcggtgagtcacgcctgtaatcccagcactttgggaggccgaggcaggtggttcacctgagttcaggagtttgagaccagcctggccaacacggtgaaaccccatctctactaaaaatacaaaaattagccgggcgtggtggtgggcacctgtaatctcagctactcggaaggctgaggcagaagaatcgcttgaacccaggaggcagaggttgcagtttgctgagattgcaccactgcactccagcctgggcgacagagggagactccatgtcaataaataaataaataaataaataggctgggcgcggtggctcacacctgtaatcccaatgctttgggaggccgaggcgggtggatcat

SEQ ID NO: 100184 - DNA, 1745 bp, Homo sapiens
aaatttgggggtcagcacaagtgtagaaaaaaaggctaagagtttgtaagatggcgccttagggcatcaagtgttcaagtaaaggagaccgtgtggctcagtgaggtgagaggagaaccccatggtctcagaagctgagtgaagacagcatttcaggctgtcccaggagtgggaagctgttcaagaggagctgatggctcagtgcacatcatatttgtacatttcttccaggaaagagaaattgaagatgcagatgcaggagggaaagagaattgcaggaggagggtcccgagtactgagggggtctctcgcccgcactccgtgcctattgacaggagagcaagtagcatatgggtgcagatgcctgtgtgcgtgggttcggtgggcggggggggggggggactttggcaaagacttcttcctgttttctcttcttagtgatgaaataggaagcccctgagatggcggggctggaggtgagggtgcgggtgggcagacaagaggagataaagcagttcagtcgtcgaaaggtgtggtggagtgactccctgcactgtattagagcagtgattctcaaggagtgggccagggtttggggtccccaagattgtttcaggtgttgtgtgaggttagagctatcttcatgatgtattaagaaggtttttcatcttttccactgtcattccctcacaagtagacagtggagcttcccaaggtgtgatctttcagcagcaagcataacaaatgcttgagaatcccgttgtcttttaagcaggacgttgcagaattgttaaaacaatgccattgttgtcactggattttgttttgttttgttttcggaagtatagtgatttttttggtaaaggtatttgtgttaacgtgtaattgatttattatttttgagtgaatatttaaaatttttaaatctcagtagatattacgcgtataaacaaaagttctttggagtcttcagtaactttttagcgtaaaggagttctgaaaccaaacagtttaagaactgctggactacagaaatatgatatgactagcattgttatgggtctcaaaggagaatttgactagaaatcagaagagaacagttgaaaagtagctggttttgaacctgacaaaatagtggctccattaattgactagggaagtgaggggatggagatgggttttcagaatgcagatttgggaatggtgtgctgggatgtgctggtgagctgcccacagcatcggagccaggttgggaggcatccactaagaacacgtgattgaacacataggaatggggatggtggggacagggaggtgggagtgtagaataggagtggggagcaaaaaccgagtggtgggagtgaccacatttagagggtggaataaaggagcaattgtcagggaagacccagacacaggcggggaggatccatggggttggatgctgcagcgggcgagtttgaccttctgtctctgcgagatacatccctagttggtctccagttccattagcaatttattgccacttagaaaacacaagatgtagatttattaacttgaattttaaagaagcaagtagcagttaagtgaaaaaatatgtaaacaccttaatagtggctgtgacagcttattatggctattaggtagattaaatcatctgcctcagccctaaagttggccttaaagttgttgatgaaacatgttttgttttccttgtggcatattactgttagctttagcaggct

SEQ ID NO: 100185 - DNA, 1034 bp, Homo sapiens
tctagtaagcagcgtttacaataaccagttgaaataagcctgctaaagctaacagtaatatgccacaaggaaaacaaaacatgtttcatcaacaactttaaggccaactttagggctgaggcagatgatttaatctacctaatagccataataagctgtcacagccactattaaggtgtttacatattttttcacttaactgctacttgcttctttaaaattcaagttaataaatctacatcttgtgttttctaagtggcaataaattgctaatggaactggagaccaactagggatgtatctcgcagagacagaaggtcaaactcgcccgctgcagcatccaaccccatggatcctccccgcctgtgtctgggtcttccctgacaattgctcctttattccaccctctaaatgtggtcactcccaccactcggtttttgctccccactcctattctacactcccacctccctgtccccaccatccccattcctatgtgttcaatcacgtgttcttagtggatgcctcccaacctggctccgatgctgtgggcagctcaccagcacatcccagcacaccattcccaaatctgcattctgaaaacccatctccatcccctcacttccctagtcaattaatggagccactattttgtcaggttcaaaaccagctacttttcaactgttctcttctgatttctagtcaaattctcctttgagacccataacaatgctagtcatatcatatttctgtagtccagcagttcttaaactgtttggtttcagaactcctttacgctaaaaagttactgaagactccaaagaacttttgtttatacgcgtaatatctactgagatttaaaaattttaaatattcactcaaaaataataaatcaattacacgttaacacaaatacctttaccaaaaaaatcactatacttccgaaaacaaaacaaaacaaaatccagtgacaacaatggcattgttttaacaattctgcaacgtcctgcttaaaagacaacgggattctcaag

SEQ ID NO: 100186 - DNA, 3040 bp, Homo sapiens
cttcctgagtagctgggattataggcacgcgataccacgcccagctaattttttgtatttttagtagaggcaggctttcaccatttggccaggccgatcttgaactcctgacctcaaaggatctgcctgccttggccttccaaagtgttgggattacaggcgtgagccactgtacctggccttagaatgaaagattttttttttttttagaatgaaagatttaagaagactaagaccatgtctgtctggttcactgccgttatcgcctgggcctagcacagtgcccaaaacagagatcagtaagttcttgaattgttgaagaggaaataaaattacaagcatcattatattccaattctgcagtctaaagcaatcagttgaaatctatattaaaatctttacctactccacaaaatactagtggtattatacttactataacccattaattctccaccaggtgcctctgcaacaatgaaatactctggccagtgggcgaggtattgtaggtagaaaggaatcccatactagagtcctgttaaggagtgtgaaaagtaatggacagtaaaaagttcttcattaagggatattgtaaaaaaagtttcctttaaaaagtatactgttactttatccccagctctgtatgagtcctataatcatacataccattacatgaaatatttaggttatcactgatttttaacaaaattgcctggacatatagcctcaagtgtggaatggtgatagcactgtctaatagaaagcagagaatcaggaccccaaagttctacagtctacttccctactgaccataccatatctaagtctctccatttatcacctgatattgtttgtttgcggtctgcctcctcttagtctatgaatatcatgttccctctgtccctggtgcctggtacacagtagatgcttaatacactgatgcttacataattgcactgaaaaattaatgggtagttcctactttgacttcagctatgagactgtgaaaataactttacaacctaagtccttccagagccaacttaattacccagtttttcctctccactgattcaaatcctgcatttctagtaatgcagataaaagctgacttaaggaatcaactatgttaacagtaaatgcctgaataatttgctcatgacttcactcttcaaccttgggatatccttactgacatgtaatcattcctacatttctcttcttctttttactctgtactttaatggatgaaaatatatttcttgttagtataaactttctgatgcaatttatcagaggacaccatcaatcacacataaatatattttttaagttcctggaaaacctgttccgtgcgaaattcttcaaaatctcctctgaaggaccatcattattttgaatacccctcaaatacaacccttaacatggcaggacagccagtcttcctgccagccagccactgacatataccacaaccatctcttctgtggctaacagaggagtcccagacacccctccctcccatcgacctctaggacctaacaggttactttcaaatataggctcacctggattatgggactttcactgcaaattttaaatgtcactggaagcacaccatataaacggatttgcatcctaaaatccttccttcctatatagtgaaacttttgtcattcaaaattcttcaaaaatcttaaaagtggtgatatcattagtcgtaatttaaaaaatccagatgaacctgcagagattttttgcttttcccattcagttttgtttctgatatgtagtcctgttgctgcctgcacctgtaagttaatttttactgctgtatagtatttctttatgtgaagagacaccttaaatagcctgtatcctgacaatggacacctgggtcatttcctgtttctcaaaaaaatgtttgaaatccttcttcagtacagcttaatttacttaaccatctcctgattgttgtgtgtgaatcttattccaaatgcttagtaactctcctgcaataaataatgtttgtaatggtataactcaggggttagcaaactttttctgtaaaaggccaaatagttaacatcctaggctttgtgggccatacagtccctgctgaactactcaaactgcaaaagccacagaaaaaaatataaattaatcagcgtggtgtcccaataacattttatttacaaaaacaggcagtgggccagatttggcctatgggccttattttgtcaaccactgacaaactgcctctatttcttcttattttcagctttcaggaaatggaattactatttccaaagtgccttctggaaagataatagcaatttatattgtcactagcaatttatgagaatgttcctctcacctcaccatcatcagcactgaggtttatcattttttaaaatcttggctgatacataaaatatggcatctcattttggttttagtttacatgtcttttgactgatgagactgaactcttaacacgttcattaagctcctatatgccctcttttgataaattaccggttagcagaaccctcctacccacctacagtagatacagagcataacacagaatccgaactttgtgttgtaagccactagagatgtggggttatctgttacagcagcataaccacagtatcctatcttcacatctttgccccatttttccattaggacaataatagacactgttcattgttacctcaaagccttcactttagtaacaagtcccaatttataaagcagggcacatttctggactctagataggattcagtagacaggtgaagcatgaaacaggtgctggtcaatgagacagagcgggcctgtgtggcatttcccaaaggtactctccttttttttttttttttgagacggagtctcgctctacatgtagcccaggctggagtgcagtggcgcgatctcggctcactgcaacctcggctcactgcaacctctgcctcccgggtcctggttcaagcgattctcctgcctcagcctcctaagtagctgggattac

SEQ ID NO: 100187 - DNA, 2000 bp, Homo sapiens
agtaaattaagctgtactgaagaaggatttcaaacatttttttgagaaacaggaaatgacccaggtgtccattgtcaggatacaggctatttaaggtgtctcttcacataaagaaatactatacagcagtaaaaattaacttacaggtgcaggcagcaacaggactacatatcagaaacaaaactgaatgggaaaagcaaaaaatctctgcaggttcatctggattttttaaattacgactaatgatatcaccacttttaagatttttgaagaattttgaatgacaaaagtttcactatataggaaggaaggattttaggatgcaaatccgtttatatggtgtgcttccagtgacatttaaaatttgcagtgaaagtcccataatccaggtgagcctatatttgaaagtaacctgttaggtcctagaggtcgatgggagggaggggtgtctgggactcctctgttagccacagaagagatggttgtggtatatgtcagtggctggctggcaggaagactggctgtcctgccatgttaagggttgtatttgaggggtattcaaaataatgatggtccttcagaggagattttgaagaatttcgcacggaacaggttttccaggaacttaaaaaatatatttatgtgtgattgatggtgtcctctgataaattgcatcagaaagtttatactaacaagaaatatattttcatccattaaagtacagagtaaaaagaagaagagaaatgtaggaatgattacatgtcagtaaggatatcccaaggttgaagagtgaagtcatgagcaaattattcaggcatttactgttaacatagttgattccttaagtcagcttttatctgcattactagaaatgcaggatttgaatcagtggagaggaaaaactgggtaattaagttggctctggaaggacttaggttgtaaagttattttcacagtctcatagctgaagtcaaagtaggaactacccattaatttttcagtgcaattatgtaagcatcagtgtattaagcatctactgtgtaccaggcaccagggacagagggaacatgatattcatagactaagaggaggcagaccgcaaacaaacaatatcaggtgataaatggagagacttagatatggtatggtcagtagggaagtagactgtagaactttggggtcctgattctctgctttctattagacagtgctatcaccattccacacttgaggctatatgtccaggcaattttgttaaaaatcagtgataacctaaatatttcatgtaatggtatgtatgattataggactcatacagagctggggataaagtaacagtatactttttaaaggaaactttttttacaatatcccttaatgaagaactttttactgtccattacttttcacactccttaacaggactctagtatgggattcctttctacctacaatacctcgcccactggccagagtatttcattgttgcagaggcacctggtggagaattaatgggttatagtaagtataataccactagtattttgtggagtaggtaaagattttaatatagatttcaactgattgctttagactgcagaattggaatataatgatgcttgtaattttatttcctcttcaacaattcaagaacttactgatctctgttttgggcactgtgctaggcccaggcgataacggcagtgaaccagacagacatggtcttagtcttcttaaatctttcattctaaaaaaaaaaaaaatctttcattctaaggccaggtacagtggctcacgcctgtaatcccaacactttggaaggccaaggcaggcagatcctttgaggtcaggagttcaagatcggcctggccaaatggtgaaagcctgcctctactaaaaatacaaaaaattagctgggcgtggtatcgcgtgcctataatcccagctactcaggaagctgaggcgggagaatcacttgaaccccggaggcagaacttgca

SEQ ID NO: 100188 - DNA, 1033 bp, Homo sapiens
actctcatggttcatagtattcactgtatgtatgctagggaaaagacttgctccagtctcctcctcagttctgtgcctgagaaccactgctgcatatatttgtttttaaattttgtattgaactgttaattgaagctttaaaagcatatatgaaatgtataaatctaagatgtataatacattattgactctatgaatgttttctgaagtttgttagtcatttgtaaaactaaatcagattgtaatcccagtactttgggaggccaaggcaggctgattgcttgaggtcaggagtttgagaccagcctggccaaaatctatactaaaaaaaatacaaaaattagctgggcatcccagctatgcagaagctgaagcacaagaattgcttgaaccctggaggtggaggttgcagtgagctgagatcgtcccactgcactccagcccgggcaacagagtaagaccctgcctcaagaaaaaaaaaaaaaaaaaaaatcaggattgtgaaaggtcatcatcatttaagatacgtttaattaaattgtgacttccatacgtagtattttaaaaatgcacacttgaagcaatcactgtccagcatacttaagaagctcccttcttatcgtgtagtaaattcttcccagtcacctgcgttcataccattatactgtttgtttgttagtcctagatcttttctcctcttcacaatgctttgcttaaatcctgcccttctaaaaagccaaaaaaaaaaaaaaaaaacttgaggttttttttttttttggagagggaaaagaacataattcctaaagaaaggccatataactatatcataggccaaccatgtattttatgtgtagtgtcttcctctgtaatatgtgaaaatatccagttagttagttagtgaaagacttaacgaaagaaaaacccacaagaaattattaaacttttactatcgaaaggatttactttggtggagttgagggtgggagagaaatgaatctttatgttctcctgttagagaatagcttttttcctt

SEQ ID NO: 100189 - DNA, 1148 bp, Homo sapiens
gtgtctctaggctggagtgcagtggcgttatctcggctcactgcaacctccgcctcccaggttcaagcaattctcctgcctcagcctccagagtagctgggactagagacgcgcaccataatgcccaggctaatttttctatttttaatagagacagggtttcacctgttggccaggatggtctcgatctcttgacctcgtgatctgcccacctcagcctcccgaagtgctgggattacaggcgtgagccactgcacccagccaagttaaactcttttcaagagtttaagactatgtcagacatttaattgtagaatgtagaatcaaatattttcagtgtttatattgaagcatatattcattgttttcatctgtgaaacattagtgatgcacacattactttccgatgtcattaactgggaattcgctttattattactacattattatcttctgagtgatatggttaatttggttcaataataactttttttaaaggtatggatcagctttgctcagtttgagttgtcttcaggaaaagaaggaagtttgactaaatgcagacaaatttatgaagaagctaacaaaaccatgcgaaactgtgaagaaaaggaagagagacttatgctgctggaatcttggcgaagttttgaagaagaatttggaacagcttcagataaggagagagtagacaaactcatgccagagaaagtcaagaagagaagaaaggtccagactgatgatggggtaagaactctgccctgggactgttcatctcacgtcacatgagtagaaacacttctgacgtcgaaatgtggacttttaagtggcatatgtacaatcttagaatggaagcagaccacctggagtaggagatggttgcaatctggctgttatggaaacacggggtagaacatatggtccagtcagaggtggagaacgggaaggggttggcaaaggtgttttggtgatggttgagtctgggaacttcatgaagtgtgatatttttagagcatttaataggaagtaagtgtggaggaagatggaactgaactttcagataggagcctatccagagaaggcttgtaggcggtaagaaggagtttggtgggagtcagtgaaggctgttttgcataaaatgacgtgac

SEQ ID NO: 100190 - DNA, 1060 bp, Homo sapiens
acatgagaatcacagcaactcgggaggcagaggctgcagtgagccgagatcgtgccactgcactccagcctgggcgacagagcaagactttgtctcaaaaaaaaaaaaagaaagaaagaaagaaaggaaaaggaattgaggtctgcaaaaggaccatgagaagactttgggatctgatttgacctcttcactctagaatgtgggactgttttaaagcactaatgctgttatatatgaaattctgagaattaccagaggacttaaaggtaatagtcaaaaacattttttattagggacaagcatagaccattttaaagtatcagttagttgactgtaaccttctgtagtgggtttcttattcctcaaggattccaggatgtaatttctcttaaatatgaacaaaatgaataaccattttagtacaagacttaaaatagaccaagggtgctgtcatttttagtcatttgtcttttgacttgaccctttttgccttcttccagacttttgaagataatataagaaaaaacaggactgtgattagtaactggataaaatacgcacaatgggaagaaagcctaaaggagattcaaaggtaaaattactgagagtgtagttttgtatataatgattcatagattaacagataccaaaaagaaaagaagaaaaagttaaagcacaggtaaaagattgtgcctcgggtagaaattttcaactttggttccatggaaccctagggttcccttgagggcctcaggagtactggggtagaatagtcctggggagggtggcagaagaggctttagagatagatcttgtcagttgtagctaaagaagcacaatttcatttgctttgtatatattgagatttttacaaatttcagctaaacaatggccaaaaaaaataaaaccaatggccaaaaaaaataaaaattgcaatctggcccttcctgtggtctagctttctgcattctccccgcatacctccttcccccactgtgcctgtgtatgtgccactccctgaatatatcatgtctccttatcgtgaggcttgactgttctc

SEQ ID NO: 100191 - DNA, 1126 bp, Homo sapiens
tctaatgatgagaacttactgaaattgcctttgacttgaagtgccatgtaaaaccaaacccagttatacaccggggcattaaataagttgaagaattctgtaaatgcaggttgtaatgctgttaataagatgtgctacacattttgataaaacaaaacctctggtcagaattttacctagacggcctcaaagtttattattatactcatctaaaagggaaaacttgctattatttttgccacctttttctcttgagacttttacctatggctttgcagtagatactatgaataagagagaaaacggtattttttttttcttttcagtctcatggaggaatgggaacatgtcatacaaaaagggcatcttgtgataatactaacaaagttcatatcctaaaaaatgtatgtttgtttcttaagccttgtgtgaagagcaactactaaaaatagaaatgtcttctttcttaaaaggtgaaaaacaaagccccggctgaggtacagataactgctgaacaactcttaagagaggctaaagaaagagaacttgagcttcttccacctccacctcaacagaagatcacagatgaagaagaattaaatgattataaactaaggaaaaggaaggtcagtcagtgtggtatctttcagtccactaattgttaagactgtatcggtcagtttgaaaagctcctcattggttggattctgtagggcaagatgaggttaagtgtttccagacgcatgaataatgtacttctggttaccagataacagcatttttctgaactatataaaatatgccatgagttgtctggttaaagtgtaaagaaattgaatctgcataatttttgatgctgaatcaaagtgagcggaagtttagcagatggaacaactgacaacaagaaggagggtatgcttagtaaggctgcactgtgtacttctgtctataccaccttctgtgttaagaattgagatctggctgggcacagtggctcgcgcctgtaatcccaacactttgggaggccgaggcgggcagatcacctgaggtcaggagtttgagaccagcctagccaacatggtgaaaccccatctctactaaaatacaaaaattagccaggcgtggt

SEQ ID NO: 100192 - DNA, 1090 bp, Homo sapiens
agtcacactgaggggagggggtcatactgcgagtggaggtagtcacactgtgaagggtggtagtcacactgagaggaggtggtcacactgaggggaagtggtcacactgaggggaggtggtcatactgtgaggggaagtggtcacactgaggggaggtggtcatagtgtgaggggaggtggtcacactgaggggaggtggtcacagtgtgaggggaggtggtcacactgaggggaggtggtcacagtgtgcggggaggtggtcatactgaggggaggtggtcacagtgtgaggggaggtggtcacagtgtgaggggaggtggtcacactgaggggaggtggtcatagtgtgaggggaggtggtcacactgaggggaggtggtcacactgagggaaggtggtcacactgaggggaggtggtcatagtgtgaggggaggtggtcatagtgtgaggggaggtggtcacagtgtgaggggaggtggtcacactgaggagaggtggtcatagtgtgaggggaggtggtcacactgaggggaggtggtcacactgtgaggggaggtgggcacactgtgaggggtggtagtcacactgagaggaggtggtcacactgaggggaggtggtcacactgaggggaagtggtcacactgaggggaatggtcatactgtgaggggaggtggtcacactgaggggaagtggtcacactgaggggaatggtcatactgtgaggggaggtggtcacactgtgaaagaagatgatcacagtatgagaggtcatccttcaagaggcaagtgcccaaaaatctgtttataatctagagcaatatttgcctgaaataaactttaaaagtggttttacgctatttaacccagtgtcagaacagcagcatacaatatgagctcaaaatcttgtataattttagtaaggtaattgtttttggttggtttgatacaattctccagaaaaattaaggaagaaagagccaacctcatacacattgcagaatatatccacgaggccttactggtggcacccaaagttttcagaacctcccagtacttagttgtgagaatcagttgctttttcccta

SEQ ID NO: 100193 - DNA, 1034 bp, Homo sapiens
ctgactcatcacggtggtaccagtaggtcagccatctggaaacagaagtggccctaattgggccaaaatgtggtaagactcgctggcctcaggcagggccaggccagttccctcacttctctgcacacctattcccagattccatccagagcaaagctgatgtttatcgtctcattgtacttaggctttcgtactttaaaaaattatgactttttaaaaataagccttcagcagacagaagtgaagaaatttagcctgggttgcctcagcaacaaagtctgcggttcctaagagccacatgttggggaagtggggtgacccaaacttggtgacataggttgattgatcagaccctcagccttacaagcaagagctcatgcagatccacagagccatgcacatcctgtcttcctgaccttcctcaggtggcaccacctgcgccccatggacctgctgtatcggtgtcatgtggaggtctgatgaatcctttaaaacctaactgtgatgtcgtaaatgtaactgtgctacctttatatctactgaagggcagcgtctgcatccgagggaaattcaacatgaaacaaccatcgttttagttgcactcagtctgtccatatgacatacacatgaagtgaatgtttccttatgttttcaggtctacaatgtttagtacatgtaaataaggaaaaaatttgataaatatggtaaattaagttatagcgtgtcatttgattcttattttgctgtctcttgttatttaattttcctaatgctccacatctaggttccttcctaggtggtgggaacaccttgcagacgtgtgtgcaccaggacacaccgcggcccaggcagccacaccgagaaagcacacatctccactgatggcagccacccgactctccagttaacctcttttactctttaattctgatttactgtgatgatttaataaagtggaaacacagcacttcagtgctatatgtttctctcattctcattatagtttataagaaaataaagttcaccctggcatc

SEQ ID NO: 100194 - DNA, 1043 bp, Homo sapiens
tttgtcagaagcagcctgtttttgtgttctgaggtttttcatgtgtggtgttttttttttgagactgggtctcactttgtcacctaagctggagtgcagtgaagccatcactgcagccttgacctcccaggctcaaaatcctctcacctcagcctcccaagtagctgggactacaggtgcgcaccaccatgcctggataagttttgcaatgtttttgtagagacggggtttcactgtgtttcccaggctggtctggaactcctgggctgaagcgatccgcccaccgcgcccggctgcagcctgttttaaagatgagaatagtgagccttctctgtatgcccgacctgactgagcctagaagaagggaggcaaccatgaagcccctggactctgaaagtactgaatttcaggacaccctgagccaggctgcctccataggtccaagcacgtttgcaagtattgattttggaaactcctcctagaaacaataagggaaggtcagagaatgaaaaaagatgcgtctgtgaataaaataactgacttaaattaatttcaaatgccaataataataataatttcaaaggccaaagccctgcaagtgaatcacgcagggaggaagatgtggaaactctgcttctgaggttggttcccagcagaggtcatgcaggaaacttggggcataatacaacagggtttaaaaatacactacgaggggaagggtgatgaaatgatcctctcgctcgcagaacggtgctaggggagacccagctccacccgcaacagtggcttggtgttgcagcaggcattcttgtattcctctgagcacaccgacagcagccctggggaagcggggggtgcagatgtgcaggttttaattttattccttttccctccagtgatgaacagctgtatgctcatctggactcattcagacaagcaatttaggactgacctctagtcttagaccctttggggaataatcgagttgtaactcattgtgtagaatatcgatatgtaaacacgtggagattccaggaacaccg

SEQ ID NO: 100195 - DNA, 1053 bp, Homo sapiens
taattaggctggctaattcccactggccttgggttgccagtgttgagtgtgtgggcttaccccatccactgcctgcacctgttcccttcctcagagccattccaaggggtctgaatagcccagacagctctctgatctcccactctgtccgccttcctgctggtaggatatttagcacttgcctaaagctggagccctagtccactgtttctctccctcatccatgccagctctcaaaatcattctctttcctaattatcttgaaccagttaatcattttccacactgactgttcagtaaccaggatccaaggacaggcagcagcgtttcttgtcctgaccctgcccagcctcatcccaggtggcggttctggatggcagcctttcttcagaggcaagaagcttggttcaaagccttgctctcttgctatcccagtgagtacagctggagaaagcatgccatagaaaggcccaccaattcctggaacgcctctgctaggcggagccgcacataacacaacacatctccagccagcctcttgtttcctgtgctgctttaaatccctgttgatatccagagtatcggagaagtcacacaaggtggaagaagcaagacatctttcttcaaaagtgacttctggattcccccggctcaactctgtgtctgagccgccagttggccacagtttggccttttggtgtctgagttaaactgctaagggctgtccccgaggagtctcactcaactactcttagatatgagtagggctggcttcgattcccagcaccacaaataggtaaaaatgacttcaaatttaagacactgtaaccctataacctagtgtcacaactttttttttttttttttttgagacggagtttcgctctattgcccaggatgtagtgcaatggcatgatcccagctcactgaaaccacctccccagttcaagcgattctcctgcctcagcctcccaagtagctgggattacaggtgcccaccaccacacccagctgattttttggtatttttagtagagacaggatttcatcatg

SEQ ID NO: 100196 - DNA, 1125 bp, Homo sapiens
tccacagaccgagtaactgaaacttgattcgaggtgctttcgtagatggtctcgagggttttaaagggaattatcgatcaccttgtttagcaccactttaggcttcgtgcttcttcatccctttgttcttttaaaacttttttactctcctcagtgtcagctctggaagagatgagacaagcattcttttcatttgcttggctaggaaagtgccactgctacctgtcagatgttaccatctctgacgtggtccttgttgcccctggaggctgccactgagcaggactgtgcagggcacttcaggcaacacaaactaaggctctgggaatctcatgcaggcctgtgtctctccttcccttgtgaagcttgaagtcttattggagaaaagcagacactcgtgagccacacacaaaaaaaatggctatttattaataagctcagataagtttcctccaaactataaccacatgtcaaaaagatagccagccagtggtttaggccagttgggttgagatttccctgagatggaccatgccatttgccttgtcaacttgaggagaatgaaaacttgcctcgtttgtattagatattctactaagcatcctgccagttggtttggaacttccccacattgcctaatgtctgagaactggaaggcccatggacaaaaataaaaagatagaggatagtaaatgtgagaagagcagagagaaagaaaccacatgtttcagagccactgcggggacagtgacactcctgacaaccctggggctggtgctgggagtattcataggttcccagaataagaagcggcctgagatcattcattttgaagtgtgaccttgcactgaatctgttcccttggcagaactctgaaggtgcggtttttctgtgaaatgctgcgttaggttctgggttcccagtccttacagagttttaagtgcaggtggcatcttcctcctgcctgactgctaattacagctcaggggacgctttagcagttgccaagagatggctggcaggtaccaggaatttttctcagagacaatttttggaaataactcttaattaaagcttatttgaaataaccttgagaatgtatttcagaagaacctgaagctcccg

SEQ ID NO: 100197 - DNA, 1047 bp, Homo sapiens
ccaacaagccctgcgggggtgggttggccaggtgaacaggcttgcgttcaggatgcgccgtcaaccacacatggtggtgtagctgctaatatatgagcgctcggcatttttcaaagagctttcaaaacaaaatctattttcctaatgagaaaatatttttaaagaccatcgtatctaccttgtatctattccatccattacttgtattgataacacctgacatgtaaagatatttcaactacttttttacctagcactatagtttaccttccttttttgaccagcattaaataatctaaaatgtagccagtattaaaatattggttgcaattaacatatatatgttttatgtataaatacatttatatacacatatacatttctctctcacacacacacacatattggggtgggggactaaatttgtgctttcaatcatatcaccaagaaagagggaccggcagagaggccttgaaagggttaactggaatgggcaccctcgactgctgggagggactgatgtaatcactgcagctcacagccaagtgcatctgttcaccatgaggtcattcttctgcatgctaatgatttggaaaatcaagtctagtgtttgacattatcagaaaagatataaatagtgtaaatctttgctttttagaagttgctcttataaaagagaaaaaaaggaactttacattggacctgagatttttttcagaactgccttaaagattgtgtctggatctaaaaattttggaggaatccacttgtgtctgttgatcaatcaatccccagatcactattacggtcacagctagcaatctggtagccaagggctacaggtatgtctcatttaatatctaattttaagaatttccaagtgcctttgtcagaagttgatagatttttctcaaagaatgttcaaaaccaagttaaatgagtggttcttctcggaatacccaaactgacttgtgtttgctgaagatgccaatactacgtatggttcctttctgcttcaatattgctatagagagccagcagagggag

SEQ ID NO: 100198 - DNA, 1092 bp, Homo sapiens
actcttgagaaagctttttacttcttaaaattaaacacgtaaataataactagatgttttcattccttaactgttacattcttaagattattaagatattatcaaaatgaataatgatggactttgttttctatgtatattttagcctctgtataaactaatttgatcttttccaaacatccataattatttaaaccaatagaaatgagtgagattctaggagcaatttgagtttttaagaactctacttggagaggattgtcaataggcttcttcaagaacgtcatatttttgaaaattgcttagcagaatgaagattctgacagcatgtgagggtgggcattggaactcttctaaaaggaacgtgaaaccaaacatggaatatcaagacaaatgctactccctccgcttttcaaattattaacatcagtattacatttcatagtgttcatggtttaaggaattcagtgttgagtgggaaacatttttatacgtctatcatgcctatccttaagtgtgatttttaagtctaggcataatgttctgttttaattctttgcatatcttctcataacgctgagtaggaatgaactagatataatcttgatttgaactgaaatgtggggcagtacaatgaggacagagcatttcagcaccatagacaagcacgttttcggaagcatcttctagcttacatactggcttcgcttttgaggaatccctgtccactatctgttactacttctacagatgaaaacatttgtcatttgtttacactgttatgttcttgggacaagggcgatcaaacccagatgagccagccagcttaaactaagaaattgaggtgaagtctgttcttccaagcaacaagccaactggaaaaattgaccctgagcggcttaagctcccacagtgcacttaggacccaatcagaccatctctggccctcagtgtcatcaaagcagggccttgggcttgggctcacatgcgtatgcacaatctgaggaattaggggctcctaggttttctttgtatcctcaccaccaggactttattattaatgaagagggagcatcacctgaacactgcatt

SEQ ID NO: 100199 - DNA, 1061 bp, Homo sapiens
ggaagaggccatgtagccatggaagcaaagaggagagtcatgcagccccgtgaatgcagacagccacctggaactggaagaagcatgaacaaaatctctcctgcagcctctgctgtcgtcttgattttggacctgtggcctcccaaaactagtgagagaataaatttctgttgttttaagccacccagttggtggtcatttccagcagccacagaaaactaacataaggaggcttaagatggtcatacgtggtagctatttagccagaggttttcaaccttttacacaccctaatgtactcaagggatggaacagtggcagcagaactcgggggcgccagaacttttgagagggatgcgtggatggctgaagcgtcccaggtggttctgaaacatgacattccctcctctgcagatcactgccatgggagttagagtcatgagaatggctagctctgggcttgcttgtgccagtgattagaggctgcatgagttcagaaagaaaactgaggtgggtacgcaaactgttacagcacacacacactgatgtcaggaggctgcctgtgtccggggccactttgccagtctgagcgtcatgtccactcttgggaaatttagagaaggttcaggcaagaagggtttcaagggttgaaaaaatacagtctgcaacatagcctcttacagacagttctctttatttctttgataaaagaagcttgatagtgctaaacaacagtcaacaaacacatagcccgaatgagtaaaaagaaattaaaatggaataattgttgttttgttgtattttataaagtcagcatgatctgggtatagatgcagcttacacatacgcactcaggtttacgttgcgggttggttattatagctcacgtatatttaagtcagttgatttgtctcatttggagtttagttcccatcctcacacatgatcttgaacttaacaccatttattctagaattcaagatattagatgaaagcagtaaaggttagaggacctgggctgtagccttaattccattactgtgtgactgtgattcaagaaa

SEQ ID NO: 100200 - DNA, 1906 bp, Homo sapiens
cttcttatgacaattgtacagataatgatttagctagaaagtcaccatttattccagattagctataaaaatggccagttttgtgctactcttggttctggggggagaaagaagaatctaatttatctatccttattcttcctgttagcaccaaacaacaatgtttgtggattaatttagcactgaacattgcaagcatcttaaataagtttgaaagattaaactgagacagcataagggagtaggaagaggccagcatgtgtaacagatcgccctgggtttgagtttcagccctgctcattgctagctgggtggtctcagagcatcacttttgttgcctgtctctgctttatcatatgtggtttgagttttgcaggaggacccaatgggctcttggctacaaagagcttcatgagtggcagccaactgcaccaacattgggtagcttgtttttatttcatagagattgtctcttttattctaagtgagatgttgccccaacagaactcaggctaattatagtgtaatctcactatgatgggttttagaatcctccaatatactataatactcagtacaacatttgaatattataggatcaaagatttagaggagggctgagatgcaaggaagtactttccttacatctgaggagagaataatggatatgtaggaggcacttagtaaatatcagatggaagggttggtgagtagatgggtgaatgggtgggtgggtgggtggatggatggatggatggatgggtgggtgggtgaatagatgggtggcaggcacaataatgggaagaaatgagggattgagagaagatgaacctgggctctctgatgtggatgggccaccacatttgggatcatgtccagcctcctggccttgagaccagtgatacaattctgcctcacatatgaattgtgaggatcatctccatggctcttcaaataaaatacaaaatggctccaaaggacattttcctcatctgggtcatgtctcatgccattaatataaaactgctgatttaatggagctgcttttgatctatcaagaaaagacgtaccgaattcaatttggctatttttttttctaagagtaagtgtcttaatttgcaagagaatgatttgattataattttaagtaatactgcagttatatttttagtcacgaagatgatatcaagtgactctatgaggcttaaatgtggaaagtcccagagaattgtgtgggttgggaattttatctttaacagcactgggggctgtttctgttatttgtatattttatgagtttaggcagaatagatgggatctgttacaaggaattttgcatataaaatataaaagcagacagttttcattgaagagtaaagtagaattatcccagaatataaagacataaaaagttaagataaacacccatcatttttttctgaaattttatttttaaagcatgtgttattatgagagaatttctaattctgatctctcttctgactgcagcagactttttaacctgaattccttctgccttactcttaaaagttgaaaagatttaggtactcagaggtacctgctgaaatggagtagaaatgttgaatctgttgttcaaatgtcagattcaggaaggaccaagtatctgctctgcacttgatgatatatgttgtccagctacaaaagaaaacaccccttacaaaaaaaaaaaatcttttttcccttgcacaatccatcctgggccagatatagtcatagctcaatagaaaattgctttcctgttactggcaacctgtgcggtcactggtatgacagtgcctcacgtcaaattgcaagccgaggggccactgcagcaggtgcatggtaacggtgcccaggagcactggaggacatgaaggacacacaa

SEQ ID NO: 100201 - DNA, 1704 bp, Homo sapiens
gaaccatcagataataattgcatatatttatggggtacagtgtgatgttgtgatacatgtatacattgcaggttgattagatcaggctaatcaactattacttcacatacttacatttatttgtggtgagaacacttaaaatctgctccctttgcaattttgaaatctataatacattattacctacagtcaccatgcttaatttttttgcatatggccatcctcccatctcaaggataattttagagtaatttattgccagtttgcaaattgtgtcatacattttaaaattatataaagcctggtgcatgtttaagttttggttttctcttgcatcatccattaaacctgtctggtctttgaaatgtcctctacctgcctgggatcctctccctctgcccagagccactttccaaggctgtgtccagggctttctgtacagatctctgtgctgtggcacccttccttctcccccctccagcctcatacctggctgccagactcaccaccatgcattgtcagcctgctgtctaccctcaggagcctcctcgcttccctaacagcagtgtcagtctagactccggcctctctccagtcctacttcttaaggagccctgtgttccccagttctctgggcatggcttcttgggaaatgccccatgatgttttcctcctgcctcccccatcactcctgttctggcctgtgtagattccactcagtctcagagctacgcttcagggggactcgctccacaaagcccccaaccacaccaaaagggtatagccatttccttctcatgatgccttgcacatttgttcacaccaccaagaagccctgggaagagtgtcccaaagtcattcctgtcatatcagtagtatgctgggagacgatagggaccatgagttaacgtctttatgtcctccatgaactcacaaaataattacttctgattgaaaatatatagaggcatttaaaaagttctctcgctcatgtactgtccttaacctttggggtctacgtagagtatatactgagaccaggtgatcccagtgatgtacatacgtgatgtttcatgaaaacagtgagatcttgtgtctgctatcaacatacagacacagggaactccgaaaggtaaaggcagtagagaaatacaaaggaaatttctcaagtgacatttttaatattcactggagatgagtgaaaacagttgaaacatcagtctacaaagtaaatcaccagtatacttgatcaggatcagaacctgctataggtagaggcaagtttccatcatgtacaatgactactctccttatcactggtccctgtgtttctgtttttaattgagaaaaacacttctcatgaaatattcccccacctgttggaggaagcattcaggccatgggacaaggaggtgatgtggccctttcccataaagggaaagatcttgctgccctaggcctccacagggcccacaactttgagccagatgcctggccacggtagtcagtgattgagtggcactgagatccaggcctgcccttgtgtccctactctggaatgccagggctctactccacgttgctgttttgccagctgctccctgttaggttccactgaccgggtgccactaggtccagcagctgctgctgtgatcttgaacaggcacacctgtggcatcattcccctcactgcagcatggtcct

SEQ ID NO: 100202 - DNA, 1050 bp, Homo sapiens
acaagaagtcagaagaacaacacaattttacgcctttttttctaaaggatttatttctcagcctccattttgcataaataagtactctgtaaggatgaagtaaatatatatgaatttagttgtttggggggaaatacatatatataaataattagtccgtcttttagtctgatagcttgaaactccattttgttttcagtcaaatgtgagagtcttcctggcaaccccagcttgaccctgtctttggatctggagctagaaacccagattggacagttggcgtgcgtgcagtcccgagcgcactgcctggcagccccgggcccatgctgcctgtggtccctggtggctgagtcaccctgatcactgcctctgagggctgtaccgtgaacataccctggaacttagcagggacactaaaagggataaagggagtcagtcccaaaggcaatctctcaaccttctttgtgccatggatgtcttgcacttctcagaatgtttgtaaatgcagaacataaagcatataggattccagagtacatcagttatagtgaaatgctttctaaagcaaatgcatatatagtaatataggaatgcctttattcatgcattaaataccaagctctagtagtaggtccaataatcattataattttgaagcagtaatgagcagaatcaatattttgagacactggtaacaatataatgcgtcatgaaaatatctgatttctactggtgacacagtcacaggtagtatcactgtggtatgttcctatttataacggaaagaaatgtttcatttcagctagaggataggatagtgagaatgaagatgtgcttttttaccatccaagttcagggacccctggaattttgatcatcacccagaagatccccatggggtccattgacccatattaagaaccactctttgcgggattcataagaaccacggagtcaggatccactggaaccactgcagtgttgttccttcagccagctagcctgcgagagtggtttctgagactctgtaggtatggggcctgttctctg

SEQ ID NO: 100203 - DNA, 1105 bp, Homo sapiens
gtgagctcttacaatgtgtacgatgtgataaatattttatgtgtactttaccatcactagaaagtagggttgttgtcccattttgcaagaaagaagcgaaagcacagagagaagctgaatgacttgcccaagatctctcagccatcaagtgagaagtgaattcacaccccggcttggtgctcactctcttagccactgctgtctgtcttccaactgcattgtcactaattgctaaaaatattttcacagactactttgaatgtgcaaaccaactaatatttatgcctttttctctaaatttattcagatactctttttcatttctgaaaaacagtaaattttttttcttaaatgaaagtgaaatccaatagaatttctttcttggcttgtcttatgttatttgtgataaataatgtatacttcaggataatttcactttctgttgatgctgcctctaaattaaaaaaagaaaaatcctgttttaaaatgatctccaaaacagctcagactacatccctaggacagcagtatttaaatgactctaggatacctctgtaactttgtttttcttacatttcttccacttaaagctttcccagcacatgtcaactctacagctctgtatctgaggctgatggccagtgctccaaccatgggcaacctagagcattagccaggaggagagagggagtgctcctccagcaacccccgctggtcttgagggagagaagcagaggatgactgacgactgaagggagggagcttgcttctgctgctgtcctgccttgacctgcctctgctgtcattgtggtcactgctgcagaggcccagggagggcaaggtgacattctagctgtttgtttgtttcaacaaggctagccacaggtccacccacactcacctcatcccggtcaccttccacctaaacattggcagcagttccctaacttacagattaacggctgtcccacttcccacttgtttccttctctttcattttctgttatgaaaaaggtcctcatgtgaaacagctcccaaaaagcatcttatgtaaattcatgccaaaatatgtgagagtcctcttgcaaaagaaaattggaatgtg

SEQ ID NO: 100204 - DNA, 1050 bp, Homo sapiens
aagggcttaacaatagctgaaaaagtgaagaattaattagtgacaggggaaagtatgattgaaaaataatcttaatgcccacattagctggctagctgcttttgctaagccttttagtttaaaaagcccaagtacctgacattttgcatctgtttttctgtgaagataaaaggaaacttgagtgtcttattctcaataatggattttatgtgacaaaaaggtttctgctcccttcatttccatggccaggcatttttatattattgccccaccgactgtcatttcatgtttaactctttgtagactcacacagctttcctcaaccctggggatggtctgggattgaatgatgtcaaagcctctctgtgtactaggtgcttccatgcatgttggtcttcttgttaccatgttgcaggacttgttgccctataatccagctcttctctcaggtttgtttacttgtgatcactatgtaatcattcattttatggagcttcattaaggactgcaaacctctgtcccaatttagcgtcattcaagcgtaggtagcatccatctgctccacccgcactgtttaattaatgaacttcataatgtgtttttgcctgtgaaaagctctctgtctcctcaggttgttaaataagatgtgcattccaggttttctgtgttaagattctagaaaacccgccatgggaggtgctaattatggactcaccgaactcctgttaagtcgtaacttgaaggcagatttacctttttttttttttttcaatatacattcataaacccaaagtcaggtcgctttttgagtaagtaaatcactggtcagttttcatagtcattctcttcactgagagtaaagattaacatttttttaaagctatattttctttcagtaccctaaaaatatatttgttactttgaggtttttccttctgaaattaaagttgtagaaatgcttgaatgtcaaaaatgctatttctgttttccaatatcttttcgtagaattgcctgggaaactttgtaggatagattctattaaaaataatg

SEQ ID NO: 100205 - DNA, 1886 bp, Homo sapiens
ggcaacagaaatttagattataaatttatattaaaatgtccatttttcaaactagaaaataaatacatgggatcttctaaaagaatgtccctcctaaactttggatcagttgtgctaatagatagctacattcaatctgagaccttaagtactaaaataaggcagttatttgcatttacacaatcaggcctccctttgaagtagtgatcaaaatattggttcttttataaataaccttttactgaacattttatttaaacatttcagagtcaggaattgcaaccatgaaatgattaggcagtttctaattatggatcagtaagtgttttgtagccagtctggcacatgagcacttttgcaatcagaatttggcaaatgaatgaatttataaaggaacttcaacctaagagggtaatatagatttttttaaaaatagattactttttggaagcccaaaagatgtcttttggggagcaggctagacactcagaattgatgtttcattttggtttcatgtttaagtctgaagtttttgctttctgatctacagataggaattcaaatgcacatctaacttataaagggcattctattctctgaaaatgaaacaaaaatatataaaatttctaagtgggcctcactttctatattccagttttgatgccatttttcaagcatgctctctaattttgctctttgccattggaaataagctggtgtgtatttggtgtgcctaaaaatttattaggcacttaaaattctccacgtttggcatatgtgaggatttctagttttgctttcactgccttgagtttgagagctatgtttgttgttgctcctactagtacttttattttatcctattaccactcatttttatgaaatgagggcaaaattcactggagtattcaaataattacctaaggacagaagtggagacactgctgagcctgaactcttggtcagtagttagtgtctgcatgtaactgataaaatgctttctcatcagccaatggaccagagagtaaactcagctccaaaaggcagtttggaacatcagtgcacgatgtgcaaaagcgcaggctgatcacaggcacccagaaggactgttggaccattattctcactcttggcgacaaccctgcagaatgggactgtgttaacccacagatggggagagtgaagctcgaggaagctgggtcttggcctggggcccacagccagggcagggctgggatgagagcccagaccaacctgactctatggccgcctgctgtttctcatttgtgcacacttttgacctaagaataggagaccatcaaaatgatatagctttcagaaagtgaagcaattccaattagttttagcttgttctctcattattgttaccaagtgaatcctagccttttaaaccttgattgtatggaataaatatgaaaacaaaattatcgttaagttaggatggaaagtattcccgttttgataccatgtgtacatctcttacacctaaatacatgtagcttccaaattaaaaagcagtgaaaatattaagtttaaatattcttactggcatatcccacttagagtccatcccaaaataagcatctaattgatgttagttagtgtgcttttgccttgagaaatagttgaggacgcagttccatcacagtgatttttctgtctttttgctagcaagatatttatttgtatatgtggaatccatttatattctacctctctctaaaatagatttgaaagagcttacataaaggccatgtataatgagaaagagaaaatcaaagcccaggaagcgaggatgaaaataagagtatcatctgaaggcatacagagaatccacagtcatggctctggcagcagagcagggc

SEQ ID NO: 100206 - DNA, 1050 bp, Homo sapiens
ttgcttataatgacatatgcacatcagaagactacatcagaaaacaacatctaaattatttgaataaaaagaaacagattggttttgtacttatgctctataattttgtcaaatgcatataatttttgcagaaaatttgactaaggaaagcacttcacataaaccaccccattttttgtagaattttagcctaagtgtgggtttcagctcagattgggatgagatgcgctttccttttaacttatattggctttctctgacataaatttccagactctgattccacactccttctctctggattaatttgcccagtgatcacttttttaggtcatcaagattcaataaggtagcaggtcagtcatgctttggagttccagagctgctgtgtgctgtcagagctggtatgcccatatgtgtgcacgagctgaaccgccagtttcctcagtgggtttgttatgtagaccaattgtttaactaaaatgcccctgacaataactcagtaggatagtaaacatgttttgtttgttttttaatttaggggaaacataaagcaatgtaaaacctttttctacgtctcatgttgggccgtgtaactgacaccataacactggacccttatggtcaagtcttggttctcagtgagaagagttcttgcacagaagagtttggggatattctctttccttcatggcagcaattttactacaagtgccagataaattttaaagtgtatcttgtttattgtcatgcccagcttagcaggtaacatgtcatagctgacctcagaccttgggttttgatgttagtttaaattaaataataacttagtttttggctttgaatactttacctctgtcagtttccttactctaaaatgaggaaaataatccctccaagacagattattgtaaggatgtatggaatgaagtatatataaatatgagactgaagaatgaatgaacggttgagctgatggatgcagcagtgtagaggagggcctggcccctcgctcgttctcccagccccaactagaagaacatctcaggg

SEQ ID NO: 100207 - DNA, 1097 bp, Homo sapiens
tggccatgaagcatagaaaaaagtctggccattacaagactttttataatcctaatgaatcctaataaaaatcataatttaaaaaagcacaaagtagtctaaatttattaattttccctttaaatattatctagtcattttcataggctttgatacttatatcacacggctcctttgttttcagaggagttcttaatattatcaaaagcgggtacaaagcctggtgagatctaaagctgtctgaaccgtttatccatgccaaatcacttactcaaccaggaaggcccacccttggcatttttggaagaagacttttatttcaggtttattttgttctctcttaaatagttaattcattggccccagcttcaaagtgagaaaacaaacaaaaaacagtgagacagaaaaaaaaaaaactgaatcctacattataaactgttgactacaaactgaattctttaacaaaaaaaaaaaaagtcagggttttaagcccatcctcctattctggaaagggaagggaacaagtttcctaaagacaatctcttctggtgcccacagactgaaataacacattgcagtgagacatcagaacctcttaatccaacattaatcaaatttcagtttactaattatcagtcccatgttgaaaggaacagaatgccataaacagcatccacagaacgtttagtggactctgggattataagcaatattttgaaagtgagactttctgttattcaaatctctaaaaaggataatacataccttattagaataagagacgctgcaaagccaaagaaggacaaagcaggcaagtccaaatggtggtcccttctgtgcagagtctgccctggcgtatacagtgagctcccagcaggtttccgtgctggagtaatttgcaacacactcaagtaaattttttaatgaaagcagaatacttttttggtaatctaggggtgagtacgacccaaatgccatcatgttagccttgaaagggtgtcctttctgttttactactgaggaattttaccacactctaaaaggggtactttgaattttgtgcttcagatacatttctgaggccctgtgctttgaaa

SEQ ID NO: 100208 - DNA, 1054 bp, Homo sapiens
taaattctgctacgaattttcacatcttcaaaaatgactcctctccctaaagctataacaaccttgtttctttcttgttcagtgggatctttggttctttttcctggacagatctttattttttccattcatctccatacatttcagaaaataagtcaaatggtaccatgtgttctattttgccgggcagcaccagttagcattcgtcaacatttacagtgcccctgccatgtgccaggcacagtcgttgccgctaggaatagaaatgtgaagatactccaaatgaggggccaatgtttgttcatggaccaggctttgaaagagcacatcatattatcacatttgagaatgacagatgcttccatatggcagagtatagaatacacacacacacacacacacacacacaaacacacacacacacacacacaggatggaggtgatggaaacatttaaggggccatggacggggttctgagagagagcaggggtctcgtcgaaggcagtggcagggatgatggattggatatctaggtaaaggaggtggactaagtcagtgtgggacctgctagatttgtgggggtgtggagagaatgagaagaatagaacggtggtctcttggtggtatgagaacagaatcgcagacagaactctctgggccatttgaagaaatggcttgaaaggagggggcagagataaagaaagacgggaataggagagaatggtttcacagaaaagcaggaaagagagaaatgaagggttagtttcagcagactggccaagaaagagacatcctactgggtggttttattcatgactggttctagcagactcaagtcttcacctggaggattgggtataagaggacctagaactgaattactgcaaggtaagatgttaaaacatatcagatagtagcagcaccacaaagaaacactcctgagtgaggtcaacacgtgcctgtgaatgaaaaatgcatggggagaggggctgcattgaagagcggcagccagaatggagttatacccccagatgggagggatggccatgcttt

SEQ ID NO: 100209 - DNA, 1049 bp, Homo sapiens
acccttccgcatccgctttgtacagcagcagcactgttttccctggcaggaccactcaccctgtctatcctggagcctcctttactgcctcagtgtccagtggtctgtggagcctaaaatacctgaccatcagtttcctcttcccactgagaacactgtatcttcttctaggaagtacttaagtactaaagtactccttaagtactaaaactaaagtcagagactatcatcatagggataggaaaaaaggacataccataccttatgggtcagcatccccaactcatggggtaatatatcccacttagcttggtgaatgattttcagcagtcatcaaacaggcaggaggctgtgtgggtaggccctcctgtaactccactggtcccgtgtgccttactcatactgtatttcttaccacaggttgggatatatcttgctgtaaggcaagtccctacccagttcttctttggctttttttagccaatttcatttctacaaatgtcttagaatcagctagtcaagatacatacatgccatgcattaaatccataggtcagtctaggaaggaaagtcacaacaatattgagtcttctagtccaagaacacatctatcatttcatttatttaaactaacatctctgaataaagttttgtaactttctttatactttccttgttagatctattttatatttttatgctgttgtaaataatatttccttttctaaccatttgttgctggtggagaggaatgcatttggatttttggtgaatgtattctgtatccattgactttgataaacactcttactaattctgaccatttgccatagattatgttggagattctgtgagtacagttataccatctaaaaaaatgacagtttttcttcctttctaattcatagtcctctatttgtgtcttgcattactgtattggcaaggatctccagtgcaaatgttggtagatgtgatgtagggggacatttcttttctccttcacagtctcccacatcaagttctcaatgtttcaccatttagtggttgct

SEQ ID NO: 100210 - DNA, 1072 bp, Homo sapiens
attcattgtcattgaaaatcagtgatacaaatatgttaaaggggactctcatccagttgttgaatgtcttacatatatctgaattatgcatgctttataggaattaaatatgaattgggattttcaaagaatttttcatcatgagcacaaaattgtattattgtattactaggcctctttggaaattataatgtcaaatttattattttgtaaatgttttaagttttctaaattttgtacttttgaaaaattgtatcttgaaattttggttatgttgattaataataagagttgaaggaaccccatatcacatctagcattttgtggagaaccgtgggtatggaatccagccttgcctggtgtcgggcacttgccaagcctctgactgtgctaatggggtcaatcctgcagaattgcaggcatgtccacgaagaggccgggactctggagcacggcccacgtgatgagtttcaacaattggagcaccttgctgcagaatcaattcagccatgtcaattggtattgatcatgggaagagctggaacaatccaatgatctgtgtgctgtgtactaaattggctgcagtttcgatccttgtcatacctttagtggtattttagccatgctttatgtagcgacttgtttttgttttagaattactaatagaagggcgtttttaaagttcttaaattaaacattagcatattaagccatccctcaagaggaatgacattgtgtttttcagcttgatagtatgtataatcttcattttcatttcaagttgttctcctgaaggagctgaaagttacccttctgaaaactctcttttaaagctttgaaataataggcaacagatttattgttcatattgggatttatgacctaatctaaagggttaaagttgtgaggattaaatgagctaataaatagaaagtgcttcaaacagtgcctggtccagagtaaaagctacttaagtgttagctattattattattattgttgctgttgttttttgttattactactatggagagagaatacttaatgaattccaagtttaacatgcttatta

SEQ ID NO: 100211 - DNA, 1051 bp, Homo sapiens
actcatgccgtaactttgaattatgactcataaactttcggcagtggtgtaaagtggttgttcaacccttttgaaaggcagtttagcaaggattgctaaatatttttaatattggtaccttttgacccaacatcttagaaaaacactcctttgagtgtgctttctgttttgaaaaagcagaaacccccaaaatccatcaatagggaacctatgtatacacacacatatatgcatatatacacatacatttatacatacaggtgggaaaaaagttagagattatataccaaaagtttggtagtggttttattcagttgatatgattgtagagcactttcatttttaatgttttttatttctttaacattttaatctggtctaactttgtattacatttgtttgtaatcagaaagaaagatataaaaacgaaaataatttattttttttctgaattcacagtcctgcttagtgaaagagcagctcatttttgatcctcactctttcttctttgtgacctttgtcaggtggatctctccacccactgtgggttcatgggtggccttcagcgcaatggcagcaccgggcagacggccccttactatgctacctcaactgtggaagtgattttccatgtttccactcgaatgccgtcagactcagatgattccctcaccaaaaaggtaaggggtctcctcgggcaccattcttagctgccctggtttgtaggtgaggctctcctaggacagacaaatacaagggtagaacgcacactgagatggtttctctgaactctacgaccctgagattaaggtttggggaaagaaggcgtcttaaatgttattacttttggatcttccctcccgtgaatattacctgatggaaaatgacatttttgatctcacagattgtcaaaggttacaaaatatgatgaccctgtactggtggggctctgggaaagcaggcccctctgaggcttgctgcggggcgatttggcagcatctgtcaacataagtgcaggtgtgcagctgctcagccgccccactgttgcccc

SEQ ID NO: 100212 - DNA, 1050 bp, Homo sapiens
gactgagtagataaaataatattaaacttactcacagctatgtattgtttccatccttcagaagcatatggtattaagatggatttgtttgtattgaccattttgtgggaatcagaagggcataagttttcttttcttttcattttttcttttcttttcttcacccttctactttcccacctgtctcccaggtcactgagcgcctcttattgcatcatatagctacatacatgttgaagcatgaactgttttgtgtatgtttccaagtcttgggaatgtgacaggatggctgttccaaacctgattccctctgcagaaggggacatgagggccttttttcctaggtggccttaaagagtgataaatatttcagtatcaaatatgcagacatttttttaaaaacacaaaattaaaatattcatttgtagttttacctggataaaggagccattctctgtccagaagcctgcagctccattgccattttaaatgtctttgtttcctgacttatcaggtgagacagtaaaagatttgaatttgaataattttttaaagtcattagaaatgaaaaacctgaagctgccatttctcaccttgcccttcactgtattctgtttcctgattcttcttgtgattccttttctctagaggaacatagatcaacttctctatggaaattctgtaagggatttattctgaagaactcaggggttcaccacactctccctccttccttcagtattaaataagcagtcatttgggttccacactcagctttttaagcgtatgctgaattattccaggcttcttagtattaagtgaatacttggtttcatgtaattgcggtcaatttgttgagcgttaatgcactttagttgcatgaggtacaattgaattagctccctggggtactgttgcaacgaaatatggctttgaatagctgagtggcagtcccctgccccttgatcaaccttcacttaaaaccccaactcctggatttagtgtcttcttgacatcaaatgggtatcaacttattttatggtgaagggt

SEQ ID NO: 100213 - DNA, 1133 bp, Homo sapiens
gtgaatttactttacataaatatatttaacccaatggtgttttcttattttctcaagtattaccttgattcttataaaaatcagtgtttggagttgatgatcttgaatttatgattaaaaagggaaatctgttacaattattacctcatttatgcattttggcatattcaagatgatttgtgtttgcatggcttgtatgtgtacaaaggctcaaatgagtagatagatcttcaatcaactgcaatttgtaaacaaccagtgaactttcaggaactaatcttgtgaaaataagaataatttaaaaattgtattaagttagcccttacaatttatggcgtcatgagttatactaatttaaactcattactggttatgacgtgcactaatggtctctgcttgttgtgctcattccaccctccaccgtgattggcctgtcccaccactacccttcatccccagattagttccttctacctgtgccgcctttggtggacaggagggggacttaggtatgtgcaatcacacagaatgtgaataagtactttttaacttttactttccttttgccttgagaacatatttcttggcattgatatgaaaggagcaaaataaatttgctaatagcaagaagatatttaagagtggtcattccatttccagctaggaccaagcaggagtcctagctgccaagtgctgcagtagtttgacagattgtcaggggacacgcggtgagtagcatccgtggtgcacatggcctctgttttcacaggttttgcactgctgtgtgtgtggctcaagcacgtacacccaacagagtcactacatactgaccctggctgacttgtcatccacggattatgaccccttcctgccactggcaaatgtgaagagctctgagccagtccagtatcattcatcagcagaattgggtaacctgctgactgttgaagagggtgagtattctttcaggtatgaaatcttgtgggaaggaaaaggaaggatttagcctttagccatgcttgctctatttttttttaatctagttgttgaagttgaaatcctagttcctggagtcctctgtgatggcaaattctgccttccttgtttcttctttttttctcctctgttttccc

SEQ ID NO: 100214 - DNA, 1050 bp, Homo sapiens
ctgttgagaagaattaacagtgaaatttattttgaaagttgtatttaaatatactttaaaataaaatatagcatttgttttatgtttgtggtataggtattgtgcatattatggtaaagaaaacaattacaaacacaatttttgacagttttctcagatttatgtttcttattcttcctcaaaaatatcttgaaacagtcaaatgtaataacctattagtttcaacaaaactaagtgatatatatgggctgtgacaattaatagaaaatatgccatttgtttaattaaatatttaagtactaaaccattatcaatatttctatttgtcctgaaaattggcctattgagggttctttatcttttctttcaagaaaacattctgctaatagatctataatatttgctattttgtataaatagatttaaagtgttttgttatttgaaaatactgagaaagtatattaagtttcatgagagttttcctctgttttcttctttttaaaaagatgcattgctgtttgctcccttggggtctggatatgtgaagagcttgcacagtgtacaagccaccctcaggtgaaagaggccatcaatgtgataggagtaactctgaaggtattaccagtttgtggtgctgattggatattaagccatatctgaggcatttaacagtttgagtttgaattagccccatcttttttatcccccaaatgacagagggattgtgattcccattgcatgtgctgtgaggctcccgggaggggcaccaacggatgctcccctgctggcagctgcagcctggccacgagtgtctcgagtcttcctggaccagtggccaaatgggttcctctggtggctgggaagctcctgtcgcaaagaggtcacctgtcacctgttggtgggggtgacaagagagtggggtgtcgtgctctggcctcttcagcaggcctgggagaggcctccacaccttccagttaggcctctcagtgttcaccatctggctgaatcttgggcactttaaggacatctttgtttctttgttttgttaat

SEQ ID NO: 100215 - DNA, 1037 bp, Homo sapiens
atagagactactcaaatcaaagatggtataaaggtaaatgtaaaggtcaaattcacatgaagtgttgccaagatgggaaaataaataatgaaagcataaccagaacctggaaaaacacaaactagaaaatgtggagggaaggaagtattgaaatataaacttcaaaaaattcagaaaggatgaaatacaaaaccagcttgcaataaagaaaaaagtgttatgttctttgaaactacagtaaaagagacatgagtgccttatcttttaagctttctgacggtatcgaatttgcttggtctttagcacatatatcaatgttatgtaatgttatatacatttaactatctgcctgaggtatgatagtaggaataaatgttacagccatgaatcgatttttaattctgttttcaaatattgcacatgagtgtgtgggttagtgaatggttgggtactgggtgtgctagtcataccatttttcctacacatcttcatccccgtgtactacacttttggtgggaaggtaaattgctgcagccattatggaaaacagtatggaggtttctcaaaaagttaaaaatagaactaccatatgacccagcaatcccacttctgggtatatatccaaaggaactgaaatcagtatgttgaagaaatatctgcactcccatgttcagtgcagcagcattcacaatagccaggatatgaaagcaacttaaatgtctattgacagatgaatggataaaggaaatgtggtacatatctccagtggagtgttattcagcctttaaaaaatgaaggaaattctgtcatttgcaacaacatgaatgaaccatttttccaaatgaaagaagccaagctcagaaagataaatactgtgtggtgtcacttatatgtggaatctaaaaaagtccaactcctagaagcagattgtagaatggtggttcccaggggctgtggttggggtagggggagatgggatgatgtttgtcagtggatcaaaagtttcagttatgccgaatgaatgagttcgggagatg

SEQ ID NO: 100216 - DNA, 1576 bp, Homo sapiens
tcataaggcactgtccaccccgctttttctccctgggttttcctggcttctcaatgctggtgggggacttcatcacggccgctgccagggtccttagcacagacattttgacggtgagtatgacaatgctcagcatcccagctcccaagaggcttcacaatcgctaacaaggttcagatttctccactcttaacaggtgttgactcattagtgcaatgtgaaactgggctctcagggtagataccctggcagctgatgtgtgaaattgtaggataagatgacacactggttttggaaaggcgtttcatcaaaaggccaaagtgtgagaaatcatatcctcactaatatttcagcacatttacacagtcagaagcaggacttgtctcttagaatattattagcattttccagtaaatggtgacacagacataaatgtctaaaatagagagttttaaaatgtacattagcagtaagtttttttttgtttttaaattaagtcttggttattataagtctcatagaaaatattttcttaaaatgttagaacagtaaagtcttaactagaagtaaatatgtattctcttaataacatgccagaatactttggcagaatttttgtaataaaaaattagaagtggactaaatgatcagtaagggctacaaaaaaattatttttactctctacatttacctctactactaaggcagtatcttttcttttctttttttgttgttgtttttcaagagatagggtcccattcattctctgcccaggctgaagcgcactggtgctgtcatgcctagctcactgtaacctcaaactcctgagctcaagtgatcctcccacctcagcctcctgagtagttaggactgcaggtacacgccattatgcctggctgatttttaaattttttgtagagattggagtccctccatgttgcccagattggtctcaaactcctagccttaaatgatcctcctgcctcagcctccaaaatgttaggattacaggtgtgagccactgcacatggccaaagcaatatcttaatgcctttttgagagaatactgttatacatttaaagttaaagggccttttccatttgtgctctataagctgttatatattcagagttatctttgccccttcaaatggtataaataaaattagctttactatttgctaagcattggtgtcgaaatcagtgttgccatccaacaacctaaatcttgtttgatatgagattactttttcacttatttcttctttgcagggtaaattcaaacttcaagcccttggttttaaattaaattgtttaaaatacttcctgtagctggtatttcatgttggcgctttcacacactaactttttcttataaagataaattagaaaacaaagagaagtgaaaagagacaggagcaaaagagaagaaaggtaaaagagaagaagaggccaggcatggtggcgtatgtatagtcacagctataggagactcaggaagccaaggtgggagaatcacttgagatcaggagtttgagttcagcctgggcagcataacaagaccccatctcttaaa

SEQ ID NO: 100217 - DNA, 1076 bp, Homo sapiens
ggggacttgggggaaagggtggaaggggatgagggataaaagactacaaattgggtatagtgcttactgcttgggtgatgggtgcatcaaaatctcacaaatcaccactaaagaacttactcatctgaccaaatagcgcctgttccccaaaaacctatggaaataaaaaaattaaaacatgagtcactttgaaaaacctgttaggcaagtaatgttcactttggacagggagatggcaaaaggcatgaggattgcacatgaatgactcatgtctgagagcatcattctttcccatgtatatataaagccctggaggctgtgaggaaggtttcagatttttattatatttttcaaagacttctgttatagctgtgtcttaatgtatggtggggatggtgaaagaaggattctactgagttagaaatgagtggggcattttgtggatgtcccactattgagaatatgcagcggctcttctttgagtaccacgtggttattcctaattttaaaatgttatcacaaagatacagtcttcgagttgttccacttcagtgtggagaagcaacggaagcaggcatatggccataatttggctgactggtcatatagttccctctttaacccccccatttaccctcccccagtgctgtctttggcgacttcacacaggcgctgtgtctcctcagggcgctgtcttacgtgggtggcagggtagggtaggctagccatctgttattttgccctctctttccaaccttcttgctcatagtagcaggttccgttgaagtgattggctgaggtccagggggtgagggagccatgtgactttatctcagctacatgcctatctgctgtctttagcatcagtatagcaacttagtcatattttttgaatgccccattttacagattgttgcctttacacatacaaatcttacaatgcaaaatggattcatttacaaattgtggtattagcttgttaaaggatttagttcataattcccataaatttagcctagaaaagcattttttaattaaaactctaaattccagtggtgaaaaggggcttatttgat

SEQ ID NO: 100218 - DNA, 1865 bp, Homo sapiens
tggcatacatttttcagttgagaacatgttcttttgctctgaggtttctctctggaaggagactctactgtggcctgtcacagagcccagatcaccggaatcttttttaatagagtcactggagtgcattctgtcttttcccagagagggtagatgctcagtagatatattgattgatagaaaatggaagaaaaaaaaaaagaccttcttctgagactggctattccaaatctacacagcatcatggggaagaatgggtaaccaaagcagctgagctgagccactttggttgcaattttggctccaactatcagtttcaaggcaggcattaactttctactgtggtgagctagtcaactttcattaccctagaacagtgattcttgaggggcaggggaattttgccccctccagggaacatttggcaatgtctggacacacttttggttgtcataaagtgcactgtcatttggtgggtgaaagccagggatgttgttaaatatcctgtagtgcacagaaacacaacaaagaatttatgaccaaaaatgtcagtactgctgaggttgagaaaccttgccctaaaggagtacttctgcagatgacattgtcctaagaaaagagctaggtaatataaattaaatgacacaactcagtaatcaaagacagtatgaaagtctcactctgttagcttaaccaagggaataaatgcatacaaaaatttaaccagggagattaagagagtcaatgtttcaggttgagttaaatgagttttcaaaaagggggtacaatttcataatggttcagcttactaaattctctgtctaaaaaaatcagtttaagaaataaaacatggaacgttctgattaattctgaagttaacatgaaaattatctgagatgaattttgtctggaagcccaaagtagaaagttgtgtggcctgcatctgcaaagcccaaggcactgtatgtatgaaaggaggcaggaagggggctcaggttccacttcttgcatgagcactgcctgagtagctaagaggaagcaggatggctgagagaacagcttgcatggaaaagggctggtgcatggagacagataattgcctttttcaaatgtctgaagcagtgctgtgtgagagagactgttttacccagagccaggactaataggtagattctagctcatcatcaggagacactaaatccagttttctgttcaaatatggcaggtgataggttctgtgtttgtaagcctttcaagctctaaagtattcagtccaaggctgtctgacgctctaggacagcctcagaaaaagggaacattcactttagagcttgagccctacctagccttgcactcaagtcactgcatccatgaattggtgaacagatacatagcctgtttggcttgtgctgcttattccatgaaacgggtttctgatgactctgggactttgggaagggaaagatagttaggccttcagtaggcaatggtacatttcattgcagaagggattttcctgctctttggaatatagctattgacctgtaagaccatcttttctcatttagagttctatgaagactttaagaaatgttacatttttctccaggcacagaggcactgagagacacaggaatagcttctagagacatttcaggtactaaagttatacttggggaaggaggatacattaactcccatttggagaggaatgatttttgaatataagagatttaaatcatgactgtggtttataattcataaagagtagacttggatagaaggatataatgtcaagaaaagcattttaaattgcaatttttgtttccgtgagaaaagtgctctccttgtggggaataatctct

SEQ ID NO: 100219 - DNA, 1996 bp, Homo sapiens
aaataattttaatacatgtctctaaagtgctcattctgtacagcaagtgattttaccaaggttttaatttataggattttaactcaacactagcagataaagtacttatttgtgaatttaaagatctaactgatgttccgaggatgaaataataactttgatgtgtatcagtagaggaactttagacctttagaaggctaactttgttaaagcttcatttaaaaacagtttaaaaaaaactataggtttatacaacaagtaaaaataggactaatgtggggccttattcctaaggtttctaagaattggaaaatgtacttccaagaattcaggatataagatggcttcagaatatattgactttcaagaataacatatgactctcatggatggcaggcctgatactgggaactaaaataccttagagctagactcagctttgtcactcactggccatggggccctcacctatccacaagtagtcaagtgaatgaattgggctagagagcctctcagaccctttcccattaagcattcttagatcctctgatttatttttaggcactttattattagggtcacatcactccttcctaaatgtggcacaaagttcaatgatctttttatgttgaatattttttcctgccatggtaaagacctagtcaggttatgagagtgtgagatgcataaacaagtatctgtactaaccatcaacttgtgcagaagaccaaataagtagtgatatacatgttatgaaaattgaactgttgaatatccttttagctaagttgatttgaaagcagctcacaaaggagaggggatttagcaggactttcaagaatggataggatttaaatagcaggacaagaagcatgatggagtttcacatcaaagatacagaacttttcaggctgtgttcaggaacaatgactagagtggctttgatttaatgccagatatatgcgtagaaataatatatggtcatgaatccaggcagcactgtagagagccttgattcaaagtagttttcatcccatggacagtggggagctgttgaaggtttttgagcatgatactccacatgaccacaagagcattttaagaagcttaaaccacagtgataaagtgggggtgaattataatcatgaaagaatgatgacaacaaacacagaaaggaaattattataatagcccaggggcaaggtaatgagggctaacaaggactgaggcacagatggggtttgtgtgtgtgtgtgtctatgtgtataattcattatatgtgtatatattttgtatatatatgcacatatgtgttttgtgcatgtgtgtgtgtgtgtgtttgtctgtgtgtgagaaatatgttggagaggtaggatgtagtactgattggtaagcatcctgagaaagtagtgtcctggcacgattcccattatctgtcaaggcaaatgttggttcagaaaggcaagaagatgaattgagaaaaggaagacatgtgggcatgataggataaagggactgtaagtttcgactcatgtcttgatgacccttcctcaccttggacattatagcataggacaggccaaatgggtgcatccgaggatacaccaaggggtgtccccaaagaattcttgcctgttaggaattagaaatgtgcaggaaagatttccagggacattttctctgtacttaagagaacatattttctaattctgttggaattcaagcagttggtatgcaaattgtaaatgtatttataattattaaaatgggacatctaaagggctctgtaattgatgtttttgttagccaagacatatatttgttactaattatttctgaaagtaatgtagcacttaaaaacaagtccttttatttttctaaaaatacaacttctgacctgaatttactttactcaagttaatgaaatattattgaatataaggggagtttactgtagcaataaacaaaacttccaagtttgacttaggtttgattg

SEQ ID NO: 100220 - DNA, 1033 bp, Homo sapiens
aaaatttggcgtgactttcagggctacccggcctgcctgtgaaggagtctcccagtacgcttccctctgctcagctgctttgtgtctgagggtgggctggtgatggtgcttaggagtatttatttcttcagcactcacagtgctggactctgtgctggggactgcatgatgttgtactattgaatcttctctgcaattcaattcaataaataccatggcctattttattttattttattttattttattttattttattttattttattttattttattttattattgcttttttttttagagatggggtatcgctccattgcccaggctggagcgcagtgacacaatcatagctcactgggctcaagcagtcctcccgtcttggcctcccaaaatgctgggattacaggtgtgagccatagtacccaggcccctgaggcccattttataaataatgaaacttcaaaaaaatatctaaaacttttgcccagtgccacaggctaaaaagcctgttagaattcacatacaggcttggcttattccaccaggtatgttttcttttattgattcacagcaagcgtattggtccaacagccttgatgttgtttctcccttccgttttattttgcctgggctctgcccttggtcctactccacttcagaatcctccttattaaactaccctgccccaacctggaaagacctttccacagttgccttctcagttcttcatcatccttcagtttctcttctaaagctgtttcttgttgttctcagtttttcctaacacttaagcagctttttcacatcagaattccccaaaatagtttgacatgaaagaacctatgatttggatttattaaaaacagtttttattaatttcatgattatttaaaacagatggaaagatcaatatgtgtgaaatggaaaaggacagttgaggaaaggaattttattttcatgtttgtaagaacatgtatcagagactggaaggttttctttgcttaaaataagtgagctattttttaacaat

SEQ ID NO: 100221 - DNA, 1040 bp, Homo sapiens
tctttaaccttaacaattattgttatatattttagaagcgctgactgtctgccaaacagaattactctaagtaaactttattcctttgccagatgaaaattacgcagaagacctaatgaaagaaactttttttcatttaagttaagaaatgtctctggtaattagtttaacttttgatccacacgtctaaatagatcatagtggttgtttcagaacttatgtaattctggaaacacatgttatattaattataaaaagaaaagaaagcatttatggtagagaatacagttaaattcaattttttaattaacaaactatgtacctgtgactggtaccatctcagggcttctttctattttgtgagaattctcaaagggccacacttttatgtatcctagcagcaaaaggatttatttatgcagagagaaccttatgaaagatgtcctgtgtttttaaataaataatcataaataattgtttaaaattgaacattatcagttttgtctcacaaataaaatccaaggtgggtttcttccttttgcctctgggtggcacacttgtctgcacgacgcagctttgtggttcatgggcctttgaacattatgctttgtatggcttggttgtttcatgaagttctttcttaaatctgaaggtatcaaaattatgtcagtagtgaccaataaagtgttgaattaaataagttataagatgctaaaaagtattttcaaacataatgatgttcatagtaattgaagacattttttagtttaaaaaacaatttgtaaagtagatgtctcatgagttgtgttctctggcaatcctggaaagttatagtttcatctaatatgatagcaaatttattatgtaaacagacatgaccatttgtatcttaaaaaataataatacatataccaaacagccagaaaaatgtagtgcattccaaagcaactgtttttagtatttttaaccagttttggttatcctaataacttatgtaatactaacacaatgaatttatcaagtagtatttcccccggtac

SEQ ID NO: 100222 - DNA, 1078 bp, Homo sapiens
cactcaggcctttgagtttgttttttatgtttagttttcaaatcaaaaggaaaatttttttcagagaccgaggctacatttctttaacactgtgcctagcttatataaaattgcagccatattaaatcaccatttggccttaaatgcttattttgccaactaccaagacttattttgtggctgaaatcctttctatatttgcaaagttctaaacttttagatctctttgtaaaaattatttatgtgtttggagaaagatgatacaattatgcttgtaagagttttcactttaataaaaaaattttaaacacccgtatagcattaagtagtaataaaacaaaaagatagcaggctagcatactaggctgctaatgaaaaataaaataaaataaatattgggtatttttagggtgaacgtgaaattgtctgaagtctcttaaattcccatttttaattaagtgctccttcactgaggaaccctctacatgtaaaatgtcagcatctgttctgtcacttacgccaccagcagagtaattttgggcaaaacatttcaactcattaacatttttgttcatagtaatactgaggaaactcatacaggcatctcagaaactcctaaagaagtcagcgtaccttgataattttatggaggatgttgcctaggattttatcattgaggcatgaatttttctgagtgtaaagcagtactgaagcagattttctatgtgggattctttcataagtaagggcatattcgttggcaggttgaaaagaggtgcaggtgatgatgaggtatctgtctacatgtacttggagtggttactcaagcaaatctccagtgtgattgggatgctggggaccaatctctgttttggatagctacatttttggagtgaaggtttaaccagcgatgaaacaaagctgtaaattatctaatccccttactttttttttctcctcaagggattgaaaaatgccatgacatcctttatgagaaaaataaatgccatattatgcttcttgttcacttgggggctcatgttgattcataagcatttattgatgcttcagcatacct

SEQ ID NO: 100223 - DNA, 1048 bp, Homo sapiens
cctggtacccagtcctaggatgacagggcaggggatattgacttagtatgtgagaactagagaaaggaggtagttggagggtctgaattttgaattggtaggtttgcatgtgaaagacatgctgcctggtgaatagacttctatctctaggaattagctaaccctggaagtggcagtccttccctgatcagtgaggccctaatgccagagcattgagaagacagaaaataagaaaatatacttaagacatgcatacatttagttctgttgaaatagtcaggggagggggacatttatgagtctacagctaagaatcagtattgtcatttacctcatcccttatttaacaaataagcttatagtctagaaatactgatttagatgctctgagaaataaaaagatgaataagtcataagccactatagtttttaagagcttataaaaaggacagaagacacaacatttatcctaatagtcacaaataatgtgataaattctatgacatttacttaaagttgtaatcatagagatagacaaatagacggatggaacagaagataaaatatagcactgagtgcacacagacatggaatcatgatatatgatatatgtggcttgtcaggtctgacaaggaaacaatgtattgttcaacacatttctgtgggacaagtacttagccatatggaaaaaaatgaaatagaattcctacctcacgccatgtccaaagtcagtttcagagggataaagtacataaatgtgaaaaggaaaatttaaaaacttttggaagaaaacgtcttttttaaaaggttctatgattttttttaaaaaatagctaaccataaaaaaagtgtcagtaattcaacctcagcaaaatgaaaactgcattaccagagaaacttttaagaattctgtggtttagcagaaccacaaagggaaaaagccagctttgttgctcttttctttccatgttcttgttagctcagtgataacttttaaagtaaggtttggtgagaaatgttatctagcatcttggtttagttgggagat

SEQ ID NO: 100224 - DNA, 1036 bp, Homo sapiens
tagaaggtctgcatttcttatttttgtccttcttcacctgggtgccctgcatggcctggtataaccagcatctcttcctgtacatagaacttgctgattaccacccagtacttcctgccttgaatcccctcctgtcttccctctaccacttcatgtccattgctgtcttgaacagctctcctataaagctgagccaattaaggcaacagtttattctgcatccccttcagaggcagtttatttgcatattttgcttatatacattataattattttgtgtaatttgtgtatgttttgtctctccaagcaaattataacttattagaggatgcagatttcctcctgatttttttttaatcctgtgaatttaatacaaggttaagcaatgctcaggagagtctgtggcatgcttaactaggaagacactgaatggacctttagatctctgggtggagtttgcgccttccctaccagcacacttatcatttgtgtgcataacttatgcctcctagagcattgtgttcacaatatatgtgtgcctgaccagaagaacaaatagaactttaaaacaaattccttccatataatttagcattccttcttagatcaatttaattggatggatgtaagttgacaaagtagaggatataaattaaagtttcagatcttgagtaacataaaattaaatatagtgatttgtgaaaacatatccttcaaatggaaaacatcaatttatttagctattattattatttgtttctttttctttagaaatttgggctagaaacttaagtcttataacaatgaaaactttcctgtagtaaatgcaatatttctttttgtctgaagatcttagttcgaagaagcagcagccctgctgaattggatttgaaagatgatttgcagcagacacaaggaaaatgtagggaaagacagaagagtaagttccgggaaatgtctgttcctccaactacagagttgatatgttctattttctttttacattttattattattattattagagactcagtct

SEQ ID NO: 100225 - DNA, 1060 bp, Homo sapiens
cttgttggttgacatttagattgtttccagctttttgtttttgtgaaaactgtagccatgtacattcttgtatgtgtttcagcatctgcatgtttaatgttttctctatgatggctatctaggaatggaattaatgacttatagaataaaataatttctttacaagataacccctgttctctaaagtggttgcatcactcatatttttgccagcattgtgtagagctcccattcatcttcattcttgccaacactttctattatcagattttttcatttttattggtcaactgagtgaaaataagatgtcttattttgtatttcttagactactaataaggttaaaaatcttcccatatgtttattggccatttttgtttcatctgtgaaatgcctactgatgtcctttgttgtttttctattttttgtctttttctctttatttatatttactagctctttgtatggtatgaatactgatcctattttggttatgtttgtagcaaatatcttcttccaatatatggtttatatttttaccttctctagggtatcttttgatgaacagaagttcttcattttgatattctctattatcatttttattgttgaggctttatggaattttttaaaagtctcaactacacaggaataaaaatattatatttataaatgtttcaggtttgctctacaaatttaagtcttttatatatttggaattgattcctgtttatggagtgaggtagggatccaatttcattttttttcctgaatagataactacttgtgtcaggtcccatttattgaattaatttttctttattgatctgaaatgccacctctctttcatatgtgctatttctgagatatgtaaggcctccttttggtgtttcttatcttgattcttggttactttatctttcggacagtacaacatctcagttactatagttttcccacctctttctcccttttccttctaatggaagttatttttccataatcttttgtctttctttgttgctgagaagtcttctgtccatccggtcctgtctggtta

SEQ ID NO: 100226 - DNA, 1103 bp, Homo sapiens
ttttatatatctatatgtagatatatacccacttttttaaaggttggcatgtttgaggacgagacaggagtccaagtggctggagtagaaggaagacggaggctgttacaacatgaagtcaagtagggcatcaagttaggtattatggaaggcagggaggcaggatgggggcagggacatagggaaagggctgtgagaagagccgttaaagttgaaaatgagaatggaaagctgaccagacttgtgaaaaagtttattaacagcttgccgactctgctgagatggaaaataataacttttaatagcattaatctacacggtttcaccaacaacttgcagcagcaacagggtgtggaaagcagggagacagatggtttgacctgtaaacagtgaagaatagatttctcaatgaaagagtgtgcttaaagtgtgtctagtatcattggaaatagttattctgttttggtgtcatgaattagttaagaaatcaactctatttatcaacaagttatctcatatcttttaatgtcaaagtcatgctagtctcatcagatgagtagggaattattctgtcttagaaatcctctggaaataagaaaatacagtaaaagcttcagaaaatgtattatctgaaagatttttgaaaggttttgtataaggctttttttttatacatatttggtagaaactaccagttgcctgcatttttcttgtaggaatgttttaaaatatcatttatattttaacataatttcacttatggaggaggaataagttcaagaaatgtgttgtacagtatggtgactgtaatttgtaacagtgtattgtattcttgaaaattgctaagagagtagattttaagtgttctcaccacaaaaaagtatgtgatacatgttaattagcttaatttagccgttgcacagtgtatacacatatttcaaaacaatatattatacatattatattaatataatttttatatgtcaagttaaaaaattaaaaaagttaaaataaaatagttataggactatttagattttccatttcttgttctgactttgataaattatgtttttgtagaaaaaaattttttttttttttca

SEQ ID NO: 100227 - DNA, 1849 bp, Homo sapiens
tacaggtgtgagccaccacgtccggtctgttctacaattttaactgctttttaggttaaaacatttatcaatctgtagcacttacagatagtagattttatttttcttttaggaatattgtaatagtagtaatgagaggatcaacaatctccccttattctaaaaaagcatattggaatggtatggcaaaccttgcctcgctgcttctgcatctggtttgtgtgcttctaggaagtgcttttttgtcaggacctggtctgatttacccttgggaagtttgatcttgtgggaaacctcaagatgctgagctgatatgcatttcctatgctttttataggatcagattggtatcatgcaaggtgttttaaaaattaggaaattatactatttattttgcttatgcaaccttgtataagggataaatggaactcagaattttggttattgaagaatgagcctcactccacttactaaatgtaagactgagtaaggaagacttaaaaagtgagtgaaattgctgtgaaaaatagagatctggaaaaaaaaatagaagttactgaagagcttacacacttaatttgatcacactgccttttctcagtggaaaaaaatgaaattaagtaatccttatttgatcatttttcggtgtttcgaatggagctttagaaagtaatagtttaggccgggcgcagtggctcactttgtaatcccaatactttgggaggccaaggcgggtggatcatgaggtcaggagatcgagaccaccctggctaacacggtgaaaccccatctttactaaaaatacaaaaaactagccagttgtgtgcctgtagtcccagctgcttgggaggctgaggcaggagaatgccatgaacttgggaggtggagcttgcagtgagtcaagatcacgccattgtgctccagcctggccgacagagcgagactccatctcaaaaaaaaaaaaaaaaaagaaagtaatagtttagtaatggtattgtgtaacttacactgtcaagagacgagaaagttagtgcttttaaaatctgggtagttggaactaactaggctttagagagagtacattatttggtgaatctaagatagaatttagctctttgaagtgatttaaacaaattgtgtgatattcaaaatagaaaatgcaatagatctaggatgtattatataattttattgtaactgatataattctttctccattttaaatatcagataatcctgtcttttggtatttgcatatcactattaaaatgattttcattcgttatgaaagagcaactgctaacagctaaccccacagaatgagagcagatttaacataaattgctctttcttaaataaaatgccagcagagggagcccaagaactatttaaaaaggaaaaatagtataaagaaattgtttctgtcattcatgtattcatttatacaaaacatgtatttaatataaaatatgagaaaatcccaataaatatactgttacaaatcaggaaattggatttaaattgtgggataaggagaattgaaaattctcttttcacaccatctcaattgatagtcaactacaggagtaggtagctcagggcacctacaacccaacagcacacttaagcatcgtggctctccccttccttcccactaaatcacgagtgctcctgccctgctactgaccgctattcctgaaggcttggactttctccatctgatacgtccctcctgacagctttataaaaacaaagccttaaaagctgcattaggccagcctgttgggaaggcagaccagctggtggtggcaggctctccgtccgtctgctgtgttgaggaccagtgggg

SEQ ID NO: 100228 - DNA, 1596 bp, Homo sapiens
ggcctacttacttcaacagaaggatttacctttctctatattgaataattaggcctatgtctatttatttttcagtgattctaggatgaactgaatcttcttccttaaaagagaaagatcattttcatgatcttttttattttcagaaatttggcgttgtagattagtattttttgttgttgttgtttttgatttttttgagacagaatctctctctgttgcccaggctggagtgcagtggcatgatctcggctcactgcaacctctgcttcccgggttcaagcagttctcctgcctcagcctcccgagtagctaggactacaggtgtgtgccatcacacctggctaatttttgtatttttagtagagatgaggtttcaccatgttggccaggcaggtcttgaactcctgacttcgtgacccacctgcctcagcctcccaaagattagtattttttttaacattggagataacctaattgtggctttctgtagtactaaactatgtcatactgtgttttagcaaagcaaaatgaaagcttacgttctctgatggctatgtaaataccatattactttatagaatttaagggaagaagttttaccaagagcgaggactataatgtttcttagaaaactctttttctccagtaactattaaaggtgaaaaacagtaagaatggtacatgggaaaatggtcactagtcaattacattactgttgagttttaactgcccaattatttggttttcaaaaaaagctattgtttggagatgattaataaagtatttaaaatgattttaccccctgtttggctaatacacaccccaaaagaatttttttcatggtgaaaagttttcttatgtcacagtccatttttttctatattttgtttctcttaagtttttcactagtttgtccagaacatgttcccacaagaaatctcttcctattagtaatttaattttggaagcttttgttctcattcaatattacattttattttactaagactcttggttcctgtatatacgtatacagttccaactgaagttaaatgtgatttagagcagtgattctcaattggggacaatttcaacaatgcctggagacatttttaattgtcacaagtgggacagtgctagtggcagcttgtggatggaagtcagggatgctgctgaatagtctgcaatgcacaggacagctcccaaacaaagaattgtctggcccaaaataccagctgtgccgaggctgagaaatcctaagtcagagtgaaatcaagtggcctgggctcggtctgcagttttcctgcctttgccatctttgttcttggttttgtagcacaaagggtgaaagaactttagagtatagtgactttgagaacaacctgacattccaactatgatagtgagcttcttagcctgatgccattggttctttactacttaaaatgttgccattgtcctttatgactgtcctatcaagagactgacccaagggcagattgtatattctccactggttggcacattagagtattgaatttgccctccaatttaaatccaagtatgtaggcataccccaccaacatactgcta

SEQ ID NO: 100229 - DNA, 1061 bp, Homo sapiens
cgcgtgccacgacgcccggctaatttttgtatttttagtagaaacagggtttcaccatgttggtcaggctggtctcgaattcctgacctcgtgatctgcccgcctcggcctcccaaaatgctgggattacaggcgtgagccactgcgcccgccctacattttacttttaaaacaaaaagtgaactctttaaaaagaagcttgtatacggcatttaataagaataaataaagccacctcctccccagtgactttgagcctgtaacttaggtttaagacaattgtaattgatatttaacatgttgacttcagaaagtcgcaagatcctctggccataaaacaaagattcattaaagcttaacatattctatagtgcttagtaaaggcttaatacagatggtttagaatcctgttggagtttttatgaaaatatattccaccttaactgtaactctctcatacttttttgctgtagcatttgctggaaattatcaccttatttacatgcacagcctattctgcttctttctttctttctgtcattctctcccctgaggagagacccaattctttgttagcaggcaacttttgaggatgctcattcactgatttcctttctcattccaattcctaaaaactatttgcttttatcattggattctttttttgttttgttttttgagtcggagtctcatgctgttgttcaggctgaaccgcagtggagcgatctcagctcattgcaacctctgcctcccaggttcaagcgattctcctgcctcagcctcctgagtagctgggactacaggtgcgcaccactatgccaggctaattttttttttcttcagtagagacggggtttcgccatgttggccagactgttctcgtactccttaccttaggtgatctgcccgtctctgtttcccaaagtgctgggattacaggagtgagctgccatgcccagctcttctatcattggattttttttttattttttattttttttgagacagagtcttaaaaaaaagcccaggctgaagtgcagtggtgtgatcttggctcattg

SEQ ID NO: 100230 - DNA, 1047 bp, Homo sapiens
ctacccacagattcatctaaagagacagacttatcttaggaaggcaaacaacttcgaaaacactgttttcaaaatgtaccgaacacattatttaattagtgaccatgactaatatttctgatttatgttgctttattctaaaaaggatttaaatatttattatagaaacacttgccttctaagggctagactactagaaacaaaaagcacaggcagaggaaactgggtgtggaaacatgccacaggtggcagccactggccacatcatacctgtgcagaaatctgtaagtctgccattctctttcctcctctatttcttttggtccatagcctctcattgaaataattaaccagaacaatatgaggaaaaataaaagttgaatctcagactacaatgttttattgttttggacctttgctaaaataggattttgtattatttgtagattttcattatcctgcccatttgactgaatccacattagagtttataggcatggattgctctggggatttgtggaggggttggtgtctacaggatgcagtactattctaacatcaggatctctgagtttttggtttataagtagtggtttttggagtgtcctgggaacagtagtataacttcatttgatattgttcttgtattgagaaaggtttattaatactttcttttgtatattggaatgagtactatgaagatataataatatccataagactgttttagattcttgaaaatattttggcaacaagaattcttaaattagtgacatatgagcaacttcctaaattgcagtgtaaggaagtggtacttaatttgtgacaaggaaacctgctgattatatatagttgtaggtacaccatttgctgagcaacacaagcgtgaaatgaataataatgaattcagcctttagattatttttcttttcctttatcaggctgtgttctagatcctcagaaaggaaccaccgtggggaggtccttttctctcagctggcggagccacccagatgtgaccgaaccgatgcgatttaggagtgccac

SEQ ID NO: 100231 - DNA, 1047 bp, Homo sapiens
aatttttccttcaaagcttcttaaagggtacacactgcttattgtgtagactaccctttaataataccagctgccttatagacagtatcagtgtgcttttgccatgtgacaaatcaccccaaaacttatggcttaaaataacaaccacttatttatcttgatttgatgagttggcaatttgggttggactcagccagtcagttcttctgctggtctttgcttctgtgtttgcagtcaaccacgctgtgaaatagtcagctaggcagctctacttttacgggttgactggctgtcagcaggggcaatgaggtgtgactgggccacgtgtttcagcagccagaggctagctcaggcttgttcaccaagtggcttagagtttcaggggcagtaagagggtaagctcaaattttcaagtgcatttcaagtctctgcttgttcagttttgctaccaagtaagtcacgtgatgaagcctaatgtcattacaggagagaacaacagaggatgtggatacagggaggtgtgaaccagttacagtggttagtaaaccatatacacgtataataaatgtggtggattcttatatcttcattgaaatctgagaatggcttgccaaagcactaattaataaaagcaagttagtaagaagccaaaataaagtagttgaagtacatggcaatccagtggaacagtttaatcccaatgtagatttagactgtctaatgcaatgattttctaacatttttaacagatccgtttttcttcccggttgaaggtatacacaactcctttctaaagaaatagactggagatttaggattgaagtaggggcagggagccaagagtctgggcccttggcgtccatctagtcctctctgacagctctgaggacctttgtgtaaacccggggcctgagaggacccagatacttccaactaggaacttgcctccctaagacagtcgttctcagcccagaagagaacttacctggctaaggatacctttcaggccagaggaggagagctgaaataggagataaggacctacct

SEQ ID NO: 100232 - DNA, 1078 bp, Homo sapiens
agctttgtcctgaaggttatgatctgttctttacaattagtgctgggcttttaggcttttctccctctctgctacctacttcctcttttaatttgctcaagggtggtaggaattaggaagctctgatggccttggtggaaggctaggtagatttggagaggtaaaggatgaacgaaagtatgggaatgggataaaactttgagagccatcagtgtgttgggcaattgtatttaaagccacaggatgggcttacctagagaggacaatgtccacaggtgatgggagagatgctgagaaagggtggccagtgagtgaggaggaaaaccagaggagtgtgtatcctgggtgcctggggatgagtattgggtaggaggagagcagccagttgaccatgggctttgacagatgtagttggttgagaatgttctatgggatgagtcccacctggagtagatggaggagaaaatgagagctgggcagtggaagttgcaagtgtagttaaggctttgcagagttcttgctgtggaaaggaagaggaaaaggggagctagctgaagtcggtggcatacatggtgggcgaggtttaaggtgggtggtactaaagtatgtttgctcaccaatgggatggtccagtgagggaggacaagatggtcttggggagacagaggataagtgaggtcccggatatggtggagggctgggccggtctttggtgcgagcagagagccaaagagatgcctgtgcttcttgcatctcatgtggtgagcaggtgaagaccaagagcaggctgatacctggtgagctgcctggggaacagatgtgccagagagtcctgagcatggcagcctactgtgatgttgctaatatttatgaggaccttagagtttatgaagcattactgaaagtgaacagtgtgaaagggctctggaaaaatgctacattctacataaataaagatattagtacagtggatggacttgactttggataattacataggtgatagttgtggggaggagaaattaacttccctcctcagttgacctgaaggtggttttggaggatatatgttaaaaag

SEQ ID NO: 100233 - DNA, 1048 bp, Homo sapiens
ctactcctcccattccccctctacagtttctcactcatatgcaacgatcctacttttttcccttgttttcctttttttgttgaggggttgttgaaaagtcttcaaaagcttttctgactcataaaatttctgtagttgcaattaatatgtaatagtgattttttcttttcccctagggaaaggcttttcaggtgtctctgtatttaagtgattctaaaaggtgaaccaaaaaaaaattttgaatatgtgttggtaccacttgccttattgaaatagaatcttttggaaataactgaaaaatgatttcattggtagagtgaaattaatatctgtaagcaaaatttattcaaatgtttatgttcagttatattttctaatgtaaagttgttgattttaaggtatttttgacgaactctgcaaacatctttttgttggaaccatgtgctgaagttcctgtgctcttgaaagaacaagttgatgcttgtaaagctgttttgattatttttaggcgcatgataatggagcttacaatgaataaaaagacatggtaagtttatatcaaattaattagtattgtaaaacagatgtttctgtttttcaacataattaaaatgttaaggcttgcatttatttaatgtttttacgaacttaacaacaaaatgtcttttgtaacagtttctgtgaattatgaagaaggtagttacccagtactttgacagatcaattattttcattatatttttaaaaaatgttcttgaacaataagtattttacttaatagtggatttttccttttaaacgttaaacatagttttgtggaaaagcagcaactggtgttttataatactcaccataagctcaggagagtttgttaattgccctgaaatgctgtcaactgatttttattgcttctaacttgacgttttaaattcattttggaaaagcaattattttaaatgataaattatcagaaactaaatacatagtgcagtcaacaatctgttcctgtcattaaaactacgttttttccttttcatctttgtttttg

SEQ ID NO: 100234 - DNA, 1078 bp, Homo sapiens
taaatgaataggtaagcaaattatcattcattttaaagggctgtattccatgctcactcagtcattggacaaacacaactcattctttcagcacatactaagtgctgagcactattttaggtgttgacggttgagtggggagctctctacctcctagaacctattttcatgtgaatcctggtgagtttaaggaattaaatatgccaactaaatataacttagtttatataatatatttaattatatttatagttaaatgcaagttaaacacgtgcatcttccactctgttaatggatcattatcttctgaaggcctcatctgaaagttctggtcataaacgatcttccagttggggacgcacatactccttcacaagtgcaatgagcagagggtgtgtgacagaggaggaaaatacaaatgtgaaagccggcgtccaggctttgttgcaggtatgtggctggccaggacatgaagacccctccaccgcctacagctggagccattttgtctttttgtttattggggataatgtcatataaagtatggtggtatttgtagccatctgtcagtaaacgataaacagcaatttaattagctattacattctcattctgagttttctttctaattcctacccacaatttacaaaaatttttttctagtcaaagaagacataaaaactggttacagtctttttgagattattatatagtgaatatgaaatggctgatatttaaatctttaaattatcttccaaacacttatgagtagtaagttatctgggctctaatttgcaagacaagcttggcaattataaaatcttataagtaatattcctcttaaaattggctgtgtttacaaagaacaatgactgatgtagtttttagatttgaatgaatatatgaaatagaactgactccatttgggaacatttgaaagagcaactttggaacattacttaacctccccagagctcaggattttacctcaaaaatgggaattgggagatttcctctcagatctcatgtagcttgaagagtaagtgaaaatacagggtgcctctcattccctgctcac

SEQ ID NO: 100235 - DNA, 1033 bp, Homo sapiens
gcaacctccacctcctgggttcaagtgattctcttgcctcagcctcctgagtagctgggattacaggcacacgccaccacgcacagctaatttttgtatttttagtagagatggggtttcaccatgttggccaggttggtcccgaactcctgacctcatgatccgcctgccttggcctcccaaagtgttaggattacaggcgtgagccactgcgcccggcctataaaagttatttttaacgccattttttagggctctcttatgagaatgtctttcttgctgctggtaagtttggtgtgcacaaagatttgtggccctgtgtagtatatttataagctgtgtgttccaaggaaagtgaaatgggtgatgctcattgggaatgtccgtgatgctgccctatactgatctgagtgtgtttgtagttaaagggagttttctcttttcctttcaggcatttttgttgccttcctgtgagatagctgtaacaagaaaagtagttcaagtgtacagaaagtggattctccaggacaaacctgtgttcatggaggagccagatagaaaagatgttgcccaagaagatgctgaaaaattaggattttccgagactgatagcaaggaggtaatttttttcacttgtcttttgagttgagggtaaatatattttagtaaagtatacttgctcagtcaagagtcttgtcaatgggacaaaggcaggtggatctcttttttatcccatctgatgcttctgagttgctgagttctgtgaggatctaccaaggagagtagcttctgtactcccattctagattggcagtcatctcctgcaactctagccagggccatctgcgtgttgcatctttgttggtcactgttgcaggagagttgtttaataagccatcatattttacatgtctatttgtgagactaaaaaaatcactaccttctccttgacttgtttaaataaatatcttttggagaaactaaattgagaatgtttgggtagacttttgttgtgcagtggcctgtaccagaa

SEQ ID NO: 100236 - DNA, 1083 bp, Homo sapiens
cccttagagtggtaaaggtgggggtcaaatcttcctctccctattatttaaaacaggtaaaactagttcaaatgaataattaaaaacagttttggaggggaagtggtgacacgagatgttacttttttggggaacatggtcacctgattcagttgtctgtactctgtgtgtttctatgtatgcgtacacacacacacacacacacacacatacacacacacacacacacggggagagaagccaaaacttggtgagttttgaaagatgtagaattactgacttttaggtgcactgggacatgtatttctttagctatatatatgtgaatattttttcaaaatttgtttctgattttatatgtagtctaaattcattttaaaaacatggtatattgttaatattcctagattaaaagttatttgttgatcatttttctgcctcatacaggtattccagatatacaaaaattattaagatagagagttgaacttatggcaagtagtatctcaaatccaataccatataattttcatattgattatggaatttaaagaatgagaaactgacttcttattaagtctttggaaaaggtagcatttgatgcctcaaaggtgaaatgtgactttcttaattcttttaaatataaagtagatgatattgattctgtttcattggattcatctaaagggaaaaggatataaacctctaaagttcagtggatttaatcactgcagtgttagatgttaaaatacctaaaatgatgttttaaaagttcatatatacttttacatttgttccagctataaaataaaattaaattaggtataatgtatgtgaaaagatgtttactattatagtctcatgtaatttatcaaaattgttaaaaatagttgttagcttagtttttccatagctgtatatcatagatacataaacaatcaccatcatcactcattctcagtcagatcacaaggcggaatcagaaaggagcctaccaaaaaaatgccattttaaataattgcggttcttcattcttagttgctatttagacaaccaaaaattggatttaattggaaaccaaaa

SEQ ID NO: 100237 - DNA, 1015 bp, Homo sapiens
tatgatgataacaaaaaagaaaagttgaataattctgttcagaggaattgaggaaggcttcaagagaggtaactttgatctgagccttgaaagatgaacaggtgcagtttggaaagggttttctgggtgggagatcaatatgtacaaagttgtggaacctgaaagaatgcaacatgattagtggatattccaaaattctaaatcctaaatttcatttaggattattcaattattaaaattgaattgactgttatagaaactgaattatttgaagttatatgttcttaatttaaaaaagtgtatatgtcaattgaaccaaatgtgtaaatcattactttaagatagtgcctttatctttaaatatttcaaatacacaaagaaagttttcctttaaattttagagagttctccattgcatttctgcttaattgagactttcagcttgtgtttttaaattaaagtaaaaataaaaatttaaatgtaaggtataatccaaagagacatcatggggatttgtggtgctccatggtaccgtaggaatggctgacaatgagaaataactgcatgcagtattttttatctgtgctacatataatccttcttcaattttgtttatatcatttgtatgaaaactatgctaattttctttagatagcactttagaatgtctgaagattagtaggctcttcacagcatgaataaacttattaggactatgtgtgaaaattaatttgcatttgtgttgtgaaactatgtgtctagtaggcagtgtgtagtattattttaattctgcctaataccacataaactggttaaaattgctggtacaagtagctttttacccagtttggcagcatcttagcaagaacaatgactggaggcctcagactcctcaattgagattgccaaatactgagtttcctgagccatctaatagcagtatgtgttgtttatctggtgtgcagaacaagctggtgctgtaaagtggtcagaatgaataatatttcagaatgtt

SEQ ID NO: 100238 - DNA, 1023 bp, Homo sapiens
atttcatgaaattcttgccaccaatttcattttcttgtctcactgagttgtttacagtctcattctctttgttttcacttttcttcccaatcctgttctttgtccagagactaatagtgattataatgaaaatgggaaggagatggtgaaaaagaagaaacctggggaatctgtcatttgggaaatttttattttaatatttaagaaatggctattatttaattaagataaaaataacattttaggttttttcttgttttcttttggagggaattaaacttgggacagtgatctctttaaaacattcaggtaagaaagcttgcctggggcaagtgaaagaaactatctcataggaatacagcatgaagtgcagtatttatgttattgtacatagtttccttttcctcttctagaacttacctacagtgagtaatatgggcctgtcatgaaaatgtgtaatttcatttgttgtttattttctttatatctttttttaatagaaaatactgcagtttctacctgaacgaattttctttcgatggcattaccagagtataggtaagaacaattaaaaattttttagtaatatgaatttcttccagttgaattttcagtaatgttttatataattgatatcatcaagatagcttatagaaaggaatattaataagggtatggtattatggtaatgaaaaccaagacaagttcaaccctgactttggagacaaatatgtctctctcttcctctgtgtgctccttagagtatagttcataggccagcagcataagcctcacccagaagcttgttagagatgcagaatctcaggtcccagccagacctcctgaatcacagtagtgtgtattttttttttttttttttttttttttttttgagatggagtcttgctctgtcgcctaggctggagtgcagtggtgtgatctcggctcattgcaacctccgcctcccgagttcaagtgattctcctgcctcagcctccagagtagctgggattacaggcatgc

SEQ ID NO: 100239 - DNA, 1079 bp, Homo sapiens
taggactgagatcctttatctctatagcatgtggttattctggtgtctgattttgattgtgaaatgtctatgatctgtacaaaccggaaggtgggaacaaaatataaacatgtggtccattttggagattctttgcatgcacttttcctggttaaaatgtgattatcctattatagaatgttagtaattttaattagacaaatgtttgagttgaaaggagtcagtttcaatggatagtttaatatgcaaatttagtattaaagactgcagtctcccttttgcatcaagacttataggtgagaaacttgggattgacccaacgggatataccaaattactcagttcaccttggaggaagggacactggagataagatgttcgtggaagtctgaaattacattcttgttgttatctgttgcagtccaggtgccctgagcttcctggcatgctggcctctttcacatagtgtgccacttgatgtgttggtaactgacactcttaagaggagatcctgtggaaggcaatactagcaaaaatgcttccaagaatcttttaagggcagatggtagaaactgcattagggctaaagatatgggaaattcacactgaaacctgagcatgtttatttattgttaggatagcaggagacatgtagagagcttttttctctttaattaaaattaatctgttaatgcagttttggtaagttgattttttttaaattaatatatacctttaggagagagttgtacaaaaacttgctattataagtctattacttgttttctgtttggatatgtagtgtggtggctgttacagagtgacatctagtgtttgatgtggtttgtgacactgtacaggttggaagggtctggcttgaagcctttgtgcactggcttttcctgcaggccttgggcacttgctgaatgaatttgacagggtggccagtcccaagacaacctgcaggtgtacaatgctttctaattgtgctgaggcaggagtttaaatcctctgaatttatggggtggtgggaaccaagtagtggcatctcactggggttttgttattctctactcatc

SEQ ID NO: 100240 - DNA, 1064 bp, Homo sapiens
gtttttatgaatgaaatgttggaggctttgtagggttaggtgacttgcccaagggtgcacacttagtaaatgggagagtagggatttaacctttagtctaactctagaacctattattctaacttactggcatgctgcctaccacttaggagtgttggtattctttctaagctgtattccataggctgtctatatcaacatatactattctttacaattcatttattcatcagacacatttattaggtatgcactgtgtcagacacacgtaggtgctggagatacaacaatgagcaaggtagccagagcctcccgtcctcatggagtataaattaccatttcgtggtgagcggaagagtctactggtaagaatgaattcatgtcagagctccagtaatgaccttctgaatcacagaaaatcctgaatggttcttttcagaagtgatattttggtgatggttcttgaattagttacctgcataagggaaaggagagttggtgtagaaacacaaggtacttggtgaatgggtctcaagatcaaataattcacattgagaaccttctggattcaagcttgacaggttattttaatggtacctgagattcgttttaatcaggtgtggtaaggcacagaaacatgaaaatgattgttatgaaggaagaagttttaattatgctcacaggcctctagaaacagacatgtcacacagagccaaacagggaagcaccaaggcaaaatcagtacgcaaagaggaaagggagcgacagagacagaactgagggcaggagcttttattgtgtttttttgcaggaaggaatgggcaaggccaggtaagtaaactacataggcttaggactggatagtttgaataatttcagctgacagggctgtaggggtagctcctggttgtccagcacctggcccctggatgattgaggggagggggatagagtccataaaaggatgtggttggggttacggatttgggattggttggtttgcatatcagaaacatgctctgagccactatctttgggaatttgctaacccttggaggggcatc

SEQ ID NO: 100241 - DNA, 1022 bp, Homo sapiens
aaatggtaacctcagctgcaggtgttgtaggttttattactgttgttattatcaataggacagtgtgcagttgccccaaaagatatactacttttatagttatctgctctatgactttttatattaccaacttagaaatttttcgtttgtgctgtgcattctgccacaatttgagccaataagtaactagttgagaaatgaataaattacccatcatagtttggtaacaagttggaaaacatggaagctgtgttcaaacagctagcaaggggcagctctgctggatgtggatctgagcagtcgggctcggttgtctgtttgcaatcctaatgtgttctccatactgcctcttgctattttttgaataaatgaatgtatgttgaggcttactagttttaagctgccttttagcataatttgtagtgtcctgaagtttaaatgatgtcatgataactaattattttttaatattccagggaataataagtcacaaagggaggagctggactccatcctcttcctttttgaagtaagttttgatgagtttatttagcttttataattcttgttggaaataaagtatttttgatctttaattttatttgaagacaaataaaaatggctgttggtggacatatatttttttctttccttccttcctcccaccctcccacttttacaaactgtgctacaaataattttctcgtgattttctttttttgcaagcatgtgtgatagtttttcctgtatgggtacctagatgtgaaattattagatggaggagtacacacatcttaaatagtagcagatattgctgaattgctctccaaaaggtcatatattcacactgagaaactgccctgtaaaaaataaaaaaatttaaaaacccaaaaatgttatataaactgatatgtaagtcttatgtaaatttcctatactctaacattagagatgattcgtctcatatatataaatacatatatatataaatctgacatgcaaaaactttttttgatatatat

SEQ ID NO: 100242 - DNA, 1477 bp, Homo sapiens
atttaaaggatttaccatatagattcttagtagatttgtttctgagttcattctgaatcctcaattcagggttttagccttaattttcagaaaagtgatgtttcataaccattttatgtcttttatgttgttttagaaactgaagccacagctattttaaaaatagttgtaatctctttttttttttgagatggagtcttggtttgtcacgcaggctggagttcagtggtgcaatttcgcctcactgcaacctctgcctcctgggttgaagtgattctcatgcctcagccacctgagtagctgggatcacaggcttgtgccaccatgcctggctaatttttgtgtttttagtagagacaaggttttgccacgttggctatgctggtcttgaaatcctcgcctccagtgattagtccgcctcggcctcccaaactgctgggattacaggcctgagccaccatgcctggacaaagtagtaatcaaattttgatattacaattatggttaagttaaaaaaatcccttttgataaagttcaggagcccatggatattgtgtttgatttcaggtgatgacacatattcattgaaccttaaccatgcctgaaagtacaagcatggtacttgtgacattgcttgtgcctgactatgagagccataagaatgtgctgcttctcctgttgtggggagcatgattgactgatggccccagctgctgctccctgaatctaccaattttgagccaaagcttagtttcccttgggaagctcttagcccattactgagcactgcaggagtattaatgctgcctgttcctgcacacttcagatgcctctgaagggccactttggcttgaggacttcctattggcctaagaccttctcagacctatgttgaagtctgacacttcctactcaaccttccttcattccccttctccttcccaggggtcagacctgcatcgtggtctaaatcctctccctgccttcaccagctccttctcatttatccttcatgggcatttaccccaataaatctcttgcatgtctaatcctgtcttggcctctacttctcagagaacccacactaatctaccatccatttcctggatggtgttgtccatcctgccatctacagtttttccaggagacattgccaacactttttatcttccatgtgggctttcttcatcctcttgccctgaatgtatctcttctcagaattcccacagcactttgtagcttttgtttggtattaatggcctttggctttgcaccatgcttcttttcttttctttctttctttctttttttttttttattgagatggagtcttgctctgtcgcccaggctagagtgcagtggtgcgatcttggctcactgcaacctctgcctcccaggttcaagcgattctcctgcctcagcctcccgagtagctaggattacaaacacctgccgccgcgcctggctaatttttgta

SEQ ID NO: 100243 - DNA, 1971 bp, Homo sapiens
tcccagctcctcgggaggctgaggctggaggatcacttgggcccagaaggtcaaggctacagtgaaccttgatcatgccactgcactccagcttaggtgacagagcaagaccctgtatcaacaacaacaaaaatcaagtcacaaacattgttttaaagactgtgtgagtgcatgcctgatataagtaagtctgtgtttggatgttaataaggcacaagcccaggatttatggtttggtaggagaaatagccatgtaaacaatgaaatttaccgtgagggttttgagtggcacagaggagtgtggtggaaccatagaggtgggcacaggtgcagaggaggaacagcagcaaagcctcctggagacaccagccagtgcttctttagggagcttaggtctgaggtaggttttgaataatggataaaggattttaccagatggacaagttggggatgagggttctgtagagagaggagcttgtgcaaaggtaatggtgtgtagcaccatggagttaagtgcacaatggcttttatcctgtggcgtaagtagatgttgggactccagtgaagggttttaagcagaagaggagccacatcctatctcttcccatttagtgtctgagaatcccattctcctctgagatttgaaacatagatgctgggagagagagagctcccttcctttggattgcaagccctgaagatatagtctgggctgctggcatttgtttttcccaccatgtggggagcatgtgccttaaattgaatcctactctcagagggaatgacaatagagaggtggagagtgagaggaagcccatgagtcctgagtttggccatgtctttgccaggaccttcttgagctgctcagttgcaggaactggtaacatgttaactagcttgagtcatatttctgggtcttggagttgaaagagtacctaacatggaggtgtttgtgtatatggagatttgacttttatatttttttagaactggaggaatttgagtttatataggagaagtagctaatgaagagcaaaactgaagaaacgggggataataatgcagaacggtgtgatctgcagtgagactgagagcctggggtgggagatcaggcttaacaagagggacacctcttcctctaaggccacttgaaagaagcaggaatggggtgctagatgatggggacatggagggagttctcacaccatggcttctgtaccctctgtgaaggtagcaggtgaagtcatttgctgagccagttttcttactcatgtggtgataggaacttgaatatgtcttgctccctcttctgtgccacataacctcttaaaaaaaggacatctgttatctggaaggctttgttttttttccttagggagtgactgaaaaatgcatttaacgtttatgttaaatattcatcaagaaggcggaaaatctatatagaatgaggccagtttaagtagcacagatgttgtgtgcccttccactcaatgaacatgtgccctagagtggacctaaggtgggacataggaacccgccatgtcgtccatagtcttctttcctttatgcctttcattgtgagaacatccccctgctgggtatgactccagagttaaaggatcattttaattttttctacttttgcctttcttgtgacttaaccgcatataaaatgtaactctgttgatatctcatgttcatgtaccagtttacacttttgcaaaatgtcttctcatagtctcatttaatcaaattactaccttaagcaatcagttcatattaattataaaagaaatttattaaatatctatttgtgaatgtattttaggtggtctctaatacaggttatctttacatagttaaagcctcctggatgtgtcaatacaaatagcattttcaggtgagaggatccagaatccgctagcaaaatctagcaattgagaatttgataaagttaaaataggaatttta

SEQ ID NO: 100244 - DNA, 1100 bp, Homo sapiens
aaggccatgttatgcttctgctagttatctgattcaaaaggaaatttacatatcagaaaatgtatttatctagtagaatgaatgataacatagaaacaaaatcacaacagtttttgcatgcctcccagaaatgttgctgtgatattggcctctctctttctggtccatttttctgcatttttctagggagacttgggattatcatatttgatttgagcatgggcagacgataaacaatctcctccggtgttttagtgttcattgccttccctgtaaccttggcaggcctagcaggtgataaatatttgcgtggacattaatgccacgtggacattctacaactagaacaaagctgggaggtgtaatttcaaactcttcaggcagtcttagtatggtctctctctgttgaccttatttggtacaaagtgattttgtcgtaatgcttcctttgctgttttttcatcaattacatttataacctctagaatgtaaatggaactttggacacgtatatgtagcacaaatacaccatccatccctctaaggcttgaggttgtctagacttctgatgtgagaaaagtgaacacagggtaaatgtccaaactcgtttaagataactgaaaaaggttggcttccatcttttactctgagaagggagataattggtaggtctagaatattttgctgtaaacttttataatttggatttttattttgtaagtactttatttgtggacaggcataatacttttactaggtatgtagagtactgatttttggttaccaaacggggtatcaatataaaactatagagaattttttatttagaaaaaaccttggcggggtgcggtggctcacgcctataatcccaacactttgggaggccgaggtgggcagatcacgaggtcaggagttgaaggccagcctggccaacatggtgaaacaccgtctctagtaaaaatacaaaaattagccaggggtggttgcgcgtgcctgtaatcccagctgctcgggaggctgaggcaggagaactgcttgaatctgggaggtggaggttgcagtgagcagagatcgcaccactgcactccagcctaggcaac

SEQ ID NO: 100245 - DNA, 1056 bp, Homo sapiens
gcctttctaccagaatggctgttaaaatgggattcttatgacatttcctgaaaggactcaatagtcttttacttacatctctctcttttttttttttttttttttttttaagatggagtcttgctctgtcgcgcagtctggagtgcagtggcaccatcttagctcactgcaacctctgcctcctgggttcaagtgattctcctgcctcagcctcctgagtacccgggattacaggcatgcgccaccacgcccagctaatttttgtatttttgtagagatgtggtctcgcgatgttggccaggctggtctctaactcctgacctcaggtgatccgcccgtgtcagcctcccaaagtgctgggattacaggcatgagccaccaagcctggccttttacttacatctaagtagccattttgccaaggacagggagtcaaagatgaatgtgtttttaaaaatcatatgaccctcattttaatttaaaccatctagaaaccaagatttcaagatgaacataaaaaaattaatgtaaactgcctttaaattgaagatttttccccccactgggttacaataaagttcccataagtctctggagtatagcaaaaaaacagcgaggttgtcagcgagggggagaactagaaactagaatgagctggttgagtcctcatgagccatcgaagtccaaagtttaggaattcagaggccatcggggtgactgcagtctctcaccccgtgcgcaatgcaggacgaccacgctgctccgctgggcggctctttctaaacctaagaacccagcatacgacgtggctctcttgattcccttatcagaagtccttctgcatggacaactgaaaggcctttaaattcaaaagctcttcaaggttagtaagtaaacctggcctgtcttaccccaaaagcccgatcgctgcgaaggggagatttttattttctggtccacaccgccatctgctggcctcgccatctctaagtgaagcactcgctgtattttcttccaggaaatccagtagatcgtttagacttcattctaaaatcc

SEQ ID NO: 100246 - DNA, 1049 bp, Homo sapiens
agagtaattaattctcagcattcacaccagcaaaacgataaacaagagggaaaacatcccccaactctggaagaggtggtgtagatgtgaatctgcaaaccaacttaaaaatatatatacctagtttgaaattagtctttggaagaaatgtaattcccaaattaagtcttttgccaccttagcataaaccaaggctagtttttagcggaagaccagttcctctgggcaagagctgtgaatttcaataagttggcaagccaagttttctacacaaatcagagattaaatcaagttgttttccctttttaaaatataaagtataaacaaataccaaactggggcatgttccaaatcctctgcagctaaattgcatttaacttttccaccagaaaatgtgatcaatttagtaagccaataagtacataaatactacccccgcttatgttttatcgcagaatatcattgataatattaaatgtgtccaagaccgctcatgagttattttctcttctgttaatctgttgtctgcatttttctactctgtccactaacacacaaagagatgggtatcaaaactcaacacacacacatactgctaggtgaaattcatacatcctaaagaagctagtgcagagggggaaatgccataatatggatgtgatattttttcataagccaacggtgaaaaatatattgactatctttatccaggcagttcatgcctacgtatgctctgcagtgacaaggacatttgttgtcagggactgagagatggctttcaatgccaggagctttttctggtaaaagtgggccattggctaaaaaattgtatctgaagactttgttttaaaactggagattttgaacataacctgaattatccagacaacatggtttggtgaacttggcaatcgtgtacttcaagattacatgagaagcttttgaaaaaaattaaaacataaggttttattgagtagagtcaccaaaaatgggaaaaaataattcctttcactcatttgcctattttcttcattgtactgtttttgcat

SEQ ID NO: 100247 - DNA, 1034 bp, Homo sapiens
tcaataatcatgctttgtttgacctcctttcatttctggaaaaaaaaaaaaaccccacctaattgtttatacacagtatgtttaactcacatctcttttggtgttgcaggttgcagtgcacgaggggattaactcaggaacagccatgtcaagaggattgtatcaaccagcaacaatctttatgggccgccaaatgtcagccatcttaagcatgagagatttcagtacagagcacaaatctccccagcccacaaagaacttttcaattcctgacccacattcacaccgacagacagcccagagcagtaatgtgacagacagctgtgtagtacaaactagtaatgacacacagtgcttaaataagtctgacaacatagatggaaaggcatctcttcagattggtgagaaaatgccagtcacagccagtgtattgtctgaggaggaacaaactcattgcttggagataggaagtaacacacgtcatggcaagagtaatttatctgaaggcaaaaagtctgctgaactcaattccccgttacgggaaagattaagtccagagaacagaaccactgatttaaagtgtgacagttccagcggatcagagggagaaatactgacacgggaacatattgaagttgaggaaaaaagagccagcccgccagtctctccgataccagtttcagaatactgtgaatctgaaaataagtggtctcaagagaagcattctccttgggaaggtgtttcaggtgggatgagaggctgagtttggttgctgatttttctgggtggtagtgatcttatgtaaggacaaaatatactaattatctctctttcataaaatagtatctttgccaacaaattccattctaatgaactcttaaatatgtacatgggagtgaatttgctgatttttaaacccactgtgatttttttaaacatttgaaaacgtgtttaagcttttaagttccgtaatgaattgtgtgtgggttgcttctccatgtttttaactgatgagtaattctgctgtgtgttac

SEQ ID NO: 100248 - DNA, 1099 bp, Homo sapiens
cacttgaatcttgtgtgcctgttattattccttcccagcataaaggtacacttcagagtagggctaagcctgagtctgcagttgtcactcaccctccaatagatggaccacatctccttcatccttatcacatcaggcacatagccatcaactaggtccagtaacttcaccaactgtagtgctatttacaaattagtaccttgcaaattaacatattgctttataagttgctttgtaactaatcttcattttctttttggggtgtgtgttgaatattcccaactacaaatgtgaacagctcctttaaagtagaaacactgttttgtcttctcctatagctttttagaatcatgcatccctcaaaatagtcattttttaaaagatggtaactaatctatttgaaggctactgtgatacaacgacagacctaacctaaaacagtgaccaaatttttagactcttatcacttactcagtagactggatatagataataaaagataaatccctctttccatgccttcctattctgattaagaataaagaaaatttgactgcaataggatctgaatggaaaactaatagtcatttttctacattcagaaatagaggatgtaacctatacttcagccagaagttttcaatttcttagcagtgacaatttaagtaaatttcatacgagttgtggggatctaactttgttatgattgacaatataaaattagccttttctgctgttaagattatctagcatacctgtcattcaggtggaatgtggaacgagattgcccagctgtggatttgaacatcattaaagtcaacaaagggttaaaagttacttcctctgatggatttaaaattgccgcatacacgcaaacaagtttttcaaactgccccattttatgtctttgttgagagacagtatagttgctgcattttaatgtccagattatattacagatatatttcagtaaaccatgaagaaccatcatagattctagaagctggtgatctgtgcttaaataagcatctcctgcagcatcttttttattttataggctctgtaatcacaatggcattctgaaagaagaccttgaagc

SEQ ID NO: 100249 - DNA, 1053 bp, Homo sapiens
gaccagcctgggcaacatgatgaaagccagtctcatgatccaatgagactaaataaataaatagattaaaattttaaagtaaaatgtttaaaaagtccactggccaagccataccccagaccatttttcctggactctgtagaggtggccccaggcacccagattgtgcagagctccccaggttgttctgtgtgcagcaaaagttgagaatgctcatttagcaatgaaataaccaaagtttttaaaagtttaaaaaaaaggatacttggactcaaaactcccttagaccagaatatgttgagttccagacttctggataaaccatcttctactaacgtaattgaggcctttaaaaatgtgggaatcttataatattacaaatctatagtgagtgtcctgtttctgttttatagacctggacaaacaccagactcagacgtaccgaggcacaggtgggtcagcatgttgccaccttgaaagaacatgataattctgtcaaagaagaggtaggtagctaaactgtctgaagttttcccaatcacaaatgtggaccacagggtaaggttagtaatttttatttaaaaaaaaaaaaaaaaagttttggccaggcgccgtggctcacgcctgtaatcccagcacttttggatgctgaggcaggtggatcacgcggtcaagagatcgagaccattctggccaacatgatgaaaccccgtctctattaaaagtacaaaaattagctggatgtggtggtgcgcacctgtagtcccagctacttgggaggccgaggcaggagaattgcttgaacccaggatgcagaggttgcagtgagccgagatcacgccactgcactccagcctggtgacaccatctcaaaaaaaaaaaaagtctcaagatgtgcagattattcatttgaggaaatgttatgtatttgaaaaaaataacgataagaaaagtagtaagtgaggttttgtggttggttggtttttaactttctgaccttgggccttttgcataatgttttatgtaggaatttattttccaagaaatttcaaa

SEQ ID NO: 100250 - DNA, 1153 bp, Homo sapiens
aaactaaggtggaaaatcaccgtgtctattgaattcttcatcaccatgttatatatttacacctgtaacatcctccatcatgtgccctttcagcacctgcgtctctgtaaaaaggtccatctccctggggaacacccggtcattacacagcaaactatagatgtttctgattttactgttttctttcctgtagtaattgcatatgtatattaaaataagcagataataaaaaaatgtcagataggaagcttgcgtttgcctcagttacaaagcctgtctgataatttaaaaattgtaccaatcgggcttcatcaagacctattaagatttctgcacatgtattaggcttgtttaggtggaatctgaacgatatcattatttttttctttttagaataagaacagcagcaattagtattctgtacagagttctacttgtcatacatctgaatttactagtaccttattttgtgaagtggtgtactacttcattataaattcaaaggtctgactttaaatatttacacaagtaaatacaccattgcaccaaggtactgaggcatgcatctgcatatgtggtagttttgttgtttataagcagaaaagaatggcttgcttttatggcagtgcagttcctggcatgattaattttttaaactcatgtttctgtgatgaactctggttttgaaaaagcagtttatggtagagcagttattgtatatattatgcattcagataatatttcactctaaaatgcagagtttttttattttaaacattttcaccaatgatatgtttattgtgtttttagtctgcattttctgcaaactctggtatggctccctgctatttttattaatagaaatgtagatgatcccaaactacagataaccatgaagtcatttggatacttttctcttgcatttacttttggatgcagaagtatctaatggcctctgaatttatttcaattaaaattacaaaggattattgaggagaaaccaggaaatgaccttgttcattcattcttctcttttcagtattctttacaatcatcccttgctgggagtagttgactctccccaaagttaatgcaaatgtattttctcatatactttctttataagaaaacggataattaagtaccagggttt

SEQ ID NO: 100251 - DNA, 1019 bp, Homo sapiens
cataaatgccaagagaaattctccccagcggttcatggtagaatcccatgtagagttttagaacatacccatgccccagccacacccttgtgcaattatttctgaacctctgggagtggcacccaggcataagtactttataacacatccagataacttcttaggtttgagaactgtggagcaggggtctcagttcaaaagagcccttgtaggtcctgttttgaagcaccctcattttacacaggagactcagagacaaaatcaggctttaaatattttaataaaatgaggggttggagtgtattattttcctagggctgttgtaacaaagtatcacaaacttaaaacaacagaaatgcattctctcacagttctgagagctagaagtctgaaatccaggcgtcagcagggcccttgcctctgaaggtgctagccagtggctcctggcttgtgggagtataagccctgtctctgcctctgtcttcacttggccttctcttctgtgtctctgtgtctgctcttcttcttagaagaacatcagaaattggatttaggggccactgtaaatgcagaatgatttcatctagggaaccttaactaatatatctgtaaagaacctatttccaaataaggtcacgttctgaggttctgggaggacatgagtttgtcgggttgaggggaacaacattattcaaccaactacagggaatgaggaaggacttcttcatattttacatttttagcatccagttcatcttctacagtaattattcctgaacctactataaataatggtaaagataagattgccatttctaatttctctcattaaataaatcattgagtacaaatggctaaaatatactgttttttaaaaagctatttaaatcaataaaatacagctttctgatgaagattactcaagttttgaaaagttaaaggtttcctgaggttgagagttgaaaatccacctctcacgactgaacagtgttaaatggcaagacgcaaaagtgtttcag

SEQ ID NO: 100252 - DNA, 1039 bp, Homo sapiens
tatctgcataagggtgtgagagagagagagagagagtgtgtgtgtgtgtgagagggtgtgagtgtgtgagagagtgtgtgtgtgtgtgaatgtgtgtgtggacacatacattttcaaagggagactggtaatgactgtgaatatgccctctgctcatgcatccccagtttcaggaagcaggacctgggtgaacacacttgcagagagcctcactggggttctttcctggctgctgtcttgtctgctgatggaaaggtgtctggcttcgggccctgaccttgatgagagctcttggcacatgctggaggcctggaatgtcatcccacagttccactgtcatcagttctcagccaaccccactgttgccttttcagccaatttcatggtgtttattctggtgtcagtctcctcaccggagcgtgggcacctcaagggcatcgagcgagtctgtcttgtttgctgctgcagccccagcacagagtccgatgccttgctctgcccctgctcttggaaggcctggctgaggcagtttccctgtctcttcccatttcaagggcacccactcatcaggttcctcgaggaagaaacttcacgcatctcaggcctgccttccctccatctgtccccaaacctcccattccttgacccctgtgcctaagtactcatcacttccacttagaacccacggctgcacatcagcaaactgagtacatgcttttgttgatccaaatgtgctgacagtgcagtggcactgcttactgaagtctgctgtctgcaggctgtcacacaggattgtctgtaaatttatcagaacacttccaggaaggcattactgtccccattctacagacaagaaaactggtgcttggagaggtagggaacttgcccaggatcatgcagtgagcagagtctttctggccccagagctgattctgtctcagcttctgaaagcagctcacatagccaggcacatgctgtggcagggttctccctgccctactgttttactgcttctcaggaggccctgtggggcgggtgt

SEQ ID NO: 100253 - DNA, 1021 bp, Homo sapiens
atgatgtggaccaaagtcctgtctcagggtaaccatctctgcttattcctctgccacgtctttcccttctcctctctgctctcataaagaagaatgggagatgaaagtggaggggcagctgaggtggggcggcatcaggctgatacaacaccccagggaaccctgcttccatgtaaccctgaccttaaatccctatcctataataaagagttgggcacaacagaagggaaaaggaagtattctgcaaattgttttccataacagtgcagaggacacactttgcaatgtgtaatttgtgcagtatgacatgcatttgggtgtgtctggtcaggtacatcatgtggtgtccctgttatgcattttgcagactgacactctgcttaaccagtccttccgtgctgtgctgttttgtaagctcttaaccagaatgcaaaaatgttaaataactgtctggttttattttccagccctctgggatgagtctgatgacagtaactcagaaattgaggctgctttacgccccagaaaccataacaccgatgattctgatgatttttatgactaacgtgctgtgacattggtttcaaataaagtctttaaacaaactaaaatcctgtgttaatatgtgatgtccaaaataaatatgttcttttaagttttctcactgttttatgggaaaacttaggactacattgctattcaagtgaaattttatgacataaatatgaacttgcatattcatttttaagttcatcatgaagcaaagtgatgaatgcaatgcccatcaaaattcaaggtggtttctatgttagaaattagccagctgatcttaaattcatatggaaattcaagaggcccagaatagccaaaacaatcttgcaaaagaaatacagttgggaggccgaggcgggtggatcacttgaggtcaggagttcaagaccagcctggccaacatggtgaaaccccatctctactaaaaatacaaaaattagctgggcgtggtagcatgcacctataatca

SEQ ID NO: 100254 - DNA, 1793 bp, Homo sapiens
atagggttccgaactcgcaggagggtcgctcctcccctactcgctttttcccggcaccggaaggccccgcccactgctttgtttcctctccagaccgcgcattttgggtctcggaagaggttcagaggctgttgttgagcaatgcatgccaggtcagctgagctagcgggttatggatgcacggattcggaggccagctttttgacaaccttgtaaaggaatccctggcggcgaccttttcgttgtttaccaattgtgccggaaaggttttctcctagtgttcaggaccatttgttgttctggttagattggacgctgaaagcagtatgtcaggtccaggatgagcgctatagaattctgagaagttacccttctctgtgtgccctgactactgaacggggtgggtgcttgttgaaaatttcaagattactggatgtacttgagcagtacaatttttgttgttagttaatacgtaagtagatttttggccattattgagttttgtttttattgttttcgtcattccatgcggattcgattttgtgctcttaattagaatttctggattggaaacgttcagaggcacatcacgcgtacctcactccttagtttttgaaggcagtgcttgcctgtcactgtgaacttatttctgcttttttttttttttttaactttcttggcttctatccaaggaggaaccaaaagccttgtcttagtgacattcccactatttcttgtttttttcaaaaagcaactgctaaattgaatacttgtttcctttgtaaaattttaatcgaactttattgaactttacttgcacgtgggttaaacaaaaagcaacagttcttgctctaccccttctcatcccatttctccacctttaactgttttggttctgtctctaagtatcatacttatacgttatcacttttagatctgttgaattctagctggaataggagaggatttagtcacctattcagccctccctctatactcttaatggagtaaatcactagatatatatttttattggtaagctttataactaagtaatttgcctttttcattccatcgcctgtgtaacgtatcccttgactcaatgctttctaaggtcgatcttagcttttcttccctttcacctcaagtttgtcagctgtacttttgcgttgtgggcatccaaaattaaatgatcagggctttgactatacagatttaaaatgctgaaaaatcagataggatagttgactattgacactgtgtagattcaggttatgtactgtgattttgttttttgtgctgcttttgtctttttccctggggctgtctttctttttccactttacatcttgccgcgcccggactctattttaccaggtagtctatcaagagtcatctttcttcttgaatagtccttcttggggtcttatttatttttgttgctgtcacacctggctattctgtaggcttgctggaaagctgcatctgggattttattattattattgctatcatatctttcttcagtgggaggtactgttttctggatcatcatcttacttcatttgtttatttatttagagacggagtctcgctatgtctcttaggctggagtacggtggcatgatctcggctcactacaacctctggcctcctgggttcaagccattcttctgccacagcgtccagagcagctaggactacaggtgtgcgccgccacgcccagctgatttttttttagtagagacggagttttgccatgttggtcaggctggtctcgaactcctgacctc

SEQ ID NO: 100255 - DNA, 1509 bp, Homo sapiens
actgaattcatggacaatcttgctaaatgccttcgctattacatagctgatcgtttaaataatgaccctgggtggaaaaatttgacagtaagtttcacattttgatacttcagaaagattagggtgatcattcgaggctgtactttgatatgactgacattatttatccttctgccctgccccataaaatgctagttgactgttggaagaaagaaaagcttccagggtttttggagatggggtatccttgcatggttaggttttagatagctgaattttctcttaaagccaattttgtcctcttaccatcactatgaagctataaaatgggattcataatttaaaaaatatatataggaaagtaatttttaaatggaaatttccattattacatatcaatatacagcaaaattagtaagttgtggggctgtcttaaatggctgtgttcccaaatatttaaataatatgtaaatgaacttgtttgtaattttaggttcataagctggcttccctattaatgagaaatggtaaattatattttatagatatgtgttattgattattcttggggcatatatggttcagcactatatccttgcatagtagtgaaaataggagcttgtgaatgatcagtttttctgatggctaggtctgacccagacatttcattcctttccattacatgtagtaagtcaatcaatgaagtggttttggtgtctctcacacacacacaccccttctttattcagaaaattttcagtgaagtagttttggtgtttttcacacacacacacacacacacacacacacacacacacacccttattcagaaaattttcccgtaacacttatctcagtttttcttgagacatataattcttttgatttttgtgcctatagaaaattggggataatctgaaagtgttaacaatttttttataggttattttatctgatgctagtgctcctggtgaaggagaacataaaatcatggattacattagaaggcaaagaggtaaagcttacttaccaatatttgattatatgttctatttttaaaaagccattgcatagaaaatacttggtatgaagtgatattcttgtggtatataatatattaatataaatacatgtttctctcttgtttagcccagcctaaccatgacccaaatactcatcattgtttatgtggagcagatggtaagtttcttctttgggatttgcttcttttggattaaaccatagcaagttgatgggttggtgtgcagtaatggattattcatggttacctggaagttccaaaatgccttggttattttatgttcgacagggaactagtattgagttgctgtttaatctgtggtcaatgatctttaatttcttttcttctttcttacatttttcaaccttttaactccccatacctttaaaatggagaatttcccaagtgtttaatccttagtggcagtctatgttgtaggtccacgtatctagaggacttcctgttaa

SEQ ID NO: 100256 - DNA, 1443 bp, Homo sapiens
taaaatggattgtgcgttagaaaaagccttaaaatttgcttggttggaaaaaattactggacgtagagtagacttgtttcatcttcattcctgttcttgcagcatgatgaacttgccgatagtcttccttgtgcagaaggagagtttatcttccttcggcttaatgttcttcgtgaggtatgtagcaataatcattgaaatcagcactctaaagcagggtgcctttgatagctgtaatggcagcattcctttttggttgtagtatttggaaagagaactcacaatggccagcctaccattcacatttgatgttgagaggagcattgatgactgggttttcatgtgcttctttgtgggaaatgacttcctccctcatttgccatcgttagagattaggtatgtgcatttgtgtagcttttcaaacgactgttttaggcttcttgactttactgtgcctactggtcctaatgcataatgtttgtctcttgctgacagggaaaatgcaattgaccgtttggttaacatatacaaaaatgtggtacacaaaactggggtaagttcattcttgaatgatttcaaaacagaagtatttgcttttataagaagatcattttacatatattttatcacttacagggttaccttacagaaagtggttatgtcaatctgcaaagagtacagatgatcatgttagcagttggtgaagttgaggatagcatttttaaaaagagaaaggatgatgaggtaaagtgtttctattgcagtagctaaaattgctcctgtctctaataggctatgatgatcctgtgattacttttaatctctttgagtgtgtttttatatcattatggtgtgtcaacactaatgtaatcatgagtggtcagtgctttgattattttataaaggttgtgctgcttgctctgtggaactatgtattgtaccctgtttgagttgcattgtaatgttttttctgtcttcataatctgaatataaatccaaacacatttctaatcaataggatttgaaatgcgggtaccaaggctggaagtctattgggattgaactagtggctgtcatgttttgaaggcaggaagacaggttaagaagaattgacaatgtagggagtgtgggttggattatatcagccagggcagagggttgggagaatgtaggatctgtggagagctgaatctcttaaaaaattgaaacacaagaaggaaataaaatagcaaagcatttgaaaattgattgcatattatggatgagcgcttacatgaaaagtccaggttctggcttgggcagttaggaatttgctggtgccatttactaagatagcaagcactaggggtggaatgggttggggtggggacaaagtaaaaactgagtttcattttggagatgtttaatgtgagggggctgtaggacacctgagaggagaaaagt

SEQ ID NO: 100257 - DNA, 1199 bp, Homo sapiens
gatacttgaaactatgagtgtactatgagtgtgaccctgggagcttgtgtggagtaaaagtacctttaatagaagcctagggaaccacggacatttaaagagaaagaggagccagttatagagaggtagaaggaaattcctgaagagatgggaagccatgctcaaggggtcacagtgagatggacaggcacttcgtccgtggacagggtttgggatccactggtgagctgataggagtggaggagcagcagcctggaggcagagtgattggagggtgattgcagggtgtagcaagggaggccagcagtgggcaaaataagcaggtaatagcttcttagaaacagcaaggaaatcctttcagaaactgattttataaaagtcatgtggctattttaagcagataacaacatatattactgctacattgcttcatgatctcccagcacattaaaatgtgtcattgaatcttattttctgttttcatcaactttgtatactgtagctagtgatctcttatttttaaaactttgggtgtcattttatgtaacatagtgggttgactgtaagcattctttccaaaagccttcagtacttggtaatgtttttatgtgatgtcaagagttttttgcatatagaattcaaattacagaactagctttgtctggaagatcagatgtcaattggaacatttttaactactttttcaacaattatggtggcatcccttgatctgctgctacatactttgtaccacttggtttaaaaaccttgagttacagtagcttctactgtctctttagccgactctgcaccttgagttggcattagaggaggaagtatgggatttggtagacaccatagtgttacagatttaattaatacgatttttcagctgacctggcaggagagggcattttaaagctttggatctttgttggtgttcctgaagtcatgccatgtccttcagcatgattggacaccaggggaaaccctcaaaaacgcaataggaaagtttccagatatatgtatttttctgggaagtatgtccctggcatttgacagatttccaaaggagttcatagcacaaaaaagggagagatccataaggtccacccaggtggtcttctgtttgtgcgtgactaccacccttagagataggcatttaacagaccagcagaacaaatgatagaaaaggaata

SEQ ID NO: 100258 - DNA, 1452 bp, Homo sapiens
ctactaaaaatacaaaaatttaagctgggcgtggtggtgggcgcctataatcccagccgcttgggaggctgaggcaggagaattgcttgaacccaagaggtggaggctgcagtgagctgggatcatgctactgcactccagccagggcgacagagcaagtctcttgtctccaaagaaaaaaaaattgttattgaagttgagcatttaggcaagaaatgtgttgctttttattgtatgagctttcatgtttaccttttaacttgggaatgttgttcatttattaagcaaatatttaagtatttaccatgtgccagacagtgttctgagtgctagtgatacagcaaaaaacaaaaaaggagacagaaatccctgccctcatggagtttacattctcttgggagagctggaagataaacacagtaactaagtaaacctcattaagtgttagagaataagtgccacaaagaaaactaaagcaggtgaggaggcatctgggaagggagaggttgggcattacagttctagaaaaggtgacgagagatggcctcactgacagctgaccttgattaaagttgtaaaggatgtgagggagcacactgcagatgttttcaggaagcacattacagacagagggaatcaccagtgccaaggccctggggcaggaacatactcaggatgttcacagaacacaaaggagccagtgtggaaggagcagaggaggcaaaggaagagcagtaggagatgaactcagaaagaagacggagggcccagtctggtaggacccaacaggtcatcataggactgttaactttcattgtgcatcagtgtaaggttttgagtagaaaagtgacaagatttgacacatactgtaaaaggatcactctagctgccatgttggaagtactgtgtggagggaaaggtcaaagcagtgagccccaggccagtgaggagccttttttacagtaatccaagggagcctggatggtagcagtggagatcatcagaggcagttggattctgaacatgttttgaaggtagaaccagtgggattggcaaatggattaaacatagagtgtaagagaaggaaaggtgacacaagactgaaagatgttttgagcaaccctcatggaaagactgggaggtgcaaaggtgggttggggattctatttcagacatgtgaagtttgagatagccaaatggagatgctaagtatggagaggctctggttggggagtcatcagcatgtagatggtgttcaaagccatgagaccaggtgatgactcccatgggaggagagaagtggagagatccaagtactgggcccaggggagcaccaacattaactcatttctgcccagtgttccattattggaacgataagcttgtgggagttatttatatcctactgctaaaggtcatcaccaaggtttgatttttcacacaaaaaacttg

SEQ ID NO: 100259 - DNA, 1068 bp, Homo sapiens
tcctgtgaattaaattggcccagagtagtaagccgtgcatacacctcaatttccttcctttttttccatcggattgatatttttggaatctggccagggtgagggataatgtttgcgtagagtcccacttctctcttttctccattgtgccatgcatgctatagaataagagccctttttagataacagagtctaattaaattgtcttgctgatttttttaaaaatggataccttagttattaactaccttcaactaaaccttaagaattgttgagttgtttattttattttattttattttttaacttacttgtatcttctccatattgacagcctgtttgctccaggataaaaccaagggtctttgtaatggctttgcattttcctaaaatgattcaaaagctttctgaacagaattaccaagatcaattgaattgtatctaaattcagtcttccattgttaagttctgataagcagcattttgaacatatagtcttattgcctggtttaatcatgtacctagatttctggggtcgtcctttaaaacttaagttgtctcccaaatcattcctggtaatgcttaactctgacatttttgtgtaattatttgacagaatatgtggattttatacttttaggacagttttagaagacgacagaaagaaaaaagaaagagaatgaaggtgagttttaattaatttcatgagattggcaatagcgtaattttacaatttatgaggaagatgttcattacagtagctttattccttgtccagtaggacttagtcagggacgtaagtgtccacccagttacctttttacctgtagaaagaacactggtgtcgatttaaagaaggtcctctaggctctgatgtctgaagggatacacttgggaggtgagaggtgggtggcagttagctatttgaatggtttacagcaatcaagtattgttttttaagtaaaaatggtcaatattttgtatccccttgaaagttactgtactcttatttctacctctttgtcagattaatctttctagaacacaacactctaaacttgtttctct

SEQ ID NO: 100260 - DNA, 1146 bp, Homo sapiens
tttatatcttgttagtaattaattttgttaaagtttgctttttacacaacttctctgtagacagttaatgggaatgtcactctcataatttaatacaaatggattagtgtagggttgaaaaaacaatagtgattacttactgaatggttaactaccatgtaccatgtaggcagcatgccagtaatctttcacatgtattgatgcatttaatccttgcaataacttgtaaggaaacagaacgttatcatccccattttaagatgaggctcacagaggttaagtaataaattgttcaaggccacacagccagtaaaggttgaatttggtatttcagactcagatctgtatgactaaaatacaacaatacctgcctcgttttccaagtacaacagtgccttcctgtatttatttttattgggtttttttttgacaatattgtctgtaccttttcattaataacattgacattatgtttttaaaagagatgtgctctaagttctatgtgaaatatgatttcgtattattttaacttttcttgacctgtggtatgaactgtgtttatgctgtggatactctaattattatatcattcaaatggccttctgtgctctcagtttaaaaaaaattcagtttacttgaaatagctaatatactgtgagtaacagaagaaaaacttgactgtggaaatgtttctgccccttatgtttttggtgatgtggtcctttagcttgagtaactaaagttgcagaacattttcttttaatttttaaatattaaaatatgttagggttatattaaaatatgttaattaaaattaacgtattatgttaattgagttaggtacaaagggaagataatactgaatttaaagtgacagctaagtctttgaaataccaataaaatctgcatttttctaagatgactaatagatttttatttgttgattgatttttaaaactgaacatataaagtaatttaagttatctaacacagtcttattaaacttgcttttcagagtggttgtactaggttgaagacttaaccatttagctgcattctcaccagcattgactattttatatattattacatctatattattatatattatatgctatatatgtaatgcattttatatatcacata

SEQ ID NO: 100261 - DNA, 2633 bp, Homo sapiens
tgattgtcacaaatgattgtgaaccaccaaaggaaaataaaattcaagtactataatttttaaaaatctataaaattaaaactttttttttcttcagaaacttttttttttgccctaataatgttaattgtttttagtttaagcatagaaagtttgggtattacattacttcttttgaggggaagtgaaatggagcaagatcagtctctgtaccttctaaatatgtttaccatctctatgtagtagctttaaaaatgttactgtgaaacatggtaagtagtggtggttggatgtaccttcttatgtaaaatgaataatgaaatccttcttctgtaatgtcatcattgtctgcagagtccttcgatatctcctaatacgagtttcacatctgatggctccccgtctccattaggaggaattaagcgaaaagcagaagacagtgacagtgaacctgagccagaggataatgtcaggtgaagccattttttggtagcactttgttagcaaattgctgaaatagatgcagtctaattaatgctatttagcttagagcagcagtgccttcagatgcttgcctgtgatctttttatccatcagtaattaatgtggagggttagaatagtcagtaaattccagtgagatgtgtaagctgtagctgttaaacctaagtgtctagattagtatgcgtgcaggctttcgtcctccaatccacttttccctctgagaccaggcacaagatcggctagatatcatatctaggtgtttagctctgactatgtgatctgaatgttgctgtttggagactgattaaattttcaagctgcttaacctagaaagttcagttatacttagacacttaatatagtttgccttaatcttctctattgaaagagttcttcctcaaaatgaaatatgcagaaatcattctgttaagagatcaatatgtatgttttttaaaaaccacagacttgcatatgcgcaattatatttcatgacagaggagtttccctttaactgtatacttcaaatttaaaataggaagctgattctttaattcatcctgaagtttgagatcattatataataagattaacaacctctcatgtaattaaatccagatttgaaccgtgggctccaagtgcaaaaggccaacaatctcaataattgtagctcattaagaatttaggaaaacgatctatttcaaaggtaaacaagacagtagtcacctacagctcatgcttcttttacaggacatggaaagtgtgtgatttgtgtttatgattagaaactttgcaagggtcacgtgtggttctgcacatttttctaacattctttgatttcagatccatgtctacttgtgattgaacatttactctgtatatctttagtttctatcctctactttctgtactttgggttttcctcttacagcatgtctttggttttgtttactatgtagccatcatgatcaatactagtttaataggtaacttgatttgtttagtattttattgtttaatcctagaggaaattgtttaatcctagaggaaatcattgtttaatcctagaggaaatgcctctaccaagaaatgcttggggcttttagcattttttcattaaccttttctgtaaaatagtgataatccaccttatgaatgggggatatttctaattgttattctgtgactcctttgtgttgtgggaggggcagattaaaattgatatggtatattctgaaacatgactgcaattaatatgtgaaatctggcacatggaaaagaggcctaaatggagaatcatcttgatgttcttgatctgttctgatgtttgtaaagtgttatttggcttctttatgttccttaaatgttaaatcttagagaataagaaatggattcttaaaaaaaataatacattggatgaaaatgtggttggtcacattgtattttcagtgatgaatgataatttagtggattcattgacctgcttctagattttaccataacatacatatgtttgtgtgtgtgtatgtatacatagatatatagagatatagaatgtgtatgtctctctatatatatctctatctcctttccttaagccatcaacaactcttagctgaaagagggataaggcccaagcaaggatagagagagtaggtatacacataatttctgcctaatgtctagattattcttttataaactatttttttacatttaaaaaagttacctgtgtgcgtcttaagtaatttagttgactttctttgtatggtttaaatatattttaacaaactaaggaacttgaactatttaaaatatcttcaatatttgaatcttaaaatgtagctttagaattgtacaaagaaacatataaagtagtattaaaatttgagcaaatgtgttctgtatctttttcaataacatttttgaaaatgtggttttataatggtcttaccagaatcagtgattggggtgtgtttaactgtctttaagttgataataaatcctatgaaattagactttttagaaatagttaaatgaatctgtgttagcatgactgtttaactctttcacatttcccctgggtattaaatataaattgatttggggtataaattagtagacagcctgtta

SEQ ID NO: 100262 - DNA, 1469 bp, Homo sapiens
gagtataacttgcttttgttttctttttgctgtgtttactcacatgtttttatagtcaaaagaaacttgtcaggtgaaaatataatggtgaattttaaaatgaaactcatggctgttttactttcaactgctgttccaataatgtctctaaccaccttacatgctcagtaaatgtctgctgtgactgcttttggttttacttgatgatgacagctctagagatggaaagaaatgtcaccaaatgtattttaaggataaaaatcttaccaaattgtgtttgtgaatatgaagtttggcagtaactactgatttttcaaagatgctttgtagcatttttaaagtcaaagagccattgatatgaattagaaacttcaaacttaaggaatttttaggagtcatggaaaagatcagtatttggaatatatgccagaagtcatgtgttttataagtagaatattataggttaacagtctaatttttgttttttttaattgtgttcatcattaacataggtttttgattttgttgttacttttttaatgattctagggctgtgcttcctggaagtggtattatccatttcattatgcaccatttgcttcagactttgaaggcattgcagacatgccatctgattttgagaagggtacgaaaccggtaagcttaattacttaaagtcataaagtttatagaattctggattagataataatcttgggtctttaatgttttttcttttttcagtttaaaccactagaacaacttatgggggtatttccagctgcaagtggtaattttctacctccatcatggcggaagctcatgagtgatcctgtgagtctcagtattttgagtgtgtgggtgacaggatttttgtcacattttattcatatcagttacaattgcttttgcagctgatagttaaaacagtgaagtacagaaacagtatgttttttactccaaacacacatatatttcctgctttctttggccctgcacagtaaatcagtttgttttggggagaaatttttttgtttagtttttgatttttttgtttgtttgtttgtaagacggagtcttgcactgttgcccaggctggattgcagtggcaccatcggctcactacaagctctgcctcccgggttcacgccattctcctgcctcagcctcctgagtagctgggactataggtgctcgccaccacgcccagctaattttttgtatttttagtagagatggggtttcaccttgttagccaggatggtcttgatctcgtgacctcgtgatctgcccacctcggcctcccaaagtgctgggattacaggcgtgagccaccgtgcctggccggggaaaaatttttgttctctggctacctgtaagtctttaattttatttgttccagccatatttggtagccaccagagatgaggaaactgccttacccaaaatcacctgtgaacttgttttgt

SEQ ID NO: 100263 - DNA, 1021 bp, Homo sapiens
tggcgtgaacccgggaggcagagcttgcagtgagtcgagatagcaccactgcactccagcctgggcgacagagcaagactccgtctcaaaaaaaaaaaaaaaaaaaaaaaaaaaagaaatatctcttacacagtaaaccagctgttgtttcacactaaagtcatcctgcagcaaattatttaaccttttcttccaccatacattttcctagggtaataaacacatttggtaaaatcatattttcattttttacttattgttctctgtggttggaatggccaataaaatgacttacggagaatcttgagacaaagggggaataaataatacaatttacaaattgaaaaatcaggaggctttggagttgacttgatttatttagtagcagaaatatcatatcgcttcagtggaatgatcatggaagtgcacccattggggttatataagggttgtgtgcttcatgatcatgtattattacatgttaaatggattggagattcgggtttttcaaggtgctttgtggaggatgtcttgattaaagcagagagagaagatgcatgggacagtgagggatgtaaaaatactaagtaaattaagaagcaaatatatttttgtgtttgttaaataagtaaattattaaatcgttgtctgggtttattaagtagataattaaatatataaacatgcaggtgacttgtcaactctgtcattgtggtatacattatttctttcactgacaggatattttcaatataacttaactctaggggaaaagtgagataatgtacaagagttcagatttcttcacatcctctccaacatttgttattttgtttttattagtaataaccatgctaatgggtatgaatggtatttcattgtggtggcgatttgcattttcctaatgattagtgatactgaacatcgtttcatgtcctttttggccatttctaaatctttggagaaatgtctgttcaaatcctttgctcaattttgaattgggttgattttgttgttgcat

SEQ ID NO: 100264 - DNA, 3446 bp, Homo sapiens
gatgtcttatttgtggggaaacatcacccactccatgacttcattttagagctgtaccagacaggttccacagaggtatgttacgcaatttggttaattagaaatgcactttttaaaattttggtaaaatatgcataacataaaatttaccattataaccatttttaagtggttattctgtggcattaagtatatttccagtgttgtataaccattagcactttttcagaactttttcatcttcccaaatagaatttctgtaccttttaaataatgttaaataatgtatcagaatttcatacctttttatggctgaataatactctatgtgtacttttttatccacttatctattggtaaatatttgggtttgtttctgccttttggctcttatgaatgatgctgctatgaacactcaagaatctgcttgagtcccagttttccattctttgcatatgagatcaggaatgcatttttccacagccagtggaggtaccccctgaactatgtcatgggattcaaggaaagttttctttggatgaagaagccattcttccagatcagtaagtttcattttgtatataattgaggtgactggaaggaagtttagttaggatttttttccttgttgtctaaatgtttattttctaataatagtgagaaaattgtatttaaaataagacaaaaccttgctgactgaaaaatgcttgggttcaaagcctagctcttcaaagtagctgtgtcaccttgtgcagggagctctgggagtccctttcaggatattctgaaggttaaaactcttttcataatgatactaagatgttacggtgttacttgcttttcttacactttctctcttgagtgcacagtggagttttccagaggcctctcaagagatagaagcagaggagagtagctattaaatagatactaaccagatattaatgagatttttgaaagtatacaacaatgacatcgttttgctttgtaaaaaaatagctttttataagaatgttatttatgttaacatgtagggtatcttttagtattttaaaaatttcttagtcataatttttaatgggtaaatgttcataaatataaccactataaacaaaagccctttgagatttaagaatgtaaaagggttctgagaccagagtttgtgaaccacatgtcaagggtacatttccaggaatggaactgctggccatagagtatgtgtatcttcattttttttctaggtaatatttctaggaggtttgtcaaggtggttacactgtgttgtaatcccagtggcagtttgtgagagatcttgttgctctacgttttggcaaacccttgtcacagctttaatttctgtcagtctggtggatgctcattgacatcttgtggtttatagttgcagttctttgagtactaatgagattgaatgccttatggttaatagttaaccatttcatgtatgtggtacttactctttttttttaagatataaatggtttttattgtttttgttagtgcattctaatgatttatcttttctaaagactaacaaacatagcaacatcttatttccacttacctaaaaggttacagtttacagagagatgtttcttctcttgtttccttctagaatagtatgttctcctgttcctatgttaagggatctgacacagaacactgtagtcaggtaagttttccaaaattcatggcattcacccagaacacagctctgaacttgcaaatccattttaaaagacctttgattcacaaggaaatggcagctgttaatccaccaatgcttcgagattggagagtccctgtgttgcagaccttacagcagagcctcttaactctaaattatgtatattgttaaggttactgatttaacatgcttgcttatctgttttctggtttcccatgacaacctgtaattcttcctggattaggcaagtgggaggtaaagagtaggagtatctagcagtttgttatataggaacaaacagaactctacaccccagaggttcacacagcttccctgtattacaacagactattttacttatgtttataatcatggccctgcagagtttgaacacaaaaatattctgtagtatgttttagttaagatgacatagaacagaatatatttgtgaaaatttttattagcaattataaacttaaagggctaatttcttctctctggaaaactaatttatatctcagttctttggtgctgacagcattttctattgagtaaaaataatataaaatgtaatatgaccatttggactaaaatccaacaaattgactactcatttgtattttataatgacaaatcttgatgacagaatttagttgtcattttctccaatctttaggtaagactaaagcaaacacatctcaggtattcaagaatttgataaaagcctgctaatcctgaatcctccttttccatccatttttgtttctctccccctcaggaaatattttagatttttttttagatttccctttgtgaaatataaacatgtttatttcctatcttaaatggattcaggtagtaaatgattgccattctagaaaggcttttatttaaagaaaactactgtgaattcgaaaaatctttctggatgagttgcttacgtttatctttacgtataattttttgtttatctttacacctaatttgtcctggttctttgtctttgtgctcttttgttaagggtggagtacagaattgaaagccacgctcctaaacccatcacaaacaatctggctctgacagattcagtgtgaacactgtgtattaacccttggagtctctggctttcattaaagcattggcgcttcaggccaattaattccacggttctctctttggattgtcacatgtttgcttgtgcttctcaatttttctgcatatattcaagggccttcctgcctaaccctctagaaatagttaattctacttaactttctaattaggatagagaggcttgcccagaggagagttacagagttaatggaaacattttggattttttgtttggatgatgatgatgttggttggttgtttctgagcctaaaggggcctttggtatttagtacatactatgttcacaagattattaaatttataaaacaggccgggcgcggtggctcacacctgtaatcccagcactttgggaggccagggtggtgggtggatcatctgagatcaggagttcaagactagcctggccaacatggtgaaaccctatctctactaaaactgcaaaaaattagctgggcatggtggtgcatgcctatagtcccagctactcaggaggctgaggtgagagaaccgcttgaacccaggaggccgaggcctcagtgagccaagatcacaccacttgggcaacagagcaagactccatctcaaaaaaaaaaaaaatgtataaaac

SEQ ID NO: 100265 - DNA, 4475 bp, Homo sapiens
gcctgccgtttattgctttgcttttcttctaaagcataatttatacagtttttatatatgttgtttccagcagtagtgttgttaggttgttttttttttttttctcatagcacctagcagagttctaaacccatatttaaaaagctcagttgttcatagtgttgcaaccagtgtttgccaaagtctttgaagagcgtaaacttttttcttcagaggagtgtttcttagactttttgtattcacttttggatgaatcagacaagatatagaatgttttattccttcaaggagattttttgttttaatgtgaatgtgtatggagatggattttttaagtaactatttctgcagcatttgcaaggcttatgcttggcaagcagataactcaagatccaaagcctgaaggaagtggaatacatgcagtcagcagtggatttgatggtggaaaacagttgggagggtttcactttcgatgcttaattggttaacctcttctgatagaatgtcacaatcctataaactctttaagtgttttaaaatgtcaagtatatgaatcatgagattttcctgcaagaacagtttgcctttgtatgccaatttagcattaattatggaatgtatcagggaaaggttgtgtaaaaatgaaacttgatatttggagttttctgctttctttctgaattatgttaacactctctaacagtaatacttaaaatagcatttctaaggataattcttaaagcgaatcagaaaaaggtgttctatattccattccttttctattgagactttgctacagtattttcttcttaccagcagtgctgaaagtgctacttgtggtataaataaaagcactgttcagtttccttattttcaaccatgcttaggttttaaatttttatttactttgcccttgatgtgtttatgaagacaatcaagcatttaaaatagtgaggttacctattaaggaaaggatctgttatgctacttgggggaaagctggtctggtacataaaagcttgatgagtcaacagtgtttcacctgcatttggaaaaagtggatgaaaatactgttgtttaaaaatacttcagtttacagaattagatgaagcaatacgaatctaaacacaagtctcttacctcagctggtcagactgttgagtccgtaggctgtattaactcatttccttcctctgcttctcagagcttgcttgagggtgcttctctctttacctcagtgttacttactacttccctagataagccttccacaagtaacccttttgcttctgatgatggaatttaaatgacatagacatgaaaaaaataaaagaccttcaaatgtttggatccatataaaaagttacctttttgagtctttgcctaatgggttcctgcttagtctgtgtgtttgacttttaggaagtttgtttgaatctgagttatggctgttatcacattggaaaaatacatttctaaaaacatagtagatcttagtatacatttttgggaacaaattaagatactaagaatctttcaacccttggaagcttaatccattttaggagagagtgtgtcttcaaattgttctcaaagatccaaggaaaaatgatattaatactttggtatcataaatagtgtcctcatctttgaatggaaacttccaaacttatttttagatactccttttctatctcctaatggtttgtattgtattaagtgtgtagatccttttgttgaatgtggttctgaggggaagtagggatgatcttggagactgtcctattgacttggaaagtttttccctttcagagcatgagcatgaataatggaattttaaaaacaattttattaaggaataattggaaaacaaatggatttgttttctcaaactttagtttcagctgtcttattaaatctcttgttataaccattctcctgcagaagtggttatctctgtgacgctgggattttctcttctccctgggagcttattaccttggctatttccttcattttcttagtttcaggtctttctgtgcatgacttggagatcttcatctgagctcgatctccattctagttccagccttaccatttcatttactttcccaacgttcccatccaagatgtgtgtcgaagactgttgcttaggctctgttggtgacctctttatgggtgtccctctgctctctcgcacactgctgctgggttgttctttctgaaattatctttgatcactttcacgtcctcattgactacttgcaaaggcatcacattatactcacacaaaccctccatgaccataacccacttctgttacctttcttcctgccccacttctgctcaaatgcgtttttactctaatttagcccttctcaactggagttccatgggagaattctgccttgagatcttaaagcatctgttgtatgtatcagattgtaggtagcagtttgtgtcctgtatctctagaatgatactagctatgttttttccttgggagaattgagaatgtactcactcatcattttttgtagggcttaattccctcccacatccccattgagaagggctgctccagtaaaactgtactgttccttggtcctgggaccctttccatatctttgttccatttgtttcctctgccaccctgtgaccaatcctgtctcatcttaaaccgcagcctcttggatgatgttttccttggtcctcaggtgaaataattccctccccgcagtacacacatagctttagcccacactgacaaagatgtttatatggaaggtgtatacacacacatgctttgactcagcatcttttctgtgcctgttgttgcattttccactttcttccttatttcccttattagaaggggaggcaggcttgatgcctggcggtgtgcataacctccctcccaccgtgaaccgtgcatgcgataggtattctaatagtttggcaaagtgctaaaaacgccctgctgaaacacagatacctgcttcaaaacactttatttgcaagtcttgctttgttacttgactttttatctgcaaagccctaatgagcacaaatacttaactaccattttctctgtcatcctcttaaacctttatcactgcctgtcctaccttgccctgccccatgccatcttgccagtacagaaaatctgagctaaagacagttgtcagtgaagagtgagttgtaagaagaactagttgagtaataagtattgttcagctgttgagcttatggtatatttattgtaagtgaatccatttttgtgtacttaaaatgaaaatttctgtaaagcagatagactctagttaaagtggcagtattcagaaagaaaactgctgtctaaaaatgtcaaccaggtcaataaaactttttttaaaaacctttttaactgactgtaagtgtaatcattggaggaattttgaaaaatatgttaaaggaaacaagttactaacttatagagaaaaatcactgataatcgattgatgaatatgtctagtctgttgtatatatgtttcccatgtcattaaggtcattaagtattctgttactaaatttttttttttgagacggagtctcactctgtcgcccaggctggagtgcagtggtgtggtcttggctcactgcgacctctgcctctcaggttcacaccattctcctgcctcagcctcccgagtagctgggactacaggcgcccgccaccacgcccagctaattttttgtatttttagtagagatggggtttcactgtgttagccaggatggtctcgatctcctgaccttgtgagccactgcacccaaccttctattactaaatttttaaaaatattatctgagttcttcctttttaggaaggactagtttttttaaccagtccactgttattcatacacttgggttttacagtctttgaaacattatgaataatagtgttataagtatccttaagtataaatctggtgtataaccagagtcctggaagaagcattgctatgtcagaagacagacttaggtacttaccaacctttgggataggtaaacacacatacataccactaccacggctatcactaccagaaaagaagttcgacccagcttatactcaaagcctgagtgtatagcttttaaaaatagttatactgtccaggcgcggtggctcatgtctgtaatcccatcactttgggaagctgaggtgggtgggtcttatgagtccaggagttcaaggccatcctgggccatgtggggaaaccccatctctacaaaaaatacaaaaattagccgggcatggtgttgtgtacctgtagtctcagctatgagagaggctgaggtgagaggatctctgagcctgggaggttgagactgcaatgagctgtgagtgtgccactgcactccagcctgggcaacagggcgagacctgtctcaaaaaaaaaaaaaaaagcatatttgtgtagttttcaaat

SEQ ID NO: 100266 - DNA, 1342 bp, Homo sapiens
aataacacattaggagagaagggtacaagggtccaactgtgaagtttaattttttttgttaagtccatcccccccgcaccatagatttcttagctatttgtgtgcattttttgattttgcaaatatttctattggtatatccatcttttctttattaaaataagagctaatctgcctcaagatgctttggggtttttgcagtggactgaacaaaattaaaggttattttatttttattttttgttgttgtaaacctcttcgacctgtctacaatatcattttgaaatttgagttggggcaatgtctgttacttctctgtcatcaccaatagtcagctagaacataacttttccctcagagaaagttacatgaaggttatatgtaccaggaattagagacagtttggtgaggaagacatttagccatttgtcaaacccatttattaactaaaataatttttggagaggacttaaacatgaaaaatacctcagtctacatgataagacaggctgatataatcagatcattgaattgtttcttgttcttttccagtattaattttaaagacccacagtttgctgaagattacatttttaaagctgtaatgcttccaggagcaaggtaacaacagtaaattacctagatttattttgtacaaatggttttcatccctattactaagtgttgtctttttaaatggtcagaaagccagcagcagtactgaaacctagtgactgggaaaaatccagcaatggacggcagtggaagcctcagcttggctttaaccgtgaccggaggcctgtgcacctggatcaggcagccttcaggactttggggtgagttgtcagtttttagcccttgtatattttgctttttctgaatcatcccataaaacaagtcagtatttatgccatatatataaatttatgccatatatataatatatgattatatattatatatattatatataatatataattacatatataatatataattatatataatattatataatatataattatatatataatatatataatataatatatatataaaattataaatttatatatatataattacaggagtgagccaccgtgcccggccgaaacccagtattttcataaagtttatatatataatatatataaatatatattatatttatagtttatataatatatataaatatatattatatttatagtttatatatataacatatataaatatatattatatttatagtttatatatataacatatataaatatatatttatagtttatataatatatataaatatatattatatttatagtttatatatata

SEQ ID NO: 100267 - DNA, 1051 bp, Homo sapiens
cctacatattcttaaaattatgaagttatgagaattaagtgagcctaatgtctgtcaagcgcttagggtagttcctaaacactatgtaaacattagttgttattgtcattgttttggaaaaatcttcattcttagtagcagtaaaagaaatgcagatttaaaatagtcttaactttttccattatttcaactgttttggaaagcaacatagtatttcctctgaatagagcagtgagttcagaagatactcttaacctttggtccaaattcctacctcttggatttgtgaggaggaaataattttagatgagcataattatatgcccaaatatttatattgtattgtaatctatactactagtacgaaatgagagaaatggtttagtaaagtataagacatcaacatagtaaagtattctataggtttatgtgttggaattacaaagatgaagaaaagatacaggcaagtatttgatatagtaaattaaaaatagcaagatgtagagtagtcatgtatacagtgatagcaagaacatggatccttaaggacaaaactgaaacataatgcaaaaaaagaaaaatatgcaaattatttttcgtatgatgtaagttgtaaatatttaaatggttatcaattaagagtcttggtgtggcagatgaacatttgctatcactattaccattatgtagttttgagctttaattataaaccacctttttgtttgtattatcttaatcagatctgttagtgaagacgtggctatgagcatttgttttatttgtgtcagctgtgttatgatgggtatatcactatacaatttttttttcttgtgttgggtccttttatagccatgtgatgccaagaggctcaggaactggcatttacagcaatgctgcaccaccacctgtgacttaccagggaaacttatacaggccgcttttgagaggacaagcccagattccaaaacttatgtcaagtaagcttttacaaatcggttattttacattataaattaaatatcacagcaaatgttggtttctaatcttcttt

SEQ ID NO: 100268 - DNA, 1507 bp, Homo sapiens
gctaagcacttaaaatagtacgttgtacataataagtactgtgaaagtattaagtgataaaagatcatctttccttttatagaattttgaactttaaaatttagtcaaatagcttgttttagtaagattgagttctaagccatttattcagtctaaaatatttttagtatcataatcattttcttcgtgtagtatgaaattgcactcaagaagggccatttggtcaaactgacaactgtcaagtgtctgctgtaggtatttcttattgttggtgtttgatttgtctttgatgtgtcagttttggctgatgagtaattgtctgagtactgataacttgttggaatcgagtgtagccctgagtactcagtctgaataaagcatttggtttctgtagcccagagaaccttaaatgtgacttctcttcattttagtctgtaaacttgtcaattagccacgttgaaaagtgatttttgactagtgctatcagtaaacatggaatcttttctgtgattgccacgctgattaggtaaattgtcacttgagaagctattggcgaagcttggtttacatggccttagagctctagaaaagggataagtttttaaagaccaaaggaaaaaattttccactctcgcctgtaccttctgaagtgcaattcactgtctcagaattttttttcttcctctcaaatgggtcttctgttagagccatacaaatgaatgataataagtttgttttaccatctacttcattacagatcagccaggaaatacttctgctttatgaatacttccaggttatatatgttactaagagccatatgaagaaatttggttaaaaatagccttgaaatatttctttgagccttttttctttttggattgaaaacaaggagtgttttaacagttgcatcagagtttattgaaagttttggaaaatttgcttaggttttaacaaaaaactgtaatttttgtatgtgctgagtttatatggaaaaagaaaattgtcctggaggtgagagatagaaaatggaaaatagagaggcacctggcacactagaagtgatatattagaaatgtttgctgttttttaagacatttctagttgtataggttagacaactagttgtataggttagacaattatttcctcctccaaaaaaagcatttacacttagtaaactttacattccagttctacttagaaatactgctgtgcttaatctaagaatagcatgtttgagtctaatgaatatatattatgggtggtgatggcttcatctccattagcacagtttctaggacaaaatatacaagtttttttcccatctttatttttcttaaaacattagattgtttctgaaggtttctcttaatgtagctgtatctttgtattgtcttcattcgattttaaatttattagggagccactgtggaagctttcgtaagtaccatggagaatgtgtatcctgcgattataccatacataaaaagacaccaggcaagca

SEQ ID NO: 100269 - DNA, 1185 bp, Homo sapiens
gggatgtgaagtagaggggtccggatgaatatttgctgtatttcttttgacttctgttacatttgcaaattttgtatatataagggcactaaaatgaaatacttctgggaacattttaactgattctcactaaactaattttgtacatgagctgaaaaagtggctcaaacattgattttactttcagtagattactttctcacaaatggtaactcattgaaattcatatatgtaaatgtatcttaagttttcccatagaaataaaccatacaaatgaaatgattgctattattgtaagaacttcttacttttatctcttcagaaaattgattttctgatagtgtatagtctgtagtaatgactcagaacttactctgggcgtagggtggggaactgtcttcctctgttttctgtggagtgtgtagtagtcagcatcctccacattgttactcggtttgactgctagtagtttggtttttaagaaataaaaaaggaacttaattccaattgactaaagataccaccttttaattcacaatgggaatctgcctggaagtgacagctggtgaagggcttcctgcacctttctgagaggtgggtttggcacccatgggtatggctgcagaaacttttccagctggccatggactgatgtgggagtgggctgtggcagctgcagatggctgccctccttcaggtagtttgtccacataaggaaaactttcttcagtctggccttctcagcatgtcgagatgggaaggaagccagggctgaggctgccagttatgagctagaatcattgtgagcagctagatattttattgattccgtgttctttgtcatggggcttttaaagcatgattctacttttttctttctctctctttcttaagtaaaaaccatatatatttttggtttctaaccagagataagctttcaactcttcttttctttaagtaattttgaaaagcatttttctagtttgtgtttctattaaaatgtgagcctgaatacattatggtaagcgttgtccttggtctcgggagtctagaggaggttactgtcctcacatggtgaactcattagacaacttctggaaccagcagttttaattaggtcacagcagaccccgctgaaggtgaagtgactgcaagctgtggttcgctgatatagacaggcccaga

SEQ ID NO: 100270 - DNA, 1045 bp, Homo sapiens
taaatgcaatacgactagcaatgtgtgtattaatgttttgattttagtatatgttctgaaagcacacagtatgtgctgtttcattttcctcagtaccacaaattttaagcagaaattaagtaagtaaggggtaaatttttcctaaattatatacttggtttctctatcttattgctcactttccatactaataataatggcaaatgtttgtctgcttacaaagtgttaacactgtgttaacatcctttaataagaatgatttcatttattcctcctagcagtgcattgaaatagatgctgttatgtttacatttttgcaaatgaagaaagtgaggcacagagaagttcagcagcttacctaaggtcactcttttgtgccattctttaccaagaaacttttcactggaacaaaacttaccagaatatttactctgagcgtaatataaagacgtagggacttcaaaggaagtaaaggatctgtttccacttctaaggccccaacagctttcctcccctctgttcacattaaaagttttcctaagatcatcatcattgtcccttcccttaccctgctgtccatcaggttttgttcttattctaccctagccaagtactagtattattctgactttgtgaacccagcaggttagtgacaagttttgtgggaatgttttttggtttagttttagtcagatacttaaaattatgcctgaaagcaaaaggtaaatgtgagcataatagagttctatcataaaagtcttacatcacagacatttaagaaagataccattttgttccagaaccaggttttaccagttcttagttcagtatgtttccacgacgctactgtttgttgagaatcctattaagagaattttgagtgtcttttttttattacattgcatttcttgaataatttcctactttaagatggtatgtataatccatatatccagtagatttaaaaatacaacaggaacatcctcccaacacagacacagcctagagttaatagatacccagcattggagttccctttgtcact

SEQ ID NO: 100271 - DNA, 1544 bp, Homo sapiens
atgacatccttgctttgttcttctgtttaattttaattattgatgatttttttcataaaaattatatttgtcaaaaacattataagtaatcaattcaaacaaaaagaactttgcgtttttaaactgtggctttgttcttaacctgtttttggaacataaaatagttttgaattgcatttataatgtatattatttatgccagcagatcttcctaaaactcaattgaattttattattgtaagactcaaaagaaaaactgatcacagttaagatgtgaattgtgtttttagcccgtgggttttgcattaattggcccagttttgatgagactttggttacagcacaaaccttagtttagcccttcactcctgcagagactggaagagaccattcctatctctgcacacggagctcttcttgctaaaacagatggaggcattcttgctaaaatatatttgtgctagtaattgtcctgaaaaataattaaaagccctagccatatgcattttctttctgagataaaaacttatttttaattgtattctgaattacttataacacattgttattagagctctggtttcagctaccaactgtaaagaaaaactttagcctttctagagttctttagagagcagttcatttcttcgaatcatcacacaaaaataattatctctggtgttgttttaataaaaagaaggcaagctccaagtgaagggaggagagtgggggtagagaggatggattcaggcttgaatagctgtgagaagaatgctttacccaatgagcccagcgccgggcttttttcccctaagacctcggaagtgaaattcttatgctgatatggttataactgattaccagctagtcagcacttcagtgaatttaaagttttattgaattcctcctaacatggtcagtggccccaaagcttctgatgttcaagtatactggagcatttgcctctgtttattctttgtagtgccttccataaaatagaagttatggaaagtgccttaaggagaaagtaaagtcttaaatggtgattgcctttagaaggtatatccttgctacattgtttatgtgacagtttttaattaagttatgatttagtacattatacctgttgctttgcatctgcaaagttaaaatagtcacttgaagacaattaaaacatttctttcgactagtaatctgcgacagcaaactgggttataatagccgttgaatctgtgttcccatgtaaactgtacaccaaatgccagtcagcccatgccaattagtgctcatgttgctaggtcaccgtggtcaattgaaagctgcatcaatagaacttgaaaaggtttcctcccaatcagaccttctgacatattgaacagaataatggatgggaaaaaacagccaagtctcctaccctggattcaaaatactcagcagtaagaattcatttgcaacctgcaattaagtagaaagaatggatccaagaacgagtctggacatttttgaaaataaagcctcattctcctgtcttgtacatgtttact

SEQ ID NO: 100272 - DNA, 1027 bp, Homo sapiens
gaaagtaagtctgctttttcagctgttgtcttttagaagtcattttacaatgttgtcattttagaagtctcctgccttgattcatctgatatccctcctcataaaagaaatttctgcttgataatcttccacatatttttcttctcaatgtaagcagctgtatcactgaatgactatcataattcctagacaaatttagtatatgtaagcttcatgtccttctctttacagcatccagttttagcagcatttaagactgaggtctatttgacataatttcctccagcaatttgacaccctggccagtatttacatgctcttaatggaatccttactagagaacaagattagaatgctgtgattcagagtaatgtgtatggagtttggcacctgcagtgatgtgaagtggtttttaaattgcttacctggtgttgcctccaggccttttgcagtgcttcacatattaattagtaagacctctcttctcacagctaaggaacatattttgtatgttttttgatgtattcttacaagtatctccaccttacaagaagataatcaccttaattgcaaataatttcttctgagattttgttacagtttatttgaatcagtttatcgaattttgctttgaattctttcagcccaggacctctaaaaatcgtgtcagtgaactaaggctctttatgttactatggttagatggcactaggccgtttcagtgatgagcatttttgaagtgaggactatttgtaactggaagaaaccttggagaatgtgtagtctagtcacctcattttccaagtcaggaactgaaaccctgaaaaccccacacggttcagcaggagaactggtagctggctgcctagactgctgaccccagttcatccattttcctctctcctttggagatcttccttttaaaggaactctgtgctgttacaggaggtaaaattcttatttacttagaagatataaaccaattggtaaatttattattcttttaggactttttgaaaataacatt

SEQ ID NO: 100273 - DNA, 1038 bp, Homo sapiens
aattgagaaccactgtctgtacatgttgtttacacagaacactttagttatttgtgtgcatttgtgattgttaaggttttttgttttatttttcagtaatagcatttgtgctagcctccaactttgcaacaagtctgtattaaagctctggatcaaagcaccttttatggggcctttccatgtgctgtacctttaacacatactcagtttccttatgatgtgtttttccatagaggtttaaagttaactgacttgcaggagtatcggtccagaaaataaactctttcttttgtttattttcagggatatcccagagaaggaaggaaataccctttgccaccaccctcaggaagatacaattggaattaagcttttgtaaagctttcccaaatcctttcatcattctacagttttatgctatttgtggaaagatttctttctcaagtagtagtttttaataaaactacagtactttgtgtatttcttttaactgtgtatatttctactgatctgatctcactgtttatgttgctttccaaagatgtatgttgcataatacagtggatctgaatttattattgcttataaaacacatttgatggaataggagtactggtttttcataatggttaaaaatgaaaccagctgtggatttcaaaacacagtgtattctagatcatctaagatccatgctgatttttattgcacaagaattaggtttgaactcgagctggaacctcagcaaactagagtatatattgttcagtatttctttggaaacatttcattaatgtacttgtcttacagaaatttctgaactttagtaaaaaaaaataaagttaaacttttaaaactctgttttgtgttgttattttgcagtatttcaactttgaaaatcttgaccaagcgtggttttttaaaattaacttttgcagaaaactatttctgtaatcagatgtccaaaccaaaggacaaagaagtcaatgaagaagtagattttaaaagatagggtcagcaagacataacaaaagctttaac

SEQ ID NO: 100274 - DNA, 1036 bp, Homo sapiens
aaaatcttagaacctggaaacagcctgactactctggggctaagggcccgtaatgagcagttgtcttccctttaaagatcaaatggggtaatgtatgttaatgtacaaagccgtctacaaactggtattagattgccatttagcgttacaaaggcaaattgggtgtaatgagcgataggttaattttcgtacgatgacgtgggatgccaggaacgggccgggtgaggccggggtccctgcactcctttgctgggcgcgcctggaccgaactgaagggcccgggcgccgcgacctcgcagccgggggcgggatggtggcggcgcccgggccccgcgtgctactcagagctcaggtcctaggtgcttggctcaactttctcccagcggggtcgggaagcgccaggccctcggtgcacgtggggcacgcgcccggcgcctgggtctcccctgcggctcgctagtcgcccggcccagcccgcagaccccgcggctggccctcccgggagccccgcgagccggccgcacgcacaggatgggcgcggaaagccccttcctctaccctcgggcgcaccctccttcctcgtccgcggcgccgcagcttctcaacctgccgctgcatctcaactccctgcaagcagcagagctgtagaataccagaaatggtcttccttccgaggctgccgttttaagttccaagtgtgaaagtaaccgaattttgctatgcttagaaatctaaaatctggacattccctgaagagtcaacttagagtccccagtttctcgatctggctccgtcccactgactgacgcctcctgcccaccccgaaaggatcctggagctgcgatctcgccagactctattcctggtgatccactgctctgctatttcccatcaggaaaaagtcaccaaacgaatgaactagcaaacggcccattctcgatggatttctcctccactcagtaaagcagaatcctcctgtggcttgtttctccacgccttatttatggaatgagggccaaaagagaacaggcttgaa

SEQ ID NO: 100275 - DNA, 1056 bp, Homo sapiens
aagctaacacaattgttagtacagtgtgagaatgaatagtaggtaatcacattttgttgtcaaaattattataatatggtccaatgaaatgattcctcctcccatccccctaaggaaaaaaacaaacaagaaacctccccttctagggtcaagctgtaacactatagtttttacagtcagagtagagaataacactgggctataacaggggagtaaaaatagggaaattatccagtgtgtcccaattctctcaccctaggattaggagcttgagccacaaattcaaatttttctatgttaaaaatcattttttagagtaataatacatgtatgggaaaaacaatggcaatattgaaatataattttttatttctgaattacaagtttattgtatattttgtgtatatagaaagtttaaaatattttggaacatagtggtatttccattgaacaacattttttagatgttttggagtgtcattaaatggctgttttataggaaaaagaatcctctgaattttaaacaaaactatatttctgttggttattttgtgtgaggagttagtttttctaagtgttccaccatgtttccaacacaacctaattagagtaaatacacaaagcttttaaaaatacttactttataacttctcacatactgtcacatttttcgaatctgagatttagtggctttaatgtaaactctttttctcctacaagtctcattaaagatgtgtcatcttgcatttacaaattactttgtaattatcaaggaaggtatcagtttttaacatctgggctgagtaattgggctgttgccaccatcacttacttgaaggagaactccaatttttgatgttttggtaaattgattattaggttgttggatttgttaataaaaagttttactgtgtacattttagaaggaacagctatgacaatatagtaattagagaataatttgctcaattttgtccccttttgttcttctgtgtactactaatgttgagggaatagttgacagatacttgtattcacatgtatctgtctgaattg

SEQ ID NO: 100276 - DNA, 1048 bp, Homo sapiens
cactgcctatatgtcccaaaagcaataaaaatccttgcccagttttctgagtcaactgactactgggaccaatactgcctgaacagctttcctactgtatatacttctttggatctgtcgcagacacagtcatatgtgtggctgcaagtcgtaggttgtgtttgtgtatgggtgatgaatgtgactgtctccattggaagtgtggctacaaccaagctcaggataagaacaccagctagatgaacaaacaagctaagctgacccctgttggcaaaacagccaccactcagctcactccttccctcccttttctttttttttttttttttttcagctaaaagagcagaagaggtgatttattatatggttgttacactcggccacaaataaacacagaaatagtccagagtgtcacaggtccagggcagaggaccaacatgggcattttgtttatgagcaaggtgggtctcagaggtgatcggcgatcagagggcgatgaagttctagatccattgagacaagctctagacagtagcatgcagtcccacaacttgtaccagcatccccagcgtctggcattccatgtttctgctcctgtggcctccacggtgcaacaagctagcggtttacttggacctctgcctcatctttcttcttttgcgcttcagcctgcgcattcgcttcttcctccacttggctctcatggcgcagaggtttccaaaaaaatggcgctaaggctgagagcccttccctccctttttgacatgtccaaacactttcactgttgccttcactgaggtgccaatccttagatgtggttgatacatggagctggggagtcttaaataggacttaatttcaaaagacctggttcaaattctggttctgcacttaataggcatgtcaccttgagtaaatcattcttagtctcagatttataatctacaagacgagaatttattctttaaaaacagggggtgggggtagagacagagtcttgctctgtcacccaggctggaatgcagtggcacaatcaaagctcactgca

SEQ ID NO: 100277 - DNA, 1048 bp, Homo sapiens
tgaaattaagtcctatttaagactccccagctccatgtatcaaccacatctaaggattggcacctcagtgaaggcaacagtgaaagtgtttggacatgtcaaaaagggagggaagggctctcagccttagcgccatttttttggaaacctctgcgccatgagagccaagtggaggaagaagcgaatgcgcaggctgaagcgcaaaagaagaaagatgaggcagaggtccaagtaaaccgctagcttgttgcaccgtggaggccacaggagcagaaacatggaatgccagacgctggggatgctggtacaagttgtgggactgcatgctactgtctagagcttgtctcaatggatctagaacttcatcgccctctgatcgccgatcacctctgagacccaccttgctcataaacaaaatgcccatgttggtcctctgccctggacctgtgacactctggactatttctgtgtttatttgtggccgagtgtaacaaccatataataaatcacctcttctgctcttttagctgaaaaaaaaaaaaaaaaaaagaaaagggagggaaggagtgagctgagtggtggctgttttgccaacaggggtcagcttagcttgtttgttcatctagctggtgttcttatcctgagcttggttgtagccacacttccaatggagacagtcacattcatcacccatacacaaacacaacctacgacttgcagccacacatatgactgtgtctgcgacagatccaaagaagtatatacagtaggaaagctgttcaggcagtattggtcccagtagtcagttgactcagaaaactgggcaaggatttttattgcttttgggacatataggcagtgatacaaatggtaccttaggccggaaagacaattggctaggcctaaaagggattaggcatgtaagtgctttattcataacataaatagtgcaagccacaaaactactgttaccatgttccctcctccagggaccaagccaacagaaatcaccagtgtgggatgaagtttgacctgaattggagccaca

SEQ ID NO: 100278 - DNA, 1054 bp, Homo sapiens
atgactctccacagcacaggatacggccatgataaacatgagcaaactcaacagcaagctgcctggaggcccgtgacaaacggaaatggtgcttttgggatgcggctggatcttgaggagcactctgctctgtttggcggaagggagcttggagtggaatccacaccctctctccagtgcttggagtaaaggatcacgaagtcattatggaattagcagcttgcccagggacatactcaaccctctagtttctccaggtggtgtctagattccaggatacttcttttcagatccataaggtcaagagggctatagcttcctatgtaaattggttgaggtctcctagtctggggggatgaactcgggaaatggtataaccaggtggcctccatggatttggggatagcaccatctccaattctgtacctcctcaggtcctccccatgctgtctgtgtccttcctccttggccacaaatcacagccactaagagggaagtagatggtgaccaaaacagtcccgatcttgattggggcaacagttagttgccccaatgtaaaatgtaaaattgtaaaatgtaaaatgtaaaaatttgcatgtcaaaattcatagaactgtacaactagaaagagaacactctaccatatgtaaattatactccaattaaaaatagattaaaaagaaattacagcctcttcagaacactaatgaaagcctgattaaaaaaaaaaatggaaaaaaaagacacccaactgtgtaccaactccctcttcctccttctatatcatgaagtagtcaccatttgaatggtaaaccttcctcccctgggccaggaacatggcctttgtgtgtcactgtgcacctgcaggtggatactgttgctctgccctctccacacagtcatgcagccttccctgggccgctgtgggctggaagtgggagagccggaactcagtcctggtttgtgtgcctctcaatttgttctttctccccatctacgacacgttcacactgggtgagtgctgacctttggcagccccactctttaggcagag

SEQ ID NO: 100279 - DNA, 1432 bp, Homo sapiens
ctttacttttaaacagtgagcctgaattttgttgctgttttgatttgtactgaaaaatggtaattgttgctaatcttcttatgcaatttccttttttgttattattacttatttttgacagtgttgaaaatgttcagaaggttgctctagattgagagaagagacaaacacctcccaggagacagttcaagaaagcttcaaactgcatgattcatgccaattagcaattgactgtcactgttccttgtcactggtagaccaaaataaaaccagctctactggtcttgtggaattgggagcttgggaatggatcctggaggatgcccaattagggcctagccttaatcaggtcctcagagaatttctaccatttcagagaggccttttggaatgtggcccctgaacaagaattggaagctgccctgcccatgggagctggttagaaatgcagaatcctaggctccaccccatccagttcatgagaatctatatttaacaagatctgcagggggtgtgtctgctcagtaatttgaggacaaccattccagactgcttccaattttctggaatacatgaaatatagatcagttataagtagcaggccaagtcaggcccttattttcaagaaactgaggaattttctttgtgtagctttgctctttggtagaaaaggctaggtacacagctctagacactgccacacagggtctgcaaggtctttggttcagctaagctaggaatgaaatcctgcttcagtgtatggaaataaatgtatcatagaaatgtaacttttgtaagacaaaggttttcctcttctattttgtaaactcaaaatatttgtacatagttatttatttattggagataatctagaacacaggcaaaatccttgcttatgacatcacttgtacaaaataaacaaataacaatgtgctctcgggttgtgtgtctgttcacttttcctccctcagtgccctcattttatgtcattaaatggggctcacaaaccatgcaaatgctatgagatgcatggagggctgccctgtaccccagcacttgtgttgtctggtggtggcaccatctctgattttcaaagctttttccagaggctattattttcactgtagaatgatttcatgctatctctgtgtgcacaaatatttattttctttctgtaaccataacaacttcatatatgaggacttgtgtctctgtgcttttaaatgcataaatgcattataggatcatttgttggaatgaattaaataaacccttcctggggcatctggcgaatcccagctgtgtgtccggtgtatggtttggcattatctcctctgcgagatatccaaattcactgtagtcatgaagggtctcagtttgtggctctcattcaaatattcatttctaaacgtctcatccagtatgaaatcat

SEQ ID NO: 100280 - DNA, 1062 bp, Homo sapiens
ccggctccaccttgactcctccggccgtggggctcgtgcattcgggcttgctcataggcatctccatcgcgagcctgtgcctggtggtggcgcttttggcgctcctctgccacctgcgcaagaagcagggcgccgccagggccaagatggagtacaagtgcgcggccccttccaaggaggtagtgctgcagcacgtgcggaccgagcggacgccgcagagactctgagcggcctccgtccaggagcctggctccgtccaggagcctgtgcctcctcacccccagctttgctaccaaagcaccttagctggcattacagctggagaagaccctccccgcaccccccaagctgttttcttctattccatggctaactggcgagggggtgattagagggaggagaatgagcctcggcctcttccgtgacgtcactggaccactgggcaatgatggcaattttgtaacgaagacacagactgcgatttgtcccaggtcctcactaccgggcgcaggagggtgagcgttattggtcggcagccttctgggcagaccttgacctcgtgggctagggatgactaaaatatttattttttttaagtatttaggtttttgtttgtttcctttgttcttacctgtatgtctccagtatccactttgcacagctctccggtctctctctctctacaaactcccacttgtcatgtgacaggtaaactatcttggtgaatttttttttcctagccctctcacatttatgaagcaagccccacttattccccattcttcctagttttctcctcccaggaactgggccaactcacctgagtcaccctacctgtgcctgaccctacttcttttgctcttagctgtctgctcagacagaacccctacatgaaacagaaacaaaaacactaaaaataaaaatggccatttgctttttcaccagatttgctaatttatcctgaaatttcagattcccagagcaaaataattttaaacaaaggttgagatgtaaaaggtattaaattgatgttgctggactgtcatagaaattacacccaaa

SEQ ID NO: 100281 - DNA, 1009 bp, Homo sapiens
tgtatgaaaagaaagaaaggaggaccaagagatgaaagagggctgcacgcgtgggggcccgagtggtgggcggggacagtcgtcttgttacaggggtgctggccttccctggcgcctgcccctgtcggccccgcccgagaacctccctgcgccagggcagggtttactcatcccggcgaggtgatcccatgcgcgagggcgggcgcaagggcggccagagaacccagcaatccgagtatgcggcatcagcccttcccaccaggcacttccttccttttcccgaacgtccagggagggagggccgggcacttataaactcgagccctggccgatccgcatgtcagaggctgcctcgcaggggctgcgcgcagcggcaagaagtgtctgggctgggacggacaggagaggctgtcgccatcggcgtcctgtgcccctctgctccggcacggccctgtcgcagtgcccgcgctttccccggcgcctgcacgcggcgcgcctgggtaacatgcttggggtcctggtccttggcgcgctggccctggccggcctggggttccccgcacccgcagagccgcagccgggtggcagccagtgcgtcgagcacgactgcttcgcgctctacccgggccccgcgaccttcctcaatgccagtcagatctgcgacggactgcggggccacctaatgacagtgcgctcctcggtggctgccgatgtcatttccttgctactgaacggcgacggcggcgttggccgccggcgcctctggatcggcctgcagctgccacccggctgcggcgaccccaagcgcctcgggcccctgcgcggcttccagtgggttacgggagacaacaacaccagctatagcaggtgggcacggctcgacctcaatggggctcccctctgcggcccgttgtgcgtcgctgtctccgctgctgaggccactgtgcccagcgagccgatctgggaggagcagcagtgcgaagtgaaggccgatggcttcctctgcgag

SEQ ID NO: 100282 - DNA, 1009 bp, Homo sapiens
cgtgggggccgcggcccgcgctgaccctggacgtcgccgcgcaggtacgttgccgtcccccggcggtctgacccccgagacagcccctagtgcataccccacgccctcctccattgtcgagaatgagacacggctgtgcctttgtccacgtggtagagttgccgccgcggtgaggctctcgcctgtgcaaaaagcgtggcagcgaattctcatcaacgaggggaggcgcgtcccctcacagcgcagctctcgggtctgaggagggccgggcagggcgtgcgtctgtctaggtttgaattaaaggcgactcacaggaaataaggccatgccactgtggtagcttttcccgtccatctccggacactcgacggtgtgggtcgtgcgaggaggcggcagtcttcacagcctcttactctagtcctcacggtcaggttctttttctgatttgacacagacagcgggactgacgacctcataggtagctgaaaaccgtaagtggagatggtccttctatggtgtgtgggggcgtggccagttgttagattgtgtttggaaagacagccaggggcggagaagaggggcatttctgagatgatggggggactggtgccatggagggaggaggagtgaggtggagatcgggaattccagccaaagagaaatggggtccctgggagaaaattcccactctagcagtcctggagttgtgctcatggagacttgcttacgcgagtacaaggacagcgttgtattgacaaaatttcagccctcagtctagtcttgtaaacgatagatcaggagtgtacttaaccgtcgttactttgatccagccctaggtttcccttttctcatttgtaaaattgttatagtaatacctttttcatccatttgtggtaacatttaaatgaggtaatttgtgtgaagcccttagcaaacacagcgcttcttagtcgtgggttccgcgtggggtggattcaaccaacctcaaatcaaaaatattcttcagaaa

SEQ ID NO: 100283 - DNA, 1031 bp, Homo sapiens
aatcgcttgaagctgggaggcaggtgttgcagtgagccgaggtcgcgccactgcactccagcctgggtgataaagtgagactgtcacaaaaacaaaatggcatagcacagtcagcccaacgtatttgcaggtttcgccctgaggttggctgaatctgtggatgcaaaaccctcagatatggagtgctgactataactaaatgtttttaaactaaacacttaaggtatactatctcagtttgccacagtggtaatcccatcttaacagtgagcaaactgagtcttagtaaaattaggcatttttaggcattgggtactatttgagcctacagtcattgttctgcagtctgtaactattttgccagtagtagaaaaggaggaatgttccattgtcagggcagaatgaactttggcattcacgtggcttctcttcaaccttacttccctgcagcccctggttccccaaggcagaggaaataccctggtggagccctccttccatagaaccagagatggcatctgtggatttcaagacctatgtggatcaggcctgcagagctgctgaggagtttgtcaatgtctactacaccaccatggataagcggcggcgtttgctgtcccgcctgtacatgggcacagccaccctggtctggaatggcaatgctgtttcaggacaagaatccttgagtgagttttttgaaatgttgccttccagcgagttccaaatcagcgtggtagactgccagcctgttcatgatgaagccacaccaagccagaccacggtccttgttgtcatctgtggatcagtgaagtttgaggggaacaaacaacgggacttcaaccagaacttcatcctgaccgcccaggcctcacccagcaacacagtgtggaagatcgcaagtgactgcttccgcttccaggactgggccagctagtgggggtggcagaggtctctttgcttcattcagccctagctctgtagagaaatgcaaacctcgactctcaaggatgtgaggaacacaagttcatttc

SEQ ID NO: 100284 - DNA, 1035 bp, Homo sapiens
ggggtaggtactaagccctgatcctcacccctgtgcgggtgcttcctattatgctttctgcctttagccctcctcctccctcacaacctggtcaaacacatcagacagggaaagaagcaacatgtgtattattaaattatttgtcagaatttccagaatcagagtctctactgggcaagtagaaaaatagaaaagtttactactttgaaaaggaaactatgacaaacaagtatatattcaggaaagggactcctagaacttgagcaacaaaaaagagttcaacctcggcacagtggagtctgcagtgtctccgcaacaacagaaatgaacttgtgttcctcacatccttgagagtcgaggtttgcatttctctacagagctagggctgaatgaagcaaagagacctctgccacccccactagctggcccagtcctggaagcggaagcagtcacttgcgatcttccacactgtgttgctgggtgaggcctgggcggtcaggatgaagttctggttgaagtcccgttgtttgttcccctcaaacttcactgatccacagatgacaacaaggaccgtggtctggcttggtgtggcttcatcatgaacaggctggcagtctaccacgctgatttggaactcgctggaaggcaacatttcaaaaaactcactcaaggattcttgtcctgaaacagcattgccattccagaccagggtggctgtgcccatgtacaggcgggacagcaaacgccgccgcttatccatggtggtgtagtagacattgacaaactcctcagcagctctgcaggcctgatccacataggtcttgaaatccacagatgccatctctggttctatggaaggagggctccaccagggtatttcctctgccttggggaaccaggggctgcagggaagtaaggttgaagagaagccacgtgaatgccaaagttcattctgccctgacaatggaacattcctccttttctactactggcaaaatagttacagactgcagaacaatgactgtaggctcaaat

SEQ ID NO: 100285 - DNA, 1037 bp, Homo sapiens
ttgaaaagaaccaactaaataactactttccatgaggaaaacttcttggaaaagtagttcacaattcatcgcccattcccaacatcctaaactcctcagaatttgaattattgttactctactgaaataatgttaagttccacagcttttacaagctgtgctactttgagcaagcaacttctctgaacccatttcctcctctgaagaaggctgaccggctgttaccagggttccatgagcctgaaacttgttggctagtttattggtttcccacacataggccaaggtgctacagtgatccccatttcatagatgaggacctatcaaggtaacagtcaatggctggttgggacatgagccagggcctggtgcccggattcaactcagactactcaacacactcttcccctcagccttgccaaaggcaaagggctatctttagcccctaaatctttccactgcagcgggcatgcaaatttcaccaaccccacctaaggcctccagataccgtcaccccatcgtcatttctgctgctttgccacaaactccctgaatgtgttttctccctgcccttcagctcctgaatctaccttcctctttgattcctgtttccatccatccaaagcacatgccttccttctagcctccttcggccagaccacagatgtcacctcggattcaacgtgtctagaaaaaaagttgtcatcatcttccctgataaactagtcccacccctctccccttctccagtctcatcaatgagaccgctccccacaactagcagtccctcaaacatggaaaagactgccctctgggagttccgctgtaaacaggtacctatgaggcttgatcaatgtcgcctgaaggagacgccccagtaaaactgtgagaacactgacaaagcctaaggaagggatctataagagtggggctcttatagagccactggggtttcagtggtcccagccccagcctggggaaacaagactgcagagggctctctcagcctgatgccctgacttccccagacctctgcc

SEQ ID NO: 100286 - DNA, 1075 bp, Homo sapiens
agcttcgcctcctgggtcacctgtgtgacgtgacagtcagcgtggagtatcagggtgtccgcaaagacttcatggcccacaaggcagtgctggctgccaccagcaagttttttaaggaagtgttccttaatgagaagagtgtggatggtactaggactaatgtctacttaaatgaagtgcaggttgctgactttgcttcatttcttgagtttgtctacactgcaaaggtacaggtggaagaagatcgggtgcagcgaatgctggaagtggctgaaaagctgaaatgtttggatttatcagaaacttgttttcaattaaagaaacagatgttagagtcagtacttttggagttgcaaaatttctcagagtctcaggaggtggaggtgagcagtggctcccaagttagtgctgctcctgcccccagggcaagtgtggccaccgatggccctcaccccagtggtctcacggattccttggactacccaggagagagagccagcaatggcatgtcttcagatttgccaccgaagaagtccaaggacaaactagacaagaagaaagaggtagttaaacctccctaccctaaaatcaggagagctagtggaaggctggctgggaggaaggtctttgtggagatccctaaaaagaaatatacgagaagactccgagagcagcagaaaactgctgagggtgatgtgggggactacaggtgtccccaggaccaaagcccggacagggtgggcacggagatggagcaggtttccaaaaatgagggttgccaggcaggtgctgagttggaggaattgtcaaagaaagcagggccggaggaggaagaggaggaggaggaggaggacgaagaaggggagaagaagaagagcaactttaagtgcagcatttgcgagaaggcgtttctgtatgagaagagcttcctgaagcacagcaagcaccgccacggcgtggccaccgaggtggtgtaccgctgcgacacctgcggccagaccttcgccaaccgctgcaacctgaagagccaccagcgccacgtgcacagcagcgagcgccatttcccatgcgagct

SEQ ID NO: 100287 - DNA, 1034 bp, Homo sapiens
tgatacattaaggtagtaggattatctcatttctgttttccaaagtctttatgatttattaattatgtgacagataaaacttaagttggctttattctgcttcagcacagtaaccctgaggtttagaatcttgtggaagatacagaagcatacagcactgaagtgttccaattcttctcagtttcttctttgcttgcattttttattcttacctgtaaacactggcttacaagcctcaagttcaaatgcatgtgagacagagatgacatgtctctgactcattagacaccacatctgtgtgattagacaccagttctgctcattctgaagtcataattcatgtcattgaatgaaaatctcatttaatgtcatgaaattagcatttaatgacatgcattatgactacagaatgagtagaattgtttaaagaaagcttgggattggggacaaggtcaggttataatgaaggattaagttagaattggtcctttgataatattaacatggtaagattttattaaagtcactatttttattttgatgtctgtgaaatcgggcacagctaataatttggtaagtctgatttgtgggattaaactacaaaaagtgagatatttaaaactcttgtcctacaattcaatcaagttgattggagttgctactctagaatagtgatatatatccattgtcaacttcccctttattctgataaagatccatagaagtgttcctttgaaaataatccagcagttcctccaaacagaagttgtgaaattattttcttgtttggaatgagtaaatttctaaaatgtgagccagctgaacaaacaatacctctttgattctagtcaaatggaatttttcttgcaatttccaaggatattttacaccaactttcagtaagtagcaagcatcttacatgaatatatattttatgatagtttttactggaaaatgtaacatgctgcctaccaaggcacttttgagttcacgtgggttttaacagtggagacctactgttccatgtgttttta

SEQ ID NO: 100288 - DNA, 1484 bp, Homo sapiens
ctcaacgccctccagcgccaccgccgcatccacacaggggagaggccattcatgtgcaatgcgtgcggacggacattcaccgacaagtccactcttcggcggcacacctcagtaagcagtgggttggcttatttgagaaacaagctgctgcccttagatgcacggaaagagaaatacctaccaccattctccaaggtggttagaggtcgagacaacaggtactttctccttgggttgtctctgcagtggaacgctcacggaatgaatgaagtggaacaccaagccccaaggcccagggaaagcaccatccacgatgactactctgtaacagtgagggtggtggcaggcgggtacttattagtgaaagttgaaaattgaagttgtagagggactattgttttaaaagatgcacttgtccagagacacattcagtgacctttgttttgtgtttaacttatagatacacgataagaatactccatggaagtctttccttgtcattgtagatggctcgcccaagaacgatgacggacacaagactgaacagcctgacgaagagtatgtgtcatccaagctttcggataaattgctgtcttttgcagaaaatggccatttccacaacctggctgcagtccaagacactgtacctaccatgcaggagaacagttctgctgacacagcctgcaaggcagatgactccgtggtgtcccaggacaccctcctggccaccaccatcagtgagcttagcgagctgaccccacagacagactcgatgcccacacagcttcactctttgagcaacatggaataagagcttcaagcagttcccatcctgttagtctgcgtgtgtggtagctgaactcaagatgatgtggggctaagaaaaataattgtccatgtgcaaagatgtgggcaagaatggcctctgcagattttcctgaacttctgctaacttgcacggctttatcacagcatttttaaagctttccctcaaaaatcctgatctgcatgatctcagctactttattgacaaaaaggcagtgaacataacctcacttaattctggtgtagggtgtatgtgctaatcgttctaattcttgattacctagtttatagataactgctggtcttaattgcagagtacagagaactgaaccagctcctgatattgtagttagcagtcttcctggcttctcactctgccttatatttccatgtgggtttacttctctcataactactttcaaggtatttttcttccaagctgaaataaaactggggccacatattttcagtcatttcttccctgttgaattgaagcaaatcagattttctgtggggaccctcaaatgcaactgaagaaatagattgttgcattcattcctccccaccccccatttgtaggcagtaaacaaagtatgactgacagattgaacacctgcaaaactgctagcgtaatctcagcacatacgcagctaggaagt

SEQ ID NO: 100289 - DNA, 1181 bp, Homo sapiens
ctctttaaaccaaacgtaataaacttggagctgtcactgtatgccagcatcataaacaccatcattttatgatagggaaaattttttggctcacttgtttagaaaattagtaaaatttattagcattattatttattagatttgtttcttcattttgttagtatgctacaatttagcatctttgaacattatacagaatgttgactttgcttaagggttgtttgaataggcatttcaaagtgcttttgcttttggctgcatggagagtagaatctattgaggtgattgttcttgtgatgtggtgccatgttccaaaattaatatatatgcatggtattaatgaggaatatgtttgcattcatattttagcagatacaatttatcagtgttggtgacaacctctatggttttattttctttataatacagtcttttgcctggatggagtcctcactttaaggttaagagtaactaagccaatgttactccagctacagttccctaaattatactatagctgctgggaacaaagccatgctgatgaatctggacttgtgcatgatttttgtttgcttctcattaacctgcccaccctccactccaaaattatacctcattaacgttctgataacagccaggaagacagcctcacctgaaccctctttgactgaatggatttttcattgtttttcttaaatgcctacgcttcagaggctatcaactgcttaaatgcagccatcgacatttacacagacatggtaagacattgcattgcttgagtggctgtggggtggagtcttgagatggcttagagttctatctttcttttttatgttcccaaactggcattcagataggtaaaatcggtgtgtgactgtttcttgttttttcccctagggaaggtttacaattgcagccaagcaccacattactattgcagagatctatgagactgaacttgtagacattgagaaggtaagcagtgggcacacttcctcagatgtgaagcaggcagataagctgactcaaagaactctcctctcctcagtctgagagtgatcgtaggtgtagagtggtcatagatggccttgcctggagactttctggcaaagtctactagctggctaagtagatgggctgttttcctggagtggacatctaagacatgagagctgattaag

SEQ ID NO: 100290 - DNA, 1051 bp, Homo sapiens
ctaaggaggctttgtatgtgcaccccgcgtcatctgttgcctggggtgatgctctagcctcctgacattgtcatactgctgcacttttccagtctgtttccatttatgtctgaggttgcaattttttgaattttggaaatcagaccttggcgatgaccttgagcagtaggataggatataaataactcccacgtgcctagcgttccagtgaaggaacactaggcataaatgtgttaatgaagtaacgtaacacaagttaagtaaggtcatatcattccaaataagagctgacgtctctgtagtggccctcaaagactatccccttccttgtgcacccagctcccacttcagagcctttgcatgtactgttccctctgtctccctactctttccccaaacagaatgttgctgggtccctgcttccttcagctccctcttcacatgtcaacttattggtgaggtcttctctggccaccccttttaaaaataacaatcttgtccttcctggaaacttttttttttttctttctccaacactgttatcaccatctagcaaaaataaattacataatgttttattcatttatatttacatgtttttattatatggtgattctcattagaaagtaaaccttggaaggccatgtttgtgtgtttttatctctgctgtatctccaggccctggattattacctgcaaagtcataggtgctcagtatatttgttgagtggatgaatattagactccttgaagttctatccatgttgcattggtgatgatcataacagcattgcatctctttatagttttaaaagttctttcataatgactaagctaatttgtttgatactcagcttttgagagatcatcctcacaggtattataccagttttgcgggtgaggaaatttagcctaagttgtgtggcttcccagagaccatttaatttaatatatgatcctttaaagacagttccaagttccccctccacctccgagaatggagtcttgctctgttgtccaggctagaatgcagtggtgcgatctcagctca

SEQ ID NO: 100291 - DNA, 1037 bp, Homo sapiens
ttgtggcctgtgtgctaggccctgtgctgcttcctcttccccagagcatcagtctagtggctaaggagatactgctggtaaataatgagaagaaggaggtaccatgctttgtggggatccccccaggctccccacactgggcaagtcccttttcagtcttttggggtggcttgacacaccccttcatggcatcctgatgttagagctgaattttgcctctggttctacatgcttatcttcatagtactgtcactgtcactttttgtggtatttctactctaatatcttgtgattttagaggcaactttatttctatctcaggagttgtcagcctttttctttgaggtacatctcatgatgtgtgtgtcattagttctcacaattctacgatgtctccttcctcccacccacagttttaaaatagtacggactatagttgtcatagttttacaatgctctgcaatagttattattcaggatgggggaaatcaagattttagattatttgaagatgaattggttttcacagctctgctgttcactggctcctggtgggacatttgtggctttgacaatgtttcctcaggggaacatggggaattgataggctttttctcagacccttctggccgtgaagcttgatattctttcctcagtgtcgtgacctccttgtgggcaagaagtttatttccttagtgttttctggcacatatggatctcagtaaatatttcctgaataagtacggtcaagaagaagagagtctgccttgcctctggaatgcaagggtggttcacctgggccagccaggtggcagtggtttttgtgctagctgggcagtgttttctttcacggtggggaaaatgttttcttcttccaagtcagattcctgtaatacaaaaaaatagttaatttagctcagtttagcttcttaatgtcaattgagtgctaagtgtttaacttatgttgctgcgtaatatggattccccacagaatattttttccaaggatcttctgcctcactgtgagacctctggat

SEQ ID NO: 100292 - DNA, 1145 bp, Homo sapiens
ataatatttcagtcatatggaattgttttcctgtgccttgtgattgttttagggaacgtattttaattcttgtttcttttttgttttggggcttttttggtatggctcatttttattttaatatttgttccttttttacaacttttattttagagtcagggggtacatatgcaggtttgttaactgggtatattgtgtgatactgaggtttagggtacagatgatcctgtcacccagatactgagcatagtacccaatagtttttcaactgtttctctccccataccccgctagtgtccccagtgtctacggttgccatttttatgcccatgggtatccagtgtttagctaccacttataagtgaaaacatgcggtatttggttttctgttcctgcattaattcacttaggatcttctttcttatgtagtagcttcatatggatgctgtttctcctttctgtttagtgtagagagtcacagagtttcttggacacacaatagcatgtgtttctgtgataggagatgagcggtttgtgtgacttcatgggtttcttagtttaaatgctgcgttgtgtaggtacagttaagtgcggtttctttaatgaatggtgctgtggaggggtaggtttgtgtgacttctaattctgtgatactcttttgtttcaagaacgtatttccatcacttgccttctttcctttcactgccaaacctccatagagctgcccccaccttctaagttgccttctcccagaagcagtgtcttctggaaactgcagcctgtggcaaagcccttctattcagttcccaactgcagtgctctaacctgccaggtcttccacctggtctggggtgtttgcccaccctggtagggcacttccttgctgagagttcttccctggacaatgattgccaggttaaactcccctctcctgtcgacagacgcccctctgactggcagcagaggcagtgttgctagctctggtagttttggattttttatttcctaaattatatttaatggaggcttgctgaatactgcctccttttgctgtaggcacggattatgggtggttgtgtatgctttttgttgatctataaggtttttggaggatgtgtggatatatttatctaagcagccaccat

SEQ ID NO: 100293 - DNA, 1067 bp, Homo sapiens
acagtgaaaccattggggcttttgatgggtatttctttgataactttcttgtttttgtctctggagtttgtaatgtttaaattttctatctctactgaggtcaattttggtaaattgtgttttcctaggaaataattcattttatctaagttttaaaaaatgtatttgcattgtgcatagtagtcttttctgacttttaaaaatgttctgttttagtaattttcttctgtcactttatttttgtgtttgtgtttttccccttttttccttgattctttttctctaaacaaccaatattttgattgatttgttctactggttttgtgttttctgtcttactgacttatacttttatctttattgctttctttggcttcttttgtttttccctctggttcatttttctagggaggtgtttattcactgttttcattgctttatttgtatggattaaaatattcatggctatacatttttttcttaaaactgcttcagttgtattttatagatcctgttacataatgtttttatcttagtttgtttcccctttgttgcaagaggcttttattgtaagggttttattccaggtagaaagaatggcctttctttgtatattattacttaaactttttttttttcattatgatcagagaacttactgagattttcgttgccacttaatatattgttggtgttcatgaatggtccaggtacactttacttaaaatttttttttcgacacggaatcttgctgtgtttcccaggatggtctcgaactcctggcctaagcaatcctcctgctttggcctcccaaagagtgctgggatcataggcatgagccacctgcacccagcacccatgtacactttatttttttggagacagagtctcacgctgttgcccaggctggagtacagtggtgcggctcactgcaacctccacctcccaggttcaagcgattctcctgcctcagcctccccagtagctaggaatacaggcacacgccaccacacctggctaatttttgtatatttagtagagacacggtttcaccgtgttggccaggc

SEQ ID NO: 100294 - DNA, 1030 bp, Homo sapiens
ccaaggacccaggatttcttgtgacgtctctgctcaggggagagccacactctccttgtcatctcctcaccaccccatgtgctatgacttggaatttccagttccctgggttcttccctctcgcccttcatagtgctggcctgagggctggaggtggaaggagctgggggcagtgagctgcctccccctgccctgtacccttagggctcccgaggccttgcacaggctgctcctcacagggctgtgctggggcaggaatcctgcaggctggggtgggggcccagtgccaccaggtagagttggagccctgggagagggatggagcagtcactgcccagtccagcggtgctctgggatcagcgggggtgggtggaggggtagataagggcccagtgtttcacctccatccttcttcactcccactctgatgtcccgtgcctgggcatcttctgctttgaactgtaacccacactgattgtcccctctgtttcctttcacagaaagcattctgctctttccagatctacgctgtgccttggcagggcacaatgaccttgtcgaaatccacctgtcaggacgcctaggggtctgtaccgggctggcctgtgcctatcacctcttatgcacacctcccaccccctgtattcccacccctggactggtggcccctgccttggggaaggtctccccatgtgcctgcaccaggagacagacagagaaggcagcaggcggcctttgttgctcagcaaggggctctgccctccctccttccttcttgcttctcatagccccggtgtgcggtgcatacacccccacctcctgcaataaaatagtagcatcggctccctctgagttcttggctgtctggggatgtgcacacaggcagggtttccgcagttcctttatgaagcctccttgtcctgctggtgtgaagatgagaggagtacctgggagctgacgcggccacagcaaggccatcaggcaagctgctgctataggagtcctgagtctcagagcagggagagcagcc

SEQ ID NO: 100295 - DNA, 1200 bp, Homo sapiens
gttttggggcggcactgtgcagggaaagcattcagttctcttctgaagttgcaaccctaagacatgcaggtgtgtgactcactttagaaatattgccttgaaaatcacacctggaatggaagcacgtgggaagcaatgtttattggcctaaaacatcaatgtatgtgagcatctcatctcctagtgagaaatgaggaaaaatacctctgggttaaatggcaggaatgagatgctctgtggactgaatgccaggaactggaagtttgccgaaatttcatcatcacatgagaaccttcctagaatagatccagtgtccctgccccctgggtcataggtagcggaattcagttaatccttggcattggcatagagaaacaagttaccggggaggcctggggcatggcatccctgccagctggcaggaggaggtggcttgtgtgccttgcaggtgacaatgtgggcagctcatgaaggtaggcttgaagccccaggcaagcccagtgacccggtcacagtgaagtgcctgtgtgtgtaagaaactgacagaacgtgctgtccctgcctcctgctctttcacatgtgtagatcgtagctggggtgaactacttcttggacgtggagctgggccgaaccacgtgtaccaagacccagcccaacttggacaactgccccttccatgaccagccacatctgaaaagggtatgtgccttatatgggtccagggccagtcatacactgcagaggggtgtgtgtgtgtgtgtgtgtgtgtgatgcacatgttctgcagggtacgtgtgcatgtgcctgagtgtgtgtacacgtggagatgcatatgtgtttccaagtataggtttgtgtggggaagtgcacgtgagtgtgtgcaagtgggtgtgtggatgtgttggggaagtgtgggggtttatgcatggataggtgtgggtgtgtgagtatatgtgtgtgcacatatgtgtgggggtgtctgtgcacatacattcacatacatgggggtttctgtgaacatacatgctgtattatgaggaattacctgccctgtgtgtgtgtgtgcatgtgggtagatagatgtatgagggagtatgtggattcatgcatagatccgtatgggtgaaggttagggtgagttcatgtagatgcctatgtgtgtgcatgtagacggggtggtgtggagaggagtgatgaatt

SEQ ID NO: 100296 - DNA, 1342 bp, Homo sapiens
gaaaggggaaagggacagaggagaaggagcctgaagagtggcggcatggaggggcccgaagtggggaggtgggaatggtcggatggatggggaggaatggggaggataggagaggcaggggaggctggaagacagtaggagaggagggggaggggaggggaggggatggatgggaatggatagggaaggccagggagactggggggccaggggaggaggggagggagaggggaggcgggaagggagaggagaggccgggaggggctgggaggggagggaaggggatggatggggaaggacagggaagcctggaggggcaggggaggctgggatgggaggagactgatagggagggacctggaggcggggagaggcaggggaggcggggagaggcaggggaggcggggagggagaagggaggtgggagggacgaggcgttccggaaaagggagtgcaggccgcggtggggtggggcggcgaaggccggaagggataaaaccgcagtcgccggcctcgcggggctcacggcctcgcctcggtatcgcagcgggtcctctctatctagctccagcctctcgcctgcgccccactccccgcgtcccgcgtcctagccgaccatggccgggcccctgcgcgccccgctgctcctgctggccatcctggccgtggccctggccgtgagccccgcggccggctccagtcccggcaagccgccgcgcctagtgggaggccccatggacgccagcgtggaggaggagggtgtgcggcgtgcactggactttgccgtcggcgagtacaacaaagccagcaacgacatgtaccacagccgcgcgctgcaggtggtgcgcgcccgcaagcaggtgcgtgccgccccccgcagggtccgaagccccggccccgccgtcccagcctccccccgcgctgctcccggaccccgtgctgctcctctccggcgcctgggcttctcacccggaccctgttcccggtcttcgctgtcacccccgagcccttggcgggcgtgtccgggaatgccctgagtctggcctggcctggaaccgcacggacacgtcaggtccgcgcccggcgcctaagatcagcttccaggagccagctcgagctgcgccgcagcgcgggggcaggcacaggacgtcccacacagctctgtcccgacctcctgggacgctgggctccgggtgcgctgctgaatacgcaggagaaggaaaaacagagcccctcatctggctgcctccttgttcttccaccaaataatttttaagcacttttgtttcttttaactttttattctcccgtaatttcagacttacagagcagctgcaaaata

SEQ ID NO: 100297 - DNA, 1049 bp, Homo sapiens
tggcgggcacctgtagtcccacctactcaggaggctgaggcaggagaatggcgtgaacctgggaagtggagcttgcagtgagccgagatcccgccactacactccagcctgggtgacagagcaagactccaactaaaaaaaaaacaaacaaacaaacaaaaaaaacaaaaaaaaactgtggatattaagtatcacacactttgttcacaatgggatcatcaaggctctgctggaagcctctcctaactgctctggacttggtaaggaccctgcagcctgcagcacagctgtcccactaaagtagcctggagcaaggagagtcatttgtccagctgcatctctgtccttctgccatctgccatggccctgctcctgtgggtcctcttgtgtaacattcattggtacacttgctaatctgaatgttctgggtgtaggtgtattagctgtaaatcggagccctagatatatttgaggacatcacagtctattttagaaccatagacatgaaatgtatctgttgactcaatatgtgcagaattctgtagcttccttccttgcctattgctagacctcgagtttctgatttgccacatacctttccaggaaaaacatgcgtcacactcttgggacacaaaaatgagtttgcatccctaatctcagcaacggttctctctgttgctcttcacatgcctacagggcaaagtggcacagggctgcttagtgagtgctggggtgaccaggtggccctaccgtctcaccattgatgttgggccatagcccgtcctcaaacacactgttttgttttttttttctttttttaccagagcagggccacatggacacctccctcctccctaagctttcctgcatcccattgattgtcttcagtcacctatctgtcccacccagagtctggcactgcagttaccagctagtctgttctgctacttcagccttgcccccggtgcacctgggactgtagcacccagactcatagacagtgggaacaaagggcttcctgatggtctctggatcagagagccaagctg

SEQ ID NO: 100298 - DNA, 1119 bp, Homo sapiens
tctcaaggagaaggaagatgcccagggtgtcatatttgtctgaggtcaggcctggtgggcagaggcggtcatcctctggactcactggcgtttaggaccccctcagcggggaagaggggggctcagagtggctcctacatatccaaaccccagatctgccccccttactcaacctagcagctaaattggggtggattttaggaatccacatggattgttcccttctggggtttttgtaaatggcactgcaacatttttaataaaatttaaattgcagagcagactgggtcctcattcttaggcaatcttaggtggcttccgcccatatttgctgtcttcatgtttactccactcgcccaggtcagctgtttatgctgtctggatgcctctcagtgttctccttaggagaccaagtcctggacatcagggcacagtggagctgggacttattttagaagatcagaaatccgaatatagaaagtgggatgctagactttccccttgcagcacttgaagcaaagttgcaaaaaatcctgacaatagagacatgccattaaaagagttgaagcattttcagttgtctcattctccctattctgccaaattctgtggtttggtagtagctagatgcagtcatgaaaacaacactgctaaggggaaatggtttctttgtaactggtccagaacataggtgccaggatggcaggaatcagagaggagtcacagcaaatgctgaacctccagtgccgaccccaagagtatgacttagctcccaccaactctcaagtcctggccccagtttatcctaagtgccttaatttggcaccgccaggtctggttcataaataatctccgggaggaatttccatgaatgtgaactcagctgcagctgagaacatacccattgcccaggtaagagtctgtctgtccagccatccatatccttagcaagttataagacaaggggcatgtggaataagatgaggtgaaacctctatctaactatgccacatgccaggtggcagcacacccacatacccaaaaagggaaagtgtgactgtgatgccacgtctgagttgtcaggaaaccactccaggtttaggagacagaaattccccc

SEQ ID NO: 100299 - DNA, 1044 bp, Homo sapiens
agaaacccctgatgcagacaccttagtgtgagtttacaacctgatgggttatgggcatgttttatttagccccttgagggatttagtgtacacacatgtgtgtatgtatgtatatgtgtgtgtgtatttcaattatttgtgattataaaataattctggagctccagtttctctgaactgtttttcttttctctgtctactggcttatattttatttctatcattagatgttacccttaaatttttaatatgcatttcttaatgtgcaaattctggagttaatattgtccatccttcttcctaacaatacaaggagtttagaatccccttgctttcttatgctattgttctgtatttcagttccttctaacttttgttccagtagaattaaccattgtgagtgtggttagttttgctgttgttttctatagtcaatgctcattaaatatcactcgtgttctttacttactttccaccttgcatctcatttttactttgtctgatcagttttctttttttctggagaatatgctttagtagccttaatgaatggctgttagtggttcattcagtttttgtacaaaggccttaagttttcatttgtgaatgatagtttaaataggtgtagaattctaggataaaatgttctctctcacaaatgctgaaattatttttgatttccttaacggtttctaacatagtttggatgtatgtccccagtccaaatctcatgctgaaatgtaatccccaatgttggaggtagggccttgtgggaggtgattggattatgggggtggtttcttcatgaacggtttagcgctgaccccttagtgctgctctcaccataatgagtgagttctcctgagatctggtggtttaaaggtgtgtgccacctccccgctcactcttgttcctgctttggccaggtgacctgcctgctcctcttttccttccaccatgattggaagcttcctgagtcctccccagaagctgagcaaatgccagcaccatgcttcctgtacaggctgcaaaaccatgagccaa

SEQ ID NO: 100300 - DNA, 1057 bp, Homo sapiens
tctttataaattacctagtatttctttatagcaatgctagaacagcctaatgcactttctgttgctgttgttgagaaacctactcttggtttgctttttttcctataggaatttgaaattattttctctgggctgggcgcagtgactcacgcctgtaatcccagcagtttgggaggccaaggcgggcagatcacctgaggtcaggagttcaagaccagcctggccaatatggggaaaccccatctgtacttaaaaaaaaaaaaaaagttaggcatggtggtgggcgcctgtaatcccaactactagggaggctgaggcaggagaatctcttgaacccgggaggcagaggttgcagtgagccgagattgcgccattgcactctggtctgggtgacaagagtgaaacttgatctcaaaaaaaaaaaaaaaagaaaagaaatatttttctctgtttgagatcatatttttgtcttttgtattgtatagttactacatttagtgtgggatagctttaatttaccttgtattatgtatgtctgaatctgtaaattcacatcttttattagttctgagaaattctcagatatcttcagatattgcctcttccccattctcaatgttctctcagtctagaattcccaatctattcatctggattttctattagtagattgggagaccttctcatttttatcttcctaccttttaatatgtctttcataatttccatattatgctgaattctaggtagtatcatcagttccatattccagttcaagtccctcatcagatatttcaagtttgcttattaactcatccatcgtgtcttaaattcagtagttatttttatttcaggaaattccaatttgccttgtctcttttaataatgtatttttccctgtgtggatttggtttctccttgtgtgctagaatatcttaaaagagacttactttatctatcacttgaaattcttggaaagatgctttccctgctgactgaggctcagggcaggccatttcttggtaaattttaaaattttgaatgtcaacctttctcc

SEQ ID NO: 100301 - DNA, 1057 bp, Homo sapiens
tggtgatgtaatggtggttgtggatttctggtagtgatggtggtggtggtggtggtggtatggaagggatgatggctaggaatcagtaaaatttttctgtaaagagtcagataatattttaggcttcatggacaatatggtctctgtcacaactgctcaactcttcccttgtcatgaagaagaagccatagacatatgtgcatgaatggttgtgggtgtagtccaataaaactttatttatggacactgacatttgaatttcacataatttttgtgtgtcatagaatattcctattttcttcaactacttaaaaatgtgaaaaccattcttagcttgtgggctgtacaaacgcaggtgttagatgtatttgttctgtggccttgattttccaaatcctggcagtagtgtcagcagtggggatgatggtggtaatggtgatggtactcctattgacagtttcagtggtggggacggtgatagtggtactcctgctgatggtgtcagtggtggggatggtgacggtggtactccttctgacagtgtcagtggtggggatgatggtggtgatggtggtgagggtgatggtagtactcctggtgatggtatcaatggtggggataatgatggtgatggtgtcagtgttgggaataatgatggtgatggtggtggtgatggtgtcagtggtggggataatgatggtgatggtcgtggtgatggtggtaatggtgagggtggtggagttggtaatggtggacatggcagtgtcacaggggaagaagcttcctccctccacattatccttaaaaatgaagtggagacttacaaagctaaagggagttggcacaacttttaaaagcagcaatggtctgaatctgcaggttttcttgtttccaaaatcacatcatatctgctatatatgtctgactgcttataaatcagatttggagttcctgtggattgtgacccagtggtgctgtgctatgacaaagcatcactcaccagcagaagtttgggttggctttgtgaacaggaagtcccaggccaccaaaaatgata

SEQ ID NO: 100302 - DNA, 1016 bp, Homo sapiens
tatttctaataactcataattggaaaagcaaatgctcttcatttttggatgaatggattaaacacatcgtgttacttattatggactattactcaggaaaaaaaatgaatgaactatggatacacccagcaacctggatctcgagggtattgtgccagtggaaatggtcagcctcaaaaggttgatatactgtatgtttccattcctatgcctgctcgaaaagacgaaactgtaacaaccaacagcagtgcagtgattgcaaggggttaaggatggggaaaggtgggatatgaaaaggaaaaatgagggagttctttggaggtgatgaagcatttctgtatcttggcatacatctatacatgcaacaaaatccatagaactacacactgcaaacacacacacgcacaagaatgaggcacagatacactggtgaaatccgattaaggtctgtggtttagtcagaagtgttataccaatgtcattttctggattttgatcattgcattatggttatgtaagaggcaagcaagggtatatgggaactctctgttctatctttgcagttcctacaggaactctgttctatttttgaaaattttatgtaagtccaaaattatttcaaagtgcatatatatatatacacacacacaatatttcaaagtgtatatatataacttatacatatatacacagatatacatttatattatatgaagtcatgtttaatgaatttgaatattctttctgtagtcttcaaactgtaactaaaaatatcacttaaatacatgcttttctttcaacaaagcagaacattttagaacagtgaagaaaaaaaggaagttagtgattattaaaaatagctaatgtccaattacctagaacaccccagcccatcccttgataaataaccagaggtttactataatttggttttacacagaggcaaccttttgaaattgacccattgacagtttttttgaagaaacagacattgacccttctgatcttaaagcctg

SEQ ID NO: 100303 - DNA, 1142 bp, Homo sapiens
cgtgtctcagcctcctgagtagctgggattacaggtgcccgccaccacgcctggctaatttttgtattcttagtaaagacggagtttcaccatgttggccaggctggtcttgaactcctgacctcaggctatctgcctgccttggcctcccaaagtgctgggattacaggtatgagccaccatgcccagcccatgtcttcatctttccttactgcacttgcaaagccacattgcatctgaatggcactcttatcttgtatcaacggaaaaatttccaacatttcactgttaagtaggctctttaggtaactcatttttaaatcattaatggctgttggatttaccgaaagctttttgtgcaaatggaaaacaattatatgaatattttcctttaatctactaatataaattacattgactggtttgaaatgttaaaccaaccttgcattcctagaataaaccctaattgatcataatttgtatatgttgctgaatttgtgtgctcttttgcttaacatttttgtgtttctgtttacgagagagattgatgtatattatcctttgtggtaatttcttcattaagttttgatatcaatgttactctggttgtgaagagttccctttttctgttctctgaacatttatttaaaactgacctatttttcaaatctttgatagcagtcattggtggagctctttgagcctggacttctcatcataggaagattttaaattagtgatttcctttctttaatatcgatatctctgattaggctttctgttgtttctcatatcggttatggcaagttatatttttctaggattttgtcagtttcatcaaaataatcaattttaataatatttttaaaatatgaatttgggcctttaagaactaaagagaagattatcttttctggggatggatggatagacagacagaaagaaatacttcaaaatgacaatgttattgttttacattgttgatatttatctgtagaaatccctagattccactactttgctcctcatttcttcctaaattttttaatcttccagcttgaatgatacccttctgcctaaagaacatcctttagaatttcctttagagtggcttttcttgtggtaaacactctctgttttat

SEQ ID NO: 100304 - DNA, 1166 bp, Homo sapiens
caataatttcattacagtaatgttttccctaaaaatggacatatcaattgttttcaacttctccttttgcaaatataggatatccacaagtgaaattccaccaagtcaaaggttattcacatgtaaatttagctacatactgtaacttctcctccagaagtccgtaccagttttcattcctattaacaaaatgtgaatgcctgtctttcccacctgagctcagtgttccattttcaacaatctgatagataaaataaaagatattgtcagtttcagtttgtgtttcattggttactataaagctgaacatctttatgtgtgttattttttttcctgcttttatttcccgtataaatttctagttctacatttaccattttgtattgggtgttcacattttattaatttgtagaccttatttttctgacacagtttttagtctgctgttcatgagctttactgcaaacatgtcctcctgccagacttggctgtcagtggtgcctcttgctgtagaaaggagtcctggagtatcttcagtggttgctggagggaagcttccagggcactacagtccagttctttacagctgctgagcattggttgtgcggtgtctcacagtgactcagcagaagacagagcctgcactagtgtctcccaggcatcatcggatcctgcagctcccacacggcagccccaggagcagcctggcagtgtgactcagcagctttccttgcctgttctgagggggcgcagctggggacagcacgggcttctgcccactcctcaccctgccagcgggaagcctccaagacttgggaaggaaaggcagtgaagacctcacttgtctcctgctgggccgtgggcccaggtgctggcttcacggtggtgactcatgaacacacgaagaattgggtgtgcagaggaggagaaaccatgcagtgaagagccccatcgtcctgtcacaaaatccactgctaactttttatttctacacctatctcctcatgcttcacagaacctctgaccaaagcagcttcctcttatcattcacagattttataactttctgcctttccgaacgcgctcttcattcctggtcatcttgcataatttcccgcccgtgattctaaagaagagaacctattgctatgataaaagctcactgc

SEQ ID NO: 100305 - DNA, 1104 bp, Homo sapiens
tgcttgttacagtggagtgcaggaagagggctctgtgtgacctcagaagccaggaatcattgaggccttgttgcttctgcctcactcactgggacacttgctcttggagtcctgagctgcaatgtaagaaatcttcctccctgagacctccatgctgtggggaagcccaagtcacatggaaaggccacttgtaggtgttctggtcaacaggcttagtctcttagttatctcagcccaggaaccagctatctgagagaagttacattggacctccagaacagcccattctccagctgagtgctccctgaattcttgactccagaattcataagcacccagtggtggttgtcttaagccactggggtacttagccacagaacaatagatcaccagaacactcactactgtgtcctaggtactgttctgaagactggtgtatattaacaccctagtactttcaaagaccccatgacacagtaactcattatcttcagcttacagatgaggaaattgaagcacagagaaggaaacttgtagaaagtcacactacagtgaagcaatgggtttgaaaccggtcagtctgaccctggaaaaatgctcttacattagcaaaaatgcttgagaggcagtttgggaaggaactgttagagaaattaaagttaccaagcgtgcctcctgggatccatctgcagccaaatgaatgatgtggcggtgcactgctctctcctggtggtgaagtgagcctcctgttggaatgaggaagccaaactgtccttaaggatcttgccacattccaggcaaaacacccatgttaattacttttttcataattatttcaatgggaagcatctgcacccagttgggcctagataatctgagtaggaacacagctcgtttacccacaactcgagatgagcagaccaaatagctggttttccaaccattagacgagagcccacgctgccggataggatgctgatggctgcattggtgccacagctgtggctgtggctctcactgaaacagctcagcaaggaaaactggcacagggctccagagaaaagagggagagaggacaacggagagtgaaagagggaagtgagg

SEQ ID NO: 100306 - DNA, 1119 bp, Homo sapiens
agcaaatgtgattctcaagcagacacaccagcttgagcatgagagctctggtgcgtctatatgcagaacctgcagagttgggccagaactgaggtcaagagtcagccccgtgccactgccttcctcctcaacaccaccagagagactggaactgtgccccagttagagaagtatcgcattcctcctgtccccccagagcccagcccaggccccagggagaccacaacacacaagagagacatgggctctgccttggggagcttacaagtgagcaggaaggcaactattccgcaagtgggtactcagatgtgtgagccctcatgagctcgggaagcccggcatgggtgttcccacaggggtcagggaatgaatgctgctggcaggtgcccagtcagctgtagcagctccaccttcctctctgcacccctttgcatagccctggggatggcactaaggctggtgatcatggcggggacacaaagccatgaccctaatgagcaatgactctttcagttagcgctaaggaaaggcaattacaggaaattgtgttcgaagatgtgggcgtgtgtgggagcactgctgcatgaaacagacttggctcaccacgacttcattcattcattcatttattcattcattgtcctaggaggcttcccattttgcatccctttatctctgctccctccagaattgtccatagtgagctctgaagctcagttccaagacaaaaagttggggaggaaaaaaataaaaactagcttttaagatccgaaagttagaggagcgagaaggaagccaagcagcggcaggcatcccttccccacacgacacagacttccagagctcagagaccatggaagatgcaggttcacgtcatgagccatctctgagtgtgagcctttctggtccactgcagaggtgttggtgtgttttagctggtgtgtttgagtgaatgacatgccgactcccatactcacctataaaacctagtaatgtcactgaccttaggtggaaatgggacccggtagaaatctggctttctggagacggccatgagaacgagctaggacattctgccagggtagtcctgaccacagggggcccgcgggtggcttggga

SEQ ID NO: 100307 - DNA, 1048 bp, Homo sapiens
ggagccctctgcccgtggaggggtggtcctcatggaggagctcttctcctgcccctatttttcattttgaaaaatttcaaacctacagaaaacttgaaagaacgatttaagaaaatgtgcttttcacctctgtaattgctaaatgttgctgtgttcccgttctcttgctctctctgcagagatatgctatatatgatatacatatgatacatatcatatgtatgtatatgatacatatataatttctggattgtttgaaagcttttcttactctaaccctctccactcgcaccccaggacgctcttccagagctgtgtctccgcctctgggacgggaggatgtcatctgaggagctcctggcacaggctctacctcctgttctcccggatcctcagtcgtgcgggagtctgggaggcctggcttcctcaggggtgaggtttggggcgctgcgttagagacgtggtgacggtgtttttcacagtcctgggagggagtgggctggggaagagagggcacatctgagagaagggcctgctgctttacctgcttcaaggtgtggttggtttggaagtcacagtcatccagacgcaggtgctggtttttcttgcaggtagttctgccaatttccacctccagcatatatttcaggcctttcactatctggagggagcaaagggactgggttactgggcacaggggagggagggcaggcttctccactaggaagcagggcctcaagacagtggtgcaggtgcccaccgaggagaagggaagtgggccagcatcttggggcaatgcttcgggcttacggcagagcctgcagacccctcccactcccctccctgccccgtgctgggtttgtgccccttcctgagacagatgtctcctttctggccagagctctgcactcaggagggacgtcacactaggtctcctgcatgccctgctgggcccgccctgcagccctcactccagccccatgatggctgtttcttgtggcctctgtgtcaggcctggggtctgcgggcttcccctctccattcctgg

SEQ ID NO: 100308 - DNA, 2317 bp, Homo sapiens
ctgtctgcttgaacatttccagtgactgggagacattattcgttggacacttgtttgggtattttcccttgtattaaaagctagaaatctgtctgttaatttccattccttggtcttaggcagtggagtgctttgtcataatttccgaccaggtgtccttctgctctgccagaaatcacgcctctcgccatctgttctctgcttaatactcttcaacagtcccgtgtgaccacagagtccaggtctaagctcttttgcctccgtccctgtaggcgtccctcaggatctgcacgccccgctttgaggaaagcagtgggattttgctttttgttttggaagccatgttgtgtggtctgtggacctgcttgctttttttgaatgtgagctgctctcaaatctccatcatttgcaccttgcctatttgaaatgttttaaatctaaacagaagacttgtgtattccagggaagctgcgctggttgtgatctggtgagtggaggtcattctgagccttggctgcagtgctgtgaccacgtcggatgtgatatgtctctctcagttcagccaggccatccagagatgtgcttgcgttgctgtccttgtgctggggagcctctttggcctgatcttcacagggacaggggtggggtggggcctgctttggggcccctgggctgggagtgggagctggattagctgtcctgtggggcactgccctgtggggctgccctgtcatgggaaggagtcagaccgttcctggatggtgggggcggcacggttgatctgcgcacagtgttcttggccagctggtgaactttccctgcactgtgcttccctctagctctttagtcaagagacggtgatgaagtttgtgccgcggtacagcctcgtcctagaactcagcgacagcggtgccttccggagaagcctgcatgatcccgatgggctggtggccacctacatcagcgaggtgcacgaacacgatgggcacctgtacctgggctctttcaggtcccccttcctctgcagactcagcctccaggctgtttagccctcccagatagctgcccctgccacgcaggccaggagtcttcacactcaggcaccaggcctggtccaggaggagctgtggacacagtcgtggttcaagtgtccacatgcacctgttagtccctgagaggtggtgggaatggctgcttcattcctcgaggatgcccgggccccacctgggcttgtctttctgtttagagggaagtgtaacatatctgccatgaggaacataaattcatgtaaagccattttctcttaaacaaaacaaaactttctaagtacagtcattctctaggatttgggaagctccttgcacttggaacagggctcaggtgggtggagcagtaaggcactacccagagagcttgctgctgcggccctgtcctgcggcctcaaagttcttctttactatatataacgtgcggtcatacctttcttcgttgtggtggggatggaagagcagagggagcatggcccaggggtgttgaggccagcggtgagagccgtgttagccaagacatggaactgtgttctcaagggttatgtggggcgtgggctctccatagtgtgtatgaaaagcttgttgactctagcggctcagagaggactttgctgggtttctttctgtgaatatctccgtgctgaccatgctggaattggatgattctgcaattcgggacctactgcaggggtccgtttagtaacgtcttgtctgtgatctttgttcttgacctctagaccccaagatgtgaacagtgcacgtgttaatgtcatctttgctcatgtgttataagccccaagttgctgtatattttcacaagtatgtctacacactggtcatgattttgataataaataacgataaatcgacttctgctgattaaccttttttgatggtgtggcctgggagtttcttctctactttaattaacagtactgaaatttaattccatcaggtgtcaatgtaaggattgtcttggtgaggatgatgttttaaggccaaacagtccatccgactagctcaggagggaagctgtgggacttctctcaggcagccgtcttcaggcaaggagcaggcgaccttagaccatctgctcttgatgccgactccctctggcgtaagttgatattacacttccctcctgttttccagcctacgaaatggggctgacatctgttcctttctttcctgggtatttgtgagagtaacaagagattgtgtctccaaagatgtttggaataacttcacagacagtattttaaatagat

SEQ ID NO: 100309 - DNA, 1912 bp, Homo sapiens
attattgagaagttcctagttcaagtcaatctttttctttctttttaaacttcaggtgaagtgaaactgctgctgtcctccgagacacccattgaggggaagaacatgtcctttgtgaatgatcttacagtcactcaggatgggaggaagatttatttcaccgattctagcagcaaatggcaaagacgagactacctgcttctggtgatggagggcacagatgacgggcggtgaggccttgctccaggtctcccatttgttgagttcaccagccaggccagttgcttcagcagagcctgttacttctagggaccaagggagtatttccagcatcatatttcagcttctaggacaggaccttagtggcttctggaggcaggtgatggatgtcacaaaatggaacaaggtgctttcgttttctctgaggaaataaaacaggccagtccgtctgagggtgcaagtctaggcagtcgagagagaccccggagccaggcctgggctttgggttgcctctctgaggggtattcctgtccagctcccaggtgagcaagataactgaccttggggttccctggaggggacactggatctgctgtggatggggaagggcccccaggggccagcctcgaatcaagtttgagcagggcacccagggcctgttgctccggggtgaggcggagtcaccttcttcaggcccataccctgaaggcccagagtgggagccagggattctcccccataaccctctgcttttggtgttccacagcctgctggagtatgatactgtgaccagggaagtaaaagttttattggaccagctgcggttcccgaatggagtccagctgtctcctgcagaagactttgtcctggtggcagaaacaaccatggccaggatacgaaggtgtgtgtgggattagctgagccatcagttactggccagagcgcatcatggccggggtggggtgggcatggaaatgggatcgacagaaatcagaggcagcagcgcaccttctgcatggcatgttaaagaaaattcaagggtgcgctttctttctcccattgcgagtcgcagtccggaagagtgtcttaaggctgactggtgcagcccgggccccattcccctgctggcagggccttggtcctcccctgacctacttcccctctgttcatactgggccctgtgcacaaaggtttcttctcagcagctgagcctttgttcatgatggtcatagagcactttccatatatatatttggaccaagaccagtttggtgcttggctaaaattttttttctgaaattgaggggctatggttcactctctgcttgggtgaatttttcagagtctacgtttctggcctgatgaagggcggggctgatctgtttgtggagaacatgcctggatttccagacaacatccggcccagcagctctggggggtactgggtgggcatgtcgaccatccgccctaaccctgggttttccatgctggatttcttatctgagagaccctggattaaaaggatgatttttaaggtaactgtgaaaactgttattccaagaaagaaaatggaaatgaattgaatcatatttttttgacccttatagcttaaaaatctagttctgcttgtagtatttggctctgaatgacacttagaaacacatttcattcttcatcctgaaatgcagatttaaacatttggaccctttggttcttatggttttcctttttctgggtgtttttattgtcaccctcaccatcgtggctttgggcatctgcctgcctgtcagtctctggttccctgtttctgggtgttttgattgccaccctcaccatcgtggctctgggcatctgcgtgcctgtcagtcttgctcctccatctgccatggctttgccaggccttctgtgctct

SEQ ID NO: 100310 - DNA, 1029 bp, Homo sapiens
agggaggaggtcccacgagatgctggggtcctgcctcgttatccggcgaagagatggcttctacacttgctcttctgcacctgcccccctcacgctgcgtgaccagtcctcaccgcggttcttggaaagagtggagaacagtagtgacattgtaggcaatttttgtgagaattcagcctggcagtttttcctgatagggatggagaaacataggaaactgtagttgttgacacctaagaaatatcaggttttgccctttgcctcctctcccatctttcagaatataagaatgctgtgttttgttagctaaaaactgaatcatgattcgtaagcatagatttcaatataagatacttaaaattcacttttcaattctgtgtcctgaatttcataacttttaagtttcagggagaatcaagaggccccatagaccaagcttgaagttgtgggactgattgacttatatttgatagaaatactggaaatatttgttcatcagtagtgtgccaagaggtggtggggtacatatgaatgagaggcagtttttgcccctgtagactgagtttattgactgatgataagaggaacacatttgaaggagagcgatggcaggaaggagcatttaggctctagagaggcaatttagagagaagactttgcggtgatagttgactccttgggccagtgaaaagatcgggaagatgctcccatatatcctgaccaaccatcctgcgttgccctggactggggtttccaaggatgtagaactttcagtgctaaacctgggcaaactgggacaatctgatcaccctacttactgtgaatattgtgaattaatcatctgttgatgattgaggagccatttagaatggacatgcaagaattggcaacactttcctacagaaatcttgaaaacaaggcatttttacctgagaaatggaagagcagtggcctgagtttgtcattaggtgcagtgtgttgaaaaccagggcctacagcccctgagggcaccggttaggtagtcccaac

SEQ ID NO: 100311 - DNA, 1089 bp, Homo sapiens
tcttcagggaagctattagaaactcaggtgacttgttagagcactaacttggtcagagccaaatcctggcaaacgctgcctgaccttcactctgtggttggggcggtgagaaccactgaggtccaatgatgagacttggaggtctggatccagtctctctttgttttaatgtgacttaggtgctgtcaacattagcaagataatggaaatcacgacgccagtgggtgcttacctccctgctaggcatgcaggggctggcggttggcaggggaaggaggcccagtgagccgggtcccttaggggagggagagtttgtcctctttgccccacagtctacccttcagggccttgtggcagtgccagtgttcggggggtgtctgggccactgagtacccactcggtcgtggttgtgctggcctcttgggtgagtgaacctgtgaagcccaggaggtggtgttggctgcagggtacacaaatactgagtggtggtcttttgttacaggcttagcaacaaagctgtgccctgggcatggggggctgtagtgtagctacagttgtgcgtttgtgaaatggcttagctttccatgttgctgagaggaacctggacatggtcccgggcatctgaatgatctgtaggggagggagttcaaataaagctttattttgttcattttctctttgtggtgatttttttgggtccagtaatgctactctttttttttcctgaatataatcctacagacaaaattggaaggggccttttctcctggggggttcacactcacagccctgactgctccttggtgagctcacctgccttaccaaggatggctgactgcgctgatgcatcagccacacgtggccacttaactgtaacttaaacagaatagaaatttggttcccagtctgcagttgctgcatttcaagtgcccagaggccatgcacagcaggtcagataggcgcactaccaccatcacttggaggccgcaggcggcactgggctagagcacaggcaagagcgagggacaacctggctctgagtagcgtgcatgaggagcatggcctggtccctgggtcatccctccgcta

SEQ ID NO: 100312 - DNA, 1029 bp, Homo sapiens
ctggcctggcgtgacctggacacacactgaccccatgccagggcactgctgggcagactggcttctcctgccctgcccagtggcttggggtcaggcttgccctcccgctgggaggccaccctgtgtcacagtgtgtcccagatgtcaccttcctccctgcacttctatgtgccgttattccattatttacttaaatgctctctttaaattgacgcattgcaagattgagaatttgtttcagtgctttacaaacagcattttcagttgccatggaaaggctatgctggtaaggctgggatgtgggagagagctggtagggacccctgcccggtgacatgtccagatgtgatcaggagggtcagagaggacggagacgaggacagtttctcaggtgtgactagggtaacttagtgcccccctgaggttacctcgctctggcaggagcctgggcccctcctctgaggactcctgcatttcacatctctgggctgggggtccacagggcactgacgtgtcctgggatttgaaagccccatctatgtctgagtccagtggctgagccagtactccctggggccactgagaggggtccgggcatggtccactgtgtctggggattcagcagcccctggattgaactccataaagcaagtgcaagatcaaggaaaggacaatggaagtgacctttagacaaacgtttgggcatcacaatcactgtctttcatagggtggcctagccttaggtctgttggggtggtgttggggcatggtctgctgtggacgctgctgcccagggcacgttctgcgtgtgtggagctattgcaagtctggtgttgccaggcttcttaatgtctgccagatgtgtggggataatttgtctatcatgtgtatgatgatgtgcattttcctgatttctaatgaatttgagtatccattctataattatgaagagctgatgaacagctcttggttggctctaaagctgcctgtgaatatcgtatatttgtccccactctctctgttttgcag

SEQ ID NO: 100313 - DNA, 2338 bp, Homo sapiens
agagtgtgtgtagccacggctcttggtgccagatgcaggggtggctgcatctgggcaggtctagggtatctctctgacccccggatggtgctgtgtgtgctggaaaattctcagggaaccctcatggccatgacatctccagggctcttaggaggagaaagggtgggcctgttgtgcaaaagtgctttcagatttatttaggtaggactctcccagaggggacattgaggccagagtctgtcttggaagtgtggtagggcagtggtggctctggacgggaatgtggcacacatgcctcaaatggctccatgcaaagggtagggagttgcaggatttgtaccccaattatggagagccattggtcgagggttccccagcacttctgcccatagctctgcaagaggcctttggtgcagaatgactgaaaggcccaagggatgtgggtgaggccctgccagtcagggtcacagctgggcatttgtcccaggctcttcctgaggggctgtgtagtaaccccccgcagctgtgatccctctgggtcatcccgcactggggcacagcgtggaggacacctccttttcctggggtcttgaggcccactgtgcgtgcacccctcttctctgctctgggcctacccctaggttagccatggaagctagggtcctcctggcttccccctgggcctggctgagcaacattggtcattgaagagcaggtgtgggatcaggagggccttctcctgaaggtaaggtgggcaggcagctcccagtcatccactggggtgtggtttctgatctctggacagtgaaggctcttggcccacacaagtcactctagacagggcctggccacatgggacacctttgggcttggcctctggttgtccagctttcttgttctctgcctctcggtatttctctgtcaccttgattgctgcaggtggcatgatggcctctttcctggggtttgctcctgggcagacaggagagaaaggtggaagtctggttgggaaattgtctttatgctgctgactcaaggaggaagagctgagcttcaaagtaatttatctctggttccttcccctcagcctcagaactggacaaaggcctggtgcttcttcatggcacacaaaggctggagagcaggcagcccctcactttttccattgagtcttttactcaagattggactgagtttctcacactcctaggcctggatgtcctatgtgagtcagagctatgagggttaaagtcgggaggagactgatcagaaatgtctgtgttgtctctgttagccaagtgcaaggtggttatcaccttcaaccaaggactccggggtgggcgcgtggtggagctgaagaaaatagtggatgaggctgtgaagcactgccccaccgtgcagcatgtcctggtggctcacaggacagacaacaaggtccacatgggggatctggacgtcccgctggagcaggtgggttacctcgctttgcacagtttgaggcgaggtcatatcaagttagctggctctgaggcttctcgggttgtggttctcaatttgggttccctagaggtgcccagggttcctctgtggtatttggtgagcttgagtcctgactgggaagataaaactcctatacgacaagcatgttggaacacttactgtaacacaaatgcttgcacccacgcttttgttttgtgtcctttccacatttggaattgaacttggacaggtcagagcaggtgaattctgaatcctgtgtgtggagtcctgctgcggagggggagtgctgctctcagagaggctgagtgccctcggtgggctgtttgtttcttctccctgccaggaaatggccaaggaggaccctgtttgcgccccagagagcatgggcagtgaggacatgctcttcatgctgtacacctcagggagcaccggaatgcccaagggcatcgtccatacccaggcaggctacctgctctatgccgccctgactcacaaggtacaggcctgtgcgggcggtgctgggcccttggcagggatccaggcaggggcagggctggaagtcctcctgctgcagagcgaggcctgtaggtgtgagaggtcagtgtttcttcctggcctattcggggcagggccccctcgagtcctcccaccctacagctcctcagggccctggctgcctcaagcccccactgcactgtctggaaactcccagataatctgatcatgtaacgcggcagcaggacactaagggccattcgcccaaagatttttaaaaactctttttagaacagatagagaaaaccacccaaattaaatgcatggcttaatgaattattat

SEQ ID NO: 100314 - DNA, 1034 bp, Homo sapiens
ccccaggagccctcaggcccatcacagctccaccagcctcggccagggctcctttgctgacccgtctcccccaccagccagactcacagcctatacagcacgcatttcttatctctagtccctggttgcagatgccgtgtggcccataggccagcagcattcttctgccctggatcctcgggccccactggacaactgagcggccccccaggtggcccctgcacactggagtgtgcttggctctgaagacccaagctgctgcagctgcccctcgccacggtgggcccagctccatctgcctgcgaacaaagccccttctgagaaggaacttgaggctgctgcccctggagtagttcttcagtaaaagatgaaaaccctctgttgggggtcgggggctaaggagctaactggacacctggaggtccggcagggagggcccagccatggcactccccgaagggccagtttctctccatcagtctctcaggtgtgcctggaccctggggcaggcaggttgtgtgccacgccccctcggctggacgctgcccgtgggagcactgagtgtgtgctaagtagcggttcggtctgtgagcggggctggagccctgtggagacgtgtggttaaacataaaccatgtgagaattctcaggaccacagccagcctgtggaagctaaggacagcttcaggtccatgacactgaaatggccctggcaaagtacttattactctgtctctaaaaataaacaggggccggtcgcagtggctcatgccggtaatcccagcactttgggatggtgaggatcacttgaggacggtgggtggatcgcttgaggtcaggagtttgagaccaacctggccaacatggtgaaaccccgtctctactaaaaatacaaaaattagttgggtgtggtgatgtgcgcctgtagtcccagctacttgggaggctgaagcaggagaactgcttgaaactgggaggtggatgttgcagtgagccaagattgtgccactgcactccatcctgggtgacagagt

SEQ ID NO: 100315 - DNA, 1039 bp, Homo sapiens
attgctttttgtccccctccccttgccttggagagagtggctggctagtgtgtgtgtcgtctgcctcctgaaggttcgggtaaaggaccagggaggtgggcagccctttgtgtcaggagatctggaagcgcctcccctcccaccgcctcctgtgtaaaggaaacagcaggtggtgttgacgggcggttcacgcaccggtttttgccaaggagagaaaaacctactgaaacccaccaggaggatgagtggaagtttctaatgtgcttcattttttgatacagcgtgcatggcaggcatttgcattcatgacccttccgtgtacttgaactgaaaacctgaagaaactggccaacagattaggcagccatcaatccacatcagatggcccctgtatttccaagaggtgacctgccatccccatctagaaagccaaccaggggacagggtagctcctaccaccaacaacactgctctaccctcagattctcttctctgactcctgcctccacctgctggagggtggcctcagcaggagccacacctctctgtttgcctgtgtgcaccctacttcctacccctgccttccctcagtccccacccgctaccttccttacagcctcatcccaccctgtctctcctttaaagaacagactgagatggcattgttttcctcaaagagtctgtcagggagaacctgatcaacacattcacgctgtggtgttagtggttcccacagaaaccccatttcctctccggcaggtgtctcagccatgggcaaacaccttaacctagtggaatgaaattgctgtttagatctgggacacaggtacatggagatgacctgttccttggggagaggggatggtgaacatgattataagaactcttcttcccacccttgtgcaagagcaaggctgttcctggttctgtgctctctcagtactgtgttctagttggactcttgcttttgtcttcctgaacttggtgtgtaacttcagtaattatgtctatgtaaggtatgtctatgtatgtgagtgtt

SEQ ID NO: 100316 - DNA, 1042 bp, Homo sapiens
ggaaggaattgggaaccgggctgccgcattcatcaggtggtgccatgctggggaggcctggggcaggggtgagtgaaacacctcagagttcctgacatcctgaatgtggctgcttctgggctgggcattctcttggttgctgtagatcgttgcctgttttgcagagctcctatgcaatattttaaccagtctctagttgtttttagtgtttctctgtgggggaacaagggcctttgagcttcctcttttgccgtcttgctgtgtcctctccctgtttatggattttctacaggactctgttgtgtgtctggtgacgttatagaaggtgcgggggtagaggagcagcctcttccattctagagaagggcttggatgccatgctgggcagcagcagcacaagacaagctgagtccctgccctgggggctcatggcctagtggggagacacagacctacaggaatcaggtctatgaatactggtttcatcactgctggtggtgggtaaagggagctcagagagtgcgtgatggggcatgtgcaggttgggggcatccgggaagggggtggcagtgacatttcagtggaggtttcagaatgaagacacggtgccagtgtggtgggacaagtattctgggaatgcgtatcagtctgtgccaggggcctgaggcagggagaggctgagttctaggggcagaagaaggcactgttctcagagcactgtgggcaaggacgaaagaggagtgcgatgaagccacaggggccagcagggacaggggccggcagggacaggcccaggcagaggctgcaacatgatcctgagagctgtgggaagcccccgagtgtggtgggacccaggcccagaatagggctggggaggggctgcacgttggcacctgccaggagaggctttttgcagccctgcccgtggcagatgctcagggaagggtggtttttcctgtctcctgctccagtgtgggtggccaggccactggtgaggcctctcccctcggcacggggcactgtggcagtgcttgtcttacct

SEQ ID NO: 100317 - DNA, 1041 bp, Homo sapiens
agatctgcaaatagtcatttaacggtcctgtgtgttatgctttcagcatctcaagtgattaaaataatgcctgtgacactctcttgcaggcgtttcggcgtggatcaccatcaacttcctgacaggtgtgtgcacactgcatcacagaggctagccgatcacagacacctgcggagggctcgactgggcctttcgagagcaggagcctcatttctgctctttaagataacccctcagggtttggcagtgttgctgactgaccatagggtgttggggatgggtggggtcacccacctgtctcacaggtgtagatgctaggagtggggtgcttctctgcaggtctggggcatttttctcccagcacagcccctgccctgtcccctgcagaacatccaccaggacccccatcctctcatttctaagagaagtaacgaatcaaaccagtcatatcttccaatattgaatgtgatgtgaatgctattcaccttctaattggattcctctgctgtaggtggaacagggaacagaaacatctgtttttagaaacaagtgacaaggagtcatttttcttagtgcatgtggattttttgtccctttgctggaattatgggaaagagcagtgtttctgatgtacagacaaaaaaggaaagaagtttcctgtcaggtttgcccatttgccactttgggggatagaaatgttaggagatgggttgggagcctccgcctgagatgctctggggagtggagatgggctgatcagagcagggcccagctcttcctgggagctaagccagcggcctccctcccagctgatacggcagtttcagtatctcccctgaaggttcatgctgtcccatcaggatccaaattaaaccacagctggtggagccattactcttgtcccttagatatatagtgtacccttaaatggagatttgtcaatagctgagctacttctctgtcttttctttcccctgagggcctggctttcaccctggcttttctgctgttctcgcgatcttactaatgcccctgtgctgt

SEQ ID NO: 100318 - DNA, 1700 bp, Homo sapiens
agacccagtggcagccggggttgccgcccacctgcctgtgctgtgcactgggtgccttctgcgctcagctgcggccttgtctgtgaatccggagtgcggagccagcgggtgcctgtagtgggtggaattggggtctgcacttgcccctccgcccccaggtgggagtcacctggagcgtgaagggacgtgtctcatccccagtgtgtcggaccctggagacacagccgcagagcagccccttctcatgcatggacctcacctacgtcagcctgctactccaggagttcggctttcccaggagcaaagtgctgaaggtaagggtgccctcaggtcacgccccagcccctttatggagtgaggggcctagaaccacttctccagttgctggggtcatgtcccccagcccatccctggcttccaaggagccacagcctcctgatgcacaaggctttcctgtctgtgtgatggtcccctctccctctctgtcttttcaagctcactcggaaaattgacaatgttgagaccagctgggctctgggggccatttttcattacatcgactccctgaacagacagaagagtccagcctcatagtggccgagccatccctgtccccgtcagcagtgtctgtgtgtctgcataaaccctcctgtcctggacgtgacttcatcctgaggagccacagcacaggccgtgctggcactttctgcacactggctctgggacttgcagaaggcctggtgctgccctggcatcagcctcttccagtcacatctggccagagggctgtctggacctgggccctgctcaatgccacctgtctgcctgggctccaagtgggcaggaccaggacagaaccacaggcacacactgagggggcagtgtggctccctgcctgtcccatccccatgccccgtccgcggggctgtggctgctgctgtgcatgtccctgcgatgggagtcttgtctcccagcctgtcagtttcctccccagggcagagctccccttcctgcaagagtctgggaggcggtgcaggctgtcctggctgctctggggaagccgagggacagccataacacccccgggacagtaggtctgggcggcaccactgggaactctggacttgagtgtgtttgcctcttccttgggtatgaatgtgtgagttcacccagaggcctgctctcctcacacattgtgtggtttggggttaatgatggagggagacacctcctcatagacggcaggtgcccacctttcagggagtctcccagcatgggcggatgccgggcatgagctgctgtaaactatttgtggctgtgctgcttgagtgacgtctctgtcgtgtgggtgccaagtgcttgtgtagaaactgtgttctgagcccccttttctggacaccaactgtgtcctgtgaatgtatcgctactgtgagctgttcccgcctagccagggccatgtcttaggtgcagctgtgccacgggtcagctgagccacagtcccagaaccaagctctcggtgtctcgggccaccatccgcccacctcgggctgaccccacctcctccatggacagtgtgagccccgggccgtgcatcctgctcagtgtggcgtcagtgtcggggctgagccccttgagctgcttcagtgaatgtacagtgcccggcacgagctgaacctcatgtgttccactcccaataaaag

SEQ ID NO: 100319 - DNA, 1033 bp, Homo sapiens
cacatctcagcaaatgatgaaagttcttaaattgaaacaagttgcagaaaaacctcaaagcagcaaaacacattgcagtccccaaggacagagcctgtggcccggcaggccctgggcagtgccttgggggctgtgcttcagcaggaggctgcagaaccctcgatgtctgcatgcaacctggacaattggagacgcacaggcttcgagtctaggcccagcacttcccgtgtcagtcctgtcccttacaaacagagataatcaagctcttgggacataactggtaaactttttccccacagtagaaaagttctaagtagaagttaggaacttttgcagagagagcaaactacaacctaaaaatccacattttagccaggtgtggtggcatgcacctgtagtgccagctgcttgggaggctgagacgcgaggatcacttgaggccaggagtttgcagccagcctgggcaacatagtgagaccgtcatctcttaaaaaaaaatatacatttttagttaaaggcaaagtaaaaacattctggtcatgttcctggcctgtcagctttttataaaacctcttgttaatacttgacccacagtattttctcagatagccagggtctagttgggctcagtatgatttcgcactggttaataaaccctgcctggacagtgcctgtggcttcctctgccagaggggggaggcaggtgctatggaaaccccatagaatattaagttcgttcaaatgtagtgtaaataaaatccagcatgatgaaagtccacaagaggcctgactgtgagtgacagcagcagtagttgtacttatagcggctatgaggactcattaattatgctgctgtaattcctgtgacgtaaaggactttggaatttatacagtaatgtagaagcctatattcaaatgatcaaaaaagtaaaaacaggccattgaagacagagctatcatttgtgtgtgtgtgttctttcaatttgtagatttaggtatttatagagtattcttaagttatgtattaaaaact

SEQ ID NO: 100320 - DNA, 1033 bp, Homo sapiens
cttcctcagtgacctgagggcacacaggcaggccccagtgtcaggcagctgggctgggctcctctcggccttctgcctgcacctttgagccaggtcgctgacctgggcttcctgggggaggagaatggcccagcctgcaccctccagcttgctctgctgtgtgcagttctttgaggggaaggagctgcggctgaagcaggagtacttcgtggtggccgccacgctccaggacatcatccgccgcttcaagtcgtccaagttcggctgccgggaccctgtgagaacctgtttcgagacgttcccagacaaggtgcatggtggccctgggagggatctcagtgccaggggctgggcgccttcaggctcttgaggttgctttctcatgtcccaaaaggggctagagtggaatggtacatgccccttgtcttggggtctcgtcattctgggccaggatcccacctgggccctcccttccagaacaagggccaccggccttgttaggagtcaggtcagcaagggacatggtgaaaggctcctgtgcaaagtcagatgtgctgggcaggctaaatggggttattccaaacaaagccctatagttccagtgagagagcccccagccccggtggccacggctcctcccctccggctgcagcacatacccgcagcagagcacacagctgtagggcactcaccagcaggcacatcgggcacagcgcacacctgccacagtgcgagcccgactgtcctccctgctccctccacagaacccctccctgttctccaggcttctcgggggtggggtgggctgggctggctccttcacttggggagcttcgtatgccaacaaccgtgggtgcccacgtgggatgaaatgactgaatggcaccccttgtgcgaccttcaggtggccatccagctgaacgacacccaccccgccctctccatccctgagctcatgcggatcctggtggacgtggagaaggtggactgggacaaggtgagcatggaggaaaagggcggcacctccccagag

SEQ ID NO: 100321 - DNA, 1088 bp, Homo sapiens
agggtggcggctacacccatgccaacggccccccacctggcctgggagaggaggtgctttgctccttgaacgaggcaccctctgttcagcagaggatgcttggggctgggggctgtcccttggcagagctattggctgatccccacgcctggcccacagcctcaggttcctctttgtaaattaaattgcacgtcctctccctcagacccatcttcctcagacagcagccctgtgggtccctgggccgggctgggccctttcctgggctggggagttgggtgagcgagagcctcctcctcaagctgggcctgggctcttgtgagatgccttggaggtgcctgctgggtctgggagcacttgagggaggtctggctgtcacagccccagaacttccctggaggcagcagagcttcccatgggtggtcatggagtgtcccctggtcatggggagtgctgggtctccgtggggcctcctgtgcccacccacctgcctctgtgttttggcaccagcacgtggccgcgctgtttcccggcgatgtggaccgcctgcgcaggatgtctgtgatcgaggagggggactgcaagcggatcaacatggcccacctgtgtgtgattgggtcccatgctgtcaatggtgtggcgaggatccactcggagatcgtgaaacagtcggtgtgagtggggcgcttgcccgagcggggccagctctgtctgacacccaggcctgcgtctaggaccatccaccaaacacatggacccagctatatagcatacaacctgtgccactaggcccctgcctccataggaatgacagagctgcccagaacaccctgtcagggtcacgccttgttgtgcgttcaccgaccagcacacgggggcctctggagggctctggctctgcgggcaacggggagacggctttgtctcctgttgctctcctgcgcccctgccttcctgggggtccagtcggaggctctgcaccactggtccacctgccgctggcagggcttggacagggcttgaaggtgggattcttaggtcagatcttgttcttgcccctcttaggtggggcgtgatctaggaattac

SEQ ID NO: 100322 - DNA, 1119 bp, Homo sapiens
ccagtcccaccagttcaaacgtccacaggaaacacacgaccctccctcagccaccgatcccagggttctctgacattgaacatcccatcaccacccaaaacccaaagccatcctcccgctgccctccaccagcaccttccctgcctgaagcaggcggtcccctcaaagccagcacctcacccaggtgctgcctgcaaacactcggccacctctcctcactgtacccaggcccatctcagactgcacaggagccacgctgctttccaggtcccaggggcccgtcccccagcacagggcattgaaccagtttgccccagagcactgctcactctctcttcattccctcttcagacctcagctttcctgggaaggcttccctgaccatagccccaggtgggcggtcccaccctcccagcggctggtccttgcctgtagcgcagggcctgacacctcagcactcatttcctcagggagcttgcataggagccaacatacaaacaggaaataggtgcccagcctagctggcagtcagctgcctcttgactcttttgcagtggccccgtggctgcactcagccacaccccagccctccctaaagctcggcttctgaactcgcacacaggacccgccaggcccaatgggtgactgcccagctcagcgcccatgttcaggggctcagccctcatgtccagaagcctgcaggtcaacacgtgagggacagactcctgcctactcagcaaccgctcagcaggggctgatgacatggcccgcggttctcagcccaggcatctccacaggcacgggtggggcccgggactcacctccacgatggtatcggccagccccgggttgcacagcagcagccaccggcggggggtgatgccattggtcttattctggaacttctctggctccagttcataaaaatccttaaagctgcaaacacagagaacagggaactgtcacaaatgctgtgccctgcaccaggtgagcaacagaccttaaagtccttttaaggaggtcccaggagccctcaagctcagtggttctgttctgttttctaaggagaacagagtgaccgcggcagctgcaggctctgggagccatacgaaggcagca

SEQ ID NO: 100323 - DNA, 1011 bp, Homo sapiens
tggtggcctgaattgcctcccagtgctgtatatcccgtgagtaattctactgcaaacttctgcttttctccagttgcctttggaagttccagaggcaaaactgtgtccctttagcacaggtacctgggttgctaagggggcagtgggctcagagtatgggtttgctttgcggttataattttccccattataaaaggaagatatgtgtagaaaatttagaccagagaatagctctgaagttgagggtcaagaatcagagaccttgtctccatgcctgtgtgttgggctttgacttggcaccacactgcttgttccctgcctaactcactgagtgctgctctgggctacagcgcatcctcatggggctcttggctgcctcctctctgcacagcctctgcttccttagatagcagtgtgaggactgtggagaaggatctttggtctgagctcaaatgattggctcctgattgtcctgtggtctagggaattcctggggaagtcggagcctgagcaccagcactgagcctggccgtgggaaggaagcatgaagacctctgccctcctcccgttttcctccagtcagcagcccggtatcctgaagccccggggggccggcacctgcaatgctcaggagcccagctcgcacctggagagcacctcagatcccaggcggggaggcccctgcaggcctgcagtgcccggaggcctgagcatggctgtgtggaaagcgtgggtggcaggcatgtggctctccttgccgcccctcaacctgagatcttgttgggagacttaatggcagcaggcagccatcactgcctgcttgatgctgcactgagctggacagggggagtccgggcaggggactcttggggctcgggaccatgctgagctttttggcaccacccacagagaacgtggggtccaggttctttctgcaccttcccagcacatgcagaatgactccagtggttccatcgtcccctcctgccctgtgtacctgcttgcctttct

SEQ ID NO: 100324 - DNA, 1056 bp, Homo sapiens
gtgctcccagccctgggctgaatccgtggacgaggcctgcacacacccaactagtttgccctgccattaccaagacccaggctgccttctcttaccctactctgagccacaaatccaatccaacttgctgacagtcaaagcaaattcagcaaaagcaaacactgaggccccacagacagcatggtctggttctggtatcagcgcaattccaaaggcaaggaaacaggctagaagtttctctatcaattttgactgtgacccctgcaatgggcttgggagatcctcatcaaggggttctttgccttcagcccataactgatgagcccttccagctgagttcccaggttggcctgggctctgataacataggcagcccactctgataacccctgtgtgaggactgggaactatctgcttatttttcatattcttggagacagcatcagtgggcccctgccccaacctttacaccagacctcccatgtccttccgaagcagcctggaggtgacgcagggaggatgaggtggcctcctgagcctgacgtggctggtgcgcagcccgtgatgcagcatgcaggggctgccttcccgcctgcccactcccagcctggtccacccacactggctgagtgtgcaagatgccagctacaccagaggcagaggccaggacccacctttctgccaagctggaagggcaccaccgggtcgtcctcagcgtgcaggatgagcaggggacaggagatgtgcttcacgctgtaggagggagaaggggctagaccaagaccagggaaagggcagagttgcccagaccctctgtccatggcagggatctgggttcagggtgtgttttgggaaacagcctgatttctgctggatttctttttactagacaactgaaagttaactcttcattatctctatgaacatctattacagctagatgacaggtgtcaatcacagctatataactggccctcggaatgtcttctgaaaattgaaaatgattatttttccaccagatatatatatttttaagcggaataattcaggtgggcc

SEQ ID NO: 100325 - DNA, 1036 bp, Homo sapiens
tatgtggtttgctgaaggatttggatctatcaaacctactgaaaatcctaaatcacttctaagtgtttagagttggagtgaccataaatgtcacttacacagataaattagagaacattgactttttttaccaacagattcctagtaacattcatttacactaagtttcttggcccacctgaattattccgcttaaaaatatatatatctggtggaaaaataatcattttcaattttcagaagacattccgagggccagttatatagctgtgattgacacctgtcatctagctgtaatagatgttcatagagataatgaagagttaactttcagttgtctagtaaaaagaaatccagcagaaatcaggctgtttcccaaaacacaccctgaacccagatccctgccatggacagagggtctgggcaactctgccctttccctggtcttggtctagccccttctccctcctacagcgtgaagcacatctcctgtcccctgctcatcctgcacgctgaggacgacccggtggtgcccttccagcttggcagaaaggtgggtcctggcctctgcctctggtgtagctggcatcttgcacactcagccagtgtgggtggaccaggctgggagtgggcaggcgggaaggcagcccctgcatgctgcatcacgggctgcgcaccagccacgtcaggctcaggaggccacctcatcctccctgcgtcacctccaggctgcttcggaaggacatgggaggtctggtgtaaaggttggggcaggggcccactgatgctgtctccaagaatatgaaaaataagcagatagttcccagtcctcacacaggggttatcagagtgggctgcctatgttatcagagcccaggccaacctgggaactcagctggaagggctcatcagttatgggctgaaggcaaagaaccccttgatgaggatctcccaagcccattgcaggggtcacagtcaaaattgatagagaaacttctagcctgtttccttgcctttggaattgcgctgataccag

SEQ ID NO: 100326 - DNA, 1074 bp, Homo sapiens
gctctgaccctgactcctctccctttttctctgatgaggacccttgtggttattttgggcccacccagcttgtccaggatcacccccatctcaaggcaagcagttagtagctttcattccttccatacctttcattccccagccatgtgacccaacgcgttcacaagttccagggattaggtcatggacacttttgggggccaccatgctgccaaccacagggaagaaagttccatcaggatgacagttgtgggctgggaaaaactccagaatgaggagcaaggaagtggtttgccctctccttctctccatgttgacactggttctcttctgctgcatgctagagaccttaggagagggagaatgagtggcttcttcccattcatctccccgcacttctgtcaggaaatgaaatcccacgcagcactttctgtttcagttctcgtggagtctacgtttctaattggcaccaagactgccagctccatctccgactgtccctctgtctctctcactgcatctgcctctttgtccgcatccttctgcctcctgtccctgtctctgtgcctgtctgtctgtccctgtcagtcttcttgcctgtctctgtgcctctctgttcctgtctctcagtcttcctgtctgtctctgtctcctgtccctgtctctgttcttttctttctgtctcatgtccccatacccctgcctcccagcctggccctagccctctgcatggcctcctccctcctctagtgtctgagtcgggaaacagcaagttctgcactaactgtttgcttacactgcacaacctgctctttctgacctttgtggtgctttcagatcatctgatgatgactcactgctgggctgctggaaagataattgcactccacctttgctggagactgggggagggacccttgggaggttgtaattttggggggcagagatggtagtgttttctgttatggaaacaagatgctaattagaccctaaggggaaacagcccctttccccttcctgggtcatggttgccttgaacccagaaatgccctccctgttctgggagcctccgga

SEQ ID NO: 100327 - DNA, 2876 bp, Homo sapiens
gcaggccaccctacagtgtgagctctctgctcaccctaacgggctgttgctgaagttcatgcactctttggttaatcagccctgcccagttttatctcagatgcttttcctgagtgggtctaatggcttgtcctttccactggctgccctggagttggcctccctgccttaaaagggtgctccttccacaccatgtgattgctgttcagaagagcctctgtgggagaacccagggtgggtgcggaggggatacattttctgaacaaagcattgtttgaaaaccaccaaggtcttcgtgtgtgagagaggcagccaggagccagcacagaggcagacccagcacggagacagggctgctgcggggccagggccgaggtcccgtgtggcaccagggtatgtcagggctgggggcaaacattttataggcagagccagcaaggagagctgtgctgggcccttctggaagggaaagcaggcctaggtggggtctgcatggtggaaccctgcagagagcattgctgaaagagcctggcggcatggcccgtgaagcggtttctgtgtcagggatggcgtgtctagctacagaatcatgcatgtgctgcacagtttcctttcttctttgtctgggacaagctgcagagggtttctcttctgcttttcaaagagcaagtggctacaaacagctcttgcagcatctttttataaatgacagaactgtggttggctgtgaataaggttcagttctgcagtgcccatcacatggttaaaaaaaaaaaaaaaagatcctgcctataactttaggttagaaagggatgccgtgactttcagtgtttgctgccccctcccaatcctgcagagactgcctggctgcagtcctcgccacccccacgttgcctgctttctttgtcctgtgcatcccactggggtttcgctggtctgcgggatccaccacccgggtccccctgaggtccagaccccctggattcccagcaactgttccttttttgcttaatgtaggaaattttagaaacttagagccactgtgaactcttacaatgataactgaaaatattttgcagtgtttcctccttgccttgaaactcattcctttattttttattttaatttttgagacagagtctcactctgttgcccaggctggagtgcagtggcacaatcctgactcactgcaacctcagcctcctgagttcaagtgactctcctgcctcggtctcccgagtagctgggattacagtcacccaccaccatggccagctaatttttgtatttttagtagagacgggtttcaccatttgaccaggctggtctcaaactcctgagctcaagtgatctgctcacctcggcctcccaaagtgctgggattacaggtgtgaaccaccgcacctgaccctttatatttttgtttctgtactttattggcttcctcctccatctcatcctggtgtccaaccagcaacactcccgcccccatacctgaaatgttgagaccgctcctgaggaaggaggagcacggctagggagtgtggagagtgtggacccgccctcctcccaggtggcccatgtccctgctgtggggtcggtccaggttaacagctggccaacaactggaaagaaagagggaagggagcctagacaggcctcagacaaggaagtacaaatgggagggtgtgtgccgagcccacttagtctcagtagcgacatgcacggtgaagctgtagttggctgtgaggggcgggaggcagccgttccggcacttcagggcctccctggggagattctaggagcatatcccatgtgcagagcacacacatgtgaagggctgtaaggcagggtggccacagcagcaaacagaagttagtgccaggtgggaaacagtcaagatgaccatgagaggccagggtggtgtggctaagcagagttctgaaggtcggctgagacgtgcggagcaagaagtgagggcagaagtcgcccatacgggtcctgttggagcacagcctctgtctacacagggtgtccttggcacagggaagctgggagggtctggggtgtggtggatgaggccttgctgtgtttcctttagtgtctttctagtttggggctgtaggtgtgcattacctactgaaaaataaaagcagtcattaagaaatctcccccaaagtgctaagaccatctcccccttggcacagcactgccagaggcgagtgtggggctacttagggggacccaaggaagaggttctgccctctttcattggcctccccctggtttggggtatggaggacaagttgacctggggcccaactctgagaagatgtgctcacaccatgtcctgttttcttctccagaggaggcgaccaccgcgtggagctttacaaggtgagtgcaggcagcacccacacctgttccctgggctgttctttccagggcaggaagtgaagggagtcaccagactcacagcttgagagttaactattgctgggctgtttgtgtgtgtgagacagggtcctcctcctctgttgcccaggctggagtgcagtggtacagtcacagcgcactgcagcgtcgacctcctgggctcaaactatcctcctgcttcagcctcctgagactgcaggtgcatgccgccaccacgcccagctaatttttgtttgtttttttgtagaaatgaggtctccctatgttgctcaggctggtctcgaactcctgggcctcccaccttggcctcccaaagtgttgggatgacaggcgtgttgagctttttaacactgcctttggatgggcgtgctggaaggtagggccttggctgcctctgctgtgactgcccatcacactgcttctaggcctgggccccaaca

SEQ ID NO: 100328 - DNA, 1024 bp, Homo sapiens
gttaaactgtggacaatttaagcatggggttaactgggatgtggggcacgtatgaggaaaatgctattactcaagatggactaagtgctgcttctctgccaggccccagtggtaactggcacattgcaagcctttgtggcccagaggaggctggcctgccagtcagggaacgctcctgctgaagctgtcagtgccatccacacagcctgcagttccgtggttattgattctagtgatggggatagttttctaccacccacccccatctgttcccctgtagttagatggggtctgcagctccctgctgtctggacttgagctgattaagtaacaccacgtgcagtcgccaggatgaggacagaagggacatctgatcctgcgctcccctctgcttctgtctgcaggcacaccgtccctgcagtctggtggaagaacgcccaaggcaaagaccagatgtggtatgaggatgccttggcttccagccaccctatcattctgtacctgcatgggaacgcaggtaccaggtgagggagaggagcccatcatctttgctgtggagcatggctcctttttggggtgggaatgtcctggcccggtctgccggaaaccagcaggagcaacctgcggtcccacaaaattgggtgtactgacccactgcaatgagggagagcctcccaagaacgaagggaaaggcagagttctgaaggggttgagggaaggcggagtttaggtgacgtttacatgaagcagggttcccacaggctgaggccagcacggctgtgttccgtggggaccaagtgtgggaagctgtgtgcagaccgtcccctatctggagctgcagcctggattgggatgaaggaggctgagtctcagtcaggagctgagctccccagccagaggggcatgtttttttctccttgttgtaatctcaaaggtcacagcatctgctggtatgtgatttggggagcagggtttcttggagagtgagggctttggggtccctccgaggaggggtcatagtggc

SEQ ID NO: 100329 - DNA, 1049 bp, Homo sapiens
cgagactcttgtctcaaaaaaaaaaaaaaatatatatatatatatatatcttttccaagaggtgaacatctagatactgaaaacagcttgatttcttttcacatatagcttcgcaccagctgatgatgatggtgttggctgtcttctgagtatttacttttttaagccataagtttacactggacataagccttgtgacttctctgtgtctccttggaatacattttaatgttttcttctgtacacaagtggtgcttctgaacagctgaattaaaattgaccaacctcactgtagcatttccgtttttctctgagaagtgagcctgaatcacagcccttttatctagctgaatttatttttcagtagccataacgtcgctttccactgtctcagaaaaccactgtgtatgtgagaagcttctaaatgaaatgctgtgagtagcttcccagtgtggatgagagaacattcagacatttctaacagtggtccttggtaaagaacataaaacaagaagggagatttttgttcttagtagttggtgctgggattaaagtcttttgtcacttcctgatttgatttaatctagcatttactgaccaatgtgtgactgtgggactcctcaggtttctgtctgaagcatgacttgttttgcacagagctgctgagtgggacttggtcagccctcttcttggttaacatgagtctgtcctattgcaggagggtgtttatggtggtgagacttaggctggaagtactaacaactcctgcatacattatcagctaccagaaaaggttttgtttagtgatgtcagtggcaagtgtcaaggcagtgacagccacgctgtgtgttgctgtgtgttggtgggtgcgtgttggtgagtgcggctgctgcccactctcatgccctaggcagtcacaatgacattgggccctcaggcagcagcaggcccagctcaccaactgcccccaccatcgcttcatcagaccctcccaccagcttcctgaaaggagggcctcaaggcctagagtggagcctgggggccattcc

SEQ ID NO: 100330 - DNA, 1975 bp, Homo sapiens
tttcatggtgatgtctgattttaggggtagtctttttactttaatggagatttagtttacatacagtgaagggtacatatcttaagtgtacagtttatatacctatatctttagagatagataggtagagctaccacccagattgagaactagaatgcttttattacccaaaaaggtccctgtgccccttcccagctggaggactttctgtgctagtgttgctccccagcactggatttctgtccacagaagactacactgccctgggggaccagcgtatctgtcttcagctgaggtgagtaaaaatgttgacaacatgagaagtcagctgaagccatcatgttggagatgccttgtcagttgtgcattccaggagcctagctgcccttggaaaagatgaccactgaaaaatatagtacctttaaaaaaaaatgaggccttttttcttttttaaaacaaattagttttttatacccttaaaaaaatccagatacacagtactttggtttctgtggaattttgtgctggccttgtaggtattgtagtctccttgagtgaacttggaccttgtgtgttttttcacgctgtgtatttacttttggagatgtgggaggagaaaggtgcagaagtatcaagcccatgaggtcaaaggcagaggctctgggcacatggccctgggaacagtcctacaagcgaggctccaaggaaagggccgcatctgtgggttcgaggtttgagaacaacggggctcgcacacggtgggtgttctgtgaaggacagcctgagaggcaggtgctgacagcattagaacaggatgaggcaggggctctggggtcactctgtggctagattggtttgcacatagtgagtctggccttatgcgtttgggagtttgaggcttggaaagctgggcctgatattgctgaggcagcaggtaagctggtggagtgggaggaggaggaaaggaggaggccgcagaggaacacaggaggtactgagaggtgccggactccctctgcaggcatctgggcttatgagtttgggtgttcagtctataatagacttaatcacagaaacttaggagatgactggctaaaaaaggaatttctgtttctttgtttttgttttttttaatgccggtaagaagaacataaattataaggctatttaatactttgtaaatctgagtttttatttgggtgtcttaaaataactgtaaaacacatgtagtatactaagaggcatttgatttttctaatggaaaagtagaacttctaggaatttttcatctctaagttttgtcacttgtgagaagcacaaactcaaaaagaaactaacagtataccaaaatgatgggagttttgtttttctgactttaatgttccttaaatgtacacagtacagcccagaaagcatttggggcttaggtataaacacgaagctacaagggctgcagattcaccatcagcagacctcagacttgaccctcatggcttttctacctttgctggcccccttgggcaggtgcctttgctgccaggcacatgagctggttcttgaagggagggtgtggggtgcattgccctgcgtggcctggtacattgtgggctcccagcaaatgtttgaattgaatagattttctttagcttgattgtttgggctactgtagacacacagcctacagattttgttctgtgggtttcctaaggaggtggtagactgctctgagggaggagaactttgggttctcctggtccagccccatggcatgggagaggagggctgggcttgggcaaggggaggctgagcctcccaaggtgttgcccatccttaacgatttccttccacctgtttgccacactggagttaggtgagcctacagtggcattttgttttgttgttttgttttgttctgagacagggcgtggctctgttgccccagctggactgcaggggtatgatcacggctcactgc

SEQ ID NO: 100331 - DNA, 1053 bp, Homo sapiens
tgcatgctagggtaattgtatacttgtttgggagaaaatagttttgtcatctcgtatatgctaaaataattccagattaatttaacagtaactattgttaacattttggttataacttttcacactgttcatacacctatatttttgcattttcacatatgattttataagctgtaaaaccactatattctggattttcatccaggtcttcacatagagatggcattgctttgaatgactacatagcacctccttatcccatggatgccagcctcccttggcactggtgtggcacagtgctgtctgaccctgaaaggtgttctggggggtggccgatatggacaaggggtccaagttcacgtgtgcccggagtgccaccctatgcactctgcataggtctgcataggtctcctgccacctcctagcctgaggcctgcagatgtggagtttgtacctttgttgcctcttctgggtacttgctgtgttttgacacatactgaagagggtgtgcaggtgatggtgctagtttgcttgtacagaagcaaagaaagagggataaaatgcagaccagtgaggaaacaggcagtaatgttaggaggccttcacaaacttcactgttgcccatgaggatagaccaacagttggtggaatggtagctggaagaaactcctgcctgcagcatatcatgacttcagggaaattttagaagaatagtcactgactttgccagtaaagatcctatatgatgtgcacccagcatccttgtgctaaatgggctcatcgtttatttaattagcttcctattgatggacaattggcttcttcctagttcttcctgctattattagcaactttcatatgtctaacttttgttcctttgttagtgtccaattatttagcgtaatttgagatttgatgggtcaaagagtatgaatatttaaaattttgaaactgttgccaatgtgacttccaacatgattaggaaagtttgccttcctaccaagagagcctcagtgcccatttcccccacccctgctgtcattagatggtatt

SEQ ID NO: 100332 - DNA, 1760 bp, Homo sapiens
gatggttcgtggtacttgaaatctgtccgcacaagttcgcctccttgggaatcatctcgcagtcctgagtcgtttggttattggcgttcaataacctttgggttattgggtagaagatgaatgcgtttatataaagccactttcaaaactgagatgggaacgtgtttcatagggacagatttctcctcccatctgctggtttcctaattatctggctgttgtagaacgtagcattcctgacagctttgaagccttgctacttcgtggtggtttgaagaagttactatatgatgatctcaggcgttgtagcagaggcacttcttttttgaccatctggaatgcccttagttgacgctggccacttgagtgtaaaatatgcgtatcgctcctaaggaaaagtagaatttcaacttcattgcttaaaaaaatcatgaaattaaactatagacacttctaagtcgatggtttgacagaagggcggagactgatagttttgtgtctttatgtgtaaaattatgtagcatctgatcaatatcttttgtgaaactaatctgttctctttgctatggaaagatttatctgcattaaaaactcatgatttaactttaatacaattttattaacagacatggcataacgcttagataaattggaaaattcttccttcgaaaaaatcaaattgccgggcgcggtggctcacgcctgtaatgccagcactctgggagaccgaggcgggcagattatcagaggtcaggagttcgagaccagcttgaccaacatggagaaaccccgtctgtactaaaaatacaaaattagccgggcgtggtggcgcatatgcctgtaatcccagctactcgggaggctgaggcgggagaatcgcttgaatctgggaggcggaggttgcggtgagccaagatctcgccgaaccgagatcgcaccagtgcactccagcctggacaacaagaacggaactccgtctcaaaaaaaaaaaaaaaaaagaaaaaatcaaattgttttacacaacgtttggggaaacagcggcgacctggcaccttcttgaagaatgtactgtattaaaattacccgattaatttttattttcgtgtcaggacaaagagagacattccagtggtgtccatatcctttggataagcaaaaggctgttaggggtaaaaagcaaaacaaagggaaagaagaccaaatttgttaggttgtcttccttcccagctggctgtctcagacatccttgagctttcttctcttcctcgctcaggctctgcgccaccatcacctcctcctcactgaggccttcttagaccagcccactcctgtcgaccttgttatcactcgagattgtaatttttgctcgtgtgcctcccccgcaaccagaatggaagcgccatgagaacaggagctttgttttctccacttaagtatctccagtacctggcacgtagtaggtagcagaaaatacttgttgaatgaacaaatatccatagaacagatatccattgcgccacagagccggctcgtttgtgtcttttatgatccttctttggatccttccgcacattttttaaactctttattgtcgacatacgtggaagtagagaagacaatctaatgagccttcttcatgtgtccatcacttaaaagttttcagtgtttagccaattttgaatcatccatccctcttctctttttttttgtaggatgaaggattggatttttttttttttttttttttgagaaggagtctc

SEQ ID NO: 100333 - DNA, 1067 bp, Homo sapiens
cacagataaggtccccggagaaggggcttcccctcctttctcgctgggttgacgttcccagcgagtgaagccttttctggaatgtgtgtacgcaccctccaccaagagttctaataagctaagcttaaagcagaacagtgaaatggcaaaactgtacagagccctgactttacatttcactctgacagccagggtcggaagcaccacatggaaagtgctgtccataactgctcacttacctgctccttgctgacagctcccaggatctggctccagagagtggcaaaactgggaattttgccaagggaaattactcaggaccgctaataaaaacgccggcttctgcaacatgcatattcccccagcccccacctccatcttgcccagggcagaccattcattaactatctgcggggtgaacaaagaatcccaatcctcagatgtcccaggactcatggctcatgacccacggaatctaaggcagcacagtggcttaatttaaaagatgtgctttcgaatgaatcctagaaaataatctgtctttacacagagagggctgcgggggcaatcctactgacgagtttgttgagagcgcgaactttttcttccaagaggcggctttgtttctcggcgcctcgctgcttctcctcggtggcctgaagtgctctcaccaggtgggcgttctccacgtacagctccttcagcagcaggtcggacttcgtgttcttttcaaactagagaggggaggaagccatgctttgcatgaggccggtggagaaacgctacagatcagcctgctctcttttatcctcccaggtttacgcaaaccacagttttgggctcttagaaatctgacccaaggccgggggcagtggttcacgcctgtaatcccagcactttgggaggctgaggtgggcagatcccaaggtcaggagatcgagaccatcctggcgaacacggtgaaaccccatctctactaaaaaatacaaaaaaattagctgggcgtggtggcgggcgcctgtagtcccagctacccgggaggctgaggcaggagaatggtgtgaacc

SEQ ID NO: 100334 - DNA, 1832 bp, Homo sapiens
tcccagcactttgggaggctgagatgggaagatcccttgaggctaggagttcgggaccagctttggcaacacagctagagaccctgtctcgaccaaaaaacaaaactaggtgggagtggtgacgtgtgcctgtggtcccagctacttgggaggctgaggtgggaggatcgcctgagcctaggaggtcacggctgcagtgaaccatgaatgtgccaccgcactccagccagggcaacagagcgagagcctgtcttgaaaaacaaaacaaaacaaaacaaaacaaatgactacttaataaaaatatagccaatgatgggcaaatgtatatataacatgaaaattaaaaacatttttttcttatgtatttaaaaactttttcccccagaatcagaactacaaggatcaattatcccagctcaatgtcagggttcttcaactgggacaggaggcttctacccaccaggcccaaaacgaggagcatcgtgtgaccattcagatgttaacacagagcctggaggaggtggttcgcagtgggcagcagcaggtgggtggcctcagccgcagggagctgagctggaggctgggagctcagggtggggaggcggctgcaaataggtcaggacacgcgctgaggagcctggagggaagtgagggacttcccaagcatgccttggagaagtaggtggactgtgctgtgttggcaaatcccagtatctaaagaaaatagcagaatagctttatatgctgctgacagaggagtgaattggtacaaagttccccgagggcagtttggcaaaatacacacttagaggctgaagaaagtccacatgccttgacttcacgattccgatggggatgttcccgagagccttgtggaaggatgcagctgcagcattttccttgctgtgctgtttataatagcaaagcagaactgaaatcggccgagtcaccaacagaagctgagggagtcactggatcacagcacagccactgaaaaccatgttttcaaatcataactaatgccccaggaaacgctcccactgcagtgaggagaaggcacttcctgcagtgcgtggcgcacctgacactgtctcaccagggagatgcgtgtgtgtagaggaggggccggggagtgactgcaggacacagggccggccttggttggtgggttcacagggatttaaattttgtactttttttcttttctgtaattttctgaggtttttgcacgaattacataccagactcttcagatacttcttgacttgtgcaattgattttttaaaaacagagtgaccaaatccaaaaacttagagttgaacttgaatgcctgaatcaggaacatcagagcctgcagctgccatggtcagagctgacccagacccttgaggaaagtcaagaccaggtgggtgtgagcgatggctggaggcactgggtccagtcccacctgggagcagcatcaccgcagtgccaacggtgttgccaggcctcctccagcccaaagaagtagttgcgctgctgggcacagctgtccaggtgcttaccgggccaggaccgaagctgctcccagtgcagggttggtttgactgtcagcaagccccgtgaagagtagtgactgtttactcccgagggaaggagtgcgggcaccatgcctgtgggtgagccctccacagaatggaggagccagaggcaagcctggggactgtgtcgtcagaaccaaggcagcaggctccagccctgggagtggggtgacatgggcactcatgggcatgcatgacactggcctctgtacacgcctccgggtgccacatctgctggccccgcaggtgaga

SEQ ID NO: 100335 - DNA, 1018 bp, Homo sapiens
ctctataccatacacaactgccacacgcttatgtcgtggtggaagcttctcttaacctgaggcttgaggttctagggaagggatgaggtgaggttaatttgcaaggaattgcatgagaaaaatgcgtggactccctaatcttgagtaaatccaaatggaaaaacgtcccagttttcttacatgcctgtaaaacctatagaagcaaaggcagtggttgtgggcgtcactctgggaaggtgacgtgtgcgtggtcgattgtgctgagagcgggtcagaggacatcactccaaacccccaggagctgcggtgggaaaaagcaagtaagcagaaatatggttgcatgaagatgttcctgacaggtggctgcagacagcagagcctccgtggtccagaccgcagggccactttcctgccgctgtcactgcactgcgccctcacaggttcccctcatgaacgtttgctgaaatcctttgtctgtgggaggtgctattgagaaaaagcaaaacatacaatttgatgaacctatgtaccctgccaagagctacgcttgtgtgttcaatgactgagatcagaggagacttaagagattcatgtacctcaagtttaaataggttgcttttttgttaaaattgccatatatttttaaatatattaaaataatcgtggaggaaatgagaaaaacgtgaaaggtcttccaaacagtggtttggacggtcatggcatatactcccttctggtggcctagatgtgtgtgtgtttttcctaggggctggagcagggctttctgtcctcggcactggtgacgtttggggccaaatcatctgtgttgtagggtgtcaagtgcccccatgcctccatctccagctgtgattaccaaaaatacctggagacattgccagacatttcctcaggagcaaagttgtacctggttgagagcaattacaatgatatgaattgagctgctggcttaaaagtattttagggggcaaggtggggctgggctcagtggcccacacct

SEQ ID NO: 100336 - DNA, 1033 bp, Homo sapiens
gttgtggccgggtgtggtggctcacacctgtaatcccagcactttgggaggcagatcacgaggtcaggagattgagaccatcctggctaacatggtgaaaccccgtctctactaaaaaatacaaaaaattagccgggcatggtggtgggtgcctgtagtcccagctactcgggaggctgaggcaggagaatggtgtgaacctgggaggcagagtttgcagtgagctgagatcccgccactgcactccagcctgggcgacagagcaagactctgtctccaaaaaaaaaaatgacaccatgttgcatatgcttttctgatggccacagagcatctcacctgggtctttgtgtggatctgccataatttatttaaccatttccctatttttgtatatttcaaaagtttttaaagagtaggctgataggaaatatgtagctttaacactaccccaaaagatttatggagtattaaattagtcagattattgtacttccttcatactcttcccttttgagtgttgtttctttaaagttctaagccaagattaaaagcccgggctctggggcttaggtgtctcggacttggttatgggcgtcaccaggcttctgcagaagtaggagcctcgctggtcttcagtctgggtagacgtggtttgagaattccagtgaagctgctgtttcagaaagagatgagactgagcgttgaacactgtttttcctgctaatggaaacagttattgtaaaagatgaatgtagcagctgagaaaaaaatatcccccacctcttcctcagattgctttgggaattcactgtccatgggtttcatgctgcctccctccttgggagggaggtgattttcatgtgcatttggtatcgaaagtctttatcaaagggctgttacctgccatgcacaccgggtggaggggccaccttgggactcaccccagggagctgtgctcctcgctgtgagggggcagctggtggcatttgccatgtgacccaccagatccccttgtctggggtcacctccagca

SEQ ID NO: 100337 - DNA, 1054 bp, Homo sapiens
aggggccccacagaaaggtgggtgtgagaggatcagtgtggtggccagacgctgagctctaaggaactacccaggtgtgaagctggcagcctggctaacccttgcagcaggcttggcataatctgagcatccctcctctcagagcagcttggggctcaggagtgaggtcttgccgagcttgggaacaagagctgaggttcacaccaggcccttacaatcacagcacaagcttttacactgctgctgcagagcttctccaaggagcagggctgcagtgctcaaggaaggattggagaaggtgagagacttaggatggactgcattgcatctggggcctctgttgggacacttgaaggctgggtctgaaatcatatgaagcgtcactgatgcgtctgggctggaggagctcagctgaggacagtctcggaggggttgcagcaggcctcagcgtggctgggcttccttacagcatggcggctgaagatagtcaactgtctcacctggtggcttagggcactaaggacatgtggtcccaaaaacagggctgggatttcctcactgagttcaggccagcctcaaagtcacaaagcatcccttccaccacattctattgatcagagctgtcacaagcctaccagattcaaggagaagggacacagacctgaagggaagagtgtcaaagaaatttgaagccacatttccaaactgcctcacatgggcaggctgaaaggaagagggaaggcaaagaggggcaaagttagaacaggggggtgtcatgtgcttcaggaaagaggaaggccggaggcattgatggacgtgtagggagcaaactgcgggatccttagcagccaggcatgtacggtgcaggtgtagggagtgcaggatgctgccatggcctttgaggaggcagtgatgaaaggagctagtgtttcagggtgcagggatgcaggtgactggggaggagaggctggagcccggctgaatgccgagagccctcttcaggctgccagcgccccccagctccccctgttgtagaaggaccagggtggcagca

SEQ ID NO: 100338 - DNA, 1035 bp, Homo sapiens
cccccaggctccctgggtcatttgctgcaggtgcctgggatgcagggatcacccaaggagagggggatgggcccaggagatggctgccagagtctcgtggggcttcacgttaagaaatatgtccatggggcaggtccacagcttgtaagttaatcatggattgggtcgaaccattttcaaggattccaaaaggttcctggttcctgctctctgtgctctcagcttctgccaggtgggtctcgatcaggagcacatccttcttagacaggtcgggcccccaggtggacttgtttaccatttgttttcaacatttgtggagacaaagagggaaaacaaccaaaatatatttaaatcttagagtcttttttctcaggggcatgtgacatctaggcgatgccagtaaatccagaacattccttttttgttcttttttaaaaatttggacctcagggatggagagatagtgaatctcctccttgtggtggatcttcattggtgccattctgcttcttaaatcatctttgattctcaaaacctgaacacggggaaagccgcctttagggttgtcagtggagttgaactcattaaaaaaatggggttgcgtatttatcaccaactcacagattctccctgatcagagccagtgccagctttgaagcatacagagtcttggtcaccaggcatccattccacagtcagttgtggggacacacaacacctggacaaatcagactttgattccagttggctgacgcagtcactgcagcacgaggtttttacttaagtcgcgtgtttcttgatggcccgggctcttgtcttgggtacagatttgcaaaggctgctggagtgtgaggtggttaccaggcgctgtgctatcccggagcccttggagggatacagaaacctgctctcaccttgcgactgtttgctgaactgatatggttggtgagggaaaggtgcagagaggcgtgttgcaagccttgtatggcgagcgtgtcctgagactgaatgattggctgtggctgcagggctggc

SEQ ID NO: 100339 - DNA, 1209 bp, Homo sapiens
cctaaaggccactactgtttagtttttgttttatttttaaaaatagagacaaggtctcgctatgttgcccaggctagtctcaaactcctgagctcaagcagtccacctgcctcagcctccaaaagtgctagggttacaggcatgagccatgtcacccagccaaggccagtgctgttaccagcttcatgtatacctgcatatagaagtgtataagactatatagaatcagttgaattcaggcagatttttaatttctgtatttcagtttaggaaacagcattcttgctcagataatctaagagtcatgcagcttgtgtttaagccatttgtgttaggaacataataccttcatggtctcagccatgtgcgagatctctgtagttccattgactttcgcataccaccaccctggtgattctctttgcctcttatgttaaatttcctattttctgtgtcctgtgtattcctattttgacttattccctctttttggtggcatgcatccttgcgtaggttccctgtaaacgtgtgtaggaggtaaaagttttgagatctgaaatgtctgaaaatatctttattctcttctcccatcattgatagttttaatagtgtgtatttcgataacatttttacttgaaattttgaaggcattggtctgtggtctagcagccatttgtatgtgaccactttctttctctcttgtaactcttagaaccttattttcctccagtggtccatgatcacatgccttggagagggtgtttccatcctctgtgcttggcacgctgaaccctttcaatcaaaatcatattttcttggtcctggggaatttaatgacttcattgataattgcctccctttgtttattttctgatttctctttatgatttctgattttttttggtttctcttatccctgttattcagatgttagaactcctttactgaccttccactttatcttttcactcccatttttccatctctgttactctgtttcttcaactttaccttccaatccttctatgatttttccctctactatcataccttttaaagatttccaagagcttgatttttttttttttttttttagacggggtcttaactcggtcacccagtgaggagtgcggtagcacagtcatggctcactgcagcctttaattcctgggctcaagtgattctcccacctcagcctccagagtagct

SEQ ID NO: 100340 - DNA, 1004 bp, Homo sapiens
agcactttggaaggccaaggcaggaggattgcttgaggctaggagttaaagacaatcctgggcaatatggcaagacccgtctctacaaaaaaaatttattagctgggtatggtggtgtgcagttgtagttctagctattcgggggactgaagtgagatgagcccaggagtttgaggccacagtgaactataatcattcctctactgcactccatccagcctgagtaacagagcaagatcctgtttggggaaaaaaaaaaaaaaaaaagacccttttcctttgttgtgattcttttactctgagggaagaaaaacacatgcgttcctctctcagtaggtgagttgagtttttggtgtgagtggcatactgtttattccctagtcccattacaacagatatattttaactgtagctgggtgcatttcaaagagccagcattgcctggcatgtttgactttcttcaggtgctcacctgaacacaggatttccagtgcagacagttcttgaggcgatcccaggatacacgttaaggggtcggggagacaagaaggggaaggagtccaatacgggttagagcagcttaatgaccaggttactgctgtgagcagctggagatttctgggggacagtacacagaacagggttcagttttgctccccaaggggcaaggaagctgtgatatttattcgccagtttctgccctacatttgttgagggctgctcccagggcaatactttttagccccatcctgtgtgtatagatacccttgtgtgtggccaagtaaagcccacaagcagagaggcccatacttggagagggaagccactggcgagtgaatatagtgtgtgccaaggggatttaggcagcacctgctataacatggggttcaaggcccttcacaaactatctgtgaacaggttccccagttgcatctcttggcatcttccctcacatgcctccatttgggctcaactcagcttcttgctttttccacaaaatttta

SEQ ID NO: 100341 - DNA, 1029 bp, Homo sapiens
ccagctactcgggaggctgagacatgagaattgcttgaacccaagaggcggaggttgcagtgagccaagattgcaccactgcattccagcctgggcaacagagcgagactccatctcaaaaaaaaaaaaaaaaagtacctgctttgtggggtttttgtgaggatgaaaacatgtaaagtacctagaacagtgcagtaatgttattgttattactattatcgtcagatttcaggtctcccattctttttttttttttttttttaatggaggcagagtatctccatgttgcccatgctggtctcaaactcctgggctcaaccgatctgcccaccttgacctcccaaagtgctgggattacagtccagtctcccattctgactcagcattgcagcatgggatatttataagtcacccgcaaaggagaccagagtcctctgtgtaatggagaggatctgtccaaccttggtttgtcactgaataagattaggcctcttcccacccagggtgctgagctgaattgaaaggaatatgtggaaatgagccataatgctggtttgtaggtgaagccacagagtcctgcgtgtcctttgacagccctgagcctctgcatgtgcatatctttctgcctgataagcacttcctttccttgtacacaaagcacactcctcaagccgggcatggtggctcacacctgtaatcccagcactttgggaggccaaggcaggcagatcatctgaggtcaggagtttgagaccagcctggccaacatggtgaaaccccatctctactaaaaatacaaaattagctgggtgtggtggcaggtgcctataatcccagctactcaggaggccgaggcagagaatcacttgatttgtagtgagctgagattgtgccattgcactccagcctgtgcaaaaagagcaaaactccactaaaaaaaaacaaaaaaaaaaaactgacaagctgactcctaaacccagtcagcatttgtctggctccagactaccagacactgtgcttgaccatcaa

SEQ ID NO: 100342 - DNA, 1013 bp, Homo sapiens
ccctgtctctacaaaaactacaaaaatccatcctggccaacgtggtgaaacccggtctctactaaaaatacaaaaattaactgggcatggtggcatgtgcctgtagtcccagctactcgggagtctgaggcaggggaatcgcttgaacccgggaggcagaggttgcagtgagctgagatggtgccactgcacttcagcctggcgacacagcgagactctgtctcaattaaaaaaaaaaagtatcaattaaaaaaaatatgtacatgtaggcctggtgcagtggctcacctgttatcccagtactttgggaggctaaggtgggaggatcacttgagctcaggagttagaggccagtgtgggcaacatagtgagaccccatctcattcataggtaaataaataaaccgattcatcaataatgtacatcatttaaaaaaatttgttgccagcctaggcaacagagcaaaactccgtctcaaaaaaagaaatatttttttcaacctaaagtacaaatgaaccataatcctctccccaatacagtttcctgtgattctgtcatgcataaatctatacttatgttaaattatatatatttttatatgtatcaaatacatgattcttaccacggaggtatttttatatcaacacagtcaaattaccccattctttcattctttttttttttttgagacagagtctttctctgtcgccaggctggagtgcagtggcgtgcgatctcagctcaatgcaacctccgcctccctagttcaagcgattctcctgcctcagcctcccgagttgctgggactacaggtgcatgccaccacacccagctaatttttgtaattttagtagagatggggtttcaccatgttggccaggatggtcttgatctcttgaccttgtgatccgccttccttagcctcccaaagtgctgggattacaggcatgagccatcgtgcccagcctctttcattctttttaacagctgctcatggttctgttttacagtgt

SEQ ID NO: 100343 - DNA, 1032 bp, Homo sapiens
ccctgtctccacaaaaaatacaaaaattagccgggtatggtggtgcgtgcctgtggtcccaactgctcggtaggctgaggtgggatgatcgcgtgaacctgggaggcagagaggttgcagtgagctgtgatcatgccactgcactccagcctgggtaacagagtaagaccccatctgaaaaatataaaaaaaaaaaaaaaagaataatggatggccataggcagaaggtatgcttaccatatggggttaaagctggtccactaaaaaatttgatggggaccaaaaactgtcagatgaaggaaatcattattgtaaaattaacatgaaaaagaactgaatccagtgaaaataattttagtaagtaggggatgatttgatcatgctttttagaaagttggtctaccaattaaatggatgtttcaattaaatcgagttttcttaaatattttctcaaggaaagtctacagtgttgttagaattttgatcagctgcctgtatccacaaacttagaccttcctcaggatccaaacaacagatccaaaggtttaagacagggaaattgggctcagaggggttatgtaaccaccaggattcacagctggtaagggcaaagtgaggttttgagctcaggtctgtctgactccaaaacccctattctttacagttttggcaaaagtgaagtggggggagcttaaagagggtgggctggccacctcctgccattgagcctgtggtctcccaaggactggcagaggagaggcctgctgaaaggctgcagagagctgcacccgagctgtgacagcacaggctgaggttctcaggattccctccacctccaccaccacttcctagcccacattaagcctctttggaacaaaccccagcctgggggattggaggaaggcaggggccgcagcctgccttaccttgtgtagtcaccaagattcaaacccaagacatccttcctgcaaagggaacctcggcttacttcatcatctgtgtctgagctcgtgccccacccagctgacctta

SEQ ID NO: 100344 - DNA, 2059 bp, Homo sapiens
aaagagagttcccttggccgggcgcggtggcttacgcctgtaatcccagcattttgggaggccgaggtgggcgaatcacgaggtcaggagatcgagaccatcctggctaacacagtgaaaccccttctctactaaaaatacaaaaaaaaattagtcgggcatggtggcgggtgcctatagtcccagctactcgggaggctgaggcaggagaatggcatgaacccaggaggcggagcttgccgtgagccgagatcgcgccactgcattccagcctgggcgacagagtgagactccatctcaaaaaaaaaaagagttcccttttccctccctttatcactgtgacctgggtacctcctggcctgcctcatccctgctaaagactccatgccaggcaaagcattcatcctgccttctttcatatcttcatagcaatgctctgagacagatggtattgttagccctgtatacagatgagaagattgaggtccagggagacagagccactgaaatggctctcccacagccacatggcagagcaggcctcagtgctgggccacccaggcatgtagccactccacagtactgccaccaggctgggtcaagaggccttggtttgctaatcttgctctgaaaaaagtccagaaaaggtctctgcttccttcctggctgggaggtggggcatgctgggtaatcagagagaatgcttctagagacgaggccaagctggtcttaaacaactgaggccttgtggaaggagtgaatgtgatggtgatcctgcccaggggctatgattcatctggctgattgattccagctgagtctgtaaaaatctcagtcctgctgttggaaagcagaatgtcaagtcatggagtggggtgggggtgactgtcaggtcatctaacttgataggtttggaagggagtccacaaatatgcttcttgacaagggactcatataggtggcatgtgggccagactttgggatcctctgctctcccaaaaatggtattttgccttcagtctatctgcttctgctttgcatttctttgatgttaacaaaaaggcagtagagaaatcactatgagtgcaaaaacctaggtttgagtcttagctgagatataggacccctgtgtgactctgggcaaatcacttaccttttgagggcctctgttttcacatctgtagagtgggaacagtaacacctacctatcaggacagctgtaagggtgccagctgtaaatggggcaggggtgtgttaaggctgactgcccatgggggctctgtttgccgacttgctttgtctttccttccagccccttcatgaataagttttttccagccagctttccaaatcgacagtaccagctgctcttcacacagggttctggggaaaacaaggaaggtcagtgctaaccactttcccctgtagtgtgccttgggtgtcttcctccaccattccctttgtctctccaatattggggttctccaatagagcaactgatgaagtgggctctggaattccatggcctggattcacattccaactctgctattgtctagacatgggaccctgggtgaacgccttacctctctgagcattgggtgtttttgtttttgttttttttcccatctgtaaaatgaaagtgttaatctagtacctccttcacagtcatgttgttaagatggcgagtcaataagtggaaagcattcagcatggtgcctggctcatagtaagcactcaaagtcggccttcatgattattttattcgtatatatttttagtgtgatcactgcctcacctaaggtttgaaaagggggttccacagctcttttttcaaaaataaaaactggccagaaacagtgtctcatgcctgtaatcacagcaatttgggaggccaagacaggatgatcacttgaggccaggaatttgagaccagcctaggcaacatagtgagacctcatctctacaaaaaaattgtaaaaaaatgcaaactatggggaagtgtggagatcctgggatttgtaggttagttagggtatggattcaaatgctgtaacaa

SEQ ID NO: 100345 - DNA, 1044 bp, Homo sapiens
accctggatcatgttcaagaagtttgatgaaaaggaaagtgtgtccaactgcatccagttgaaaacgtcagttattaagggcattaagagccaactggtagagcaatttccaggtattgaaccatggcttaatcaaatcatgcctaagaaagatcctgtcaaaatagtccgatgccacgaacatacagaaatccttaccgtaagtggggaattattgttttttagacaaagaaaggggcctttttgtccaactctaaggttgcttcacaaatacccttttatcctgccacaccagcaggttgataaaggagctatcaaatttgtactcagtggcgcaaatattatgtgtccaggtttaacttctcctggagctaagctgtaccctgctgcagtagatacgattgtagcagtcacagcggaaggaaaacagcatgctctgtgtgttggggtcatgaagatgtctgcagaagatattgagaaagtcaacaaaggaattggcattgaaaatatccattatttaaatgatgggctgtggcacatgaagacatataaatgagcctcagaaggaatgcatttggggggctaaatgtggatattgattgtgtcgtatgtgtgtttgtgtctgtgtgtgacagcgtgaatacaatgcctctgtggttatgctaaataagtttaacagatactttatagaaaacaaatcagggtgctcttaccacagatgaaaaaacaaattaggggacaagcagcaagcagtctgctaacactctggaatgtgaaaggagtgtctggactctgtgactcccggcaaactccacagcctctagttgtcttcttaggaagcttggaagcaattgagaatggtctaacatcaagatgtctaccacagggccccccacaaaagcagcctcggggactccggcctttccttgagacctgcatctcttcccttcttcatcgcctgctagtgaactgaggctgccgctaaccttcttcatcctttggtggcaaagtagaaagattccagaattaactcgacctttctaa

SEQ ID NO: 100346 - DNA, 2998 bp, Homo sapiens
ccaaagaccacttcccgctgacactgtgccaggcttgtaagtctctctctgggcctccattccctcctgtaggaaattggaggggttggggtggctccagtgagctctccccttctgaaactcatactaatctggggcagccaaggcttagccccgccagcctgtgaacctctcacagtgcccacagccatgccctcctccgtccaggggctgacaggtgggaggggtagccctgcctcagggagtggacttacctggcctctctgctcagagatcatcaattatgaatttgacaccaaggacctggtgtgcctgggcctgagcagcatcgttggcgtctggtacctgctgaggaaggtgagtagtcaggacctgggcagaaggggaggatggggttgacagggcagggtgggtcacagcaagctggtctcactccccgctttcctcagcactggattgccaacaacctttttggcctggccttctcccttaatggagtagagctcctgcacctcaacaatgtcagcactggctgcatcctgctgggcggactcttcatctacgatgtcttctgggtgagtcaggcagggatgccaaggatgtctggctccggggccatctcatctcatcaccctgcctctctggcccaagttgcagtcatctgacggagaagagctgttttgggctgaagttccggaccgcagagcaagtcctctctgggcccatctgtgagatggagccagagagagcagattctacctctttctgagagcacactcatgcccggtgccttccgaccacctgcctctcttccttgctagcaggggtgttacctaatcccatgtctccttggcaagggagttgagactcaaagaagttcaggtaggggtggaagaatgttgatgaatgggcccagcaagggcattcacattcactctgagaggcatcacagagggactgacgtcagcctgactcaggtacccttttcctggccccaggcagcctcttcccctctcaagtgggtagcgctgggggactttatcacttgggaggaacagaactgtgaacaaacataggctgcctggcttgggccatcagaggtcttttctatactccctcgaatttcccctttgttgcccagaaccagtatcagtggccacctcacctcagcttcagatctgcactggagcccctcccagctcccctcagatcccaggcagcagcacatctagaagcccagggacagccattcttccccccacagcccctcacttcccttcatactgctctttttttctccttctaggtatttggcaccaatgtgatggtgacagtggccaagtccttcgaggcaccaataaaatgtaagtgaccaccctgccacagggaaccccttcccccacccctgccgggccatgcccccacagcccgtttcagtcagtgcatctccctatctcttccccatgtacctcttcctcctgtggctccccagcctggtttccttatcctcaattgattcatctggctgtgttcatcctgcccaggtcccggcccctggccacttggtcgtggtgcagcatggcgtgaaatgagccaaaatgggagcgagcatggaggggaagtgtttaacccagcccggggggcacgcgcaggggctttccaggagagaaaacctctaagccgagacccctcactggggtccccttggcacctgagtgtcgggtgctgtctatcccgtgcctctcaaactgccttggttttgttcttcagtgtatccactgtttataagtaatagaaaatccacctacaggttgagcatctctaatccgaaaatctgaaatccagaatgttccaagacccaaaagtttttgagcactgacatgacaccacaagtggaaaattccacacataaggacttaacacatgtgaactgtgtttcatgcaggaaatagcattttaagattgtataaaactctttaggaggctgaggcgggaggatcacttgaggccagcagttcaagaccagcctgggtaacagcaagaccctatctctacaaaaaattaaaatattagctaggagtggtaacacacatctgtagtcctagctacttgggaggatctgaagcaggaggatcacttgagcctgggagttccaggctgaagtgagctatgatcatgtccctgcattccagcctggatgacagaatgaggccctgtctttaaaatttatatatgtataaatatatatgtgtgtgtacatatataaaactaccttcaagctattatgtataatgtgaatttcatatttaaacttaggttttatccccaaaacatttcattatgtatatgcaaatattccagaattcaaacaaagtttgaaacatttctggttgaaccatttcagatatgggatactcaacctgtataactgtctttaaacaagggggaaattttgtcatctcacactacagcaagcccaggggtagaaggctcagagtgagttaatgaccctctcttcaccaagagccaaggttacttcaggactcccaccccagcattctcagcatgtccacctgccccttaggtcatcccttcatggtcccaagatggctgccacagctcccagcactgactcctcacatagctgtgtccagaaaaagaaaggggaaattatgtctcagggagggatggtttttcccaagtctcctgtgcagtctccctcatactttattggccaaaactgtgtcacaggcccaagtctaaaccattcaccagtgagggggataggaaacatgattggcttagagtttaagctttagactagtggagaatcacctgctggtattacaaggctcagagaggggaacagaatccgtcaggcatgctagcaaggaagagaggaagatgctgccgggagggcaggcaacagtgagtgcatgccatggaagcactggctcgtggcgacaggcagtcgttgggggagactgggggagattcc

SEQ ID NO: 100347 - DNA, 1061 bp, Homo sapiens
aggaggcaggagaatcacttgagcctaggagacagaggttgcagtgagccaagatcgtgccactgcactcccgattacagtcctcattgccctgggcaatagagcaagccccgtctcaaaaaaaaaaaaaatacaaagtaggccgggagcggtggctcacgcctgtaactccagcactttgggaggtcgaggcgggaggatcacgaggtcaggagatcaagaccatcctggctaacacggtgaaaccccgtctctactaaaaatacaaaaaattagctgggtgcggtggtgggcgcctgtagttccagctacttgggaggctgaggcgggagaatggcatgaacccaggagatggagcttgcagtgagccgagattgcgccactgcactccagcctgggtgacagtgcgagactccgtctcaaaaaaaaaaaaaaatgtaaactgggctccagctgactcctcacattcccgcctcccgcttcagtggtgtttccccaggatctgctggagaaaggcctcgaagcaaacaactttgccatgctgggacttggagatgtcgtcattccaggtgagcctgctggtgtgggggctatgtgaaaggggtggagagggtattccccggagcaaggggattactgctaaacagacaggcttaccagctgagaaagagaaaaggtaaggctggatcaggccagggattggtgaagggttcccccttaacatccgtttacggagggccagtcaggtgccatgccccaagctgggtcctggtcaggtgtcagtgaacaagactgtcttcacagagcctctggtctaggtgagcagatgttgctcaagaactacaaaagtaaaagtctaatgacagattgaggtacactctgaaaaagcacgtttcatgacaatcttaacagactggacccctgtcacacacacccacacatacacataccccttcccagcatctgcaagcatcacagatgtaccagaattgccctagcccccttgctcctcctccctgtgccaagacatctccagggagaacacacacatgggctcctgt

SEQ ID NO: 100348 - DNA, 1728 bp, Homo sapiens
acttatctttgcagtttctgtatctgtgtttctcaaagcatgatccaacggtatgagattcacctcagatgtttttttcaaaatgcagattcctgggccctgctctagagctattagatcagactccctgggggtgggacctagaatcctgcattttttcacaagctttccagatgatttttatgctgactaaagtcttacagccactgttataagttgcagcatttgatattcataactaccaaggagatgagctcattttcccattttgcagatgagtaaactgaggctaagagaaggaaagcaacttgtccagagacacatagctgggggcagtatcagcgtgcacacccacctccagactcccagcccagagctcagtcacccccccacaacctctagggtcttccccagctccctcagaaggggtattactagttcagtccctatatctaaccctcctcctctttcttcacaccttccctgcagcttgaagaagaatacccacacctacttctacaccagctttgcagcctacatcttcggcctgggccttaccatcttcatcatgcacatcttcaagcatgctcaggtgggcaggacggtatcagagtgtcaggaatgcctcactgcaaatagagggacttacagagggatttatttgtaaatgcaagcagtccagagataggcactccccactggtgttggagcagtcatgtctgtgattctcttggccttccatttgtggttgcaagatggctgccactgctctaggcagcatgggcacgttagaggcaagaaggagggaaaagcgtaacagccatgcctgctgccttcatcaggaaggcaggaactttcccagaaccctttcagcatctcatgggccagactggggtcctaaagccaccctggctacaggagagtccaggaaagaggatttggcttctcagccttggtagtgggaagcaggcagagaagaacaggattggagtgggtgttgggtattggggcgtccctccccctactccctagtagaccaggctctgcctccttctcccaccaagatgaggatggagtactgagctgccacagaatgaagcaacatagcacaaagactgggagccctcagtgtggcctggagaggggaagattcaggggaaagtgagcagacaggattgccctactttctactggaaataataagagctcctgtttgttaagcacttccacatgtcaggctctgcactcatgaggatccttgtgaacaggtggggaaactggagttcaggtgacacactgcaagtatgtggtaaagccaggattcaaacctgggtcagcatggaaaccacacccaggctctcaagccctggccatgggaaacgcagcattgaacaggggctaagggagccctgttgtgaatcccagcaccacccagtaaccatggaactctgggcttgctgcttctgtcccctttccccttccccagggcccaaatacagacgagccatctttgaattaatcacaaaagctggggtttttttaatcactctgtgccaggcactgtgctaaactcttttgctaataactcatttagtcctagtacagtattactttatagaaggtcaaaaggcccctagcccataattagaaaaaccaagaacaaccattgtggaactgcctctcacttctgctcaagggcttcaatggcgtgtaaggtgagagtaacat

SEQ ID NO: 100349 - DNA, 1102 bp, Homo sapiens
ggtcttgaactcctgacctcaggtgatccacctgccttggcctcccaaagtgctgggattacaggtatgagccaccacgcccagccctttaaaatattttctggagatgagatctcactgtattacccagtctggtctcaaaatcctgcgttcaagtcatccttccaccttggcctcccaaagtgctggaattattggtgtgagccacgtgccaagccagactttaatgttttttgcagggtgacacagcagttgcctcctgctgacatcccagatatgcaaatgctggggctcaggagcatcggcctaacccttcctcactttgtctgtctcagctggactatcacctcctccttcaggaaggcctccccagtctaccttagctgactggcagcttcccataacctcgcgtgctttcccatcacagcactgggaacttgaggggtgactgtctcattatggtctgtcttccccagcggactgtgagctccccaggaagaggtcacatttgcagggccattgaacaggctgaaaggaacacaaagttgctacaaatagtacttttgtggaaggctccatctacttgaagtaaggagttcctttctctaattcctacaaagtacgcccttgggatggcagtagctcacctacccaccacacctctgtgtcctcagcatctggatacagcagcaaggaagcaccacatggctggtggtgtttattcccatttgggtaccctcaactaaatgtagctctgaagagcatgagcctaggtcatgttctttccatgctttgcctagcacaaagcaagtgtacaataaccatttattatttaatgattctaaagctctgtatttcagtggtggaggatatacccaattagaggtattatagtcactgtaataataactagtgcctactgaatgctgactgccaggaacctgtgtggtttttttcttttcttttccttcttttttttttttgaaacagaatctcacccacgctggagtgcagtggcgcaatctcagttcactgcaacctccacctcctgggttcaagcaattctcctgcctcagtctcctgagtagctgggattacaagc

SEQ ID NO: 100350 - DNA, 1038 bp, Homo sapiens
atggactcggcattcccccgggctctccaggagaagagaggaggtgctgcactctcggagtcccgcgtggccgcgtccagcggtccaggaggggtctgggaaaagcggtcaggagctccagctggagggcaggcctggaggtgggacatgccccaggcgccccgccccgccccgccccgcccgcttttcggagtgggcttcactgccccctggtggccacaggatgcgacctgagagccagccccagctcaagctgctcccgctcagtgcacacgacctctctcgccggggggccactttccccaatgtcctccatcctctaccctactcaccagaaaaacagctacacttccaacccttaggtactggattcagagcttgtatgggctctctggagcttagaatcgccatcttgtttggttcaagaccaaagcctccagcctcccactcacgccttcccccacgatgtgtcctcagctcctgcccctagccatagccgttcaagtcccttcctcacattctccatgtgcttccagaaatgtcttcactcgctcttttatttatttatttatttattttttattttttgagagagggtctcactctgttgcccaggctggagtgcagtggcctgatcatagctcactgcagcctcgacttcctgggctcaggtgatcctcccacctcagcctcccactgtgactacaggagcacgccaccatacccggctaatttttttgtatttttgcagagacagggttttgccatgttgcccaggctggtctcgaactcctggtctcaagccatcacttggccccggcctcccaaagtgctgggattacaggcgtgagccactgtgcccagcccagaaacattttttcacatattggcacagatatatattttgatcctccactaattttttacacaaatagtaacatactaaacacactttcccttgctttttccacctgcatactgtatcttgtagaggtttttttttttctttgagacagagtctccttctgtcgcccaagc

SEQ ID NO: 100351 - DNA, 1658 bp, Homo sapiens
ttggaggtgatcttaccaccattgagaatggactagaacataagctccatggaagccttgctcacggctgagtctccaatgccagcctcagtgcatacccctggtataaacagaagtccaaggagtctgggaacagaaaggagacattcatcccagaggttggggagggatgagcagggaagaggggactccaaaatggagtcctataggcttagtaggggttggttaactgaggaagatatggagtgaccagttaaaggacagtgttggcaaaggcaccagggcctgaagcactcaggagtatgtagtgtggggccattccaagtgggtggccaggactgttgaagcctcttgaagtattggaagaaggaccttgaaagtgatactagcctgggcatctcctaggggccaagtcaggagacccagttttctagtgtaggctctactacaaaccagcagtggaaacgtagaatgggcaggtgggttggccttgctgacttcatgggcctacctggctaggaatccatgactctcctgtggaggtcattagccattgcctgtcgccagtggccctacaaacccccacatggaagtcagctaccccactttcctcttaactcaagcagaggatgcagacaggcccttgggcctgggtctcctagaaacctttgtgacatcagagacctccctacaacccactcttaaacctcatcccctgcctaccatgccagcctggttaaaaccagtgggagccacccaaggtgcagtaggggcttatctctgcttttccagaccagggctgctctgcaatcctgtttatttatccagagcagccgcctgctgagaaaatggctctgtttatttccaagtgtgtcgtgtgaaccatgggctaaatatacccacgccaccgcctctccagcacccgccctggaacagcacgccccattttgctcatgctgtctccgcaaaagcaatccttagaatccacaccccttggaaatactactccccttccccaggaaaagaagctgaaatggaaatgaaggttgtcatgaccaggaacacatgagtggaagctggggcaggtgaaatgagaatgtttctatggcactgaaatgagaatgttccctccacccaggaatgactgtttctggacagtgaatgctttgtgcccttgtggggacagcgcctgtttactccaacccagccccagagctgaaaatttcctgtggctgccagccgtctacttcaggaaagttcccatcaagggagccaggcctctcccattttggctgcaaccccagtgtccctggtttcttgagagacatttggcctcttgggataaccagggccttctcctatgctcttcatagtgtggaactctcccccatcacagataagcctattttgtgactccacctgggtgtacttgggagcaacaaaatcaaacctcctgtaagaatatttttgtctgccaagacccgcagaggctagctaggatggagagggagacagggaagcatagccacggccctagtgccctcctttccccagatcctccacctcaaccctgctcccacattccttctcctggaaatccatcctttcagcactactgacaggacaggtccctccagcctccaacttcagggaagtgt

SEQ ID NO: 100352 - DNA, 1348 bp, Homo sapiens
atctgaatgcagtgagggcatgagctgtgcggatatatgggggaatagtgttgtaggcatagagaacagcaagccgtaaaacaaaaaaaagccagatgcagtggctcacgcctataatcccaacactttgggaggccaaggcaggaggatcacttgatgctgagagtttgagatcagccagagcgacaaagccagagtttagttgggcatagtggtgcatgtctgtagtcctagctagctactcgggacactgaggcaggaagatggcttaaatccaggagtttgaggctgcagtgagctatgatcctgtccctccactctagtctggctgacagagcaagaccttgtttcaaaaaaattaaaaaataaagcaagtacaaaaaaagactctccaacatatttaaagtacagcaagttggccagtatggccagagtagagtaagccagtggtaggaatcaggtctgagacgtcaccaggggccaggtcttgtagggccacatgggaccttgctttaagggcagtggaaaggcatggaggatttttaagcaaagaagtgacaggttttagaaggatctctctgatgtggagaacaaactctatgggtaagagcgggagcaggagaccagtgagaagccaggtgggtgataacagcagtttataccagggtggatgggtggtggaagtggcgagcagtggtcagagcttcaatacaatttgaaggttggaccaactggatttgctgatgtttgctggataagaggtgagagagaaaggagtccaggtttttggcttaagaaactggaaagtccttactgccatttaataaggggaagatgccttggctgatagtgatttcctgctagggctgtggagttgaactgcctgcattcaagtcctagtttgcttactgttttgtttttgttgttgttttgagatgaggtctcactatgttgcctgtgcttgtctcgaactcctgggctcaagtgatcctcccgcctctatcttcctgggattataggtacgccaccaggccctgcttactgtttgactttgagcaagtgtttgactttgccaagccttagtttccttcaatgtaagcctactgtctagatgataggcagttgggtgctgtgaaaactaaatgagggtaatttgtatgaagggcttaggacaatgcctggcatatggtaaaccttcagtaagagttagctctaatccttattactattgttggaagacaagaagtcccagggcctcaaggtcctctggaaagcaggcagcaggtcacactccacctccaccaccccctcaaggagcccgccctccaagaggcagctcagacaccat

SEQ ID NO: 100353 - DNA, 1066 bp, Homo sapiens
tagcccatgtcaggtactctacatgcattttctcatttaattccctcacctagactgtgtgctaaatggtccattagccctactttcttttccagtaaagaaactaaggtttggataagtgaagttgcatgccagggtcctgcagctttacgtggtgaatcctggatttggacctagattgggctggctctaaagccaggcttctttcccctgctccactcttggaataaatgaaggattgttggttcaggatatgcagaaagctgcttagcaaaaggagagttggagaagcatcttggtttgagggtcttgaaggacacctactgtactcccagctgagaggactctttctcctcatcttcaggaggatgcctccagagcctggggttactgtaggcctttgccagaggcatgttcggacttagccagctgagtatcccctgtttcctgcttttaccatctcagctgctggtcaggaggtttgggaaggtgacatcatctagctgaatcagctgctgcttctagatacattactggaactgaaagtcattaccccttccttcctgctctgcaagtctcttcagaatgaggctggagtatgggtgttccacctgtctgcagggtcatgactggaatggtacttgctgcttttaaagagctaaaaggtttttaaaagcttgttcatggaaaaagctttcctcaaggcttctcaagctaagggaacagagcgtccttgagaggcaggaggattcacaggaaggccctccccgactccctcttgtccacctacatttagccatatgacccttctgatctcctttgcctaagtccgaggcttaggcctagcactgtaggatgggtaaacaaaacgttatttgtggactttttgaccttaagacttttagagtctggtcaaggggacaaaaaaaaactgcttacatttcagagcagaccagccaccacactattggagatatattggagatctccccttgactcactaattgaaaagcaaaaaagggcaggtgtggtggctcatgcctgtaatctgagcactttaggaggc

SEQ ID NO: 100354 - DNA, 1114 bp, Homo sapiens
ttgtaaggatttaagagccttttgtaagaatgtatgtaagatcatatggtgcaggtattaaggtaattttagtaatatttaacaatgagcacttgcacttaagtgttttatatgagatagttcattgaattctcaaaatagtaccactcaggtaggttctcttattattcctatagagaagttaagaaagttgttcaaagatgcacagcgagtaagtggtaaaaccatgatttgaacccaggtagtctggctccaaagccaacttgtcctacctggataaggaaggccctagtaaatgttgctgttataactattgtatccagcattgtagttgtctgtagtttttggtctatccactgaattctgagctcagtgaagactagaaacccatttaatcaccttgcacccccagagaccaacataatactcataaaactcattaatatttgcttaatggctgagaatattctctttctttagtaatcaatcagtaactctttatcgaccagttcctgtaggctagctttgaactaaatcctaggaggaatgcaaagtacagctatgcctgtgtaaacggaagattgggtgtgtgcgttgggggggtgcattccagagagcactgtgtcattggcagaaacttccacacaggaggcagaaacaatacaggtggtttgaggatgttttccaagatgggattcccacccctccctgagggagtcacttcctccatctcctgcagaacaaggtgacacagattccctactccggccaagggcaaggaaccactctaagctcttcagtcactctaatccagaaactgtgtctttatggctcaggcaaccagttcatggcagcctagaatgacagggaaaaagctgggaagggaccttagaaaatcactcttgcccaatactccagccaaagtggtcttttaaaaaccaagttcaggctgggcgcggtggctcatgcctgtaatctcagcactttgggaggccgaggtgggtggatcatcaggtcgggagttcaagaccagcctggctaaggtggtggaaaccccgtctctgctaaaaatacaaaaattagccgggtgtggtgcacgcctgtaatcccagct

SEQ ID NO: 100355 - DNA, 1811 bp, Homo sapiens
cagctgctgagacttctctgtaattatttcatgggacacccatgtcccaggataaacagtccctccctcttactccagttggtgattaatattattgttaacattactattaatagtatctaacacttattgagtgcttactctatgccagccattgttcaaagtgctttacatgtattaatagatttcattctcacagcagcactctgaagtaggttcttttatccctgtttcacacatgaggaaactgaggtacagagaggttaagcaatttatgcaaagtagcacagttagtaagaggcaaagcctgggagggtagcttccaacctcccccttttaaacgctccactgtgttccctcgtccagtgcgctattgtctaggtgactgctggcattaatccagtgctcactatgtgacagcctttagtgacgctgtttttgttactatcccaacaaccttatcgttataggcactgagatttgggagggcttatagttagccagaggcagagtcagcatttgaaaccaggtctctcttactctgaagcctgtcctttttatctccagtccttaaaaatcttgcaaagtaggtgttgttaccttcattttatggttgagaaaattgaggctcagagaaaagtgatatacccagagcttcacaggctagtaccaagaagagctgggattcacactctactgtcttagtagtctgtattgtcatgattattctttttatgtgcatgataatactttcaatttaccaaactccttttataagttatttcccagtgaagtaggagaggtgggtatgttcagccctgtttccagaggggaaactaagataaggggtcttgtcccacagtaaatggcagcatcagacttagaattcatgttctggcttttaacacagtattatcaatactgtctgcctctcctaaagctggatgtgtggcttggagctgtccttggagtttcatttcttttgttaaatcagcaaatattgacaaatgctttgtaatgtgctaaatgctagtgatactgtggatattgtggtaactgagactgagtcccatccctcaatggtctgtttccatactccacaccttgggtcttgctggtgtccctctgccatctgaatcagtctacatgtgccatccatccttctcctcagctgccagacacaccaggcaagattcattatagttgatatgtattaatcaccttcaacacatacacagacaaaactctggcctcacatttgagacagcttgactccttgctggtggcataacacaaagcaaatcagcttcaaattctcatccataagcctgagagaataatgccaagccaccagagtaagtgaggcatgaatgagaaagtgaaatgtaagtgtgttttttggtaataataacagatactatgggttgagtagttacttgctctgtgccaggtgctgtgtttatcccctcaatataatcatcttacttggttctcacaaatgctctcctgtgaagatggagaatctagggttcagagaggctccctaatgtgtccacagtaacagatcttctaagaggcagagctgggtcttatactcagatgtgtctgatgcaaaagcctataagcgtcattgcttcttacaagcccagactggcttattttaccctgactacctggctcagggcccgcggttgggtgaggactcagccagggcctgctcaatgaacatgaagggttattattagatacaggttaggctacaaaaaaagtttctgcccctaaggaagcaaactcatttgaagcagtaggaa

SEQ ID NO: 100356 - DNA, 1136 bp, Homo sapiens
tttttggtatttttagtagacggggtttcaccatgttagtcaggatggtctcgatctcctgacctcgtgatccgcccgcctcagcctcctaaagtgctggaattacaggcgtgagccaccgtgccaggcctggtctgtattcttaagggtggcaacagggagcccagtgaagaggctggtgcaattgccaggtgaaaaagaatagtggcttggacctagaggtggaggtgtagtgagacggggactggagaataagaccaggcttgcacatggtatattgatgggtccagccatcctggaaaccatatttttcaactacttggaggtcctagaatcaaagttaagtaagatagatgttctttgggaatagttctctccaaatgtgatattctgatgaatggtcctcttccactccaacagtatttctgtctgagtaaatgaaatttgtctgagttcagttcccaactcatccgtgtctacctatgcaagctccttttacctctctgaatcttgggacaaataataatacctgcctcacagggggcgatggtaaagacacagtgaggtatacctgagatgcataaagactggagccatgttggtatcattattcttattatctttccacagaacgcatgtcagagacccattcacggaatcttgagcatccactctcctttttctaaataccatagtgacccatcagcacatctcagagcaggcccttgcagcatttctgttgtagtaggagctccacagtgtttgtgtgcaatggtggtgtaagcactggtcttggagttggaatcccagttctactctcagtctcaccttggccaagtcacttcacccccagtccccagtttccctttatgcaagatggagggtttgaagtaggcaataaaggaatgctggttctctctatccttaggccttgtggcggattccaccattacagcatatttcacattagttatattttaaaatggctctctcctgttgacagatatgtcagcaccttaactaaacccagtgtcaaggcaggctagtttatcactgagcccacaatagtgctaccctatatttatgtaacaccttacagcttccaaagcactttcagatccaccttgcctttttga

SEQ ID NO: 100357 - DNA, 1030 bp, Homo sapiens
ttgagaaacaaagtccctgtgatactttcctggaatgttgtatacatgaccttccccgaagggacacaagtgtttctggtgctttccaatgggaatgtgggaagggacccaggtgggccttgccactttgggattgctgtccctgaagaaatcccttagcctgatagaaacgtaattgttgggagcaatgaactgtgttgggggagaaaacataacttggcctttcttaagctgtatggctcagtggtctgagtttctgtagatctcttattgcctaatgtggcttcttcagatggatgtatgcttagttgaagcacctcagctccctttgcagatagtggcagttctgtggttttcttagggaaaccccattagaaaccccaaatgtggaaatttttagtaatctcattcgggtcccaaaattaagtagaagtgtctcaggggctcccccttgaaacacctacttcttctgagtgtacatttgaggttgctcttaaaattctgttaccatcacagggttttccagacttcctaggaataatttccccagtagccccacagagccctttagcttctgtcgaaaattacccgggtattttttcagggggctccaatggaacctggagggttttcttgacttttgtatgggtgtccccagatttgtttgggctgcatgaaacagcagttgttatctctgtcccttcccccagcagatatctgtcctgaggccagtgggcttgagcgtcctcctctgtgtccagtctccctggttttgccagtgccctcagccttccatcatggggctttcttgaagcaactgtggttttgcctgagtttaatgtggatagacataggggtaattcccagtgtactgcttttctacggaagtataatctcctactgccttaattaagcagaggccctgtccccacccaacctccaacctaattccacagagtcctccctaaggactccctcttttttctttgaaggagtcactctactcctggatcctcttctcttctgcccc

SEQ ID NO: 100358 - DNA, 1021 bp, Homo sapiens
gtaggcaagttttgctcttcagtgaattcagtcctgttttcttgcttatctccctacctagcggaggtgcaggttttatgagagatgttctatcccctcagagtatgcagaaaagcatcaagctgtggaaaataagtcatccattgaaggagctgaggtggaaggggacatgcaccatggactcaggaatgtcaagaatgcaactgtctataggctgggcctagggtgtggcaggcacttcactttaccactgagcaagagacctcctgagtttgccctggaaccccaccccctctctcattttgcatttctttgcaatttcaactcgtctgtgccagctcttgtaaaaggcaagggggtcaagtcaatagaggtcagataactggggtggggtcaggggaggtaaaggtggtgggttctcttgagctagctgactagacttgaaagccattctgtaaatgaactctctagggggataaatgattaaatagttcctgttggtttgtgcagtgacctctcctgttccctcctgctttgattctcttttggggcaaatatttgttcagctgattacaggagggacaggattccagtactgcagacacaccctctgaggcatctccaagtagggattgaggctgcttgcccactttgcctgactattgtctttggccagtggtcctaataccaggtgggttgttgccagctataaacaaaaggcagtctgggagaggtgcctggtctgctagccagcctctgcagaaggctacccctaccagagaattgccagctgcccagtggtgcatatgaaagaggtcttagacacagcaactctgggtaagtttattagatctccatggggttgaaattccatcttccatctctttgcttaagaatcatcagagcctgttggacaacataccacatgtcacttcctcttggtgaacagaggggatgtgtgtggaagagccagttatatcagaaccatttctgagcacacattctctccctaaggccaggg

SEQ ID NO: 100359 - DNA, 2211 bp, Homo sapiens
gatccctccggccggagctggtttttttgccagccaccgcgaggccggctgagttaccggcatccccgcagccacctcctctcccgacctgtgatacaaaagatcttccgggggctgcacctgcctgcctttgcctaaggcggatttgaatgtaggtggtgcgggggagcgggagtggggcgggggggactgcccagggagtgactttccgaggaaggcatttcggagaagacgggggtagaaaaggctggtgggagattcagagtccactggtgctttcgatttgacttaagtgaagtatcttggaacctagacccagaccttcgtaagacccacaaagaaaccagttctggtacctggagggggaatggaatttttagggtaaatggcatgcatattaattatttttttttcctgaagctctttctctcccttcagaatcttatcttggctttggatcttagaagagaatcactaaccagagacgagactcagtgagtgagcaggtgttttggacaatggactggttgagcccatccctattataaaaatgtctcagagcaaccgggagctggtggttgactttctctcctacaagctttcccagaaaggatacagctggagtcagtttagtgatgtggaagagaacaggactgaggccccagaagggactgaatcggagatggagacccccagtgccatcaatggcaacccatcctggcacctggcagacagccccgcggtgaatggagccactggccacagcagcagtttggatgcccgggaggtgatccccatggcagcagtaaagcaagcgctgagggaggcaggcgacgagtttgaactgcggtaccggcgggcattcagtgacctgacatcccagctccacatcaccccagggacagcatatcagagctttgaacaggtagtgaatgaactcttccgggatggggtaaactggggtcgcattgtggcctttttctccttcggcggggcactgtgcgtggaaagcgtagacaaggagatgcaggtattggtgagtcggatcgcagcttggatggccacttacctgaatgaccacctagagccttggatccaggagaacggcggctgggtaagaaccaagccccttgtgtgtcccttttctttggcctctggtcagagatccccaacagcccttcttctgtatctctttctgttgtgttgggtgattgttggagacgttgatagttgaggaaacctgactggcctcatttcaccacaagaggttaactccttggaaatacaaatgaccctgtgcttcagagatcaggcatctttcaccctggtcacccccatgactccactattccatacttgtgttccagtttctcagcaaagaaaactgtagcctatgtgttcattaagtcccaaacctgtgagggtaggaagttagttcggtgtttcccttaccttatacaatggttcacacacaaaggggtgatgagtataatgcctggagaagatgatgagcatcaatgacccacagacctctccatctgttccccccaaggggtctcagtcctatcctgggcttctctcccccaaatcaagttccctttatttcaaagtttgcgtgtatggcactctcctctcagactagggcatggccataggcaggagttcccactgggttgaatggctgagaattgtcagattttggggcagtgtaggctgtgcagattgtgtttgcactgcgccccctaagttcatttcccccaaagtgtgcgactttctgcatggttgccttgtttgtggagcacttgctgtgtcacacattaagccaggggactttgcacctcattgcctggggtcggttggggagctccagctgctctgcctgttactttccggccagagcccaggggcctcttcaagcactgtttgctggcaaagcaagaacctagtctttggggctctgtgggacattgagatttagtaacagacttcacatgcaggtataagttccagttctgtcatgtaactagctgtgtgaccttggacaggctgggttactttcttgaggcttagtttctttcactaaaaaatgtggcaagctctccttgccttacagtgtattgtaaatcttggcgataatgtgagcacagtgactgacaccagcaaattccctttccagggagggagagttctcctgcccatcactgagccagg

SEQ ID NO: 100360 - DNA, 1021 bp, Homo sapiens
tagggaaacttggtaaaaggggaataaagaacagtgagaaaagtataaaattgtatctagaggttactttggaaattaaaaataatgttatttgtacttagtaaaacaaagtagtaaaagtttgctctttttttttttttttttttgagacagtctcactgtgttgctcaggctggagtgcactggctggcgcaatcttggctcactgaagcttccgcttcccaggttcaagcgattctcctgcctcagtgtcccgagtagctgggattgcaggcgtgcaccaccatgcctggctaatttttgtatttttagtagagatggggtttcaccatgttggccaggctggtcttgaactcctgacctcaagtgatccacctgccttggcctcccaaagtgctgggattataggcgtgagccactgctcccggcctgttaacccttttttactacagagaacttggaacctgtttcatcacttttctgcttcttccaggttcttgatacatatttgccagacttcaagatttcagaaaaggggtgaaagagaagattgcaactttgagtcagacctgtaggcctgatagactgattaaaccacaggtaaggcagtgaccataggaataaggaacattaatatatcagcttcataagtgtttaaatgactaatgtaattttataaagtaacacatattttggaaggaaatttatttattatgaaaagcaaaaagaaaataaaatcacccactatcccacctctcagataaaccatggttagccttttgatagatttctttataatttttttctatgtctatatagtcattccttgatatccatggggaattggttctaagaccttcccaggatatcaaaattctcatatgcggccggttactgtggcttatgtctgtaatcccagcactttgggaggctgaggcaggcggatcacctgaggtcaagagtttgaaaccggctggccaacatggcaaaaccccatctctactaaaaatacaaaaattag

SEQ ID NO: 100361 - DNA, 1100 bp, Homo sapiens
atagcaaaactgagtttgtaatccttaaaaaagggcaatatgaaacatacaagtttgggagagaaatgataggaaatatatttgcttgaagtttctggacagtgatgaattagaacaagtgtccatgtgtcctgtgctgacttctgagtgttggacagtgagggattgtcattggattttaaattgacccaattttggaagcttcatagatctgtttctgtaaacagatccaatttcaacatagaagttagcaaacataaatgtggaaacacaaagtccattaaacttccttcagacttagtttgtgactttgattaacagttaaaattgcatgctggattatgttgccatttactgactgctgctaatcccttatatacaagaaaaaaatgtaggtgttttctctctgggtaagatgaaagtaactccactctattttacttgtggtaatgtaacaggatctcttatcccttgtgaaagtaggagaggatgtccctggagaaatggcactgcctgggatgggaccatcttaactaactatacttctaatgaagtcttgtcttactctgtttattctattatattaccagtttaactcatgactttctctttaatagaaataggcaagtcatatctcactgactggatagcaaggtgtttgagagcatctgtcacaccaaagtctttgttttgctcaggagctggtagtcccctatttcaccctgcttagaatgcaccctcttgcagctttccccaacccggtctgaacctgcaccttttgatttatagagcttgtcaagactagttatttttggtttgagagtgaagaaagatgggaggcaatgggaggttaatttcagatgaatgtgggaacaggttacattgctttgtctgcaatcttcctaatttgtatttgtcttccccttccatttatctcttaccctagaaaaagtcaacgttcattcttagcttgtagaactccgcaggtctgtctgtatcttttaagtattttttacatcaggaaaccatctctgatcctcttttatgctgttctccttctctgcacttccagagcgctctctgttaatgccctcttgcag

SEQ ID NO: 100362 - DNA, 1045 bp, Homo sapiens
agtagctgggattaaaggcacgtacccaccacgcccgctaatttttgtatttttagtagagacgggtttcaccatgttggcctggctgatctcgaactcctgacttcgtgatccgcctgccttggcctcccaaagtactgggattacaggcataagtcactgtgcccggccgagattttatatctctatctctgtctgtctgtctgtctgtctgtctatctatctatctatctatcgttttagtcttcgctttttggaaacaaaaatgggctataagacacgatggatggcattgaataggcagtttttagaggaacctaattggttcatagcatacaggataggctttttccttgggtctttgtaggaatattggtcattaatagctatttttccatgcagaatatttctagttttgcaagaatctgaagctgtggtagattcagataattttgaaatgtgaagctgattctcttgcttggcaacttgatttgtttgggggaatgtggttgacgcatgtgccttttttttttttttttttttggtgagacctgttgacagaaattcaatcttgattaagggacgcaggaaggcatccagttcccaccatgcctggggctctctcatttaaacagctgcctttggctctggcctgttccatttcccactaggccctgtggactttaattttggaagatttcacatcctcatatttattatttctgggggaggtagtgtcgtgaaaccgaaattacccagtagttagcttttcgttttcttgatgtacttgtcctatcagccttaattgaagagagtcagacttctcaatggatatgtatttatttattctctttttccagggagaggggatggtctcctgagttggccattctagaccaaaatatagcttaaaagaagcttttttaaagaacaggtcatgttaggaaaataatattttgtttttaaaatttcacctaaagattaagtgtacttaggtttgcacccctcgccgtttgttccccactaatcaaatgtagtcttagac

SEQ ID NO: 100363 - DNA, 1050 bp, Homo sapiens
cttaacttcatgaacacccttctttaattcacaaggtaagagggcagaaggatgtagaaagaacattgtgctgaagtcacgagcctcaggtccagatctggctctgtttttacgtaactgtgtgatactgggcaagtcatttaatctttctgatcttcagcttctaggttgggaataattgctgctttacaggattgttttgcatatcagaaagaatacatatttagtatatcatggcacctggcatgtaatgaacacctctggtaactgtttttaccatgatccttaggatttttgttgtgtgatcttggagaacccctttttgctttaagttaatatcttatagactgcaaaggttaggtgttaatcaaagtttcctcccaattctaaaatatcatgtttctacactaagtacctcaattagagcattgttataaagatacttgtggaattctggctgcagtgagcataggagagaccatgggaagatgatgttctctggggtctagattgatgtcactgtataaatgaaatatttgttataacagatgtttctggccgggtgcggttgctcatgcctgtaatcccagcactttgggtggccgaggcaggcagatcacctgaggtcaggagttcaagaccagcctggccaacatggtgaaaccccatctctactaaaaatagaaaaattagccaggcgtggtggcgcacgcttgtaaccccagctacttgggaggctgagggaagagaatcgcttgaacccaggaggtggaggttgcagtgaaccaagatcatgccactgcactccagcctgggcgacagagcaagacaccatctcaaacaaaacaaaacaaaaacaacaacaataacagatgtttctgagacactataaggaccagaagtacattatttttatttattttattttttgagacagagtctcgctctgtctcccaggctggagtgcagtggtgcggtcttggctcactgcagcctcccgggttgaagtgattctcaccgagtagctggaactacaggtgcagccaccac

SEQ ID NO: 100364 - DNA, 2085 bp, Homo sapiens
tcctatgctgcatgttgtgactcttacgtgtatttcaaagttgtcgtctttatactcagaaatagtattttttgagaatatttctaagaaaagacaacttatatttgacaaaactgtgttgaactcttactatgtataatgcactgtgttaagcaccttgatggttggatggatggatggatggatgaggtatacacaagtgagtaaaatctatctttgtttttaggaacttcgagtctactgggagagacatttacatagttaatataaaattggatgataagtgttacagtggagatataaacaaagcacaattggctttggagaggcaacaattttgtatgataggtggaaattgggaaagagttcatagagatttgacctggactttgaatgatggataagattttggttggtaggcataaaaattagtggtgtattttagaaattgggttattcagggcagagagagaataaattgggctagaggaggctagaaatgagaaaatggtaaattgagggaaaataatgacatggtgaatgtaaaacacctagcacagtgtagatacttatcaaactttgcctcttttaaaaaacatttagaaaatttatttatttattttatttttatttattattattttttttgagacagagttttgctcttcttgcccaggctggaatgcaatggcgcgatctcgactcactgcaactttcacctcccaggttcaagcgattctcctgcctcaccctcccgagtagctagaattacaggcgcctgccaccatgcccagctaattttttgtattttttaagtacagaagaggttttgccatgttggtcgggctgatcttgaactcctgacctcaggtgatccacccgcctcagcctctcgaagtgctgggattacaggcgtgagccactgctcctggcctaaaatttatttttaatttcaattttttctttttggtttttctttatatttgctgattacttaaagataatttttatttttttagagatagggtcaactacttacagataatttttatctttttagagacagggtcaactgttatacttagagataattttaatttatttagagacagggtctgtctatgttttgtaggctggacttggactcctggtctcatgtggtcctccctcctcccaaaatgctgggattacagacgtgagccactgtgtctggcccacttctttctaattccaaacatatctacctcaaggagtatctttaagttacctgaaaaactaatgtttaggttgattggacaaagtaaggctattttcagtaaattctaggtggtttgcaaaattacaaacgtggtagtaaaaccaaagtaatgatgggaatttacttagatttatgtgcaaccatttctttcctcagaaggtgacctgctgagaaaagtggtacaaatactgggaaaaacctgctcttctgcgttaagtgggagacaatgtcacaagttaaaagctcttattcctatgatgccccctcggatttcatcaatttttcatccttggatgatgaaggagatactcaaaacatagattcatggtttggtaagtgcctgctttctctggctattttaaggattagtggcttgctttgtgctgaagacctttcaataatagaaggggttgcaagaaaagaactaaaatatcaacttctttctgcaccaagacattctgtcatccatgatattatgggaataattgaaatgcccagtatttggggaatggattgtaagtacaaagcatatgttgttttgtagttcagaatggcagatttaagctttagggacctatgggaaagttcagatgaaccagtgttcaacaaaactccatgctcaaatatgtctgtagtgatggcagccacataaaaactttgtctactatcattagggatagattatatcacagctaggatattgacattcatacaatctaccagttttactcagatttctccagttttacttgtatgtgtattaagttctctgtggttttatcacctgtgttggtttatgtgtctaccatcacagtcaagatctttta

SEQ ID NO: 100365 - DNA, 2120 bp, Homo sapiens
tccattgcagctgtacttatccgtatagtgcactgtccaaatgtgttgacaggtgccattttttggaaaaggactttaatggcatctagtggggatcctgagaggagtcgtctgttggaagtggtgtgggaggaagggtaaataaatacaagggccagctgtcctgcggggatcttccccatgcccttgcttcactggaactgtaaggaaatggctgggctgtctgaggatttctttttctaagcttttctttaaaataaaaaagaaaagaaaagattagcctaagaatactgttaaatacaatttggaagaaaaaaaatgaccccactatttttccaaaactaccttagttttaaaacatttttatttttttttctttttgtttttgccagagttcttttggctaacaaaactacctcagttttaatatattactttccaatttctttcccaaataaatagtcacatctttctacacagttgcaatcagaatgtacatgcacagggtagttattgctgtgtctcactgcattcctgaaactatcagtaggctgttggtagaacagacccttcactgctttgtactgacttctgggcacagtagaatctaagataaaatttcttgagagaacctagctctgctctaccctcacacaccccttattcctcccaccaccccactgaggaggaaactctgtaagactatacagtatctcttgtaagccctacagtttttgatggttacagttttctttcgttttttttttttttttttttttgagatggagtcttgctctgtcgccaggctgtagtgcagtggtgcggtctcagcttactgcaaattccaccttccaggttcaagcgattcccctgcctcagcttctcaagtagctgggattaaaggcatgtgccaccacgcctggctaattttttgtattttagtagagacggggtttcaccatgttggccaagacagtctcgatctcctgacctcatgacccacccgcctcggcctcccaaagtgctgggattacaggtgtgagccatcgctcccggctggttacagttttctttaagaggaacatgatatatttagggagtagataaagccagttcatatttgtatgaccctaaatgtgtaccaaacaaagataaggagttattcacaatgcagaatctgtacttttccttttttataatacattgttcaatgttgccagtttttagtgattgttcttatagtctatctcggatgtgtaatgtgtactttttcttttgattgctagaactttgcttgtacttgccacatgagttggaagtgtactggtagggagctttagtttgcattttaaatgcgtgatagtgatttgttttgcttccttgctgatcagacaatgatgatcttcccttttcacagaggagaaggccaatttggagaataagttactggggaagaatggaactggagggctttttcagggcaaaactcctttgagaaaggctaatcttcagcaagctattgtcacacctttgaaaccaggtaagaaaacatcttagaaaaaagctccttgatagaatggtgggacagtgttttagaagcctgaggttctgggaaaattacctaaatgctctatctctttgtttattattggtgaaatgggctaattcatttcatgataaatgtaaaactaatgatgtgctacacttaaaaaaaaatctcttggagcttaagctaacatagaatttttttttttttttctttaagatggggtctggttctgtcacccaggctggtggagtacagtggcacagtcatagctcactgcagcctcaaactcctgagctcttagtaactgggactacaggtgctcaacaccatgcctgactgatttttaaaaaattttagtagaggagtctttgctagccaagctggtcttgacctccgggcttcaagtgatcttcctgcctcaggggcttcccaaagtgctgggattataggtgtgagctactgttcccgggggctaacatagaattttattgccagatacgtaactgttatctttttgtgacaagatttaatgtaacctaacctgggtctgggtgggaaataaaacagcaag

SEQ ID NO: 100366 - DNA, 1138 bp, Homo sapiens
ggctttggttcagtggctgatttttagctttttttttttttttttcgtacttgttcttcaagatgctgctctgtgtttcttagattttttcttttgcttgttgtctcactggcacaagatggctggtgtatctctaggtgttatatttatgtttaagagaagaagaagagtacagtaaaggaaaaagggcagcatctatatcaggaaacttaagtctttcgcagcaacccttaaatttcatttcattcgcctagacttgtgtcacttggattccctagttgcagtagaggctgttgaggcaagtacaatacttacttgtagcttagtgcgttgctgctcctcccgaaattggggttttgttaatgagaaagagacagaatagatattgggatggcaattaactctgccatttgatcatttgatggtgagcagttagagtccctccttactcttccaaaccaccactagataactcttatcttgatagcggttggctttctcaaagtttactcattgaagccattaatatatatgatctaatgatactgttggaagaatcatgtggtcgaagcatgcttgttatcctatagaatgagaaaatttaatccatatgcagtagatttggggaggagggtacaggctatgcttcagggaattgaaaacatattttttgtccttttgaactcaagttctaacaacaaaaagaagccagaggaagaaggcagtgctcatcaagatactgctgaaaagaatgcatcttccccagagaaagccaagggtagacatactgtgccttgtatgccacctgcaaagtaagtttctttcctgaatttaaactttagaatgaatggtataaaattacagatttacatctacaacctgtttggtgtacctggaggttggcaaactcctgaagctttgaccatggtgaggtgaattgttacatgtgtcctgatgggtgctcagatttttaaatttttatttaattaattaattttaaagacagggcctcattctgttgcctaggttggtgtgcagtgatgcaatcatggctcactgcatccttgacctcctgggcttacgtgatcctcccacctcagcctcccaagtagctgggactataggcatgcactatcat

SEQ ID NO: 100367 - DNA, 1034 bp, Homo sapiens
ggaataggaataggcttcttcatcagtctctttaggggatgtatggagagattccactgattcaggaagctgcctgacctgatgcatacccagaggcccaatcaatttttttttttaaagtggagttgagggtgagatttctttgcagtgctttttgtcttcaattctaagatagcttactctggattccttcaaaacattgacatggttggggggaaattacctatgtactattccagaacataagatttgttaagtgctagatcctttcttccatttttaattttttttaatgagaacagattagttataacccttgctcaaggactgacaaacttcagaataataatcttggttttacacaggccttttttattgatcctctgtgccgaatatgtggcttatggtagatgtgagctcttccgtgacatttcatttggggaacaacttttctctttacaggcccgagtgactaagggatgtaccattgttaagcctttcaacctgtcccaaggaaagaaaagaacatttgatgaaacagtttctacatatgtgccccttgcacagcaagttgaagacttccataaacgaacccctaacagatatcatttgaggagcaagaaggatgatattagtaagtttcctaccagtatcacagttggatggaacctctcctacattccctctgcttacatcttaggcacagatttgtctttagctgaaatcctagtttttcaattaaagtatggcgtgtgactatgcagacaacaaatgtatccttcagaatttttcaaaccacccagctgtctgtcttatacccatcaaccgtcttgatcctcctcatcaataattggccaaggggaatgagttaaggtaacctgagatgtcattacacatccttaacggacatttttttgccatgtgtcaaagtgtcacattgcatttagttacctatagaaaatgaaggcatttcattcattcaaggctatgtgctttttattcagtggtccaccaaaatttttactactactaac

SEQ ID NO: 100368 - DNA, 1065 bp, Homo sapiens
ctgggcatggtggtgcatgcctgtaatcccagctgcttgggaggctgaggtgggaagatcacctgagtccagggaggttggatttgtagtgagcctttatgcccctgcactctagcctgggcaacagagtgagaccctgtctcaaaaaaaagaaagtcagtctaggcccgtgcagtgataaggaacctgtcagacatggatggattttcagttcagaagatgacagtagagtttacccaaaggctaccttagtcatacccctcaataaaagaggaataggggagaagtaactgaatgttggttggtttgaccaatgtaagctgagctgactgttgtgggcccaccactctgtggttggtttatccctctctgggctacataggtgaatcaccacttacaagtaaactgggtcttgcggatctagatgaacatctgtcatctctgtttacagacctgttaccctccaaatcttctgtgaccaagatttgcagagacccacagactcctgtactgcaaaccaaacaccgtgcacgggctgtgacctgcaaaagtacagcagagctggaggctgaggagctcgagaaattgcaacagtaagtcccactggcagtatctgaggaagagttccacgaacctgcctactttattttcagttctgttagggtgacagttgctatttttctttccgtaaaaatttatggcatttgagtagtaggctctgcaggctacgcccctgcctatatgatttaaggactatagtgggaatatggagatgttctggagtataaactggtaaaaattgaatccaggctgggtgtggtggttcacacctgtaatcccagtaccttgggaggccgaggcaagaggatcacttgagtccaggagtttgagaccagcctgggcaacatggtgaaaccccatctctacaacaaataccaaaaaaaaattagctgggcatggtggcatgcgtctgtagtcccacctactagggggcagcctgaacccaggaggtcaatgcttcagtgagccaagatcacgccaatatactccagcttgggtgacaaa

SEQ ID NO: 100369 - DNA, 1305 bp, Homo sapiens
gtggtgcctctaagctcactgcaacctccgcctcctgggttcaagagattctcctgcctcagcctccctagtagctgggattacaggtgtgcaccaccacgcccagctaatttttgtatttttagtagagatggggtttcactgtgttggccaggctggtcttgaactcctgacctcaaattatctgctcaccttggcttcccaaagtgctgggattacgggcatgagccaccgtgcctggcccattgtttttcgtttttatttattttattctgttgtccagtcaatgggagcataatcttaatgattactattctttgtggttggcttactttgtttgtgaagttttcattttattaaaattttttttgtggttatttaaattttcaccttacagatacaaattcaaagcacgtgaacttgatcccagaatacttgaaggtgggcccatcttgcccaagaaaccacctgtgaaaccacccaccgagcctattggctttgatttggaaattgagaaaagaatccaggagcgagaatcaaagaagaaaacagaggatgaacactttgaatttcattccagaccttgccctactaagattttggaagatgttgtggtaaggttgaggctatgtgtgctggcagaagtgtactgctcatgaccagatatccacccattcacacaaaagtttgggtagatattatgagcagggcatcatattaggaactgcaggtgataaagagacttatcggaagtggattttgcttttagttaactcaaagtctggtatgggagacaatatatgtgtgaataatagaaaatggacagaagtgttctgagagagatgacagttaaaataggaattcagaggagaaaatggtttcttccagatagaaagttcagggtgtgctttgtagagaggcacatttgacctgagccttgacgatgtactgtagtaatagttattgtgttgctattgttgtcataatagctgacaattttactgtgtgccaggactgctctaagcccttttcatatattagcccattagttttgacaacaacccctttaggtgggttattttatcacctgtttcagatgaggtaaccgaggcacacagaggttatgtagtattcctagagcactcagctagtacatggtggagcaagtaagagttcagacactctagctacagagtctgtgatcctaatacctcattatatgcctctccattacatgatagaattttgacttgcagaaatgcaaatggactggattggcagaacattccaggcagtaggaattac

SEQ ID NO: 100370 - DNA, 1043 bp, Homo sapiens
gaggccaaggcaggaagattgcctgagcccaggagtttgagaccagctgggcaacatagtgagaccctgtctctacccaaaggggaaaaaaggatttaatcttctcatacagcttagtggagatcattttgtgatatctaattgagttgcttactcctttcagggtgttcctgaaaagaaggtacttccaatcaccgtccccaagtcaccagcctttgcattgaagaacagaattcgaatgcccaccaaagaagatgaggtgattccctgggagtaggggggttctttttccttctatatagtcagtcaatctaagccttatcatttattaatcttaatggagttcaaaggcaaccactcttttttggacttgtctttaagaatgggtatgaacatttgttcattttttttgttcctccaagaacaaagtaattggtaagggtatgaattttctgctcttagtgataactagttacaatttatggaaacagtaaggagcagttaagcattggaggcttgtctgctgtagcattgaaaatcagctgctctttgtaacatggatcaaaagttgcactttattttgccttagattgtcactattcagtgatggactttgaaaattcatactaagcaattacatccaccttgtcctatctccgttaacccagaggagttgcaaaggtgactgtggtgatcgtttatggaattgtaatatataaactgtcattggtcaggccagtttcttgttacatctcccattttatctataaatatccagagttagggtaattttatagcagattgcaagcataagcctttttataggttcatttgaaactaaaatacgcagtaatcttgtgttaccagcttgaacccaaacaacttgggtttggcaatcctattctgggtttggcaaccattaagtcccagtcacatgttttaatgaagtctagaggctgggtcaaagaagagactaaggtatatgcttggttgggaccgatcttctgatgttcattttattcataatgttagatcttatttag

SEQ ID NO: 100371 - DNA, 1783 bp, Homo sapiens
atgctgctttgaaaggtttccttccttatttttcagattcttccagatattctggagcagctattgctttccagctagtctttatcttaaacctcatgttttcttttctgttaggtgcccaagttcaaggcacttcccttgcctcattttgacaccattaacctgccagagaagaaggtaaagaatgtgacccagattgaacctttctgcttggagactgacagaagaggtgctctgaaggcacagacttggaagcaccaggtaggggatggggagagcagccaaaatgttaattgcttggttggttgattgtacaggcagacccaccatactgaaatcacctgggttaacatgctacattgtttcaggggctctcactgtaaatcaggggtcagcacattatttctgtaaagggccagataagaaatattttaggttttgtaggttacatatggtctctgtcgcatagtgtgtgtgtgtgtgtgtgtgtgtgtgtgtgtgtgtatgtgtgtgtgtacgcacacattttgttgttgttgttgttgttttttgagacagagccttgctgtgttgcccaggctggagtgcagtggcacaatctcggctcactgcaagctccgcctcctgggttcacgccagtctcctgcctcagcctcctgagtagctgggactacagacgcccaccaccaagcctggctaatttttttatatttttagtagggatggggtttcaccgtgttagccaggatggtctcaatttcctgacctcgtgatctgtccgcctcggcttcccgaagtgctgggattacaggtgtgagccaccacacccagctacatgttttcaactctttttttgtttggtttgagacagagtgtcgctctgtcacccaggctggagtgcagtagtgcgatctcggctcactgcaacctccgtctcccaggttcaagtgattctcccacctcagcctcccgagtagctgggattacaggcgcgtgccaccacgcccagctaatttttgtgtttttagtagagacaaggttttgccatgttggccaggctggtctcaaactcctgatctcaagtgatctgcccaccgtggcctcccaaagtgctgggattacaagcatgagctgctgtgcccaatcaactctttaaaaatgtaaaaaccattcttagctcaagcgctgtcctaaaacaggttgcaagctggatttggcctgtaggccagagtttgctgacccctgctctaagtgatcacctgggaatgtcccctgctccaagtgatcacccggggaatgtgggaaccgacaggcttttctggagttgggagtttctttaagatcttatctattccatctattagactcattcattgtgtttattcctttctgttgatgcattggtaagaaacagtatgggagaatagattgaaatatacaatgctgttttctcagcatgatgtgctatttgctctttataaatgacaggtgatttaaaacaattaattggttatttgctgatttaattgggatctaattctacgtggctggaaaaaatttcccctgaatttctaagttttttggatttttatgtcatcattaatcttggattctttccaaaaggagctctaggctattgtttgtttgtaggaattacccctcctgaagcccgagagttgtaatggcttacatgactgaacgttggtcccctgttagtgtggttctctaagaaaccttaggactgttgccttggaaatagtgaattttcccctctcaatgacca

SEQ ID NO: 100372 - DNA, 1064 bp, Homo sapiens
cttttggtgaatatttatagtcagtaaacttaagactgtactctgggaaattcttagcttgtaacttctctgctatacttgagtacagccctattataccctagtaaatcacacaggacataggtttggcattctttagtgaaagctgagggacttgaggagactgtggcctaaaggaaagctgggggacccaatagagacctgaatagaaacccttttgggctccaaagcacatacacttttccatcataccgtgttgccccccaggccccactccccacacctgaaactagtgactgggacctgtaaaactctacaaacattttctcaaaaagaaaaaaataaaagcaattataagcgtagttctctgacatccctctcactggtaacttttccttactttgcaggtgcataaggcaaatccaatacgcaagtaccagggtctggagataaagtcaagtgaccagcctctgactgtgcctgtatctcccaaattctccactcgattccactgctaaactcagctgtgagctgcggataccgcccggcaatgggacctgctcttaacctcaaacctaggaccgtcttgctttgtcattgggcatggagagaacccatttctccagacttttacctacccgtgcctgagaaagcatacttgacaactgtggactccagttttgttgagaattgttttcttacattactaaggctaataatgagatgtaactcatgaatgtctcgattagactccatgtagttacttcctttaaaccatcagccggccttttatatgggtcttcactctgactagaatttagtctctgtgtcagcacagtgtaatctctattgctattgccccttacgactctcaccctctccccactttttttaaaaattttaaccagaaaataaagatagttaaatcctaagatagagattaagtcatggtttaaatgaggaacaatcagtaaatcagattctgtcctcttctctgcataccgtgaatttatagttaaggatccctttgctgtgagggtagaaaacctcaccaactgcaccag

SEQ ID NO: 100373 - DNA, 1036 bp, Homo sapiens
tatatgtatatatatagtattcttttctttttctttcttttttgagacggagtttccctctgttgcccaggctggagtgcagtggcatgatctcagctcactgcaacctccgccttccgggttcaaacaattctcctgcctcagcctcctgagtagctgagattacaggcacgcaccaccacgcctggctaatttttgtgtttttagtgcagatgaggttttaccatgttggtcaggctggtcttgaactcctgacatcgtgatccacccgcctcggcctcccaaagtgctgggattacaggcgtgagccacagcacccagctggtattatttttcatttagcataatagtaactcatttttcctgtattattgcatactttgtaaataccaattttaacagcaggatgctattccattgttctgagtttgcttctccacattgaaagtgcttattttacaaaggatttttcttagctctatttgcaggacagaattgtctgcatttgcttccccctaacacatcatgtttgtctctaaactttattattattattgtttactagtcatcttttatttggaggtttattttcatttggataaaaagattcagcaatgatcacattcctcatggagggattctgggccaaggaggttatggtcaagagtgcggagtgtgctctccacactggcccctcttcggtggttcttatgtttgagctccttataagaaaggcagtggccaaaaggcacgtaagctgccagcaccatggaaaccctggtgacactcccttttttcatgttgtcatgcttgttgtatttaatagtatctgtggtaacctctttgaaacgcttcaacaatgcctttggtggtaaaatcagtatccagcttggcagctctactaatatgacatccatgaatgagtttcttcttcattggtatgactgatgccattgtggagtcctggtgtctgctgtctctaaactttaaatggtggttctcaaaccacttaccagtctatgtttgtaattaaaat

SEQ ID NO: 100374 - DNA, 2196 bp, Homo sapiens
ctggggagaggctggcctctccactactgggatcaagtctgtctggtacaatcttatcctctgcttgcccccctcattttttcagatcaagatcatctggataaagaaatagaaaaactgcggaagcaacttaaagtgaaggtcaaccgcctttttgaggcccaaggtattggcttagcagggactggagataagaaggggagggaatcatcagcatggactttgaagggcagggatgggaagtccgaccctcagagatgggcagtgtccggggcagcctgtgagtggccctggaggtgtgcacagtggttggttgtagctgcccagggacagaatggacagggggacttctacagtcctagtcctgtcatagtttcttttccaggtcccaggaaccgcttggggtgatctcacgttatacatcggggcatggcatggggatcagatagctctgactgaggaaactcagaaggcttcagtgagtgagtgaggtcagagctgaaattcttgataaatgcaagcactctagattggtcacaggtcttggaaaaacctgaggttctttgggcagcagagttacgcgtttgcaggctcttggtgacacaggagcagtggtgatgcctcatctggtgcattgcagaattggaggcccatccctgccagacctccaggctgagtttggcagcattagtgcagcgtcagcccctttcctgggcctggctccagagccagcaggaggcccgacgtgctgatggatcatcttctctcctaggcaaaccggagctgaagggttttaacttgaaccccctcaaccaggatgagcttaaagctctcaaggtcatcttgaaaggatgagactcaagaaccaagatgggggaccagcaaccccccagggtcatggaggacccaggaccctccaaccttgacacctgtaaggacaggatctgccctgtaaggggccagccgtcaggaatctggccatgaaaacctctttgtagtgcttggctactctgtgatggcaggagggaaccttcagcctgtctggctgctggacctggacaccagggctcggtggacacaagatctattgacgggccttggtagccaccagtgggtgtgtggggcagtggctgtgggggtgtaagaatgactgcaacaggcacttcccaacaatggcctgctgttcacatggaccctgagcaaggaaggagggagggaggggcagagtggagtgtcattccagcattcctctcagaagggagagaggttttcaggctggtgccatgcgattggaataaagcaggaggctcatgggtggttgctgaatgaagaacagaatcttggtgctttgtggctcaccacagccatctgtggggcaggcacacacacctcccgccagctccaattttgcactttttccctgcttgattccaagagtaggtgctgcctagcagcccttcgtggccactctttactcaggagggccttgcagagtcctgcaccaggcctgggtgagtggatgcgcctcttaccatatgacacgtgtcaagatgcccttccgccccctctgaaagtggggcccggccagcactgctcgttactgtctgccttcagtggtctgaggtcccagtatgaactgccgtgaagtcaaaactcttatgtgttcattaagggctcaataaatgttagctgaatgaatgaatagcagcaactagtctttatttgcctcatctagtccttcagtaagggcacgccactccatttagaatacaacctatgaacatggttcttgccttgaaataaacctgtgatttgacaggcgggtgataacaaatggcagcatggcaggggcacacctctcctggtccccccgctccttggctctggctcatagttacatagaaacacaggctgtcatggccagttcttacgtgttttcaagagaagctagacatatgggttgtgaagttgaatctccttttaaatatttttgactaatgcagaaacttttaaaacatgagtgtgggtcacaggtgttagctccagatagtgcaataccatacaactataatcaagaataaggaacaagctccaagatacatcaagtgaggaaagcaaggggaaggctggtgtcttataagctaataatttttgtgcaagcacagtgtgattccctcagaacagcacctgcagggt

SEQ ID NO: 100375 - DNA, 1027 bp, Homo sapiens
ccaggccggtctcgaggtcctggcctcaagtgatccacctgcctcggcctcccaaagtgctgggattacaggcgtgagccactgcgcccggccccttgctgttctgaacaccccaagcacactactgatctttgctgttcctgttgtttcctctgtttggctcactctttccccagatgtctgcagggctcacactctcactttccttaggtctctgtgtagatagcatataatcagtaaggccttctcagactacctgctatgattaacaaggtcctcctctggcattccctagccatcttagcctgctttatttttctctacaactcttaaggtctgacaaatcatatctttattctctctcctccactgtaacataagctccaagagggcaggaactttttcttgttctgctctgttgtctgtatctaaaacaatgcctggcagataataggtactcaaaaaaaaattgttgaaggaattactatttgctctttcagaagatgtgatggtttgcttcgggaacatgtttatcaagatgcctcaccctgagacaaaggaaatgattgaaaaaggtaaggcctcctggggatgggtcaggggtgtgctgcctctcccaccagctttggtcttaacccagaacagggagtcaggcttcaggcagcgtaaggagaggcagttctgtcacagggttcagactgctgtgggttttaattccacctctgccactgtgggttatttcctcatctctaagagggggatgcatctgtgtagcatagctgtgcagttgaggtaaaacaatatgtgtgcctagcatagtgctttcttattagtgaggaatcagttgggctgcagataacaaaacccaacaaattgaggcttaaggaaatatgcttcttttactcttgcataagaaattgtccagaggtgtgtactccagtcctggcatagatgcccagcagtggcaccttagcatattctcctggttgttgtttcatcgttgcaggcctcatgtcctcatgccagg

SEQ ID NO: 100376 - DNA, 1078 bp, Homo sapiens
accagcactcgtgcagtatactgtactactgcgtcacttccttagtagctattgtgttgttaccactgtctcagtgcccccaatcctgctgttccaatctagtattgttgggtttctcatattactagttcagaatcagctggagaagtttgtccaaaaataaacattaggcctgcttaatcacagtgtgtaggggaagggtttccactcccctggtgattctgatatgccctaaagttcgagtggataatgcagaatttcccatttagtcagcacatgttttctcagcatcttttctggggagagggcagctgcacaaagcattgtctttaagaccaggaagctgagtgagagaagaaatacattcacacatcaatccattttaggcaggacgttgaatgtaatcaggaataatgcattgcctctgcaacccttgtctgtcaagaggtgacagcttggggcaagagatagctgagttccctcctgtccctgtggttttcagattgtggacctggacactaaaaggaatcagaatcgagagggcctgagggccctgcagaaggatctcagcctctctggtaagttgaaattttctcagtgcagccctggaggcctgttccgttttcctttaaggcctttaccttgttcctgatagagatcaggcaggaggtcacagctgtataactcagccttgtgggaaattgaaacagtccggggagatgggggagcaaattttgcagttctggcacagactgtggttcaggattttgcctgctcacttcagtgacaggtcgttagctcctggcttatcaacgatggcagacactgagagagtgccgggggtgtataaaactgatggttcctgcccttgtgctttacagatgaggaaaacaacgtaaaatgcgtaattgaaaattgtaagaaagccagagatggaattggacttggggtgggtgttgagaatatatatccagaagaatgggacactttagatgaggccaagtggctgtggcagtggaagcaaatggggagtaagtatggctggagagagggacagagaccaggccataatgaaagg

SEQ ID NO: 100377 - DNA, 1022 bp, Homo sapiens
tgcagtagaggttggtagggggagctgtagtttctatattaaagtgctttgcagtgtctcaatggaagggaacaagtgggtgtcaagccgcatgggcagtagtagggttggggtttgagcccccttcccaaccatagaggcttctgagacctggggctggggaggaaaggagcttcaatgtgccattctggttggggagaggataggacatttctgggtccttggctgctgccggtagaggtatggggaggaaaaactctagagtgggagatgtggaagtggaaaaggaaggccctgtccaggcctggcctggtttctggagacagaaaactccccaggggacagagaggttacccccttgtgcttagcttctgccacccttcccttctctggaggagaaggctgccctctcctcagcaaccctggcctttattctatgcataaccactgcaagggcacccctggccaggctgaatgggtgggggtcccagggcacctgcaataatctcagaatggagggtatcctgggacaaagagggggtacagaaggtgccaggggggaaaaggtgattcctccatctctctctcacccaaatccccccagatcgaatctgacccttttccctggtctccattgtgctaaaccaccgaacttggaggagcctcatataaacatagcccccagccccactggctttccgaacccatcatgaaatagctggaaggtatctgaaccgttcccatagctccctcattattttcttccctgaggatcctgtggtttaggagatttttctcccaaaccagcctcatttcttgaagaagaattcattttcccatattaaattaactcaagctgagcttctgattgcagataaatgtttctaaggcctcaagtcaacttctagggcttgaaggtgggggaatatatgtattttattgagttgcttaatacaaaattctcaaaagcacttgtgggcactcattcctgccttcacaggccctcagggtctgggacccca

SEQ ID NO: 100378 - DNA, 1074 bp, Homo sapiens
gtctgtctttcacagtggaaggggctcagcttgcaaggtgaggtggggagtgatgcctgctggggaggccacagggcctgccacccctgggctctcatttcccaactgcttccgtttctaattccacggctccttttcagggatgtcaaaccctgaagtgatccgagctctggagcgtggataccggatgcctcgcccagagaactgcccagaggagctctacaacatcatgatgcgctgctggaaaaaccgtccggaggagcggccgaccttcgaatacatccagagtgtgctggatgacttctacacggccacagagagccagtaccaacagcagccatgatagggaggaccagggcagggccagggggtgcccaggtggtggctgcaaggtggctccagcaccatccgccagggcccacacccccttcctactcccagacacccaccctcgcttcagccacagtttcctcatctgtccagtgggtaggttggactggaaaatctctttttgactcttgcaatccacaatctgacattctcaggaagcccccaagttgatatttctatttcctggaatggttggattttagttacagctgtgatttggaagggaaactttcaaaatagtgaaatgaatatttaaataaaagatataaatgccaaagtctttaccaaaacgttggttttcctgtccttccaattcctgaatatctatttgccttcttgctgtatgacaagtcagaaatggtgaaggactctcccggggaccagaaatacaaagacaagtggggttcagactgggtgctgtggctcccacctataataccagtgctttgggagaccgaggagcgggggattgcttgagcccaggaggtcgaggccacagtgagctatgatcgtgccactgcactctagcctgagcgacacagtgagaccctgtttaaaaaaaaaaaaaaaagatgaagaagaagaaagaaaggaaaggaaagaaaattggggttcaatgcttgaggttttctaactgccctaaaatagttactggctatattagtttcctcttgctcctgtaac

SEQ ID NO: 100379 - DNA, 1020 bp, Homo sapiens
agattggccagatgtattgctgctagttgatgctatttatgggaaaggagattgcaaggcagagggctccagaaaaagttaacttctggttacagagaaatgcaagtgaatgaaataatttttcgttctcagggaaacttcctgttttctttggaagatgttaattgttcacacctttcaaactgggtggggtgaatttggagtggctgggggtacttttgagtcctagcagcccttcattagacagctgtttgggggagatatttctgagtgcccaacccacccccgcccccccaagaataaaacagatggggagggaaagaccttgattcttggttctcttgagctttataacattccaggtcacctgtatctttgccagtgatggcgtgttagattacagcacaaaaggcttctagattgccatcaccttgttccttgatatgctgcctttgaggtctcttttgctacttggaaaccaagtagcaaaagcaaaatgacgttgaatgggctggttcacatctcttaggactctttgcatggctctgaacatgcagaagatgattactaaatatttaattgacttttcagactgaacctctcatgggagttaatgaggcaatcaattaaaaattaaaagaaaatttaaaggaatttcctaagaagcaggtactttgctttttccttacagaaaagaactgcaggccaaacatcctctatcaggctatcaggaatatagaaggtgatgaagtcatagaatcataaaaagttggaacagtgtccaggggttttaccagaaacccatgaacttctagtccttgattctctgtgtattggaatattttttccgagatcagtatctgtagctttgataagtttctcagagggatttgtgacaccctccccaagattaaaaattgctgatctgtctgcttacccacatacctggtgccagaatccgctctgcataattcttaccttagcccactttctgcacatcttctgtggaactcatcccag

SEQ ID NO: 100380 - DNA, 1049 bp, Homo sapiens
ggggagacagttgctgtgtttattcccattttgcaggttaagtgacttgtctttgtttatactgtgggcaaaggcatcctctgttttcttcacaaaacagccagagtgatctttgttttggatccacagtcagtcttcagacttggagcacttggcttctatttacaccgcctcttcttgatttctagatagctcctctcttgcggcttcatcacctcctctgctttaaatggaaagagagagcgagtgcctctgccctgaatgcaagcagagatgccaccacagttcttgctgagctctgcaggactcatgtcaaataatgtgtgaggcacccagtgcagtgtctgacacaagtattccataactagtagccattttattctaatttaaataattctccatttgacagaatttcaggtgtagaggtgtctagtcgtacacagttattagtgcctcctctgtgactgtgttaggtcctggagataaaagcatggaaaggtgtctccctgacctcagggaacttaagagactttcttttcttacaccttaggaaggagaaaggagagaactggttcttgagcaagcccctgaaagggctgccttctccgtcagggctacgcatggctcagatgtttctggaacctctagctgacaaatttatctactgccaggtattgggggtcctggaccagttggaggcaggccttggagccagtttaaccaaaattgggtaggaccatctccccctaataccaactgtgccgaagtcttgccttgtagcgttgaacagagattggcctcagagcctgggctggcctctaccaactgtctgcagtggtgcagcttgtggccctgccacttaccatctgtggaccagtgcctgcctgccattgccctcctttcctcaccacaccatgctatcctccagccaccttgcctctccccgggaagcctgacccacttggtgccccagggtcctgatatcaggcccctcacaaatgtacctcccttctcctgggagctgctgtggaccctttggcaacccaagg

SEQ ID NO: 100381 - DNA, 1055 bp, Homo sapiens
gctcggcttcacagatgtcaacaaggtagagtgtctttggcgtgctcacaggaccgggagccacacctcacgagtcctgagcacttggggccacagaaaaggtggggctcggccacagcaagtttctccaggtgccctgggcatgatggtctgtcagaggtccgagtgctccgggcaagtccctgggaggtgctacagggaggtgaagccacaattcttaggaagttaggttccatttttgtaagattaaaacaacataaaaaaaaaaaccgtggaacttcatcagtatgtaggagagagggctaagtagtggtcaagagcgtgcaggctccctgggtttgaatccttcctctcccagttactagttgtctaagtgaccctgagcctgtggttccttagctgtaaaatgtatgcagcagcagtggcggggtaaattagcacattcgtgtgagcccttcccagcacagccctggagaatcagctaataatgtgatgattatagccctgattctcttatctttctttctaaactgaaagatattagttagggaataaattacaaaagtatgtgttttgaggtgcagcccctgtccccaaagggcgtctgtcctaactgggaagagaaccgacagtgggaggctctaagtctccagtcccagctgcctttcactggccattaattgcaggcgaggtcagagggagctccttttacactcaggttgtcacagaggaggtgggccatgagaagttggtgggcttttgctgagtggagttgggggtggcattctagttggagtgattgcagggtagagactggttcatggggcggtgggcacaggggagtctaggtgaactcatgtgacttagatgattacacccagttgtatcagggtcagatgatagaaggccttgaatgccagactttgagaaatgggcttttgtctgataagctgcagggagcccttgaagagcttctgagtaggggagtgatgagaacagtgttttaggaaggttggtacaaccaggcatgctgggtgaggcaagggccctaatac

SEQ ID NO: 100382 - DNA, 1077 bp, Homo sapiens
cgcgcccagccagaaatattacagctttgaaatacaatgtcaagcttttattgacctgaagaaatgttcacaaataccaactgaaaataacaaagtacatagtgtgatcccaatgttattgtttaaagcatacatatacacatatatacataaaaggttaaaggaattatatcaaaacagtgttattaagtgggagtatcaaatcattttatttttatatcgttctgtttaaatttttctgtaataaacatgtattactttttgttcatttgaatttcatgctacataccaaattatttttactttttttattacacaagtaagaatgcatatttctttcataatcagaaaaaataaataaattgactccaaatctcaccacccaagaactcttacagttgacattttagtgagttgaggtatttacattattttcccacaaacgaggtttgtggaatttaaagagattttccttttacgcatctacaggcatcaggtttgtggcctccttttcttgtgacagtttcagataagcactttctcctatcacttacactcctgtgtcagagcagcgctggttggcacctgagggtgtcagctgtcaccttgggggtggtccctgcaagagctgcctccatcttcaacaaccagcctcactctggcccttcgctgcaggaagacaccatggaggagtctgggtggaagttggtgcacggcgacgtcttcaggcccccccagtaccccatgatcctcagctccctgctgggctcaggcattcagctgttctgtatgatcctcatcgtcatctgtgagtgtgcccagcggggccgggcatgggggcatggcttcctcttccaggtgcctcaaggagagaagggtgggcttccctccctggagaaagggaaccaagctcctggcaccaagtgggcatgtcagtatctctgggccagacaggccgtctatctcagcaacagccccagccccagcccaggactggtgattcacctcacagccatttacagagcccaccatgtctcctccatcaatgaggcaacacatcattgctgtgagcttggc

SEQ ID NO: 100383 - DNA, 1050 bp, Homo sapiens
tagttttattctgacaagattgggagcactttgtacagtgttgttttttcccttcttttcttcacataatgtgccacatgtaatctcttcattttgacctcttcatctcttcacgttctcagtccactccttcctgttcctcccctacttcctccctggatggtgagctcctctgggatgctgaggtgccttcttcactgggagtccagatcagggctggggtcagcctcaagagattctggccaggagccctgtggtgggggcagggagtgtgcttctgctgcacaagtcgcctctccttctgtggagcccagaaggtcccctcccccttgcgcagcccccatcccgggcatcagggcctcgtgggggcctcatggtgccatgtctacaggtgccctttcccaccatggtggctctgctgtgcatgtggttcgggatctccctgcccctcgtctacttgggctactacttcggcttccgaaagcagccatatgacaaccctgtgcgcaccaaccagattccccggcagatccccgagcagcggtggtacatgaaccgatttgtggggtgagtcctccagcagaggcaagagcaggggaacgtggaagagggtacgcccccctccgccaccagaagggtgcggcaaccagagttcctgccgcttcagccggctctaatagagtttatgaaagcttaacttcactccaagatcaaggtgaccaggttgtaggcagacttggtgtcatcctaggaaccaggacaaggaaggggaaggatggaagggtatagtgagacaggttaagaccatcacttggaccttgggcaagtcaccccacctctctgcaccccagttgcccatctataaaatgaggagaataatgcccaccctgcctacctctcaagagattataatagtacagaaatatgccagaagaattagcaccaccacactcgtgtaggtgctctctcttcatgccagcttgggaaggagcttggggcttcctggtggcctggtctctaacaatgtcaacctctcgttctgtggcagca

SEQ ID NO: 100384 - DNA, 1131 bp, Homo sapiens
gcatgtggcataaggcctagcgcttggtaagctgctcaagtggtggtggctgctctataattttgatttggataagaatcattattttctacaagctgctgagttcaggctggggtctacccagagcaggtcagtcaacccctggcccctccctaaggacagtgtggctcaccccctgctctggggaagaggggccagagccacatgccaggcccacgggccctgatggtgtcatgatgatgtgtccactcctgcccttgtgacaggttggtgtgccaggggaaggggagcagggtggtcaagccagctgaagccccactgtgtgtccacaggctatctgggagaatcagttctattacctctttggcttcctgttccttgttttcatcatcctggtggtatcctgttcacaaatcagcatcgtcatggtgtacttccagctgtgtgcagaggtgaggagagcagggccaggaggcgggggagggagaactggatccagcattgaacgggttgatgaggctctgcggagaggctgggtctgggctcttcatgtggcccctgcttctggctctgagctcttgggccagtacgttgctgtgcctctcccagcctccatgtattcagctgtaccctgggcctaatgagataccttccagcttagttgtgtggggtactcaccacagctagatgaaaggacagtagatttgccagtgccaagtccactccagtagtagtttcttcaacaggctgatgcacactgggtggcctgccctccctctgggaactggccattggcagagtgggtgaagccagggtttgggatgaacagtccctctgggctgggaccctggctcctccatgagtagctctgggtcttgggcgggttgcttaacttcatgccatccgttcctcctccacatgatggggtgagtgagaggacctaacttggagggctgctctcaggattaaatgagtggattcatctatagcacttagagtggtgtttgccagccaggcacggtagctcacgcctgtaatcccagcattttgagaggctgaggcgggcagatcacaaggtcagaagatcgagaccatcctggctaacatggtgaaaccccatcgctactaaaa

SEQ ID NO: 100385 - DNA, 1335 bp, Homo sapiens
gcctggcccctgaggctatgagcattagggcaatacacaggcctggtccagatgaagcagagctgtgcccatgaaccctgcctgccgcttgccacccactggagcacgccccttcccctggccaggcctcagtttccccatgatatcagtgagagtggggccccagttcgccatgcagcctggcactaagcatgcaccctgtcttctttctgctcgtggccgcagctggacatcgtggagttcatcccctctctcctctactttggctacacggccctcatggtcttgtccttctggctgctaacgggtaccatcggcttctatgcagcctacatgtttgttcgcaagatctatgctgctgtgaagatagactgattggagtggaccacggccaagcttgctccgtcctcggacaggaagccaccctgcgtgggggactgcaggcacgcaaaataaaataactcctgctcgtttggaatgtaactcctggcacagtgttcctggatcctggggctgcgtggggggcgggagggcctgtagataatcttgcgtttttcgtcatcttattccagttctgtgggggatgagtttttttgtgggttgctttttcttcagtgctaagaaagttccctccaacaggaactctctgacctgtttattcaggtgtatttctggtttggatttttttttccttctttgttttaacaaatggatccaggatggataaatccaccgagataagggttttggtcactgtctccacctcagttcctcagggctgttggccaccctatgactaactggaagaggacacgccagagcttcagtgaggtttccgagcctctccctgcccatcctcaccactgaggccacgacaaagcacagctccagctcggacagcaccctcagtgccagccagcctctgccagacctctctttccctcttctccccagcctcctccagggctgcccaaggcagggtttccagccaggcctcggggtcatcttttcaccaggagcaaacccaagtcttagttgctacaagaaaatcccctggaagtactgggggccaggttccccagacagcaggaattgcccctgttcagagcagccggagtttgctggaccacaaggaagaagagaagagacttgcagtgaactgtttttgtgccaagaaaccctggacctggggccaagtatttcccaagccaagcatccacttgtctgtgtctgggaagggatggccaaggccgctagggtccttacccctcaggatcactccccagccctttcctcaggaggtaccgctctccaaggtgtgctagcagtgggccc

SEQ ID NO: 100386 - DNA, 1113 bp, Homo sapiens
cccaccaatgcctagccatctcctttcccatgagttttgcccagaccaccatcagccctgttgcccgcccccaggtctacaggaacctccatagccgcttgtggacccaggtgggccacctgccaatgcacaggagagcccctaatccccaggaactctgccaaactggcctatctgggcatgtgagtgaggcaggggcaaggatgggatcccctcctgagccccagttactggaccccacagaatccaggtgctctgccagcccccctgcctctacctgttaggctgccaagctgtgggtgctggggagggggtcttcctggtcctggggcctgtctatccatacccagatctcacaccatttttttctttaaatgatggcttagaaacaaaaaataacaactgaagaaaaagattttttcttaaactcaacaagaaagactttcgtgttcagtttgcctctcttcgtctccagagagggagggtttgccctgtagactgccagcattctctcttcccctataccttaccctctttagcaaggcctagaatcttccaaaggggacagtccaaggctgctgaacagagagaccaggaagtccccagagcggggatagttaatattccattttatgctgtgttcttttagactaaccccaactctttcttacccttccaccaagtccgaacccctctaggtataagagctgagctgcccaccccctcctccccctgcttgcagagctgtctgtctccatttcattttaggggaaggggtggtagtggccatacccaggccccttcccatggaaggccttatcttctgttccctaggacctggggaggccttatcacaaaataatgtggagggtgcttttggcagggaagtacaaaaggaaccagagccagctgaaaaggcaggatggctgagagatggtagaaggaggagagcccttgattttggttaatacatagagacagggtctcactatgttgcccaggctggtcttgaactcctgggctcaagcgatctgcccaccttggcctcccaaagtgctaaaattataggtgtgagccactgtgcccatctgattttttttttttcttcaagac

SEQ ID NO: 100387 - DNA, 1057 bp, Homo sapiens
aactggctttaaacactgaaattgcatgtaactggaaaatgccagatgtagagcagtctttgggttaggcttgatccagtggctccaacatggctggcctcagcattcctatttctctctgctctgtcttgtgtagttgtgacttcatccacaggccctacaaagtagatttcccctttgtgtgggagtgagcagaatgctgcctggattccagacctgccattctcacacattgccagccagaaggaagcaaccctttctgggctctcaggagaggactcaccacagaagccccaataagcatcctgtttcattggccttgatgggattctgtgccatccccaaaccagttaccatatgccagtgacaacaagactgaaacaggagtggtttctcaaaggaaatttggggcactcttaagatgaagaattgatgctggttgtccaagaaaggacaaatgttcaccctagtcactgcccaaggtgtacagctggtgacagctaggacctgaccttacctatacttgtgcccaaccaccgggttcaggcagactgctgagaggcttacatagcttcacctgactttggtggtctctaatgaaggtcgttaccaccatcctgggtgccagcccttgtgctgagatcctcccatcaggggctcagactgaactggcttttctgtggtctggagccagtgtctatggccaagcagtgcaagtcacttgcagtccagccaagagcctatggggccgttaacaagtgcaggtgttttatgtacaaaggaagtgggctgacccttcatttttgaccttccacttgacaaatgttcactgtccaccccagtaggttaaaaccctagctaggaccctaaggaaatccaccttgctccctagggagtgtataccacagtataggtctgagggctcagatgagggagctgttgtatccatttgtcaggaaaaggctgaaagctttctggaagaggtggcaaggacttccacgcagaggtggagggggattggaggtactgacctccataggccacagtttgggagctg

SEQ ID NO: 100388 - DNA, 1119 bp, Homo sapiens
cagcctaagccagtactccttgtttgaggtaaaagccttaaaatttagctccctagctcttgattagaagcaatttggagtaagtgtgttttgatttaggcagggtagcttgggatacctttttaaaaacaccagatattaaaatgtctggcaaggttagaatcagactagatgatttgcttctaaaaattagtttcagtgagtcccagggactaattaaggtttattttaaaaagtgtctaccttggtacgcagccacctcctgcatgctgtgcatgttattgggacttgtattataggtgatggtatgtgagaatccagttgggactcgctgttgccatcctctttgttgtatctggttttcatcactagactcagcaacccttctcaccttaactgccaccttccctacactctcagtttacagaggccactgggcctctggctgcagaatacaaagtcccgggctgttagaggagtcctttcctctctgcctgccctttcctgtccctccctcgaattctctctccccgtaagtgatgctggaaaagtcataggactggcaaagcaactgtttaaaccctttgtaaccggggccttgcccccacctcctgtcttttctccttgccttccccactcctgtgtcctcccatctatcctgtctttcctttcctcctctcagtgtcctcagcacccacaaggaattttcctatcactgtgaactttgctggtacagaggaataatatctgccttcacctttttttttttggaccatagctagccagtcatttcttaaacctcccttcctaaaatctggggggtcggggggaaagaaaaaaaaagccttagtggcctggttgttcaaaggataagaatagctttatcctgcactcagtacccgaactcacttcagtatgcttactgaggccatgagaacctgaggggcatctgcccaggacaggagccatggcatatgacaaagaccaatgagggaccaggaaaaaaagtgatgtcccctttccctgccacctccagcctctgccagcaatgagctgtccccctcccaccctacacagtagctggtcagggctgagtacagtcctgggggtaaggggatg

SEQ ID NO: 100389 - DNA, 1895 bp, Homo sapiens
atgtggacttctcccacctactgggctttcttccactcaacctgcccccgtgtaacccacctggggccacaggaggcctggtcatgggctactcccaggctgaggcacagcccctgcttaccactttgcaagctcagcctcaagattccccaggagctgggggaccactgaactttgggcctctgcactccttgcctcctgtcttcacgtctggcctgagtagcaccaccctgcctcgtttccatcaagcattccagtagcccccacagaggccctcagctcagtttttggctctgttatggagccttagtacccaccccgtctgtgtcccccatgaaggcagctgagctttcagagctgggttcaaaaaaaaaaattccagtgtctgtatacaggagcacttggtttgggggttcaggctctaggatcgattccagaaggagccttgagccccaaccccgtgaaaagatctcataccgtaggacttcaggtattatttacttttatttttttgacctgaatcgggagccacacttggccctcttcctctccaaagcgccagaacctccttctctttggagaatggggaggcctcttggagacacagagggtttcaccttggatgacctctagagaaattgcccaagaagcccaccttctggtcccaacctgcagaccccacagcagtcagttggtcaggccctgctgtagaaggtcacttggctccattgcctgcttccaaccaatgggcaggagagaaggcctttatttctcgcccacccattcctcctgtaccagcacctccgttttcagtcagtgttgtccagcaacggtaccgtttacacagtcacctcagacacaccatttcacctcccttgccaagctgttagccttagagtgattgcagtgaacactgtttacacaccgtgaatccattcccatcagtccattccagttggcaccagcctgaaccatttggtacctggtgttaactggagtcctgtttacaaggtggagtcggggcttgctgacttctcttcatttgaggtcacatttttcccccgtggggaaataaactgactttggactgcttcagtctctgccatcttccatgactgcatttgttcctgcctgcctcggcggtatccacagaagacaggcaagaggattggagcagttttctcacaggtctgcaattctgtttttctccaagtacattatgaccccctcatccttctcttgaactggagaggggaagaaatgaaaggcatgcccacgtccgtcacctccccatcccctagtccccaccttgaacatcatgagctgttgttattagtcttggaagcagagtctgggttggtgtggatagcaaaggaggaagtctgagcccctcattggtcttcctcccacctgtcccttttccgggaagttgtggaattgttggaagaagagtttgcagaaggttaggaatgggtagatagctaagtcctaatctatgggtacattgttgtgtcccaaaccaaaattttccttatccacaatgtcccttctgtctcttccactttacagtggactcggccactgtgcataggcttctctgctctccatcaaatcacttccactttcctgtgcccccacccccgcctccagttttccgctagtatccggcaaggtttcttgcaacaaatgattagttcttttcttctgactcgtggggctccctgctgcagagagcacagcccttgcctggagcccaggaaccccatccttgcttcatctcagttcttcatgggcttcactcttcccactcacggaagggaggtagctcagggacctccactgtgggacccttgagacgcttccactctgattcagaaacacacttctacctcttt

SEQ ID NO: 100390 - DNA, 1032 bp, Homo sapiens
gatcgagaccacggtgaaaccccgtctctactaaaaatacaaaaaaaattagctgggcgcggtggcaggcgcctgtagtcccagctaccgggaggctgaggcaggagaatggtgtgaacccaggaggcagagcttgcagtgagccgagatcacaccactgcactccagcctgggcgacagagcgagactccgtctcaaaaaaaaagaaatgagatagattggcctgatgcacagtcatccaaccatccattcatctatccaacattattgagctcttgctctgtaccaggcacagtgctcggtgcaaggggcggagtagtgagccagacagatgggggtgctggtcctccttgggtttatggtcttaatagtgggtacagacagtaaacaagtaaatacatgaacaagatgaccacaaagcctcagttcctcatctggaaaacagttaataggaagggactaaaataggcaacagggtagcatggtagtcaggattgccctcttgacaattctgtggtcctcaggagtgcttagattctctgtgtgctcctataagttaagggaactccagtcaaggccatactcttaggctttcttttttttcttttttttttgagacagggtctcacttttgcccaagctggagtatagtggcgtgattataactaactgcagcctcaaactcctgggctcaagtgatcctcctgcctcagcctcctgagtagctaggatcacaggcatgtaccaccaccacacccgctaatttttgcatgtttcctagagacaggatctcttccctgtgttgtgcagggtgatctcaaattcctggcctcaagcagtccctccaccttagcctcccaaagtattgggattactggcatgagccactgcacccggccttcttagactttcttaatgatgatctggttgccagtgggcggctgcaggaaaggtcctgggtcaggaggcaggagccctgactcatcacatataatttactgtgtgatcttaggtgagttgctagacctcttt

SEQ ID NO: 100391 - DNA, 1102 bp, Homo sapiens
gtgtggagtttccagggctaggctcctctctcacatcagccaaattgatgtgacttgtttccttctggctgccattcccaactttccagaggctgaggtgcatgatttcaaattgaagggggagtagaatttgactttgaaggtaggggtaattccctccaatctaaacatgcacactcgagcacactctctgctcaattccaaggtgcatagtaattgctggtattacaaacaggtaattccacccttgcaaaggaggaggggacttaaacaatgaaagccagacgtcacaggcctttgaggtttatagtgaagcaggcacatatgccataatgacttgaaggctcaagtgggactagtttttagtgctacctacccctccccagcatgtgattcatgcaaaatgcagccaccttaatgcagatctttctagacaaatctacactcgtgatggggacgtgtttatcatattacatcgcagtgtttcttcaacaagaggaatggttcctgaacaggacgtagctcatgttaatgatgagcaaagctctctggggcatgaacccgctgatcccatcatcttgttcacggccagtctgttggatgaatggtcactgtaagcagcaggtgctaatgagctgagcaagcattctgtggcccacagctagtttgtgcagttggagccctccccagattctcgtggataatccccagacacccccttttctctcttcacatggaaaagcctcatgatcaaattttggcaccatctcttcaaagggaatccccctgttgtagcaggttgcatcgtggttggtaatctgtggtaagcttgggagtatgaatgtgggtctcttgtccccttttgagagtcagtgtggtaactcccatcctcttcctctggattagtatctggaatggagttgtgtcgttcttgcacatctccccttctattcaacaagagaaagaatcagactttaagatttcggctccccacttgggaatggctgcgaacccagtttaaaccagaactacctgggcctaggttggtccctgagaatcaacctgcattcagtgactagtttacctatctgaaataaagtta

SEQ ID NO: 100392 - DNA, 1044 bp, Homo sapiens
cctagagtcctcagttaatggaaaccattgatgttctgataatttcgcactcactatttttttttttttgagatggagtcttgctctcttgccaggctggagtgcagtggcacgatctcagctcactgcaacttctgcctcccgggttcaagcgattctcctgcctcagcctcctgattaactgggactacaggcgcaccaccacgcccagctaatttttgtatttttagtagagacagggtttcaccatgttggccaggatggtgtcaatctcttgacctcatgatgtgcctgccttggcctcccaaagtgctgggattataggcataagccactgcgcctggcctcgcactcactattacagtgtagacattgcccatccatctccctctggcttgcttgcctctgtctccttgccttctcagccagttgtctttccaagtccccacttccttgctttctgtggcttactaacctgctccaacaaggctcttcttcgccactgttagcattctcactgaggtcaccagtgacctccaaattggcaggggttatttcccagtctttctctcacctgacctcccactggcacttgaccctgcaagcttctccttcctgaacttccctgttccaagacaccacctgtccctgctacaatctaacctctcagcattttcctctttccactgtatcaggggctcctttctctccacccactgtttagatgttagtgtttctcctctttctgtttgcttactagctatgtgacctcagatgttatctagattctgtatgcttgggtttcttcataagtaacctggagatggttatattcctacctcaggattaaatgtgcaaatctatgtaaagtgatgagtgcagtacctagcactgtgtcaacatgcaataaatattagttgctattattaccattacttgctttgctataaatatctgttgactcctgtggcttttactcttctccgtgtacctcccaaatttatctgtggcccagactcagactcctccataattacaggcctg

SEQ ID NO: 100393 - DNA, 1180 bp, Homo sapiens
gccccctgagaagcgggtggcatactgctttgaggtggcagcccagcgaagcccagataagaagacgtgccccatgaaggtgggtcctgtgggttcgggggccctttcttcctgttccatgtcctctaggcccccaagactatgtcatggcaaaatgtggggaaaagcaccagaaggacttagaatagaaagatggagatttaagtcctgtttctggcatttgttagcgaagctgcatcaccttgggcagaagactttgcttctctgaaccttcatttctacctacaaaatagagatgccagtccctgctctgtctcactcctaaagtgtcatgagggccaggtgaaaaagtgcttgtaaactgcaaagtgccacatcagtaataataactaatattcatgtagcacttactatgtatgtcaggtaccacgctaagagctttacatgtatcaactcatttaatactcacactgttccatgaggaaaatacttataatatccccacttcatagagaggacaccgaggatggcacagagagggtcagtgtcttacccaggatcacacagcaaacaagtggtagagctgggattcaaccttaggtaatttggcaccattgtctacccacttaacttgaataccttcctgcatctcagcaggtaaatgagaggctgtcatatcttattaaaagaaatttatacatttctggcactttggaaataaacccccaagtatgtctttcggtgtatgtgctaaagtcttgggaaagtggttggaagaactatgaaatttgagaaaggagacctagctcacagccccaacagtgcccttactggctgtgtaaccttgggtaagtgtctgaccctcagtgggccttggtttccaccttgaaaatgaaggcattggattagccaatcttgaatgtctcttgaagctctagtccttggttcaaaatccaaggtctgcttctccccagaccctcatcagtgctgctgggtcagcaggatgtgacatgtgaacaggaaagactctcctgctggaatccagaattgaagccacggcactctgctcagcccctggcctaggaattgcagagtgacatttctcctaggccatcctgtgagagtgttttggcctgagtcacatcacccagcttcccccacctacacttccctggcccca

SEQ ID NO: 100394 - DNA, 1221 bp, Homo sapiens
gggaacatactaattcatgtgcggtcaaagcacttggcatttaatagggcaaaggtaaacagatgtagagaaatgagtctcatgcctgtaatcccagcactttgggaggccaaggtgggtggatcacttgagcctaagagatcaaggctgcagtgagccatgatggtacccctgcactccagcccaggttacagagcaagggcctgtctcagcaaaacaaaacaagcacaggccaaggagtgagatagccagcgctgatggtatctgcctcgtagtgcatgaagtgcatgtcatacactaagcagccagccagtgttggctgtcagtgttattactcacatgctttattttatttaagactttgagatagttcatgaagtgggtattattatcaatttccattttataggtgaggaaactgagcccagtgaagttaaataacttcccaaggtcattgagctgttgagtggacagctcaggtctgtttgtaaatctttaataaataacaacagctaagattcatttagtgtcttctatgtgccagacactgttctaagtcttcacaggtattgactcacttaatctttccctgagtctgtgggttgttactgccatctgtgctttacacttagagaaattgaagcagaaaggaataaggtcccttgcccaaggtcataaagcttgaagttgcagagcttggttttgaacccagaagtctgaatccaaagcaccagttactttatatatttatatttgaaatgggtcttgcttgtctcccaggctggagtacagtagcatgatcataactcactataacctcaaatccctgggctcaagcaatcctccccgctccgcctcccaagcagctgggagtgcaggcatgtgccaccatgcctgacgaatattttgttttgttttgtacaaacagggtcttgctatgttgcccaggctggtcttaaactcctggcctcaagtgatcctcccacctcagcctcccaaagtgctgggattacaagcatgagctgctgcgcccagtcccaaagcacctgttcttaatcacagtggattaaatagctgtgcctttaacagctgccagttcccttctgggacttgcctttggacctagctttggacctagttcatgtgccactgaggatcctcagtcatggcagatttaaatcttcctcattgttgatcccagatagcacactcccattctct

SEQ ID NO: 100395 - DNA, 1051 bp, Homo sapiens
ccaggaaaaaaagaaagaaaaaaaagccaccaactctaaaagcaactccaaaagcaaattccaaaaagctagaaaaagcacacaatcctagtaggaagagaaaggacaatggtgcatggggagtgttgttgaaacacttgtttattgccccatagctttgtttgagttcattgagttgtaagaattacatgagggtttgaagaagtttgtgccttacagccaagtttttgggaaaggaaaattagtagggaagatgaggtccctagagggagtttgagggagttgatggtcccttggcagctgcctgtcttccttcaacacatatttaagaagcacttcctgagtgtcaagggctggtttggatgctggggatataggccagaataaggacatgaacaaggcagggaatgaacaaggccagaataaggcagataaggtccctgccccaatggaactcatagtctaacaggggagatagtgaataaacttttacataggatagttccagagtgagatggtgcttagaaggatataaacaggtggtatgtgattggcagggctaagaccagaaggatgagaaggagccagttgtgtcagagttagaggaaaagtagttcacagcaggaagtcaggagcaaagaccctgaggcaggaataagcttggtatggtgaaggagcagaaagaaggcaatgtggtatggagtgagtgagagaatggtaggatgttgctcttatctgttgctgcataataaatcactacaaaacgtagtagcataacaacaagtttttttttttttttttttgagacggaatctcactctgtcaccaaggctggagtctcggctcactgccagctccacctcccgggttcatgccattctcctgcctcagcctcccaagtagctgggactacaggcgcccgccaccacgcccggctgatttttttgtatttttagtagagacggggtttcaccgtgttagccaggatggtctcgatctcttgcccttgtgatccacccgcctcggcctcccaaagtgctgggattacagg

SEQ ID NO: 100396 - DNA, 1050 bp, Homo sapiens
ggggcttgggagggcatgataggggcacctgcagacccctgctcccttccatagcgcagggactatgcctgtcttgttttcctccaggtcccaatacatagtaggcaatcaataaatgttttttaaatgttgaatgaatgattcaaatccagtatacatagtccctgtgagtgtgacctggccgttgcttctgtaagcagctgcatgtcccagtcctgccatgtaggtaaaagggcaaaggcttggtccagacaccccaccctggaatgaattactgcaccgcagattggaagccagtgtgacatataaaaggttggaatgctctcctgtaaagttttaattgttcgacaagcaaagagggttgtaaattccatgtggcgggacagtattgcatattgtgcctgttgccgccgccaccaaggttccttatcagcccgttggtatttcacaacctctcgtgtttcttgcgtgttgcaggggcccctccgcagggtctctggggcatggtgcaacaccatcctttttcccgtgggggtggcagccaggctctctgtgcgtcctctgacttccctcattccatctcctgtctagattttctccaaaggaacatccggtgcttgccctgccaggagccccagcccagttccccgtcctagaggaacacaggccactacagaagtacatggtatggtcagacgaaatggtgaagacgggagaggcccagattcatgcccaccttgtccggccctatgtgggcattcatctgcgcattggctctgactgggtaacttcccccttcctctctcactggctaacttggatgtgtccctgagcatggccctggcctgtagggatcggccccgcgtcccagccagagcagagatctctcacttgttctggttcgtgggattgtgtcccatcatcccactgcagcacatatcaaaatgtaactccagagtgcctgccagccaggtctcactttagcagcagctgtttttatcctcattttacagatggataaactgagagatcaagccagaccccaggtca

SEQ ID NO: 100397 - DNA, 1015 bp, Homo sapiens
ttctcatttctattttctgttcaaagaagctcagcaaataatctattaatagtaactacaacaaaaataataataagctttcactggcctgaaaataaagatccttcctctcctcagttctccttctgtccttagtggaattgacagaaaaaacccatagcctgaaggcaaatcctgcactctggattatgttgtcaaagtgaattcaaattcttgcttgaaacctggtttatttcagggttgagacctttcccttgaaataacattatttaagggcaagcaggtttggtttgtttttacatctaatcctttattgatcatcagcccaggatgccaagcataaccaggtaaacagtgagaatggaagaaacagaaggcatttcccagaaaccccattcctcaagtgcagtgactcagaacaatgcccacctgggggcagcaccccggggaggataccccacccctctgaaaaatccacctttgcaaaaaaattggcaacacattgatccatttgatattcatctcctccagtgtgggggatgttttcccctctctgacactgcacaagctggtttaggaggtcctgggcaggcactggcagaaggcaagaattatcttttcagtttttctcaatcctgctaacaatgcccaaagagaaagtctcagttcagtgctattgtgtcattaactcctctctactgcttgctaataatctgtccttgtaacagagtagacctcagagtcagacaatcttagttttctggaatttagtaacactattactaagtaaataaatgaattatttatttatttatttatttatttattgagacaggttctcactcttgcccaggatggagtacagtggcttgatcttggctcactgcagcctcaacctcccaggctcaagccattctttcacctcagcctcccaagcagctgggatcacaggcacgcaccactgcaccagctaacttttgtatttttagtacagatggggtttcgctgtgttgcc

SEQ ID NO: 100398 - DNA, 1040 bp, Homo sapiens
ctctcccatgaattactgtgtcctttcctcatgatggcatctggcgccatatggttaaagcctgcttgcttgtctgttttcctcagtggactcggagctttgtgattcacactcacattgcatccccaggacctaacataaagggtctgcttaatatgttctaagtggggttaatactttgtagaaacaagcaaaaaaaaaaaatttgttaaagctgaaattcatgtatctgaagaaactgtatcttcagtgttaccaagaagcctctagtgaagctgccccagtccctcaccagtgatggatgggcacagctgagcacagtgtattttttcccagagtttgtcccttttggctcagtcctgagctctttatctttcacaggctcccctgtgaggaattatgttctgagagaaaccgttcatgagatggattctactttgtttctcactcaggccatggagagtaagttgcttgttggaggaaaaaatatagtagatcatacgaatgaacagcagaaaatcctggagcagaaacgacaggaaattgcagagcaggtaacttttcattctttttcagggagaatgggtgaggtaaggtgtgtttatgctgcagagcaaacgtctcatattagactctcttcaaagagaatgagagcaaggtgtgtctgcctcatcctagctggagactctgatcctagcttggggaacccagcatagacacagtctctagggcaagctgatgaattttgtcatgttgctcagaaacgtcgagaaagagaaatccagcaacagatggaaagtcgagatgaggagaccttggaacttaaagagacatacagctcattgcagcaagaggtggacatcaagaccaaaaaactcaaaaaggtatgaaaggaatgaggccagatggagttgccttgagacttggggaaagggagaactctaccctttggacagacaccctcctcacctgcctctcccctcattccagctcttctccaagcttcaggcagtgaaggctgagatccatgacctccaaga

SEQ ID NO: 100399 - DNA, 1069 bp, Homo sapiens
ggcatgtgccaacacgctcagctaatttttgtatatttagtagagacggggtttcaccatgttggccaggctgctctcgaactcctgacctcaggtgatccacccgccttagcctcccaaagtgctgggattacaggcgtgagccaccgcactggccttttttttctttttttttttttttttgaggcaggatctcactgtgtcacccaagctggagtgctgtagcacagtcatagctcgctgtatcctcagactcctcggctcaagtgatcctcctgccttggcctcccaaagcactgggatgaccatgcccagctgagcacttgctgtgtgctgggcattgtacccagcacttgactgctttctctaattaagtttccccatcttctctatgcattcagtcctgttgcttaaaggtcaagtagtggggcaagtggctgaactaggatacacaacgtattaagttatagagtaatttacaccagaagtatatatatgatataaaatttgatgtaaaatatattgaaatgtaaactgtttttctctggttggtggaagcacactcaatgttttttttctttttgctcatctgtattttataactatcaatagggaacttgtattatttttatagtgaaagattttcacttgaaatatttttagatgtttctgagtctctcttggcagccagagccaaacagaagattacggttagttagctctttgggtgccattcttcctggctttgagttatttaaaagaaagaaagcaaaagcaaaaaattaggtggagttaggtgttgtaaaacggcatcacttctttcaggcaggctctttcttgataggccctgaataacaagcaatttgcacttctattcttggaggggccctcgattgcttgtactgcctgtgtccagttggaggctaacctagctggtgatggctgtgcttctgcaggcagaaaacattgtgctgttagagctggacatgcccagccggaccaccagagactatgagggtccagccattgcccccaaggtccaggctgcattggatgcggctctgcagga

SEQ ID NO: 100400 - DNA, 1059 bp, Homo sapiens
tttgacttttgcaggcctaaaagtggaaggaagtcgggatcctcctcctcttcctcaggaacccctgcatctcagctttatccacagtctcgggggctggttccaaagtaaagccagcttctcctctcccagggcggaaacagcatttgccttctgagagaagagactagcaaaaagctgcagagaggattcggcccaaactcagaactgttcccctgaggagaagcggtggcctctttgcagatcaaccaacttaatctggttgaacgtgctgttcctaatctggcactcagcccctctgggaaacatcttttaattagcatctcagaaatgcatgggtaaggtaaagtgcgatagttcaagtggaaagcaagagaatgaccagtgaccttgcttccttcccccttgccttcttctcccccttcccctgtgctccctttctctcctctctccttttctagcctgttctttacatggggctcccttcttgttgaacaatagggcagaatcaggagtcaccttagcaggaccacatctttggagcctcgggataaaatgacagtgaggttgaaaagtgaaaaccctagaacttgaataggtgcctgttcttgtagggagaaatgagaaatcgcatttggatccaggccccaggtgggcaccatcagcagtcttgcttccatgcacctcagtaagaagtggatctgcctttgggacctgctcagtgaggaaatctcttccaatttctgcttctgaatgattcaatgttgggagcaatagaaataacattccctttgccttctctgagtgtttagggaaatagcttctttaaaacctcaaaaccatgaccatcctgtcaaagacctaagtctgtaagctggtgccatgtccatacaccatgtcactttactcttcatttgtcaccatcttttcccatgcacgcatactctgaacatccttgtgtgggcccatcctctgcatccagagcatgctctgcagtgggcctgttttgtggaagaaaggaggctgtctctgccttctctgatgggactggagttgagg

SEQ ID NO: 100401 - DNA, 1402 bp, Homo sapiens
tccaggctggaagcattcccatgtgggtgtctgagtccatgagccaagcctgaggggacagtgagtctccaggtctgccacactggtgcaccttgctggcacggtgcctcaggaaggtggcgactcaggtgggccttgagttatattttaactcagctgctcagttcccagggcacatttctggatcagaacccatgggaaacaggaggtactaagtgcaatgtcttagcattctgcaaaatggagatctgttgtccagcggcttatctcctttttagtaacccttctttctgaacccagggcccttttcagccttccctcatattttcttgagatcaaactttacttctttcttatttactaagaatttgcctgtttgaataagaacaaaacgctaaggtgggtagcctaagctgattttctgctggttacacgtgtctctcacaccacatttcctcaaagctaatctgaattctgtaggctaaaaatattcatgtagcaaatctgagaattgaaaactgcagataaccggccgggtatggtgactcatgcctgtaatcctagcactttgggaggccgaggtgggtggaccacctgaggttaggacttcaagaccagcctggccaacatggtgaaaccccatctgtactaaaaatacaaaaatttgcctggtgtggtggtgcatgcctctagtcctagctactcgggaggctgaggcacgagaatcacttgaacctgggaggcggaggttgcagtgagtcgagataacactactgcattccagcctgggtgacagagtgagactccccctcaaaaaaaaaaaaaaaaaaaaaaaaaacagaaagaaagaaaaagaaaactgcagataaccctatacattaatactggtatctcgaggtgactcttctgaccaagggtggttaagtgacacatagaacttttctaagagaagacagacaagttgacaggcatgccttgtactcagctgtgttcatgtggtggtctgtggaaagaaaagaagactcatttggaaatgaagctgtccctttccaagcagtctctggtgcttttcttctctcaaaatggatccgataaatatttgaatagagcagattgtagaatgtcgtgctgtcaccagaaagctgctgttttgggttctgcattgagccaaatatgtagaggacctaccaagcccactgagggactaggttttcatgtctctagtcatacctagaatgttctgagccgtctgagggccttcatgccggcagcagctagcaaagccagaaagcaagtctaacaggatctaagatgaccatcaggagaaggagtttgagactgtgtatgcaacccccaatagacccccttttactctgatctggagaatgtatctggcttcata

SEQ ID NO: 100402 - DNA, 4264 bp, Homo sapiens
aagcaccgaaggggttaagggtggccgggggagcccagccaccgccccttcccagcatcgcctcccagaatcccgcaggcccccagccagttctcgcacctcgcgagactccacccagccccttccccgaacagcgacccgtccccgttcctagctgaggtcggtgctaggcggaggacgcgagagggagagcggaagggggccgccgggcacgccgggaagtgtggtccacgcgcttcacgcggccatattcttccggagcgggggaggccagagaggccgttgggactacgactcccaggcgccctttcggtttgtttttgttcaaaaaaaaaaaaccccacactccccctcctcactcttcacacacactcacacacacccacggcagacacgcacgcacccgggcgccgaagggaaagccgcgtctcgccctcccgccccgccgtcggtcctgtctcagtccctcagcagagcgggaaagcggaggccggagccgtgacctctgaccccgtggttatgcggagccgccgcattccttagcgatcgcggggcagccgccgctgccgccgtgggcgactgacgcagcgcgggcgcgtggagccgccgccgcccctcccccaccgccgctctcgcgccagccggtccccgcgtgcccgccccttctccccggccgcacccgagacctcgcgcgccgccgctgccacgcgccccccccaccgccgccgccgccccagccccgcgccaccgccccagcccgcccagcccggaggtcccgcgtggagctgccgccgccgccggggagaaggatgaaggacaaacagaagaagaagaaggagcgcacgtgggccgaggccgcgcgcctggtgaggcggacagccgaggggggctccgtggggcccggggtggggggggctcgccgcgcacccccccactggggggggaggggcaaggccctgcccaccgcgggagggggcggggccatcttcctttaagaacgggacagccccgcaaggcgaggggtggggagcgctccgccgggatgggatgtggcgcctttttccgctcgccctcgcgccccccccgccccgcgcagctaaattccggcggaggggcgagctggcaggccggctcctcccactctgggcagcggggtcccgcgtcccctcccccactatttggcagcgtctgggggtctggggcagcttcgttcattcacccgggggagttgggtttccgggaagggtcggaagctcctccctcgcttcctggtgggtaatggggtggtgcctttgactccgggggtggaaaagcgaccccacattcaaggacgccaatggcatgttgagctttcccaatctaaaccaggtgcgtggagggaagcaagtgcttactcccagcttgaaccctgagcagcggttctctaactttagtgtcctgtgggcgacacctgggaggcggttaggaacgctactcctagggcccttcgtaagacctgctgagcctcagggtctgggatagagcctgggaatctgcgctttcaccagcttcccaggtgattcaaacgcagtggctcacggaccccactttgagaaacgcagactgggctgtttgccttcagaagctggactggaaattggtattttgaggagaactgaatccactttgcaaagaatgtatgttggacaaagacaaagtatctctgttgggagacgttgttcactgaggatttagcaagggagagcgtaacttgagtgtttgaagccgtctcgttcaaccgatgggggttgtgaattttgtgttcagagcgtcagaggacttgcaggtgaaatagcttccttttggattactcccacaaagctcagacactttgagacatattcgggtaattatctgctgataccagtagtaacaggttatactaagatgtcagttcctaagatctgtcacacagcgaggttgtggtgcggatagcataagtgtctcttgacactgtagtttatatgtaatggttgtaattcagttttaatgatgagtgaagctcagacttaattttctctcttattttgaagtgagttttctgcttcaaaggtgttgtgcaaaaaaaaaaaaaatagactgtattgggggggttgacacaaacctgaagtacacctttttctttctcgaagtctgtaaaagttacagatttataaaaactgaaggaatttgggctacagaattttcattggtgcttgctatcctcttccctagtcatttgttgcccagggaacaaaaatagcaattgtttgtatgctgaagttttgtgcttcagtttattttggcctggcatgtgaagtttgaagattttgaggttccgaaatattttttttctgattgagtcaaaattggaagcttgggctagttttcaggatcttgtagaaatttcaggatttctctaacggttctgcacctggaaacaaatataggcctgatggggagtgggagagagctctcgttctcctcctcgacaatgagttttgtgtgttcattgacattctccttggcgttcctgttatgcgggtgtttatgaccctgggcacccaaggaaatttgcttgccagagttttacttgttagaggtaggtgaaagtacttttaagtcttgtgttatttatgtcttgacagaattatgaaatctgtttgtctcaaagttctgttggctcttactagttgactttaggaatttggggtccactgttaagtctctttagattctcgaatttaccgtggtctgaacttcaacatcgaggttgctatttctgttttatcattgactcaacttcaagccaggttatcagggtaagttattcctctttttcttctaaggctcttcattaaaaatagtaatatgaataggaattactttgtttgtttgtttttcgtttgtttgccaccacacccggctaattttttatttttagtaaagatggggtttttccatgctggtcaggctggtctcgaactcgtgaccttaggttatccgcccaccttggcctcccaaagtgctgggattacaggcgtgagccaccgcgcccagcctatgagtaggaattactttgtggtgctgttatacatgtgaaaaaggatttgcgagactttgggagtctgaggtggaataatcacttgaggctaggaattcgagatgagcctgggcaacatagacccggtctctacaacaacagcaacaaaatgagctgggcatggtggtacacacctgtggtcctagctactcaggaggctgaggatagcttaggccgaggagttggaggctgcagtgcccaatgattgattgtaccactgcactccagcctgggtgatagagggagaccctgactctaaaaaaataatgaggctgggcgctgtggctcacgcctgtaatcccagcactttgggacgccgaggtgggtggatcacagggtcaggagttctagaccagcttggccaacaaggtaaaacccagtctctactaaaaatacaaaaattagccgggtgtggtggtgcacgcctgtaatcccagctactgagggggctgagacaggagaatcacttgaacttgggaggtggaggttgcagagagccaaggccatgccactgtccagcctgggtgacagagcaagactcgtctcaaaaaaaaaaaaaaaagaaaaaaagaaaaaggacttgttgagaatgtgatatgcaatttgagtatcttgtgtgtgttttttgttttagaattttccatttctttgaatgggactggatggtaggtgagggggaactttttaagagtcccaggccgggcacggtggctcacgcctgtaatcccagctctttgggaggccgaggcagacggatcacctgaggccagaagttcgagaccagcctggccaacatggtgaaaccccgtctctactaaaaatacaaaaattagccaggcatggtgatggtgcatgcctgtaacctcagctactcgggaggctgaggcaggagaatcacttgaactcgggaggtggaggttgcagtgaacccagatcacaccactgcactccagcggcgacagtgagactctgtctcaaaaacaaaacaaaagaaaaaaccagtcctcttaatgtttaaaaaaagttgctgtaacactgtactggagaatttgtgagagcgtacactggactgagagaaacttgactaggagggaacgtaggacagttgattagaacacctgaacacttctctttgggcaggtg

SEQ ID NO: 100403 - DNA, 1629 bp, Homo sapiens
gaacgcgggaggcggagcttgcagtgagccgagatcgagctactgcactccatccagcctgggcgacagagcaagactctgtctcaaaaacaaacaaacaaaacaacaacaacaaaaaaacctttcgtagaggaaagaagattcttaagaatttcagtatagtgtaccccaggagattgatttttgcagatgttaattatgctgttgaaaaatagtctttctttcacacattttgtagtattgtcttttctaggtgtaagaagtagaccttatgtggttgagtggatataaatcctccaacttgttataaacagtttgtttgggagaaatagccaaggggatttccctttaaatcgaggacgctaaatggattctccctggcttcgagaaactctttgttgtatgctttatcttttactttgattcatgactgaccagttcttacatcaaacatttttttcccctttgaagtaagagaagagatacttaaaaaaaaaaatgtagtctagaaagagactaggaatagaacactgctgacttgttcttataccaagagctggaggcataaacagttttaataaaaaagaatactttgtatcttttgatgtaacttccctttagagattctgtttcccctgtcttaaattctcaggctatttctgattgctgtttaaataattggtagttactatttgagtcatgcttcttaaaaaaaaaagatataaaaattcgccagctcagctttcatttaattagtatcaaagaaatgttatctgtggcagtgaacattagtagcttgttccagggtttattgtaggtttgttcaagtcagtactgcccatcttggcacttaggttcttggaatacagaggtggataaggtttgcccctcagggcttatggtcttctggggatgaagaaggtccagacgcaggaacagaattttactacagtcatgatacgtgttatcatagttgtataaatcataaacagatatcccagttgctgcctcttgtctagtcatagtttctcctttcactctcaactgtcctggtttggaagataattgtatgtgttatgaaacaatgggaacattgaaaagagacatttacctctgcctggcagagatcagggaaggcttcctggaggaaggtgctttctgagctgaatcttgaagggtaactaggagttaggccaatcacagagggcataagcaggagctggtgacaacacatagcaggagagaaagagtcagagtgggtgagagggagtgtgtgtatttgcaacgtgtgggaattaggtatatctacaaattattggaacataaagtttgtagagtgtcactgtggatgggtagagaggcagagaccagattgtgagggttccatatgccaggccagtgagcacctactctgtgccagacattgtaggcattacttacattgtctctaatctgtccaacaactcgagaggaagacatcagtatccttcaaaagagaacctaggttcaggttgggttgtaattgccccagtttagaatgtaaaaatttgaatctaactctagatcctgttctttaccggtgggccagtggactttggaagcttcagcttttgcagtatgtgattaagg

SEQ ID NO: 100404 - DNA, 2336 bp, Homo sapiens
gaccctcctgcctcagtctcagctgagactataggtgtgcaccaccgtgcctggcctgttgaaggattttagagctgaaagtgatgagggcaggtttgctttgctgggttgacctcagtctataacatgtaagttctaccagagcagggatttggtcttgtttactgtgaatccctagaattgtgtctggcacaaggtacgtgttccatgtgtttgttgaatgaaggatgacaacagagtcagaatggatttgaggaaagcaggactggatggagggataaatattaagaggctgttgtgttgggtcaggtaagagactggttttgggacttggcggacagatgagcgagaaagatgacacctgcgtttctgaattaggtgattatacaggctgtcaatcaaggtagggaatacaggaagaagagtgggtctggagaagaggtgaattagagttgccaattagatgaattaagagtagagctgaattagagtagataatgaaggggtatagtcagtacacaactgaatatttgaatctgaaatttgggggagaagtcagagctagaggtagagattaggtagttatcagaatttaggtagtagctgaaactgagatgataatgttacccatggagaatggaaaatctgaaaagagaagcaaagaataggaccatgggaaataggggttttattttagtaccttctccaaaccttgactttggtgctgaggtcttatgttcttccatagagagtaccttccgcagcagacctatcagacgagatcgggcacattcagggtggtatggctgtagacagcagcatcgtatcagacttctttatgttttgcttgtgacagcagtacttggctatggcagttaaatggactgtaagatgttagcttgatttggagtaccctgagtagctgcacaggtagacaaagtacaaagatattgacagcttttttcttcctttagaagaataacatatctaaaacaactcttaaagcaagagagctgcagttgcacactaagaaaatactgcaatactgccatgacttggttataggtgatgctaacataaatgggatattctgtttctcattgcaccagtcatgcagaatcatagcatcatgtgccagatggcagaacgtactgtggcagttaacaccacaaattaacaacacagtggcagaaagcaccgtttaaaaatatgggtacttggccaggcgtggtggctcacttctataatcccagcactttaggaggctgaggcgggcagatcacctgaggtcaggagttcgagactagctctagtctctactaaaatacaaaaattagtgtgtgtgtgtatatatatatactaatcaaacttccttgggaaagaaaatgtgaatgcatttctgtgtcatacatttcttgtgcagcactatatattctgtggtttagcagtattaacagcatcaagctgaacagtaaccagtgttgctaaggtctcgcatactataccatgtatgctgagaagatatgcatccttagaattgagaattagaacatttcagttaattgcagtaacttttcagtaactagatatatgtgtaatttgatttctgaagtaattttaactgtggaaaaactaagttgtcaccagcggtacctcatagcataactttagcccatgatatatggatggatggatataaatggaaattgcacactgaaattaggacgtttatatttcttcaggtattagaaaactactcggatgctccaatgacaccaaaacagattctgcaggtcatagaggcagaaggactaaaggaaatgaggtttgtattgttcttgttgcttaacatgagggtttcataggatatgtgtctttctgtagttgtagtgatatgagtaagtacacctgtgtatgtatttgtgcttctgtgtctggtagtgagatggaactatccatttcccaaattgtgtgtcgtctcagtggagggtggcagtgggtgaacatccatttgttttcatttagaggtgcagtggctttccccatctccttgttcttccttaaatcttggcatagagcttgttttttgtgtaaggagtcagggcacattttctcttgtgctgttttggaagtttcagacctgatagcctctattgtgcctaacgctacccttttctctatgccgtatcactgaagttctttcttttagaataaaagaacagtggtctcatcaacataaaaaaccactgacttttttccccttactaattgcagtcatatatgatgtgaatttactaaattttgaggtgacctttattttccaaatttatggtgta

SEQ ID NO: 100405 - DNA, 3667 bp, Homo sapiens
aaaaaaaaagctgggggtagtggcccatgcctgtaatcccagcactttgggaggccaaggcaggcagatcacttaggtcaggagttcgagaccagcctggccaacatggcaaaaccccgtctctactaacaatacaaagattagccggcatggtgacgcatgcctgtagcctgtagttccagcttgggaggcggaggctggagaatcgcttgaactcaggagacggaggttgcagtgagccgagattgcaccactgcactccagcctggacaacagaataagactgcatctcaaaaaacaaaacaaaacaaaaaacaaagaaagtacttaaatgaggaaagaggagagcactacacagtccttgcctgggactcagagcaaacttcatgtttttgctagtcaaacttagctgctttaattgaccttttagggtcaaaaggccttcactttccagttgtcagttcaaacgttctcaagttgatgttttgtggggagggaagattgagattgtctacatcacatttatttgacttgtacttatccactgtgtagtgttataattgtgctttatttttgtttttatgggctatttcccatcatgctgctgtctgcactgctgttggaccactttgcctatagaaggtaaatgagtccctttgggacatatggaattgagaaccttaacttgtttctgcttcttgttcttagaggaattatgaagcagtcatgatggctcatgatgagtgagcagctctgtaatttgtagacagaggtataatatgtaggagtcacagaagagctgtgccagcatgctgttccccttgtagcagagatgctagcacacccacttgatactccagattttgcatagggtttcttttagagattggttcttggtgaaaaattttttagcatccagtgtgttccaaggcaaaataagtaatagttttttaatggtttttttagactcagaatttatttttaacactgcataaattagggcttctagttctgaaaaatgcaaagaggcttacttaagctatttatatattttttaacatgctggggagagggaagagagggtgcacaggtgactcctagcactaatatgctagtgccaaactcagttaatattaataatggtcatttgttgatatttttggtagcttttctatttaaagattcagtaagtagcatcctttgcactgaattgtcacgttttgtaacctgctgttgtggcagggaccatgaaacaacttagtatgccattgtttcagtttattttttaagcattactgggaactaaatccacttgacttactttttgcatttaggtttaaataattgttcctgggtagatacagaataaaactcaatctccccacttccagcagagaaaaaacaaatgaaatactgttctttttgtgtacttactagaaaatgtttaactggaaaaaaagttctgcttgttttattggcacagcaccattgattctgtgattctttgtcatagtattctgtggcagtttctgagtatgatatgtagattgaaatatagaggctaggaaacttttaatagtaaaattttactaaaaatttattaacttattaaaatataacttgaaaaaattgtgaggtttttctaaatttcttggaaatttgatttatattgtcaaaaagcactgaagaagtgttagttatggatttcgggtatcacataatgtttattccagagttttctgagtgtgatttatgtgaatttcatttggttattcttttactattttcacagtgaaattgtcatgagattttttcttctgtatttcttgcttagcttcttctcatttaagaatgagttggagggattaggtctttaagtaggcagatggattgtataaccctcatccattcttttgtggttttacagtgggacttcccctctcgcatgcctcaatgctatgctacattccaattcaagaggaggagaggggttgttttataaactgcctggccgaatcagccttttcacgctcaaggtaagtgatatgaactctcttttggtgcagtgattcttggacttttaatgtgcataaaaatcacctggtaggtctggaataggggccatgaatttgcatttctcatatgcagtcaggtgacactgatgtttttcttttttttagacatagtctcgctgtgtcacccaggctggagtgcaatggggcgagatctcggctcactgcaatctctgcctcccatgttcaagtgattctcccacctcaacctcccaagtagctgggactacaggcacatgccaccatgctcggctaatttttttattttttttaatagagacggggtttcaccatgttggccaggctggtctcgaaatcctgacctcaggtgatccacctacctcggcctcccaaagtgctgggattacaggcatgagccaccgcacctggccagatgctgttggttctaaatggcactttgaggtgttctaatatgaatcagatattagaaattatttagtcatagcagctcttgtttgtgtgttcatcttttcttgtctatatctttgtagattgtacaaaactgaagcataactatggggataattgcagatgtgcctttttttttttttttttttttttattctgagatggagtctcactctgttgcccaggctggagtgcagtggtgcgatctcagctcattgcaccctccacctcccaggttcaagcaattcttctgcctcagcctcctgagtagctaagagtgcactaccatgcccaggtaatttttgtatttttagtagagacggggtttcaccatgttggccaggctcgtcttgaactcctgaccttgtgatccgtccgccttagcctcccaaagtgctgggattacaggcgtgagccactgcacctggccacagatgtgccttaattaggattttgttgtagtaatgatgtgaaggataaattactggtcagctaatgtaagacctactctatggaaaataactgaaatgtgaacatatttgtggaaattaagtgacagtaattataaagtaagagtacttaaatcaggtagagttcataataaagcttaaatagggccgaaatgaacaggctaattatttttccaccatttgtgatatatatggtaatcatttagaccgggggtctgcaaagtttttctgtaaaggaccagaaaatcaatgtttttttgttttgtggatcatactgtctttgtcttaaccactcaggtctgccattgtagtaggaaagcagccatacccaaatgaatgggcatggctgtgttccaaaaaaaaaaaaaatttatttacaaatgtttgttttacttacgaaaacaggctgcaggccagatttgatttggggctgtactttgtcgacccctgatttagacataagatgacttgtcgacattggagaaactgaaaatttgatgctgaccctttcgttcttccatagtgggttataaattttagcagtcagtacaaactttttcctttaagttttgttttcttgatggactgtattcaaaataaatacctgaacaaataccaactatataacatgaagccataaaacttggtctttatatataaataaagtttatcttggggtcagatgtctgtgctgtt

SEQ ID NO: 100406 - DNA, 2022 bp, Homo sapiens
ggattacaggcgtgagccactgcacccggccagttgttggttttcttttctgtgccagattgagtgatatatggtggtactaagagcactggaataggagtcaaggactgaggtacagcatagcacctcatgtattacttggtatctccacttgtctctaacactgaagaggtataattggttgtttaaaaactgtgggtgtaaaacgctagtatcccatgaaatggaactgcagaatataagtggatgactctgaaactgcttttgaaacaagcatgagggctcagtttctccatctctcgtgggctccaccatcactgtctgacatcctgatctcctaaggcatctttcctccatcccagagctctgttgaaaatctcttgggctaaaaaccagtacagaccttctgatactcacgttctagcctttttagattgttgtgtgtgaagagtaagtcagctgtggatatttttctttcctattttgtgaggcatttggtatttactggaggctgcctgttttgttgcaaaccttgttccactgtgtactataggaggtctgctcagaaagcctagttagtagagcagtaccatttgctttggtcaattgtagcagcagtctgttttttttttttttttttttttttttgagacagagtcttgctgtgttgctcaggctggagtgcagtggtgtgatctttgctcactgcaacctccgcctcctgggttcaagcgattctcctgccttggcctcccaagtgggattgcaggtgtgtgccaccatgcccggctaattctgtatttttaatagagatggggtttcacccccaggctggtcttaaactcctaacctcaagtgatccacttgcttcggcctcccaaagtgctaggattacaggtgtgagccaccgtgcccggccagcaatctggttttaaaggaggctttgacccctcatttggtaaaaggttccttctttgactaattcccaaaggacatctcgatctgtcttcaaaagaaggggtattccgttgtcagtattcctagctagctctgggagaagagagaacttgattgttttcagggccctggtcagagtctggttttatgcccaagggatgaactgccttttgtccttctacctcctgaagttcagagccctgtgaaaatgaagtggtaaaggtcaagtagcagtagtttgaaaagcaccagcactgggacgattttgtggtagcctagcagagtgggcaggatgcttacttcagaggtgctaaagatgtatttttttttggaacaagaaggttataaatgtttctattaagtttgattttaaagcatgagggttctgggaaaatgagaagattgtacatactctaggcttccttgggactgcatttgaaaaaaaaaaaacttttctttgggtcagccagtatgaaaactgcatttgatctcaatccttcagatcaggcttttggggagagttagttgaagaatttgtttagtctaagaaagttgcttctagcttagctaaatctggaagaaaaaatggaacctgatgtttgagtgctaactgtattccagacagacgttatactccttatattggtccttttgaagcataaatatgtttccaagtcctataataatgaggaaattgcctgtgagagtttaagtaaattgtacaaagtaacacttttggttcagagatttgtttttaatacagagaggacaggttaggaactttgaagcttcagctaaatgagtcagttctcaaatgtttgagaagcatgctcaaggatctggaggaatagcttaattaatttgtacatcatgagaggagtagggagcaaaaatatgtataatttcttctgaatgatgctgtcttttttgatgcagtggtgctaaatgggctttgcttgtatgatacttcttaaatgcattagctaattattttgttttagtcttcttttttgaaatacagatgactctttgagctggttttctttggaaagttatctgtcctga

SEQ ID NO: 100407 - DNA, 1020 bp, Homo sapiens
gtctagcaactcatgtgtctcaggtctgggaaatgattttacagtttttccagctggtgcgtaactagctgtttgttctgatactgtcagtatttaactttatgttagaaacatttcataatgcaaatgaaaaatttaagccaggtgcagtggctcatgcactttgtgaggctgaggtgggaggaacacttgaggtcaggagttcaaaaccagcctggccaacatggtgaaaccccttctactaaaaaaacaaaaaaacaaaaattaactgggcatggttgtgcacccccataatcccagttactcaggaggctgaggtacgagaatcactggaactgggagacaggtttcagtgagccgagactgagacagagcaagaccctgtctcaaaatataaataaaatacataaaaaatttaatattatgtatataatatccagcccaggcttttctatttgtcatgccctgtttctttcacatcatagccttactcagatgcctgctgatccttgattgaggtgtgatgcttgagagtcaggctcttaaatactactggcgaattcagtgcattgtggttttgtgacttcacttgtctcttacagaagtggggaagtggtttttacttcgatgcatggttctgaagtagagatgtctatctcctgatgcacactttaaataatccccatgttttccactccatactccatccttgtctggtttaagctcttagcctgtctgcagttcaggggatgaatctgcttggttcttttcagcatctccctctgcaacgcttagatctcatcttcctttgctttgctaactattctctttgcttctccatttgtttctctgtcattgatgacttccaagttatatccccatcctggatattccttttgaacgtcagactcatatattcagttacctcctcagtatctctattcggatatctaatggcatctcaaaattaacatgtgcaaaaccaacctgttccacccttgtgttggctgtataaattag

SEQ ID NO: 100408 - DNA, 1026 bp, Homo sapiens
ttgccatgtttaaatatggaagctcaagcgtttgtacagagaaagtggaaaatgcccttggcttttatgccaaaccccaatccctctgtccccacctgccaccctggcctgttgcccctgttcttcccagtagctacaaccactatcattaatttaacgtgcatcctcctattcatatggaggtatgtggtatgtttgtttatataagtgtattttattttctttaatgtttaatagtgtaccatatcaatatagctacattttatttatccagtcccctgctatgaatatgtgcgtttttcactgttttctaatccctgttataaacactgcagcaacacttatccttaatctccatgtacaaacgtgtgagaatttctctaagggactattcccttaccttttcatattgtatgcttgggtaaaatggaagtgacttggaggctctttctgtgggggttagtgaaaagatttcattacattttctttgcattttgtaattatgatgagaaaaatataaaacttataaatcttttttaaaagttttgagaaacatgctttgttacgatcatgacatcaagttttatgcttaaaaagtctgtaattccttgtgtttaatgatgaactcttcaaattcctgatacagatctatagtcccttattaacaattctgaaatccaaaatattatgagaactgaatttttttccccttgactgatttagtagtaaaacctgacctgtgtaaactcattttgtgtcaaaactctgatgtagattgacaggtctaggttagcttatttgtttcacttggtctttgtctacattttatttttttaaaaattaatgtgtttgattatgggttgctggtggtgctgatacacaatatatgcatatattaacattctaaaattcaagaaattctaaataaaaacacatctagacccaaagatttcaggtaagggattgtggacctgtggtcaccattagctagaaagtttcagctgtgagtggcaacttacaagaatt

SEQ ID NO: 100409 - DNA, 1004 bp, Homo sapiens
tttgttataaattatatttttgttttcttttttcttcaaccctggcaaatggatatattttctttttttttttttttgagacagagtttcgctcttgttgcccaggctggagtgcagtggcaccatgtcagctcactgcaacctccgtctcccattcaggcaattctcctgcctcagcctcctgagtggccgggattacaggcgtgcgctaccacgccgggctaatttttgtatttttactagagtcagggtttcaccatgttggccaggttggtcttgaactcctgacctcagatgatccacccacctcggcctcccgaaatgctggcattacaggcatgagcccccacacccggctgatggataaattttctaattgatgatgttaattggtgatgttagtatcacttgatttttccttttttttttttttaatgtgatctcaaatgtcacaatgtggccaaaatcttttactaggtctgagtctcttggatctttaatgtaaataattatgctatctggaaattatgacatgcttttctaatcccttcttgtttctattatgcattgaaaggaattctagtatactgttgaatggttggtgttttcttagtttttcacagccttcaagtcagccttctcctaagagatagtacttattttttgctcaggaaagatataaggaaaggcataactgatattttgcttttttttttacttcagaatctaatcttgggcagtttaaactttatcaatttaaatgttagctctcctttgctcagatttgccacattcgtagtgtcttgtattttttaaaacatctgacctgtgggagaacattttattttggtttacttattacagatggtttattttttttcaacattagcttcttttctagttaccttgccaaactagtatacgttatgcattttagaaacacttatttgtattaatagatgaacgtgagtaaaaagtatacagcaagtcttctttgtactgtt

SEQ ID NO: 100410 - DNA, 1062 bp, Homo sapiens
attttaaaacccagcttaagcaacacatccttttggatgtgttacttccctgatcgttattcacctccatgccgtctttcgctcaactcattgaagttaggtgcccctcttctgggctgccacggctctccatgttcacctatgtactgtactttgtattgtaatcagtttaattgacccccctacttatttgagctccttgagagcagggccttgattcctgctccttagcactccaccctccccagaactaacatggtatagcttataggaggcaccctataaatgtttaatgaatgtttgaatgcaaaagtgtatctaactttcttaatgatatatttatgaaaagaacttgctgagaaaaaggtcagttagaaagggttaggaacttgtcagtattctaaatccctctttttcaaaagcatacacatttaggaatgactgccttgctttaagaatttgtagggttttgttcacctgagttgtaccttgctgtcacagaaggatgccctgcagtggtctcgccatccagctacagtggagggagaggagccagaggacacggctgatgtggagagctgtgggtctaatgaagccagcactgtgagtggtgaaaacgatggtaaggaccctttaatggatgggtgagggagccacagcaggcactagggactaacctttattttcctctcttccagtatctcttgatgaaacatcttcgaacgcatcctgttctacagaatctcagagtcgacctctttccaatcccagggacagctacagagcttcctcacaggtaaggaagaggtagagcctagcctgggaggatgaatgatgacaggtataaggcaagatccctccttctcctgtagtgagctgtgaacatgttcagagagtgaagaatagaagtctggtctccagctgttagtagcatttaacagggggccgcaggaaaagtgaacagtaggtttgagcagagtaagttttttctctttctttaccttggctgagtgattttgttcattctttttttttttttttttttttttttttgagatggag

SEQ ID NO: 100411 - DNA, 1121 bp, Homo sapiens
tttttgtagcttggaatgatgcttggcacagtgaccagcacgtagctcagtaacattaaccagtgctcttgtcagcattatttgacagatctggttgaagacgaacttcattttacaagagcgtgagtagagatagtgtcgccagggaatgcttttgtggctctgcagttgacttgggctctcttttgttctctcttggaacgcaggcgaacaaacaaaagaaaaagactggggtgatgctgcctcgagttgtcctgactcctctgaaggtaaacggggcccacgtggaatctgcatcaggtatgtgtaaactcatggttgtgatgctttttcctcaggtcctggggacctggcctccctctgtcagcagtttctgacctaatagtgcgatactaggagagctgtcgggccacaggcaagagccctgccaatggatgaggcctgccataggttctagtgctgggctctgctgtgtgccttcctctttgtctcccagggcagtcgtgaggatccaacggaggatttgattatgccagtgctttgtaaaaggtgtagtgctatacaaataaagatggcagtttggcacctgtaaggtgatattttaaagccagaccatgaagtggtggtttctctcagcctaaggctgggagatggaagcatcccagtattgctggcagcatctcagggagagctgggagaaatgagcttgtctgagagccatgggcgcggcttggtgatacttttgaccagtggaatgctgtgccttcagggttctcgggctgccacgccgatggcgagagcggcagcccgtccagcagcagcagcggctctctggccctgggcagcgctgctattcgtggccaggccgaggtcacccaggaccctgccccgctcctgagaggcttccggaagccagccacaggtgagtggcgtggcacttatttctctgcctgtaaagggggcccctgcaggcctagtgagaagatgatgtcttctattccaattcctttaccagtttatttttacttcttgggtggccctctattttttgtttatttttactttgtaatttgcttatttcatttgtagctctctgctaaactgtgagaactcctttcagg

SEQ ID NO: 100412 - DNA, 1532 bp, Homo sapiens
tcatccctctccagcccattcacagaaggcttctgcagatttttctatagtatactaactagatttacttttagataattctcatgatttctccagttgagctttgtggagcctgttctccagctttggagggaagctcagaacctgccccttgcctgattttctgtgggaagtgtccttttcaggctgtgacacagcacggtacagagttttgtctgaggagatgcaaccccaagtgttctcctgggtttgatggcaatgacagtaacctggaaagaatatacaggttaggatggactggacaattgagcagattgtgtgcagataactcctgggtagcttgggtgctgtcaccaaagttttcccatcagttggcatttgttttttcttttaaaaagctgaaatctataccttgcttcaaaaatcataggtcaaatgaagcgcaacagaggggaagaaatagattttgagacacctgggtccattcttgtcaacaccaacctccgtgccctgatcaactctcggaccttccatgccttaccatcacacttccagcagcagctcctcttcctcctgcctgaagtagacagacaggtgcacatgggcagcctcccctttgcctctctctgggtgggcttctgttctcttttaagtttatttattaggatttttttcccccttgatccttctaggtggggacggatggcctgttgcgtctcagcagcagtgcactaaataacgagttttttacccatgcggctcagagctggcgggagcgcctggctgatggtatgtagacttggtcatctcggacggcttgcgacgcacctgtcgtgtggtgttgcatgtctcctggtatttaaaacccaagctcgctcttctcaaagggttatttagtataagacaggctttcctcattactaataaatgtggtgggtattaatatgccacacagctctgaagaaataacagggtgtttaggtttagactttcactatattgtatgtatgtactcattcatcatctcctttttatcattaaaactataaacacctattccagtaatcatggcatggtctggaagggtggaggaaagtacactgtggagttgagaagctccaccatgctctgtctttttaggcattgtcacttggagtgattgttagcttctattaatttaattttgtggggaaagtgttgagagggctctaagaacacccctaggtttgatgatttgctagcaggactcagcatatagttatatgtacagggctgcggtttattacagcagaagaatacaaagtaaaatcagcagatggagaggcacatggggtggggtccaggggaaaccatgtgttggcttccaaggtcctctctcagtggtgtcacacaggacacatttaattcccccagtaacaagttatgataacatgtatgaaatgtctactagggaaacctgttaaagactcggtgcccagggtttttatcaagggctgatcatgtaggaagccactgcttggcacatacccagc

SEQ ID NO: 100413 - DNA, 1231 bp, Homo sapiens
cttggtctcactttaaggaagagtgaatttcccttatagtagatgtgttagctctgtccctataagagcatgatgtgagagagcctttagaagagacgtgttgttttaaaactgggagattcagctgtccataagacagacattaatatcccgaatgcacttactagaagaggtttatttctccctaggtgaatttactcatgagatgcaagtcaggatacgacaggaaatggagaaggaaaagaaggtggaacaatggaaagaaaagttctttgaagactactatggacagaagtaaggcagttggagctatgagtcctggtctggggttttgaggggatagaggtagatggtctcaaaatagcatatacttatgtgttggacaagaatgtggagattgcagtgacacttgggtcatttatcttaatgccattcatagtgaagctaacagaagtttttccatggttagattgtgcaccacacagatttattttgttctgagatatctgtgtttctgggtccatattattcatagaaataagagacatgtccactctggcctgaaactgatggctgtgattttgatttgcaggctgggtttgaccaaagaagagtcattgcagcagaacgtgggccaggaggaggctgaaatcaaaagtggcttgtgtgtcccaggagaatcagtgcgtatacagcgtggtccagccacccgacagcgagatgggcattttaagaaacgctctcggccagatctccgaaccagagccagaaggaatctgtacaaaaaacaggagtcagaacaagcaggggttgctaaggatgcaaaatctgtggcctcagatgttcccctctacaaggatggggaggctaagactgacccagcagggctgagcagtccccatctgccaggcacatcctctgcagcacccgacctggagggtcccgaattcccagttgagtctgtggcttctcggatccaggctgagccagacaacttggcacgtgcctctgcatctccagacagaattcctagcctgcctcaggaaactgtggatcaggaacccaaggatcagaagaggaaatcctttgagcaggcggcctctgcatcctttcccgaaaagaagccccggcttgaagatcgtcagtcctttcgtaacacaattgaaagtgttcacaccgaaaagccacagcccactaaagaggagcccaaagtcccgcccatccgggtagg

SEQ ID NO: 100414 - DNA, 4272 bp, Homo sapiens
ccattttactatgatgatttcattgttttaaggaaattatttgattctgtatgccatgacccttaagctactagaatcctagttttgctttacagtccctaggtcagatcacccagtcagttaaaactattttctaattctttttttgcagattcaactttcacgtatcaaaccaccctgggtggttaaaggtcagcccacttaccagatatgcccccggatcatccccaccacggagtcctcctgccggggttggactggcgccaggaccctcgcagacattaaagcccgtgctctgcaggtccgaggggcgagaggtcaccactgccatagagaggcggccaccactgccatcggaggggggggtggcccgggtggaggtggcggcggggccaccgatgagggaggtggcagaggcagcagcagtggtgatggtggtgaggcctgtggccaccctgagcccaggggaggcccgagcacccctggaaagtgtacgtcagatctacagcgaacacaactactgccgccttatcctctaaatggggagcatacccaggccggaactgccatgtccagagctaggagagaggacctgccttctctgagaaaggaggaaagctgcctactacagagggctacagttggactcacagatgggctaggagatgcctcccaactccccgttgctcccactggggaccagccatgccaggccttgcccctactgtcctcccaaacctcagtagctgagagattagtggagcagcctcagttgcatccggatgttagaactgaatgtgagtctggcaccacttcctgggaaagtgatgatgaggagcaaggacccaccgttcctgcagacaatggtcccattctgtctctagtgggagatgatacattagagaaaggaactggccaagctcttgacagtcatcccactatgaaggatcctgtaaatgtgacccccagttccacacctgaatcctcaccgactgattgcctgcagaacagagcatttgatgacgaattagggcttggtggctcatgccctcctatgagggaaagtgatactagacaagaaaacttgaaaaccaaggctctcgtttctaacagttctttgcattggatacccatcccatcgaatgatgaggtagtgaaacagcccaaaccagaatccagagaacacataccatctgttgagccccaggttggagaggagtgggagaaagctgctcccacccctcctgcattgcctggggatttgacagctgaggagggtctagatcctcttgacagccttacttcactctggactgtgccatctcgaggaggcagtgacagcaatggcagttactgtcaacaggtggacattgaaaagctgaaaatcaacggagactctgaagcactgagtcctcacggtgagtccacggatacagcctctgactttgaaggtcacctcacggaggacagcagtgaggctgacactagagaagctgcagtgacaaagggatcttcggtggacaaggatgagaaacccaattggaaccaatctgccccactgtccaaggtgaatggtgacatgcgtctggttacaaggacagatgggatggttgctcctcagagctgggtgtctcgagtatgtgcggtccgccaaaagatcccagattccctactgctggccagtactgagtaccagccaagagccgtgtgcctgtccatgcctgggtcctcagtggaggccactaacccacttgtgatgcagttgctgcagggtagcttgcccctagagaaggttcttccaccagcccacgatgacagcatgtcagaatccccacaagtaccacttacaaaagaccagagccatggctcgctacgcatgggatctttacatggtcttggaaaaaacagtggcatggttgatggaagcagccccagttctttaagggctttgaaggagcctcttctgccagatagctgtgaaacaggcactggtcttgccaggattgaggccacccaggctcctggagcaccccaaaagaattgcaaggcagtcccaagttttgactccctccatccagtgacaaatcccattacatcctctaggaaactggaagaaatggattccaaagagcagttctcttcctttagttgtgaagatcagaaggaagtccgtgctatgtcacaggacagtaattcaaatgctgctccaggaaagagcccaggagatcttactacctcgagaacacctcgtttctcatctccaaatgtgatctcctttggtccagagcagacaggtcgggccctgggtgatcagagcaatgttacaggccaagggaagaagctttttggctctgggaatgtggctgcaacccttcagcgccccaggcctgcggacccgatgcctcttcctgctgagatccctccagtttttcccagtgggaagttgggaccaagcacaaactccatgtctggtggggtacagactccaagggaagactgggctccaaagccacatgcctttgttggcagcgtcaagaatgagaagacttttgtggggggtcctcttaaggcaaatgccgagaacaggaaagctactgggcatagtcccctggaactggtgggtcacttggaagggatgccctttgtcatggacttgcccttctggaaattaccccgagagccagggaaggggctcagtgagcctctggagccttcttctctcccctcccaactcagcatcaagcaggcattttatgggaagctttctaaactccaactgagttccaccagctttaattattcctctagctctcccacctttcccaaaggccttgctggaagtgtggtgcagctgagccacaaagcaaactttggtgcgagccacagtgcatcactttccttgcaaatgttcactgacagcagcacggtggaaagcatctcgctccagtgtgcgtgcagcctgaaagccatgatcatgtgccaaggctgcggtgcgttctgtcacgatgactgtattggaccctcaaagctctgtgtattgtgccttgtggtgagataataaattatggccatgggaaacattgtatatttagtgtgtgtattttgataatgattgatcttaaatctgtatacagaatatcattgatataatactctttaggcaggagcactcttgccttcccccaaaatttacactgctaaagccctctgtcacttggcgacccttctggtcttgctggaggggtttcctgggtataacccattgggctgcccaaggccagccagcctgagctctcctgcaagacagagcctgatgtggcacggagtggggttgcggggggtggggggactgcctgactcccagagggacttgaaactgaagcaagaaggttgcattctccaccaagggagttaacctacctgaactaagtagaaatgccagtcttccactaccccctccctgccatcttttcttctgctactttggggagttgatggccaggaaagaagccagcacagggttaaagtaactcctggcattgcccaccagggggctggtgcacctgctgacctcagggtcacagttgagtcatttgccagttgacggagcaagtttgaccttggttctgttgctgaagcaaatttggaacttttctgtctcagtgtgatccactaacccacaggatcatttggaaccttgaatagctctgcttggacaatggggttggggaatagggttgtctttcctatgaaaatgccatctgtagaccttgtgagtcagccgtccagatgtttgcaggtgaattcctctgcttgacatcctccctgtcactttggaccctatgggagtgggcatctccacgcacctgtgtatgtgaaagtcattttacatttcaaagcagtgtgtgtttcttatttttatatttttaactctttattcttggatgtataaagtgaactttttggcttctgtaagtatgctctatgcacctctaatgttttatcatgtatttatatgttgtacacagtactggctgattctgtaaatggatgtattgtacagagaacatgaacgtctcttcctaattttacatcttcagcatcattgcattaaagtggtgtaatctccttctctacatctgttgtcagagccactgagtgctgtgctgctcgacgtgagggtgaaatgattgacttgtgacctgccaggttgcccgatgccctgttgggtcaccggctggacctgctgcagcctgcagagccacagtcagc

SEQ ID NO: 100415 - DNA, 1030 bp, Homo sapiens
atggctgcttgctgccatatgtgacaaatcaccaccaccagtgttaagtgcttctggattcatgggtgagttccctgggcagcccccaggaaggccttccagatctggctccagggtcaccacctgtcacagcaatacctgggaccatgctctcctgggactgtgaggctccttttgacgtacttttgacatcaggcaggtttgggaagaaacaaagccatgcctgctcctgcctctctcccaacatgtttccagcaagtagatgcccctgtgtgtgttttcccttgccttgtttcctgccttatatcttgtatttcgacttattacagagttgagggttcttgcttaatttagatcaagtataaaatttgtatgacttcaagtctcattttatctgaaaggtttttttctcatttaatctgatgtggcattttcgtcatctgaagcatgagtgacaagttgggaatgatgtggtgatttagaatgcagtattggccaagtccaagttgtcaacttaagcgtctgtttaccaaagaccgggaacaggggcccaaacatgtccagtcctcttcttccctctgctggaacctttggggacactcaagggtacagtttgacactgatctggtccatgaggctgcccagagaaagcactgcttctgtatgtctcttgtggtattggaacaataaacccgtacaacctgcagttgtggtctcagtcatctgtggctgcctcgctggtgtgggaaggtcagctggagtgctgagctggaagggaaggagtagacgccagctctcctcaccttggctctggagctactcttcttatacttggagctcttcttttgggaggttagtccaaaaggaatgacttggcagcttcactggtctttagccattcatgacttggcggacttcaccacatagactgcagtcagcgttctactgagagcaatgagaatgtttccccttgggagtgcgagtcacaaactgtgacatccctctgcagcaactcatccaaacagcttca

SEQ ID NO: 100416 - DNA, 1077 bp, Homo sapiens
ccccagtccctgtgtgttctgcaagacttgctcttgaggaggaagatgcacctcactaagctcatctgcttagcaaagccacaaacaaaaacctctcactttttacctacgtttccacctaaaaatacaacaaaaaacctataccacgtagaactcagattggctgaaaaacactttccacctggtagatggcccatatgcctcaattatgtggtccatttaggagcaggagtcagaagagagacctcttattggctgctggtgggtaactgcatggacagaggaaaagggaaggcaggactttgctgcagagctgtgggatgaatgtagttcttccctgggcagcctgggagtgggaaggtcagaatgactcatgttgccttcaggatcaagccatccaggatttagggacaacccaagaggtctttagtcctctggcataatttagacatgttttggaagagcatgagttccatatctgagatgagatttaagactttcagtgcagatagtacaagccatttcttcagggttcctctgggggcagctccttcatgaggtcccacctccggggaggggcacagggctccagatagtaagcacttaaggcaaacagtggatggcaccaacttttaaaggtgactctattaatggcttcacctctaaattatatttttacagatatgcacctatgcaacttaacgtggctcttctaagcaggtgaggacttcctcctcaatgctctctataaaaattatttgtgttctatatagtgagttttaccagtaaatgtggcttaatattttaattcttagaatgtgtcttctctacgtgatgtgactaaattctgttttgtttgtggaatgactagcacaggccgactccctctctccctcacttaacaaaagaccaatgagctgttaatcgagctgttatctccatggtattacttgctaaatgcactgatttcataagtatgtggaatccttttccttttgaatctgtatatcatatataagactgaatctacttaataaacactgaacaacaaaccgaatgctctgcttccactgtgtc

SEQ ID NO: 100417 - DNA, 1019 bp, Homo sapiens
aggattagatctaaagatcagcataagctacagtttgaagtcatgtttttctgagttcaagctgttggaactgaccaccctccagcctgccttagtactgcggcaagagcgtaggttcaatgtgttttcaagagaaaggaaagaatatgttgttaaagtccattgggcctcccaggcccctccaggacaatggatttcatcatgtcgaccccacctcttgggtgggctcctcctttccagtgaaactacacctgaagccctagagatggcagaatcaggagcaagtttctgcatggaaacaggattccatttagctggctcagtcagggaacttgttttgcttttgttttaaaagatgcagcttcaaccccttccccctactcccgacttggagggcaccaaagagctggttctgatgaactaagctcactgctgtctcaccctcaccagagggactgccttctcccaaaaggagctcccaaagcccttgtcccacagccatttaaaaatcttctgaagggcctcagggcacaaagtgatcatttgggatcctaagttaaaaaggaaatgcaagagtaggatactccaattccagagtctttgcaggaggctaatcccacaagaagggtagcatcagagaagtgggcattggtcttagtggtggatcatcaggtagacaagtgatagtgtgtgtaacccatctgaaattcattttaccgtcaccactcttacaaaggacagtttattcccaaggacagtgctgacggggagggggacaggcagggagttaggagggttttcgaggatttcaaacaggtggaacccatccatccctattcccaagggccacttacaactctaagggtggttacaggattaactaccagttcattttcaaaatgctgctttgaactcagagggttgatacttttaatttgtaattttttgtaaaactttttacaaaatagtaaagtatttcaccagaataccagtttcaatccgtccatggtctgattttt

SEQ ID NO: 100418 - DNA, 1042 bp, Homo sapiens
gtagggggagggagccccttccccagtctttctcactcctgtctgccaagaaatgcaaacggttcatgtctagcttgggtactgcctctgggaggagaagtgacacgttaagtaactgataccaggaattctagggtggcgattgtctctgccaggttttaacattaagattttcacaaataattgcctggggtaacatttttgcaaaagatcttactgattactttgtagtattgttcacacacaaaaataaatatttacacgaattcaaatgttgagtagtactgagcaggtggggccagatgtgtggatggctggggtgtgggagaggccttgggcactggaggttgtgctgtgctaagggtgagtctcaggtgtcctggccctgaccagaggcctggggattggtcagatggaaggcagaggtggtgtggctggatggggtattggaggccacttgagagataacgaccacccccaacctctaggggccggaagtaagcacggggtgggcaccctacctttcagagttctggacctgaggcaggatggggcatcctcactggtgccccccccatccctccttggggggagtctgccacagtgccgggaggcagtggccacagctgcaacaggcaattggctgcagaaaagctggtttgggaaggggtgcctgttctgggagcgagtggctctccgtggccatcctaggatccactcggccctggctcccctggggcctctctgctctgagggaggaaaggcaacagagggcttctgccagctctgggcaggggcgggcagcagagagctgctgtcatggctacggagtgttgcacggagaggccctgggggcctgctgaggtctgggcgagtccctggtttagcagcactggtaggtattgcactgagcaagaggaagtgcctatcaatcaatcaatcagggaggaaggaaaccaggccagctttttctttttgccctttttcacactccagggattatgggtttcttccaggaccggcccctccggaagggctggtc

SEQ ID NO: 100419 - DNA, 1031 bp, Homo sapiens
tctaccacctccaccacccccacgcccaccccctccagcaccagcaccagcaggcccgtgcccaccgctcagctcagccccacggagatcagcgccgtgcggcagctcatcgcgggctaccgggagtctgctgccttcctgctgcgctctgcagatgaactggaaaacctcatcctacagcagaactgaccccaccggcacctggagcgcactgccctagggaaggaggctgtcccagcctggacctggcttcctgcctcaccagttggtacattttgtttttgaaagaggtgggatccaaaagagctgtttctagccacactccaagcacctgagactttgggcacaaggacacttttttttttttttttttttttttttggaatctcaccacacgggtgctctgacctgcttggaagaggccaacggggcagctctggaagggttgggggctcccctgacaaggcgctggggctgcagctctgtttagaatcaccttcgtggaccctgatgttagaatcccacccccagataattacctttcaagtcttaggtgagcagaattgcatatttattgagaaaagcaaagtggaccctttcttcctctccccttagtaatttatttttctgaaaatggattcttttgtgtttgtacagattgctagtctgtgtctgtctgatcagaaggatgtatccccatacctaacattccatatcactacactgatgtgggctggggccagtaggggcaggacaggtgccaggctggctgttcctctgcatgcctggtgcaccctgtggccgctagcccttggccaggccatcctgttgcagatcccagtgctgccacagggacaccaccaggcacctccctaggcaacgccaagcaggaggacctcacccacacccatggcaaagcaaaacaaaagaggcaccccgaccccattctacagaagccccagtccatggtcacctgtattctacctcacactccagcgtgggctttttccaggatgtgccctgagcctgtt

SEQ ID NO: 100420 - DNA, 1047 bp, Homo sapiens
agtcggtcctccctgcggcagcccagggagggaggtggtagcattgctgtccccattgcacagatgaagggagcagaagaggggagtgacttgctcagggcctcgcagctatggctctcgtggcagcagggcatgcgtgccaccctggtccccaagctcaccgcctgtaggagacccagcaagggcttgagcagctgcttggcccaaccctctgcctcttgccctccttttagtcccccccctacagctctgggagctacgattccatcaagaccgaggtcagcggctgccctgaggacctgacagtgggccgggccccgacggcagatgatgacgacgatgaccacgatgaccatgaggacaatgacaagatgaacgactctgaaggcatggaccctgagcgtcttaaggccttcaacgtgagcaccggccggaaacaggtggggtgggatgggggcaaggccagggccagcccttcccatggcccgtgtctccacagatgtttgtgcgtctctttgtggacgagaacctggaccgcatggtgcccatctccaagcagcccaaggagaagatccaggccatcatcgagtcctgcagccggcagttccctgagttccaggagcgggcccgcaagcgcatccgcacgtacctcaagtcctgccgtcgcatgaagaagaacggcatggagatggtgagtcccccctgcctggcccacactttccctcggtgccactactgacctcctgccacactcccaggatgcccgggccccttcacccagggtcttcccaggagccctggaagcaagtaccataatccctggtttgcaaatgagggaactaaggcccagaaagatcacacagctccatagactgaggcgctggagcccaaaccccaccctgtgccacccacccctggggcagggtctctgcacaagcccagggcccccacgggccccatgctagctccatccccgttctgcctgcagaccagacccacgccaccccatctgacctcggccatggcagaaaacatcctggcagctgc

SEQ ID NO: 100421 - DNA, 1058 bp, Homo sapiens
cctggtgaagctctggaatgggagatggcttggagtgtgcccccaagccaggcccccttctccgagcctgtgaagtggagctgacggcccctgccttggtagaggtggtaggtggatatgcatccccacaacccatccccctcccccagaacagcatctgctggggataacagcaagtggccactttcggcacagccaggtacgaggcctcccactgcctggtttgtctgcgtgcctgtccccattttataggtcgtgcgaaaaaagggcgagggcccagggatgtgggcagtggaactcctcctttgactaggctgatggacggtggtaagggtgggcacagtacgtacccctaccagtgggcatcccccctgcttcctggggcctcccccacacttccacaagctgcctccgggccactaaggtttcctgtagtagtgcctcttctccaacctgggcccgggggccagaggtgccttcctggagcttacacctctggacaggctcttctccctctctgggcctgttttctcttctgcagagagagtggagtaggtgctactgcctgcctcatttggaatgtctcgtggggacattctgtaccatgggctcagtgctgagttgttgctatgtgtctagcacaggtggctgggagcaggttctggccagagcaggctttgcctgggtccaagggacaggcatagctgctgttccatgaagggggtgagttgtgttcagcagccattgccactgtggccacagggtacatggggggcccagggaagtgagatgagagcaggaacgccaccagcagctcctatcttagttttttctccatctgtctgccctggccctggctcagggtttggctgaggagtggcgtgggaatgtggcttgcctggggccacacggccagttatggtagccagcgggggccctcggcatcctgcccctatccaagtctgtatgtggacgaagagacaggcaccaggccagtgaccctagggcaccaacccctgcgggcctggtcccagggagagaggcctggcgggggccgt

SEQ ID NO: 100422 - DNA, 1194 bp, Homo sapiens
atcgcttgaacctgggaggtggaggttgcagtaagccaagatcgccccattgcactccagcctgggcaggaagagtgaaactccatctcaaaaaaaaaaaaaaaaaaaattagccaagcgtcgtggtgtgcgctgctggggagatcgcttcagcccaggaggcagcagttgcagtgagccctaatggcaccgctgtactctagcctgggcaacagagcaagaccctaaaaaaaaaaaaaaaaagtaaaccatgtaactgagtcgccaatattttaaaatctgtttacataatggtgcagatttccagtttcttctaacagcttggaacacttggccatacgaggtcctagcacctggtgccttacgggtcttacccgcccaaccacttccctggccagaccagggtggcatctgagtgcagttaggggaggttctgccccggcactagtgcctgtcgatccccagccaggcagccgggggcacagccccgaggcaaaggtcttggtagctggagagtctgggcccccgtgccgggcatctgacctggtagaggctccaggagcaccctgagcagcgtgtctctggagctcacagtggcggagggcaagtccatcttctcgggaaaacctgattgggaggtgggtggtgggatgatgggatgtcacttctgggcctatgtagggtgtggcactgcagccagccttgggcctggtgcctgtgatgaaggcagtgaccacttgctcactgtgtgccaggcacgatgcccactgaggagcagcccctcattccagaggaggaatctaaggccctccaaggtcaagcaagtggcctgtgagggtggtgtcggtatgtgaagtcgcacctgcaaggtgggtgaaggatgggccccctgcagctcatgggagcgtgggtaaccagccagtatgggtgtcatccctgtcccccgtggaggctcctggacctcaggtgcaggggcttctctggtgacagggtctgtcctggtggggcagatggccctcacgatgaccctgggccaggggaagggagcatgaggatccctggcagggccgggcagcaagctggggttggaggcgtgagtgcctccttcctagggacagtggagaaaagtgccagcctgaagtggcagtgtggaaccagaccttgaaggctggctgccatctgctcagctggagg

SEQ ID NO: 100423 - DNA, 1034 bp, Homo sapiens
cagcttggacacctctctacgggccaggaaccccagggtctctgcagagagaaatgatttcagttttaggggaagatctaggtgtgtgacgtctaattcattagccaaggacggctactgagccttggaaaaggctagtgcagacaggtgtgcaatacacgctgcgtctcagcggctccgtaggaaagaagaaggtgaaatatctcagctctgataacacggtatcaattatttgttgaaatggtactattttggatatattgggttaaataaagtagattattaaaattgatttcacctgtttctttattactttttaaaatgtgggtactagggcactcaaatccctcatgcggctcccactctgtttctgtcggacagtgctgctcccgactgtgagggcctaaattggcacctgcctaagcaaagagtgaccagagtttcagcaggaacgcccactgcccgggcactgaggggcacacgcagaggaggcgcatgctgtgggggtagaggaactggcgccccggggctgcaaatcagggggcaagtgtggcacccagatggggggcatgggctccctgctccgtggctggggccgggccaggctgtgtgaaccacagggacagagctgggcgctcaggagggcagctgtgcaggcagctggggcctgagggccacgtggagaatgcaggtgccccgtgtggccccatcacccggatggtagggtcctagtgtcccccatttgacccctgcacccctcctgcctttctggaggaagagctgggcagcctgccctgagcctggtgctccttggaactacgcatcgtgtaaacacagcctgggcgctggcctttgtcaaagcaggcagggggccagtcctggggaggtgcacgcctcaaattcagagcagggtcagcacccccagaccacagcccatagccctactgtccacgcctccctggccatggtgggccgtggctccagcagtctcccaccccctcctcccccgtcgccctgttgtgtgtgaattattg

SEQ ID NO: 100424 - DNA, 1029 bp, Homo sapiens
cccaatatgtggcatcctgtaggcaggtcctgggtgctgtgccatggatctggccggcccttccccgaagtatggtcttgagctagccgatcccccaactctgggccacagcttctctctgtgacatggcctgggggctgtggcccctcatcctggcatgcccccaggagctcttagtgagaagaccaaggcttcctacctcctggcccctgctgcccttgggtggggccctccaccacccagaaatgcaaactgggcagcagggcgggtctctggggagcaggtgtgtttcctgagtgcccagggctcggtatttacagcagcagtgctgttggcctcttctccttggcccggccccctcccctgtgtgcctcctccctggcctccaagaggtctgcagggaagtgtgggggcacacagagctcagatcttgctcagttccctccttgccaggcagccttgggcgggtgccaaccccttgctgggctgggggtgatcatcttggcccaccttgccaggcggttgaggaccagatgtggacagcacaggcccattgggggccaggctgggactggatgtgggcggtcttcctcacctcccccagattctctgagccctgcgcaccaccccgttggtccagtcttgcctcctcagccagcctggtctcccttggtcccctctgccatggaggcctgtgggaccctgactgcagcttacctcacagccaccctcagcggcatccccacccctgctctcagctcccaaccaccgcccgggttgtgcttcttcgtaaagggagccgggctagggggtccttggtgtcaaccagacccaggcactcacagcttgtcctgagtccctgtccctccctccccacccacatgtgccaggccctgtccagggaccccaagttcccaagaccctgcttctcaatctggcaaatgccagacccatccaggtgcccacactgatgggcagctaagcaggcagcgaggagtcagtgctgccatccaaggagaaggtgccagg

SEQ ID NO: 100425 - DNA, 1930 bp, Homo sapiens
ttggggctgaacagcacatccgtctgtacttacgccgccacctgtgggatgatctgtttgatgcagtctcctccccaagtaccataagcaccctgagagccaggcctccagcacccagcacagggcctggcaccacgcaggtgctggggtgctgtttgttgaatgaatgagtggatgaaaatgaacgaaggcatgcacggaggcaggtgagccagtgcgcctcctgcaggccggggctggcccaggttcctgacccggcaggcggggccactccttccgtttcccctggatgtgcttcagcaggcctctcactctgccccttcctgagcggaaaatgtgaggcccgtctggcctccagaagggatgcgtgggggcagggagcggacattactcacctcctgggcagacaggaagccagcgccaggggagagcaggggtctgctcgctgggcctgcatccgccttctgcagggtgggcagtcgggggattgctgagcaagagtcgtgtggagccctggctggggcaggtcagggcctggtgtgtgcgcctctcagatgaggccgctcctccaacctgggcctcgggacacacgggctcccgcactgtgcaggcctgagtctggacaaaggcactgagggccctttggctcttccaggttcttggccactttagtcacaccagcgttggccttgtgacacacaggggtgatgagccctgtccccacctccctggaggagtctggggtttggttgaagccaaacaggcaccagtgtgggacccctgcaggctgtcagcttgctgagggcaggagccacatctttgtagaaatgtcccttatttctccccttatttcagaagtattacaattattgtagaaaaataaaggagaaggccaggtgcggtggctcacgcctgtaagcccagcattttgggaggctgaggcgggtggatcacctgaggtcaggagtttgagaccagcctgaccaacatagaaaaaccctgtctctactaaaaatacaaaattagctgggtgtggtggcacatgcctgtaatcccagctactccggaggctgaggcaggagaattgcttgaacccgggaggcggaggttacagtaagccgagaccacaccatttgcactccagcctgagtaacaagagcaaaactccatctaaaaaaaagaaaaaaaagaaaaaaaaatagaaaaataaaggaggaaaaaagaaaatgaaaaataatgatgtctggggccctatttttctcagacttttctatgtatctaagtaaccagagcctcattttcttttcaatgaggcagtattggcgccttttttctcacatagtcattggcctccctgacactgatgtgggccagccacagttcaaagcttgtctagtcagtccagtgactggggtcccattcctgagcccgctgtgtgcccagcctgaccctgctgtgtgcccagcctgaccctgtgagcccagagctatacatgtcgctgttccacagggcaggaaacatcgtctccgaggggaagtaacttgcccagaccacagggactgggtctctccagagccagcgttttggccactcctgtggaaggacactcaagtccctgtttttctttctttctttctttcttttttttttttttttttttgagatggagtcccgctctgttgcccaggctggagtgcaaaatggtgtaatctcggctcactgcaacctccgccttccaggttcaagcaattgtcctgcctcagcctcccgagtagctgggattacaggcgtgcaccaccacgcctggctaatttttgtatttttagtagagacagtgtttcaccatgttggtcaggctggtctgaaactcctgacctcatgatctgcccgcctcggcctcccaaaatgcagggattacaggcgtgagcca

SEQ ID NO: 100426 - DNA, 1072 bp, Homo sapiens
ctctgtgaaacgggtcagccttaaagagtaaataaggggtaggagccttgctgtttgggtcaaagttcatctccatggcagaacctgcgcgcctgcctcccgaaggcctgaatccggctttgtttgggaggagacccagtctggaggcagctggaggtgtctgggccaggggctggggagcacagggagtggctgcaggaggagtggggtgcgtggctgccggcaaagaaaaggcttttgtgcttgatgcctcgtgaggtcggtgcgaccccctcgtgctgccagcctcccaggccagtgccgccttccagcgttcccacgggggtggggaccggcgggggcagccacgtgctctggggggctctggggctgggacaagcgcagcagctgacctcccgcctcaactgagccgattgaggccacgcccaaggaacactgagggcggtgcctgcagagcccagctggggccacaggctgtggtcccccacaagaagggtctgggacagttgttcagaaacccagagcagtggggctgaagggaccatggtccccctactcattcccaagcagatctcatgctgttattcctcatgaccaccctttgagagcgtgatctctcttggagacacgtcctggggaggtctggtgatttgggggctgtcaggatcaggtagctgacagtggcatttctgtggggtccatggggttccctcagcacctgctgcccagaggctggctggcctggccatgaggatgaggctgagagatgcagggaggctggggggtctgtaggtccccaagagcccagtgcggggtcagcctggggtagtcagacaccaccttcccctcctgatggacaccagagctgggacagggaggatgctgttgaccacagggccgtgggcctcactgtcccctccgagacactcatggagttgtgggccaccccgctggctggctgagaccctgggcagggcacaggccttgggaaggcccaggcagctggcctggcctctgctgcctcttctgggcctgtgggcctgttggtgtctgtccagagcagtgggtttcc

SEQ ID NO: 100427 - DNA, 1132 bp, Homo sapiens
tccacccgcggacaggagccatgtgaataagccaggaatgcttttgactacaggcccccaaacccagttgactatagcaaaacatgaagttattttactcctaaaacaagaagaatggaggagccgccgctggtgccatttgcaatgttgggttggtgtctctgtgatgttattgaggcttttcctcatggttgcaagttgcctgctattgctccaaccttgtccacattcgaggcattgtgttgatgtctcattgctgcaaaagggtcacgtggttcccagttgtaagggaggctgggaaagaaagaatttcatgtttctaccctctgtggttgaaaaagataagggagaatgttgattcagggcataatatcaagaaaactggttcacagtctctgccacagcctgggcaccatcaactaaactttgacaatcactttgggtgttaagatgccgaaggcttgggcagagaaaaagaatggaaaagaaaggaaacggggaaagtggggaggaagaagagaggagagggaggtaggcaggggagcaggaacagcaattgttgggggccttctgtgtgctgggtacccccagacacagaactcagttcctcagcacacagggaaactgaggctcggctttagagagcttaagtaatttgtttgtgtgtgtgtgtgtgttgtgtgtttttttttttttttttttttttttttttcccgagattatctcactctgtggcccaggctggagtgcagtggcatgatctcagctcactgcaagctccacctcctgggttcaaatgattctcctgtctcagcctcccaagtagctaggattacaggcatgtgccaccacacccagctaatttttgtatttttagtagagaccaggtttcaccatgttggtcagactggtcttgaactcctgacctcaggtgatccacctgccttggcctcccaaagtgctgggattataggcatgagccactgcgcctagccagtaatttgtctgaagtcacagaattagtaagaaagagagccctagtctctccaatcttaatgctgttatttctcaagggaaggggtggggaaagagaaaggaaaaagaaagcaacagtcagggtagggacaagctg

SEQ ID NO: 100428 - DNA, 1078 bp, Homo sapiens
tatcaattttttcttcaaatcgcttctgcatttgagtcttaaaaaggctaactccactccatcccccatgttttcttttagtatttttatgttttcattttttttttgatagactatttttgagaacagttttaactttacagaaaaattgggaagatagtacagagtatccacattgcccactcctcgacacacagtttcccgtattatcaatgtcttatattaaggtgatacatttgttaccactaatgaaccacactgatacattattgtaagtaaagtctacagtttatttagattcctttagcttttacctaatttccttttctgttccaagatttcatccaggatacaacatttaattttcattgtaacatttaattccatttaattgtcatgtccctttagtcttctttgggctttgacagtttctcagactttccttgtttttgataaccttgacagtttcgaagagtactagttgtgtattttgtaggatttagaaatttgacatttttctctatataaaaccggggttatgggttattaggaggaagaccacagacatggagtgtcattttcatcacatcctgttaagggtccataatatcaacatgatttaggactgttgccattggccttgatcacacctggttgagatattggttgtcaggtttctctcctgtcaagtgacttttccctctttccacactgtgcacttgggaaggaaggcaccgtgtgcagcccacacctgaagagtggggagtcatgttctgccttttttagggtgaattatcaacgtaaattatttagattgcttatgcataggagatttgtttctcctcccccacttattaatttattcagccatttatagaagtcgagactcatagctgtttattttatgctttgatgatcattcaatacttcttcattttgttgtacaaattgttctagctttggccattggagctttttcagttgtttcctgtgctcttttgccatacctcattggtgtttggggtttttgtttgttcgtttcttgttttttagtgcttctttgctttctggcactgta

SEQ ID NO: 100429 - DNA, 1060 bp, Homo sapiens
cctgcgctgccggtctccagccctgggtgcggccgtcctgtgcactggtctccttgacaaccccagcatgcgtgctccgagggggtggtggctccttggccagatccatggtgatgtagcaggacacgtgcaggtggcatcttggcccgtgttacccagtttgaggacttcagctgggtggcttgaacctgcagagctgcgtattcctttcaagaggcagggcggccagccctcctgtccccacactgtgcccagaccctagaggctgtgtgacgtaggctttgctctgagcggtagaactgtttgctagaactgtgtctcccacgtcttctcatctgagcgtgcctgttctgggatggttgcatctccaaaaacttcacatcatcacaaataattccagtggggaaaatgggcttgggttgggtttccaacgcacaaaggcaaagtagtttgagctgcaggagtgtcggtaatgagggtgttgcttttgttgttggttatagaatcccagcaccactgtgcagcctctgcattaggtctcctctcactgccactgaagagcaatctgtggcctttctttcctgtagccatcctcactgtctccggcacctggcttcgtaaacactgttatcaccgtgctcatctgtgcccatgaagaatgaagcacaaaaccgcacaaacagccggaagcacagccccctggttttgtttcatacagaatggcactaaatccaggtcaccactagaaccagtagtggtcagtgtcgtgcaagttgcgatctctcactaacaaatcagatatttgatctggttaaaaatcctaactgtatcttcacttgcgtcaatggaaggaggggagttaagactatgggttaggtgctttaacgaggattcagtcattccacaaatatttatggagctctgttctgtgagccaggctctgaggatttacagaaacagcagtacccctagattttctttcttttctttttttttttttttttttttttgaggcagagtctcactctgccacccaggctggagtgcagtggcccaatct

SEQ ID NO: 100430 - DNA, 1036 bp, Homo sapiens
ctatgtagctaggactacaggcacacaccaccacgtctggctaatttattttattatttgtaaagacgagatctccctgtgttgcccaggctggtctcgaactcctggggcctgtgtcccctcctggggctcaagggatcctcctgccttggcctcccaaagtgctggaattacaggcatgagccagcacgcccggcctcattgttttttaacgtgtgaaatctctaaatagaacactggcatttaataaaaaaaaaatatttttgacaccatgcagtccacatctctgggccagatgtgggtgagccacagagtctgcgacctctgacctgtcccttctcctccaaggtggcttcctcttccacgggctctgttaaatgctccatgtgggcaacaggcccgcagcacagactgaaagggctttccttttgttctttctgccagaaaacgagcctccatctccactggtctctgggattattgattacaacatgcccctcacctccacctacctgaagcagatgaagcttcgagtgatgaattcccaggagcaggtaaggcggccgtctcccctcaccccacctggaggcgtcctgacttgcctggcggtggttgattctttccaagacttggggccacagcttgtgtaaacacacgggaaatcaaagaggcccttatctggttatctgggttgtccaggcggagaggcgggaggcaagaatgtgtttctcgtgagagggtctcctgtgcagacagccctgcaggtcttcagggagaaaactttccccttgggtgggctcgtgggaggagggggaggaggggacgtggaagggagggagccgcagccctggcccctggagttgttctttctctgctctgccctttatcgctggcctcttgccaccttcccccagggaggcaagagagagtagccgcctgcctgtggcctctgtcactcttggggcccagaggactaggggatagtccttggagggtggacctggggcctcctggccgtccaagcctccccagctgg

SEQ ID NO: 100431 - DNA, 1023 bp, Homo sapiens
catatgcctgccgcgtgccccacttcccgctgcccagcctggagctggcacatgactggcactgagccagctgagctgcacacagagctggaatttcagcagcagggccaaggctgagctgagcaggccagggccctcctgccgtgggtgtgaggccgaaggggctggcacacctccctcctcccctacgtgcctcctctccttttccccttctcctccccatctgtcacccttctcatgccacccttttccttttttgggggcagggggtggtgcctggatgcctttgtgcccctcttcatctgctcccattttcctcgacccatacctagctcttcagccccactctgcagacacgaggcccccacccatccatgcctgtggaaggagcccccaaggaaacccctgctgatggctgcagaggggcacagcctggcatcacggggtacgcatcaagctcctggctgaggactttttggatctatctctgtgttttgccaacgctgaatcctcagactgcctgacagtctctagggcacagggcccctctggatttttccaggcctaggagggtactataggagttaggactggcagggcggtggcagactttttcagtgcactaaatgaggcgtgttatttggtagggaaaagagctttctggcatctactgctgtccacccgtggatcagatagggcaggcaatgagctttctgaaactggaggtattcgagctggagttagatggccatgtgcaatggataatgcagggattcccatttcgagtaggaagtccctgtctcacttagcttctcagtgtgacctgaggtgcagaggatctcggaggtctctccagcaccagggtttgaggaaggctccagctggttctacagagtttcctgaactcacacagagggctagtcctttttccaaggggccttcctgcttttctgatttctgcacccttctgggttggaacaagcccttttgcttcctttttccctcccagggtgctggtaggtc

SEQ ID NO: 100432 - DNA, 1037 bp, Homo sapiens
caggtgatcggagctgttcccccgggaccccagcccaggcccacagtgaaaggttactgctaattggcgagctcctgatggggccgcatctatttagcactcccccctccccagagacttccaggatggtcttggcacagcgtgtgattcaagagctccccgcccgagtctggcacaatctgtctgaaattgtgaacatggagcctcttggttttttaatttgtattttcgttgtcgccgttctctgcccattgttgctggtagatttcatagctgcagccaccctgactctggcgtccccctccagggagccccctcggtaggctccctcccctccccaccccaagacccactgtcggaggcattgcccgtcctgaccccttgccccggcctcagggcccagttctcaccccgccatcattcctgacactaacacagcttgtccaccctgtcgcagggggcagatggcctgtcggagccagagggcatctctctgaagcgggtcgctgtggtggaagatttctttgacatcatctactcgatgcatgtggagagctcagcggagccaggcaaagcccccaagcacgctgggcagaagaaaacctaccgagcggtgagatttctgtctctttgcctccactggcagccccaggccttggcaggaggccacgggctccgcacatgttgggcttggggggcggggcagggagctgaggcgtgatgaaacggcctttggggatctaggggggcacagggcaagggcacggcagccagagatggctcacagggcgaggggagggaatctgtggtctgagcacaaaggaaaagcaggttgaagggggtgagagggagggaaggagagggatgagggcaggaggcgccctcctcttccccgtttctgcttcacttgctcccacccgacaccacccccagccccttgcagcctgttctggggctggggtgctggggacagataataatcagaggagcaaatgccttcatggcatggcatttactgcatgccaggcctgtcctga

SEQ ID NO: 100433 - DNA, 1052 bp, Homo sapiens
cgggttcacaccattcttctgcctcagcctcccgagtagccgggactacaggctcccgccaccatgcccggctaattttttgtatttttagtagagacagggtttcaccatgttagccaggatggtctcgatctcctgacctcatgatccacccgccttggcctcccaaagtgctgggattacaggcgtgagccaccgcgcccagccaaaaccagctatattcattcttaaggttcattttgtttattttcaccaatgtgaacctctggttagaagtgtattataactgtacatcccaaatccatatctttgctgagtaaaaaattttttaaaagtctaactgacctatcataatatttgtcccatcccaaccctgtcatggcagtatatgaagagccctgtaatgctgggcatttacgggtcaatagtgaacaagttagtcattgatcagcccgtacagatggcctgagatgtcggagggggtgggatactccccaaaagaggtaaaattgattcctgagagaggttaagagcagaaaagtcatggaactttacagctcatctcataaatgaagctcggggaggttgaagggtttgcccataatctcacagcgaggaagctggaccagcaagtggcttctcctgtacacacagagagagagagatatgtgctatctgagacgtcccactgaaatgggttctgaccaggaaggaagccactggcaagagggccttgttggggccagtgaggtcacctcccagggttaccacttagggacactgcccgctagctgtggggctcgggaccccacatcccagatgccctttgccccccatctgctctctgctcttgaatgggctgctggtgaagagacactgctgttcggccatcatggtgtgtcgagaaagctactgggtgaaaccaagacctgtctgtgccagaacgtgttgtgagcgagcgtcacctcccagtgtggcctgtattctacttggactacagagtccaaggtctgaagccatctgtgccatccaccagccactgtacctcaggc

SEQ ID NO: 100434 - DNA, 1565 bp, Homo sapiens
aacttattaccagcaagtgacttcgaagctctaatggagatgacagaactgcaatccattagcaactggacctcacttcaccatcaggggcaggggtccatttaattggctcatgtggggagacaggcaagattcagtccgattcaggagctccctgaggtcgccccggcaggagcctgtctaatggcctggtaagacatgccgatccccctcttaggtctgcagcctgggaattagcatgctgagcattcagatccatctgaggaaaacgaggaagccagaaaggacctgccaagggatgccctgcttaagtatttattaactttgccagggaggacttaaaaatctgatgtcaggatgcagggcgttcctgctctttctatccataatccacattaagtctctgggcagatgtgttgaatttatactaatgttgcccaataagattcttttgttctcaccattaggaaaattggccttcatcggaaatgaaaatattaatatattaggccaggaagcacagagcatgtctatatttaatgagccaatacctgttttcctacagttacctccctggctcaatcatggagacattctgatcagcagttctcaaaatctgtcttgcatcagaatcatctgggggggcctgttaaaacccccagcacatcagatttggtaggtttaaggtggaacctgaaaatgtgcatttctaacaagttcccaggtgatgccaatgctgctggtctaaggaccattgctgtaatattttgaaatatcagatgtatttaagtagacatttggtgattttgtcaatgacttgccacctagcttttcatttagaacccaaatgggctggtgttaagggagctggtgatgtccaagaatgtagctccataaatgtgtaggttttttttgtttttgtttttgttttagagatgggtcttgctgtgttgcccaggctagactcaaacccctgggctcaagtggtcttcccatctcagcatcctgagtagctgagactacaggcatgcgccaccatgcccagcttctccataaatttttaaaactattgccatgtctgattctgttggcctggctctggcaggctgtttgggggttggatggttcgaaaggatggtgtgtgttaccatggcaatgttcttctccatgcaggaaggccccagaggttgatcctacacaagtgactgtgtgtttttcgtggttcttcccatggggtgatacagggttccattccattactcctgctaggtgtttccaggaagctgggataggcaggagactccaagtcccttcttgatccagcctatagataaagtgaacttcctttgtcaattcactgtccagtttgcttagggcaatggattagatgaagctaatttgggtaccaggcagaagggggatggcaggggcttcccaagtctacagggaaggtgctttctgcttcctttattagcagctcttcccttgcagcactgtctggatccttagctagggaaggcctgcctcccctgcagcatttagcatgaaggttattacctccatgg

SEQ ID NO: 100435 - DNA, 1821 bp, Homo sapiens
aggaggctgagaaaggagaatcacttgaacctaggaggcggaggttgtggtgagctgagatcgcgccattgcactccagcctgagtaacgagcaaaactccatcccctcgccaaaaaaaggaaaaaaaagctgggcgcactggctcacgcctgtaatcccagcactttgggaggccaaggccggcaggtcatgaggtcaggtgttcaagaccagcctggccagcatggtgaaaccccgtctctactaaaaatacaaaaattagccgggcatggtggtgcctgcctgtaatcccagctactgggaggctgaggcaggagaatcgcctgaaccaaggaggcggaggttgcagtgagccaagatcatgccactgcattccagcctgggcgacagagcaagactctgtctccaaaaaaaaaaaaaaagaaaagaaagaaaaaaaaagaattacaacctaagtgtcttgtaaacaggctcttcctagctccaaaatctggacacaagaataatggcaatccaaatatcctgctctagcccgcccttcttacagacaatggaactgagactcagcacgctagaataacggcacatgcctctccctgcacctccagcccctgggacagcggagaatgcagctgcattctggatatagtttaaaggtggagccaacagaacttgctgatggatgggatgtgggctgtgagaaccagtgagcagtcaaggatgccttcagggtgtttggcctaagcaagggagatggagaagcctgctgggggaggaagtttggtggtggtggccagggctgtgggcgggtcgggggaagggggtctaaatgcttgctggatgagtggatggatgtgtcgccctggctctccagggggccctagacacacacttgctttcagtccagtcggctgtccggcagcagaggagaggcccatgctggagatgtcaacgtgacatcgcacacgtgtgagtggccccaaggtggacgaagttcaaggactggggcttggggttgtcaacattaggaggtcctgtccaaagttcatgtttttcttctttcatgaaatgtcccattttttaaaaatttttattctttagagacagggtcatgctctgtcacccaggctggagtgtagtggcactattataactcactgcagcctcaaactcctgggctcaagcaatcctcctgcttcagcctcctgggtagctgggactacaggcaggcaccaccatgcccagccccaacttttaagtatcagcaacaaactcaaattgtaataaacctctgtaggttcccccagatacatccatagaccccacttggcctgagacctcctgcttaggacctgtggtgtgggtctggagtcacactgcctagatctgaacctggctgtcaattcccagctgtgtgcttttaggcaggtgacttagcctcagtttcctgatctgtaaaataggaataataatagtactcaccttttcgtgtcatagtatgggttctctgagagtcgtgatgaaaagctatttgtgatggattttactagtgaccaaggctgttgatagcaaaggggaacagtgcactggattttgagttcaccctggggtgggatctatctctgccattgacaagccgtgtgacctggggctggttttagacctctgagaaagtggtttgttgctcttggagttgggagctggccaggatgcctgctgaggcctctgagccgccactgaccaccctccctccctgcctctctccttccagcctcgcccacctgccacctcccacccctttaccctgcagccaaaatgat

SEQ ID NO: 100436 - DNA, 1071 bp, Homo sapiens
gtttatttttcaccatttgatttggcccccatgccttgagagtgtctccgcccacttctgaaataactaccagaaaaatgcaaattcagcaggtgatgcctggagaatctctgagatcatacttaagtgtgcaaaaggcaattaagtgtggaagcccaaggcagtcagttactagggaatcttgaatgagcatctgttgtatgcctgccagtgagatgtggtctggtttaggggcttagaggtctagctttgcaatttgtcaggcaaatgtaggttcaatcctgactccatcccacctgtctttgggcaacttgcttctcctctcagtgcctaagtttcctcatctgtaaaacggtattgacaatagtacctactggtacatcaggagtgtttaatacacattggctattattgtccttgttggcaaagtgttacaggaaattgaaggcaagagacatgttgggttgggggttgggggaaggtcagggaaggattcctggggagagagaggacatttgaatgaaaccacccagttgtgggcacccagttgtgggcagaggggacagtgtgtgtccaggcacagaggcacgattgccccagagctcatgggaggagaagcagccagggaggctggaatgtcaggtttgtgctgggacctctgggaggaggagacatggctggagctgcttccaggggcctcaaatccaggcatgagttttgggatggcatttgacaggcagtacagagccacagaaggattgttgagcttgcagtcctgcccagcatgtccccacctgcaacttgggtgcttccttggggcaggcttcccaaacctcctttcttactgagggacagcctaggacagtgtttaagaatgagaaagccaggcatggtggctcatgcctgtaatccctgaactatgggagtctgaggtgggagaatgacttgagcccaggagttcaagaccagcctgggcaacatggtgaaaacctgtctgtacaaaaaaatacaaaaattagctgggcatggtggcttgtgcctgtagtccagctacttgggaggctgaggtgg

SEQ ID NO: 100437 - DNA, 1035 bp, Homo sapiens
gtaataacattcctacctcaagtgctccgagcagtgccgggaacaaagagagctcccagtaactctgggcaatttgtcattgactctgcccttgaggagaaagggctgaatgtttatcgagttcctactgtgtgttagactctgacctgaagagaatccaattcaagaaatatctgctgagtacctactatgtgccagcatctaggctgggctttggggatacctggatgcaagacctgaggcaggggtgtggggatagaaggaaaaggaaagggaagggaggtgaggtatgaggtcctactacgtgccaggctgtttgctgagcactgggagtccagagaggaaagcagtggcccctgccttcatgatagggaaggacagaaatccagaacccgatgattatgacccagggtagtcccgtgggggatgcctgggggccagggaaggcttcctggaggaggtgatctggaatcttgggcattgcggccacactacagctctcttctacaacagccccatcatgtgatctggcctcagtttacacatctggagatacgggacacactatccaaggaggaatatactttttccatctgcaatcggctcaccttcccttgcactggttctcggcggcccctccgctgcccctgctccggtccaggctgcagtggctcttgctttggcctgctggctccctctctccatccagcagccagagcgatcttccgaaacgtaaatcacacatcatcagttcctagcctaaaacccttcaggggctccccaggggctcttaggacaaagaccagactccataccacagcctgcaaggcccggccaggcccagcaccgctgaccctctggccccaccagtcagaggaaagggccacagccaggccagatcctccacctgctggtgcagctggaatcctccgttacggctgtcaggggatgagtggtgtggggtggtggggcggccgtgtacccagccggctgtgtgatctcagcatacagtccctttccagaaccgtgagtcag

SEQ ID NO: 100438 - DNA, 1047 bp, Homo sapiens
cccctcccggctgggacccgacacaagctcctgggaggcctctgcttgggtggatgactcatcgttttctcggcatccccgggctgaggaaatgttcaaggagacatggggcccttccttcagcaggccaggccctgactggatgctggcgagtcgagaaaaacacaatcgggcctccggccttgtctgaggacagccctcaggggtgtttccgagagcccctggcttccacagccttgcacagtcctcaagcaccctgcaaggctgtgttatgaccccattctacaggttagcaaaccaaggcacaggctctgctgggcccccagctaagcaaccactgggtgcctcagtttcttcgtctgtaaaatgggtgtgatgattgcccctcccctgcaggttgttgggaaaaactaaaggcaagaatccatgtgaaatgtttaactcgtgggattgtcattgtcatgaggatgtgaagaggggtctccccgggcaacaggggctcttgactgggcagagccactgtagggacatccagaaggcggtatggccaaggacagtcctgcatttggatcccaactctggcaacagctgtgtggttctgggcaaatggcttgcctgctttgatccctgaccccttctgtataagggggtgataaaacccgtaccccaaggggtagctgggaagatggcataaaaccaagcctgcccggtgggccacagcataggggctgctgctccatcttggggtctctcagagcaaagatcccaaagccaggcagctgtgaagctcccaagggtggctccgaggctctctgtggggtgatagggaagcctgggctgaggggagagaagaagggaggcagctcagagggctcaggctgggaggctccatggaggatggatgttctctggaggttgaggttgagacaggagcaggctaggggtgaaaggctttatgttgattcgaggcccctgcaggtcagcagagcagtgggggtctggagccaggggctgggtccaggttctgccgcttactgctgtgcagtc

SEQ ID NO: 100439 - DNA, 1037 bp, Homo sapiens
tctagcctggtccaagcctggagaggtggctgcctctccccggggccccctgtgtctaccctgttccctgcccacataaccccttcttcccacaaacagccagaggaaaccttggaaaccccaagtcaggttctctccctcctctgtccagaaccctccaagactcctgtctcactcaaagcaagagccaaggccttcccagtagcctgcagagccctgcgcgatctggccctggctgcccactgctctcaattccctctcgcctcgttcatttggcctcagccacactggcctgtttgctattctccaaacacgccaaatacagtcctgccccaggccccttgcactggccttcctctagcttggaatactctttcttcagatctctgcatggccagctcttctccctcttcaggtctttggtcaaatgtcacctgctcagagagggcctccttgatcacccagtgaggcccaccttagatcccttggaccatctcccatctctcttttctacttgatttttcctctggggcccttatccctgcctgacattatgtgtatttcactactttctgtgcttaggatctgtctcctccaaggccatgagcactagcagggcggactgcgtctgtgtttttttgctgccgtgtccccaggacccagaccagcccctgcccttaaggggctccccactgggcagggtggttcagcagatgtctcagagccgggttctgagaactgcctagttctacacagaggccctgagcagccccagggcgcagacccaccctcccacgggacagggcctgagaagtccttgggaaagtgacatttcacctggaccttgaagtccaaaaagaacttttcagcaagagcagagcatagggaagctcattccggggggtgggactggttttggcggggtcagcgtgggcgttgtacgacggatcccagggccaattttcttagagaagcatgtttggaagaacattctagatggagtggagatgagtaaatggccaagtcagcttgagaac

SEQ ID NO: 100440 - DNA, 1049 bp, Homo sapiens
ctgaggggtggggacaccgtgcacccttcttccctgggtaggagctggtaggaaaaccctctgctttatggcccctgcaggctgctttgtcgtccctgcacgtctgggaggctggaaggcccatctgggacctcagaaatgctgctgggaggattggggggtggggagcctgtggctgggggtgtctggggaccaagtggagggcctcaggcatacctgggcttcttcaagccagatcttagctcagaggttgtgcgactgaatcctgaacatgtgtgtgctcacgggctagaacacgcatgtgcgtgcatgtgtgtgtgtgtaaaagtgcaactgtgtgggtgtgagtgtgctgttcctatctatgtgcaggctggaaatgcttgtgtgtgtgtgcgtggagtgtgtgcagggcacaggtggagaggctcctctgcgtgtttgtcggcatctatgtgagcacctgggctgtgggccttggcagctgcgggtgtgactgcgtgtgcttgcactcatgtgagatctggattggactcaccctgtctgtctgccagtgtggtgctgttgggatgtcctccatcatcaccaagtcacctgagctgctgccctggcccctgccatccccggagtctcagcagctggctgaagccaagaggtggccataagaggtggtgccatacccccgtccccatgactgcagccaaggcatctccttgttccagcttcccactgccaccccctacccgcctcttgctatggtcctataacaaagcccaaagccaagcatggggcgggaaggtcctgggagaaaaggctctgaacttgaagtgagggggccagggcctatggggtcctaactcaactgtttaattcccacatgaccacgggcaagtagcctgcctggcctctctcagtctcagtttccttttctggaaaatgggctctaaaactccacttcttggcaaactggaaaaggctctgctgtcatttgaggatggtggctaaggaatgtgcttgaggccaccctgctcactcatgtcaaagccagg

SEQ ID NO: 100441 - DNA, 1035 bp, Homo sapiens
tgagggggccgcgagggagggaggcgggagccggggagcagatccggaggcgcctccccccgcgcccaggggacggggctgcaggccgcggggagtgggagccgcgagcgcggagggcgggcggcccatctgcgaggagcgctgataaccgcgctgcggccgccagcagcccatctgcgccgctgccgcctccggccggaccgggaacagggggccgggcagaggggcgcgccgggaccgggctccccgagggggaagctggggcagtgacccagcccgcgcaaggctgggaccctcccagcctaaatcagcactctcgctcaaacccggcgagtctgggtcattgtcccctcccccgatcgagtccaggacccctcccccagcccaaatcagtgccactttcccagatggggagtatgggtcagccctccccaccctgccaggtcggtcccctcctcggttctcccatcttgggtcactgccccccgccggagggcggtttttctgaggtcagtgacccacgagatggttggctgggtcttgccccctaccctaggtcagtgccctctgccatcagggcttcccgggtcggtgccccaccccacccccccatcctggttacacctccctgaagagctggaagccttggcccaaccttcttagtctgaggcaggagccctgagtccaccctctcctggagttggggggtgaccccccagacctggcagctggctcactggctttctgtgtggctcgacttctccctagggagtgggcatctggagcagtcgtccactctttatccacacagctgtagaggctgagcaccccctccccctatccaggccacatgcagaaactgggtgctgggcctggaccccaggtcctgccggcccagctgctggcttcagatgctccttgagacccacgctgacccgctctgcctgcccctggcagcgcgaccgtccccagtctccaccctggctctcagaccaataatgagccctccccaagggaccacctgcctgggaggca

SEQ ID NO: 100442 - DNA, 1064 bp, Homo sapiens
agccttcctgtgcccaggccccttctcgcaggcctccttgtcccacccccaccctcaccccaatagctgcaagagagacctggctgggaaaatgcttctgtgttgtccaaagggccctgggatgctgattcatggctcacaggagctgcctgttaaatatgtggagcttggctatagcctgtgcctgtctctttaaggaggccttgggcctccttgctcagccaacattccctaaggaactgggcaggcctggtggctcctctggcataggcctactgacttcaacttgttaaggcagcctgaggcggggcccacaggtccttgggtgggggagggaggaccaggggctcagaggagccctcccttatccaagatcctagtctttggaagggagggaaattggatcccagaccaggtagctggacccgaaagcctgggcttgtggcacttgggaggtcctgagttaggatgaccagctgtccagcttgcctgagactgaggggtataaactgtgatggtcccaggcaaactgggattccatcaagagcgaagtcatccccatgcctgggcaggcagtcttctctgctgaccgagctctgtggggtgcagaattcctgggttccagaggctgccccacctgagacatggctgtatgaccttcgacagggctcctcatatctctgagctttcatttcttctgctgtaacatgagggtgtggtcactgccctgcccctttcaggccaatgggagatgctgggaggtaatggctgccagagtaacttcatccttcgtttgaatctctgtgccctggggcaaatgtcttttgagcctctggatagcccaatgtggggaagagggttcactgattcactcagcacagggcccggcgcctgtgctcagtgcatattgaatgaatgcatgcgtggaaagttaaatgtgcatccatgcctcctctgtgaacagagctggagaaacagaagaataagaccatcttggctctcaaggggtcatctttagtgggagggggaaagaaaaggagtcagtgtccagagtggccctgttt

SEQ ID NO: 100443 - DNA, 1020 bp, Homo sapiens
ggcaggggcaccgcggcgccccggtggcactgcggctggaggtgggggttaaagcggagactctggtgctgtgtgactacagtgggggccctgccctctctgagcccccgcctccaggcctgtgtgtgtgtctccgttcgggttgaaaggagcccgggaaaaaggccccagaaggagtctggttttggacgtctgaccccacccctcccgcttagggcttctgatcccccagggtgatttcactggcccggggttgggagggcagggggccagggggcggagcccgcggagaggggcggaggggaggctccgagcgatttcaaatttccctcgtccccgcccccccgttccccccgcgcccgggcggggatctgagtggctgcggcgggggcacccccgggcgggggcggggcaagagccgggccggggctacaaggggagtcggcaccgccccctccccacccactcccgctgccccgtccggcccgcgccgcttcctcgcagcagctgctcccggctccgcggccgcagcccgcgtggacgctccgagcgccccccgacggacgggaccggctccctggcggtcgggcgagcgggcggcaacgctgcccggccggcagcgctggggttaagtggcccaagtaaacctagctcggcgatcggcgccggagattcgcgagcccagcgccctgcacggccgccagccggcctcccgccagccagccccgacccgcggctccgccgcccagccgcgccccagccagccctgcggcaggtgagcgccccggggccccggggaggctcggccgccagctgcttcgagggctgctaggggaggggacggcgggggctcccgaagctgccggggagagaccctctccagggacctcccgaggaggggctctcgccgggttggagacccggctgggtttgcggggtgaggaaacgtccacggaccctgcttggggtggaacggggacagcgggtgggacgcgggggacatacgtctgacggggaccg

SEQ ID NO: 100444 - DNA, 1050 bp, Homo sapiens
gggaagggagagagcaaacaaaggggtcaggagggaaaataatgcactggcttcctgagcccctgcagaggctgagcagggagagggggccagggccagaggggacagaggctggcggcagacgggccgggacaggcaggtcctaaatggcattgtttgaaggggccggctaattgcacagagcagtctgagcctgagaccccagccctggcctccccactctgtcctgggtgctggcgtctgagccttcgggacagcctgtccacatggaaccaagtcctgagcctccaagcttggtgagggggaggctatggggggcagcctgggtggggtacttgggcaagagcatcaccctaagaatgcatcctggggccttggcctgagaacacagagcccatggcgggggaacactgtccctctcatgtccctgcttccctttcaccccacccattctggcttctcccacaggaaagcatgaagggagacaccaggcatctcaatggagaggaggacgccggcgggagggaagactcgatcctcgtcaacggggcctgcagcgaccagtcctccgactcgcccccaatcctggaggctatccgcaccccggagatcagaggtggctgggcagtggggactggggtggtgtcaggcgctgacatagtgagcggtcactgcagacaactggaggctttggggagagtctctgacaacctccaccacaattccccgggagggaagagagctctagcaaggagggatgcagggtcgagcccttcacacctgcccgcagcccttggcctcccctttgggactctcatctcagctgggactctgagcgtgacacaagggtgatggttccctgtcctctgccagtcatgacaggggtggtctcagcatgggcccttggagagcccttctgcagtgggaccctctccccactcagagctgggctggggttgggagggggaggtctggagtgtgcttcctttccaccctgccctgagcagctccagccagctcacttgggatcccgccccagctgggttggaa

SEQ ID NO: 100445 - DNA, 1008 bp, Homo sapiens
gatgtaaccctgttgtgctatgagggaagtactgttattccaattttaaaatgagggaaatggactcaaagccacacagttggtgagtgaaggcaagtgcttaacactccagccagacctagctgctcgctgcttcagcttttgtgtttggcttatgctgggttttggtgtgaggtgtgaggcctgcacgaggaagccctgatgacatggtgcaggtttcatgccattgcttccggggcatctgtcgtggttggtctgtgtctgcacccatatgcagtgtgttgtgatgagtgacccggtctccctgccaggcacaggcgatcagtctttcatattgcaggtgccttgtttctttgacttgctgataccctggggtcttcatcatgttcatcatgtttccttataaaggacttgacaggcgatggcgacggggaagatggggatggctctgacaccccagtcatgccaaagctcttccgggaaaccaggactcgttcagaaagcccagctgtaagtagccacacctcgagccaaagcacttgtggccaacactctacatagcatacatagcatgctacatacatagcatagctccttaggggagcttttaagagaaagtgatgaaaaaatgttttgaaactagaaaatataagcaaggctcttggactattgttggagggttttcttttttctttttttttttctgagacggagtctcactgtgttgcccaggctggcgtgcaatggcgtgatcttagctcactgcaacaacctctgcctccttggtccaagtgattctcctgccacagcctcccaagtagctgggactacacgcacctaccaccacacccggccagtttttgtattttcagtagagatgaagttttaccatgttggccaggctggtctcgaactcttgacctcaggtgatccacccaccttggcctcctaaagtgctgggatttcaggtgtgagccactgcgcccggctggaaggttttctctatgt

SEQ ID NO: 100446 - DNA, 1792 bp, Homo sapiens
tccaggatgatcctgaatttctgattgcaagtgatctgcccgccttggcctcccaaagtgctgggatcacaggcatgagcgagccactgcgcttggccagatttttatttttcaatcccaattggcaggtgccatttcagctggccatgtctgtctgctgtgacaggcagagcaggacctgctgggaattgtcgggcatcctagctggccaccctaccacctctattccaagaactggggaattctggctggactcagtccagagtcccacctcatcacctgttcacttccagttgtcctgaagctggctaccaggtctccttggccacctgaaggcctaatccttctggccccgccagaccccaggcctccagtcacctaaggcccagtgagtgtcctctcttgcttctaggtccgaactcgaaataacaacagtgtctccagccgggagaggcacaggccttccccacgttccacccgaggccggcagggccgcaaccatgtggacgagtcccccgtggagttcccggctaccagggttggttccccagatgcccagacccctgcccgcagtctctaactgggagatatgcctcactcactgcactactggttgtggctggtagataatctgtgtccttttttcacactgcttttcaggttcttgctttttcttttctctcctgggtaagcttcccgtaagcctgttggcttctctcctggtctgatctcagatgacactctgttgggaatggaagctttccctgttgacttggttcttgctctaacttggaaacaaggtagaaaacactgacatccagaactgtcttctccctcatgtcttcttcacctgtcttgaggcaaccctagcgggtatggcaacatttcactctctgagagtccctcgtcattacccatcatttgtgcctttgtcatctttctgtctctgggacagttacaatgactttctccccccttaagggatacgtgttcctggaaaagtttcttcagcggtctctgttctctttaacttcagtctttcctctttctttttgcctaggagccatatgggggtgccgttggtctctggtcaccgacatcctttgctctggcccaaactatgtgtccttctgtccacagtccctgagacggcgggcaacagcatcggcaggaacgccatggccgtcccctcccagctcttaccttaccatcgacctcacagacgacacagaggacacacatgggacgccccagagcagcagtaccccctacgcccgcctagcccaggacagccagcaggggggcatggagtccccgcaggtggaggcagacagtggagatggagacagttcagagtatcaggtatggccgagaggggctcctgcccagggtgactgaggaccctgaacacggggaaaaaccagttacctgctactgttggtaacagagcgacaacagttgttagaagtttcgtaattgtaataattgacatgtttgaattctaagtatcttccatatgcaccacggacctttctttaccttaatcctctcccagacataagtcaaatgccagtatttaccacgtgaatactgtggtttttcccaacatgacatttatgtaaggactgcaactgcgtacgttatacatttcatgtacgcccgtgtgaagagaccaccaaacaggctttgtgtgagcaataaagctgtttatttcacctgagtgcaggtgggctgagtccaaaagagagtcagcgaagggagataggggtggggccattttctaagatttggg

SEQ ID NO: 100447 - DNA, 1930 bp, Homo sapiens
acaagaaatctagtgccgccttatataagatacagaggagatgagatagtgctggctggggcttctatatcttggtggtagagttaattctgatatgtctgccttttgagtgggaggtgaccactgacattccctagggggaagagatcctatttggtgcctgcatgaaaagatttaaccacaaccccccttccgaggcctctccctgcacaggcccctccttcctctgtcacataccacagcccaggacagctgtctggctatgaaagggcccagtgtgaaggggaatgtaggccctggctgggggaatccctgggtgtggcctggcgagcacctcctccccacccccccattcatcacagactctgcctttgcagaaagctagggtgcgagctggcaagaccttccccagcagccctggagactcattggaggaccagctgaagcccatgttggagtgggcccacgggggcttcaagcccactgggatcgagggcctcaaacccaacaacacgcaaccaggtgggaatgagtccccatggcagcacccgctgcctctgctggtgggaccacttcttgggagagtcagccacccctgctgccccacaccccacccagctttctagcagctggtctcaactctgaatgttggaaaaataggagcaggcatacgaaggctgtgccagctctatctggcttccccggccactttcttgctgatggtcacgtgcatataatttgtattgaatctgacatctgtcttgaagtcaggatgcagtgttgactagcaccttttttattaaaggaaaaaatagttaagctatgctcatttgagaaaattggaaagtgttaaagaagaatatgccacctgctaacattttgaccagtaccatatttctcccattataagataactctggtttctagaaatccaggacttgtcttacaatccatagatttaaaggccaggcctagtggctcatgcctgtaatcgcagcactctgggaggctgaggcgagtggatcacttgaggcgatcacctggacaacatggtgaaaaatagaaaaattagcctggtgtgcttggcatgtgcctgtggtcccagctacccgggaggctgaggtgggagaattggcttgagcccaggaggcagaggttgcagtgcgccgagatcgcaccactgcattcaagcctgggtgacagagcaagaccttgtctcaaaaaagaaaacagtccatacatttaatgtaatgttttttctgttttgttttgttttcccctcaaaagtggttaataagtcgaaggtgcgtcgtgcaggcagtaggaaattagaatcaaggaaatacggtatttccttcctgtcttttgactgtgccctgttttctatgcactttcttctgatttctttgcatataaaatggtcactggaaaagaatcaaatttcttgaaaagtcaatctgaactccctccccactctcccctcacatcccaccctcacaaataccctccaggttaacgttgggttgcacatccttccagatttttctgaacactagttggattcctgctttcccctttattaatattaatactgtaagcactgtctgatgtcattttgtcactaaagggtccttaagatttttaatggctgtacaattttctttcctagggtcagagtcaaatttaaccatgtccattaagattttctgtgtagatggaatagaaatacaaatgggttttacaaaatcccatttatagaatgggagccatattatgtaaaattaaaaagtgctgggctcagtggctcacgcttataatcccagcattttgggatgcaaataaccatctcttggatttcccagcattttgggacgctgaggtgggcagattgcttgagctcaggagttccaagaccagcctgggcaacagg

SEQ ID NO: 100448 - DNA, 1096 bp, Homo sapiens
ttcttgaatccaggaggcggaggttgcagtgagccaagatccacgtcattgccctccagcctgggcaacaagaaaggaacaggtgaaattaatacaaatcatgatttttttagcgctaaatttccaagatgttagcattttaatatccagctattataaaaactgagatagtctacatttatagtgctggtttcaaaatttcacttattttatatattttacatattacatattttacagatctcaattttgatgctaaatttgcaatgaaaatacttgatctgtattaactatatacagattcttgactaaatacagatgtagatggttaaacacaaattaactaaattcataaaacgtgcatttgagaaagcagactcatatgtctaggctagtcttaatgagccagttagttgacttacttgtcagtgttttaattaaccttaaatgcagaattcatttcctcaacagtttcaagttctcagtagccaccccctatgcctactgcccagcatgtcagatatcacagacatgggtatgccaggcttttagctttgaatcgagctttgctctctgagctgagtcatttttacatcctagttgtagccatttaaaaccttgtaaacatgtgttaaggatcctgggtgcaaggggttttgaatgagctcctgttgtgagttgcccatcaaggggccatatacattcagtgtggaccccctgtcatgccccaattgcagctggtacccaggcatagcatggtcttgtcctgggcccgcattctctctggaccctcctaccaagccacggctgcagtctaattacctttcacagagaacaagactcgaagacgcacagctgacgactcagccacctctgactactgccccgcacccaagcgcctcaagacaaattgctataacaacggcaaagaccgaggggatgaagatcagagccgaggtgattgttgggtacctgggatcatgggacagatgggaggaggacgctgcagatcaggaattgatctgtacccggctccctgacctcatctcatgccttcttcttttctcaatagaacaaatggcttcagatgttgcca

SEQ ID NO: 100449 - DNA, 1101 bp, Homo sapiens
tcccccatctggctaggtagggatgcttgtttgtgggttttataaaggtcctatctacccagccagggatgcaactccatgctgacctggtgatatgaagggaaggcagggttgcctactggttaaaggacctggattctgaaattacagccatttgctgtttacagggtgtgggcatgggcaagtcctatcatgagacaacaagccaattggagtcaccacaaaatccttagtgtcccagtatttaaagcttctcaaggattgtcacaccagggaggtccccctgctcagcgttctgcctgacatcatcctactggggcagccccttgcccatcttgatgttccccatctgtgaagtagggatgccacctggaagcattgttgagtggtagaagctgtgaggcatggcctgaggtgcaaagagtccttggcaagctgctggcctggagggaaatcttaggaactgagagaccccaggctttagcagctggtgtcagggcctcaactgccaaaagccacaaccctgtttttcttacagatggctgtttgtcttgtggcaggaaaaaccccgtgtccttccaccctctctttgagggggggctctgtcagacatgccgggtaagtcctcctactactgccctggaccttcctccccttgcctcctctaactcccctctccttcccaacagcacctgtgtggagactcagtgaagcccactcatcccagctgccttgcactctgcctctggggcaggatgggggacagctgtcacagaggccaatggcacgcaggtcacagccagttgtccttttaaaggacaccaagccaccagcagtgtgttctgcagctgtatcctagggcctccaccagcaagccggcagggcctgcccttctctggtctccgatttcactggtgtttctctctggctgccaggatcgcttccttgagctgttttacatgtatgatgacgatggctatcagtcttactgcactgtgtgctgcgagggccgagagctgctgctttgcagcaacacgagctgctgccggtgagcactgggccctgtggggtggatgtgggtgggcccccaaggctcctacg

SEQ ID NO: 100450 - DNA, 2138 bp, Homo sapiens
cagtcttggtcattgagttttatttatttattttttcgagatggagtctccctttgtcacccaggttagagtgcaatggcgtgatctgtgctcactgcagcccccatctccgaggttcaagtgattctctcctcagcctcccaagtagctgggattacaggtgctcaccaccacgcccagctaatttttatatttttcgtagagacggggtttctccacgttggtcaggttggtctcgaattcctgacctcaagtgatctgcccaccttggcatcccaaaccgctgggattagagacatgaaccaccgtgcctgggcagtcttggtcattttaaaaggacatacatcttagctgttacactttattttttatgtgcagttatcttgaacttgattttcattccacatgcataagtataattggagataaactagttaacaactactgctacctctggttttggttcccttcttttcctcctatatggagtttacacagccaatatgtgtggtgcgtgtacagcctttgctggattgaacgcatgtgatacagtcatgaggaactgttcattttaccatagcagggagtggaggaaatgagctgctgtgtgctcagcatcatttatgcttctgtgtctctctggcccccacaggctacctagtcctcaaagagttgggcataaaggtaggaaagtacgtcgcttctgaagtgtgtgaggagtccattgctgttggaaccgtgaagcacgaggggaatatcaaatacgtgaacgacgtgaggaacatcacaaagaaaaatgtgagggcagtctgtaccttgcgggcctcatctcttcctgtctttttccccagtcctccacaccctgaaacccacatgtaggccccatccctgagaccccagaaaaaaggattgaaatcctgtgggaatcttaagcattaggttagggtcagaagtggagttggtgaccaagcaagattctatttttttctggagacagtctccctctggagtgcagtggcatgatctcagctcactgtaacctctgcctcccgggtttaagcgattctcttgcctcagcctcccaaagtgctgggattacaggcacctgccaccatgctgggctaatttttatatttctagtagagttggggtttctccatgttggccaagctggtctcgaactcctgacctcaggtaatccacccccgccgtcagccttcctgggattacaggtgtgagccacctcgtccagccccacgcaagattctagaagtgggtccagctctctttccctctgtccacaccctcatcctgactctgtctctctctttcagattgaagaatggggcccatttgacttggtgattggcggaagcccatgcaacgatctctcaaatgtgaatccagccaggaaaggcctgtatggtgagcatccttctctctggcagtccctggagagcctatgtcacctgaccactggcccaggtgcagcagcctgagaaggagccacttgcttctggccaagttactggcagcatcaggggcctgttggtgctgcctacgctccatagtaaatcctcagcccacaagggaaataccctagtaaatagtgccctgctgctgcctgtgtccctgctgtcattcaggtggacatagactggtaggcatcaccctgaactgtcaggaggccattgggaacctgctggtctcagggaataaggtgggttgggctggaggtttcaaatgaaccctgcgctgtcatcttttctgagcacagagggtacaggccggctcttcttcgaattttaccacctgctgaattactcacgccccaaggagggtgatgaccggccgttcttctggatgtttgagaatgttgtagccatgaaggttggcgacaagagggacatctcacggttcctggaggtgagggaatctggggacctgattgtcacagacagccagggcagggaaagcgctgctggcagtgatgattggtgggtgttgccaacattgggaatgactttcccgttcttggtctggctagatccaatagtgagggattcagtgggttctcttagtacatggaaaatattttttttgagacagggtcttgctctgtcacccaggctgaagta

SEQ ID NO: 100451 - DNA, 1004 bp, Homo sapiens
tctgggtggtttttacttttttacttaatcttgcttgatcaggaactctggtgtcttcttggccccccacgtgatctcgttcatggtcacttttttgtttatctcattttctctgaggctggtccttcctgttaacgtcttggcatttgtgggaagcacaaaatgttcttgtctctccaactctgcttttcgctccctgccctgccattcctctcccgcgcctgccctctcccttccatctttcccaggtacttttctctcccagccctgccactcttctgccgcacctgcgctctcccctccatctttcccaggtacttttgagccttgactccccaggtcccttcattctgtgctcactccatgatgtcattttgttctccagttaaagaaagtacagacaataaccaccaagtcgaactcgatcaaacaggggaaaaaccaacttttccctgttgtcatgaatggcaaagaagatgttttgtggtgcactgagctcgaaaggtgagcaaggctgcacttggagagggaaactgtgtagatcaaaacacaaatgggcagacatgggcaggtgcttaccttcattcttgatggcctcactgccctttggtgttactggggcgaggagtaataataccttttcatagttcgcccttatttcctgacaaaaatggcggagggggtgtggtggtggtgaggaatctgagacatgaggtcattaggccacaccatctgtctgttggctgcactgccgtgacatctgcctgtcccaacatgctgggacactacgatgtgtgagaagccagtgaaagaaaaccccacagacatgccattcttgaagacttcagtttgctcattctataaatgattccttcttagccacagtttatcctctccttccctttctttgggctaagtttgtctgttttgatgcaaataaccatctcttggatttcagttctgttctgttctgttttctttcactcctctattgtttgttcatt

SEQ ID NO: 100452 - DNA, 1025 bp, Homo sapiens
cctatagaggaagcttttggtatatttgatgccatctgcctggagtcatctagcatggtccttcatccggcagctgggtttgaagagggaaggaaaactctggttgcctgagcctgtgatgactgaaaatctaggctgtttttgagtgaccttgttccttattaaggaaattgcttaacttctcccatcatagtgttttgaaaatggatacattgctggctggctgatttagtatgcatgcatttattctaggaaggtcctctgagcaccaactctatgccaagagtatggtgctaggcctgcacaaaacgggggactttcatttgtgagcaatttgtaagcaagtgttctgaattaagggctctgaatttaggtccttggggaccttactgatgggactgagggatggcgagggcagaaagagtgggacctggctggttgaggctgtcaacatcctggaggcacttctgacttgctgtcttttcactccggtacccccaggatctttggctttcctgtgcactacacagacgtgtccaacatgggccgtggtgcccgccagaagctgctgggaaggtcctggagcgtgcctgtcatccgacacctcttcgcccctctgaaggactactttgcatgtgaatagttccagccaggccccaagcccactggggtgtgtggcagagccaggacccaggaggtgtgattcctgaaggcatccccaggccctgctcttcctcagctgtgtgggtcataccgtgtacctcagttccctcttgctcagtgggggcagagccacctgactcttgcaggggtagcctgaggtgccgcctccttgtgcacaaatcagacctggctgcttggagcagcctaacacggtgctcattttttcttctcctaaaactttaaaacttgaagtaggtagcaacgtggctttttttttttcccttcctgggtctaccactcagagaaacaatggctaagataccaaaaccacagtgccgacagctctccaatactcaggttaa

SEQ ID NO: 100453 - DNA, 1026 bp, Homo sapiens
atataagctgccatatattttgtagacaagtatggctcctccatatctccctcttccctaggagaggagtgtgaagcaaggagcttagataagacaccccctcaaacccattccctctccaggagacctaccctccacaggcacaggtccccagatgagaagtctgctaccctcatttctcatctttttactaaactcagaggcagtgacagcagtcagggacagacatacatttctcataccttccccacatctgagagatgacagggaaaactgcaaagctcggtgctccctttggagattttttaatccttttttattccataagaagtcgtttttagggagaacgggaattcagacaagctgcatttcagaaatgctgtcataatggtttttaacaccttttactcttcttactggtgctattttgtagaataaggaacaacgttgacaagttttgtggggctttttatacactttttaaaatctcaaacttctatttttatgtttaacgttttcattaaaattttttttgtaactggagccacgacgtaacaaatatggggaaaaaactgtgccttgtttcaacagtttttgctaatttttaggctgaaagatgacggatgcctagagtttaccttatgtttaattaaaatcagtatttgtctataactgtctgatgtcccttttcttctgcaggtcagatggatgggacatgggggagggcctggctaacatgtcagggtgggagtttggaagtaggtgattcattcattcatgtattcaaacgcaatgtgaccccaagctgactggagcttacttacagtgtaatacactggttctgcaccattggctcacgcctgtaatcctagccagggtgggcggatcttttcagtccaggagttcgaaaccagccttgccaacatggcaaaaccccgtccgtacaaaaaaaaaaccaataatccaggctgggcacggtggctcatgcctgtaatctaagcactttgggaggccaaggcgggcaga

SEQ ID NO: 100454 - DNA, 1364 bp, Homo sapiens
ggtgagccggctagcgggcccggggggtgcggctgggggggcggccgcgtgggccaaggccgggcgtgcgcgggcaggccctacgggcagcgccagggccgttccacacggcggtgctgttcgagccgggtgggggaagggcggggccgtcacccggcgcgcgcgggctgggcctgggggcgcgcgctgcgctctgctcagggggcggggtctcgggccggaagtgggctgctgctacgcggggtgggggtttctgggccgccgctgaggtgtggtccctgcgctgcagcgactggaggtcccagggtggttgggccctgggagggtgtgggcgaggtgggccgtcctgggagctctggggacgcacattgtgggaggccgtgttgcctgagggccgagagatcgggtggtggagtcagacctgggttgggttccgtgcggtgtgaccttggacaggtgctttaaccgctgtggatctcagcttcctcatctgtaaaacggggacagtaatactacccacattaaactcttagcgcgatgtatggcagaaagtaagccagctcttggactccctcctttcttcagtgtgtgtttattgaatgcccactaggtgttgggcaccgtgctaaaccctggctgttttcccgggaacaaagatttgctctccaggaatccacattatgatgagcaggaggacagtataacgggatggtatcaacagtgctagttcagtccctacttcacagttgccctcggatgctgcagggcagagcttgacctctgccccattttggggatgaggatcctggggcccattgagggaggttatgctaggccgggcatccgcttctccgatggcatgtctctaacagtagtaatgataatagcagctctttgttagttgggcacttgttttgtgtcaagcactgttaagtgctccatgtggctttgtgtcttttaatactaacactgtctttaagagagattctcttcttccttttttttttttttttgagacagagttttattctgttgcccaggcgtgcagtggcaccatcgctcactgcaacctccgcctcccgggttcaagcgattctcgtgcctcagcctcccgagtagtcgggattacaggcgcgcgccaccaagcccggctaattgttgtattttttagtagagacgaggtttcgccatgttggccaggctgttgtcgaactcctgacctcaagtgatctgtccgcctcggcctccaaagtgttgggattacaggtgtgagccaccgcgcctggcaagagagattactttcattttacaaataaggggtctgagactctgagaggcggagtgtcttatgcagcccagcaagt

SEQ ID NO: 100455 - DNA, 2072 bp, Homo sapiens
tgggcagttcatttcaggtcatgtttgtatgtggaaatccagattctgtggctggaatcttagtgtctctcgtttggcctcatggggaagaaggtgaggcttaaaaagtcaatgtacctaggctgggcgcagtggctcacacctgtaatcccagaactttgggaggccaaggtgagtggatcacctgaggccagtagttcaagaccagcctggccaacatggtgaaaccccatctctactaaaaatacaaaaattagctgggtgtggtggtacacgcctgtaatcccagctactcgggaggctgaggcaggagaattacttgaacttgggaggttgcagttgagtcgaggtcgtgccactgcactccagcctgggcgacagagtgagactctgtctcaaaataaaataaaataaaataaaataaaattgagtgttcctacaggtttgcttttggtgactctctaggaaacacttgaccttacttgcatgcctaatgtaacacaggcccttctcttttcttcccatgctttagaagatggcagtgaacgtatactcaacgtcagtgaccagtgataacctaagtcgacatgacatgctggcctggatcaatgagtctctgcagttgaatctgacaaagatcgaacagttgtgctcaggtaagagaaatctgctggatcatttttctaggaaagcctgtaggtttttcaggaatgtgaaggcctgtatctgactgcaaagccacacacagaggttcagggtctttgttagggccaccctgtttcttcctctcagccctgcctttgcttctgcttccaaaggaacttttttttttttttttttttttgacagagtctcgctctgttgcccaggctggagtgcagtggcgcgatctcggctcacttcaagctccgcttcccgggttcacaccattctcctgcctcagtctcctgagtagctgggactacaggcgcctgccaccacgcctggctaatttttttgtattttttttagtggagatggggtttcaccgtgttagccaggatggtcttgatctcctgacctcatgatctgcctgcctcggtctcccaacgtgctgagattacaggtgtgagccaccacgcccggcctttttttttttttttttttttttttgagatggggtctggcgctattgcccaggctggagtgcagtggtgcagtcttggctcactgcaaccttcgcctcccgggttcaagcgattctcctactttagcctccaaagtacctgggactacaggcgtgcatcaccacacctggctaatttttttgtatttttagtggagacggggtttcaccatgaggtcgaactcgtgacctcaaatgatctgcctgcctcagcctcccaaagtgctgggattacaggcatgagccaccatgcctggttggaactatacttaaataaagagtgtgctctggcctgcaggtccaccatcttctgctctagagactgcattctgaggcctgaagctcagccccgacttcttggtgtctattattgtgcatccagattgcatgttttatttgaggacagtaattgtattaactactgtctgctgttctagttttatgttcatcagtggcatttcttattcccaagaagtacaagatcaaagtctagcaaatatcatttcagccacaattttatggaactactgtttaacaataatttggcaaagatgtaatgatttaaagtctcggtgtggtggctcacgcctataatcccagcactttgggaggctgaggcaggcagatcacctgaggtcaggagttcaagaccagcttggccgacatggtgaaaccccgtctctactaaaagtacaaaaaaattagccgggggtggtggcaggcgcctgtaatcccagctgctctggaggctgaggcaggagaaacgcttgagcccgggaggtggaggttacagtgagccaagatcgcaccactgcactccagcctgggtgataagagcgagactccgtctcaaaaaaatgaaaaataagtagtgatttaaaagaagaacaaaaacatggtctctttc

SEQ ID NO: 100456 - DNA, 1068 bp, Homo sapiens
gagatgtaaaaagcccagggagacagacgtcttagggaaaaaaatgttttttaatctagatcaaggatggatcttggaaattgcctcctgaagaggagggtatatctttgtgaaaaatcagaaaatgtcacttttgttattttcttttctgtattttaggcattcatttttgtttctagtggtcattttattgtcatgatgattaccaataaagaacaggagttttaaaattttgtagaaacactccttttctccttgttataggcttctgggttgcaagtatgttgtagaatatatggggtgaaaaccacagtcttgttacaggttttagaaattgacttcacatgaagttagtgaagcttttggtttttgtaggtctacttcacaattttaaaaattgtatttggtttaagtgggtctgggaagaagttcaccctgcttctttaattgtatttttctgttgccgttgttctttcaggggctgcgtattgtcagtttatggacatgctgttccctggctccattgccttgaagaaagtgaaattccaagctaagctagaacacgagtacatccagaacttcaaaatactacaagcaggttttaagagaatgggtgttgacaaagtaagtaaacgttatcttttattgtggttaatgttccttaatgatcgttactaaggaggtagatgctagcttatgactttggacattttcttttttttcttaatttatctagttaacttttctcagttaacacagaatttactgggagcagtttgcccctaccttcttgcccctattccccttgcttgtttctttcttcatcgtctgtgaagttagtaactgtttagaggagtcagcctgtaaatttgtacagtgatttttatttttaaaaaattcctgtgtaatctctagtagtctggaatctaactctcttaatctggatttacttctgtaaaagcatactgtatgtagaatagttccagtagagaagattctaggccaggcgtggtggctcacacccgtaatcccagcactttggaggctgaggtggagaagattctagaa

SEQ ID NO: 100457 - DNA, 1058 bp, Homo sapiens
gccttggcctcccaaagtgctgggtttacaggcatgagccactgtgcctggcctgtgcagtggatttcatgctttgtgataggcattgtggccatgcaagttatatagcggacctactctttatagcataatgcacttttgtatcacgtcttacgatgtgcttggatggatgtgtgtatgtgacttatatggtacttgttccttttttgtttctgattccttttcatacatttgagagagtggggaggggttgggaagtgtaggtactcttgaaggcaaactgcatgaaacttgctttataaatttaggggcttagccctaaggtctctaaaatatttttttctccttttggcagagctttataatgaattgatgcatggactagtttgatgcttgccaaaagcctcttttttggggctaaacagttgtttttctctgcagataattcctgtggacaaattagtaaaaggaaagtttcaggacaattttgaattcgttcagtggttcaagaagtttttcgatgcaaactatgatggaaaagactatgaccctgtggctgccagacaaggtcaagaaactgcagtggctccttcccttgttgctccagctctgaataaaccgaagaaacctctcacttctagcagtgcaggtaaaaaaacaaccccaaaacgtttccaaaaaatagcgttccagatattcattcagcgttcaactagaatttttttcagtagccataggcttagggatcttaagaaatataatcccaggcatgtggccagagtatggattttggcatcaggcagataacggtgtgtgtccttaggtgtctgtagccctgtgtaagcaacttcaactctgccccacagtttcctcctctataaaatgggaattttaatacttgccccagagggtttttgaaacttgaacaagttactgtatgcagttttgccaaagctctagaaatccatcaggctagctcatgtaagagagcattagtttgttccaaaacaagggcatttttacagagccctaggatgggaagttataccagagctgaa

SEQ ID NO: 100458 - DNA, 1274 bp, Homo sapiens
attgtggaataatattccattgcatgcctatacctcatttgattcagcagttcatggtcttttgcgttgtttcccactttatggcagataggaataatgctgctgtgaacgttcatatacggcttctgtgtggacctacaagttttgatttctctcagttacagacccaagagtatatactctgggagcagaattgctaattgctgtgccatgtgttaactctgtatttaaccttttgcagaactacctgttttccaaagtgcctcagctctttacattcccatcagcagggttcccgtttctctagatattgagtactttttattctttacctgtttagaatgggaaactacatagataaccccgtgcatttcatatttcagatgctgctaccagttgagtggagacgtgcattaagcatttagtctttgggataaacgtgctagagagagtcatccagaggaaatgcctattactgtgggtgacaggccttgtgattatagtttggggtgttaggaagatgagatattttcaaacctggcatgtaatatgcaaactttacaaaataattgctaagtaggtgaatcatcagtgatatatataccttgaggtttagcccattcttgattaattttacttgtagataggttggctcctttactccttttttcttgtctttgtctgcttttggctgtaaatactgagagacgtctataaatactagtcagtgtgatgcttttctctcctcactcttctaaactccttctaaaaggtaagcagagatgaagattttaaagcaattcatgggaagagcaggctctcctgctcttatggattccctccctcttccactccaaggagtctgaggtgaggagttaggagggacctaactttccagatggggagcagtgggcacctggcaacagccgagactgtgtgctcatgtctagcgtgaagtttgcctttgctctacgaagctggatttggtttgtagatgtgttaactaaatcttagctgttgtaaccaacatgaaacaacctgtttgtggatttggtcagagctgggttaaggtggatcatctctgtgcaccagaatgactgtacccctttcagatggtagtcctgttcaccgcagtggagaaaagacctcactgaaggacttattcccagcatgaaacatcatgacagaaattggtacttaactctgctgccaggatagaaaccactcagtaggcaaatgtgggagcgttgtcttgcatgcgggggctctctagc

SEQ ID NO: 100459 - DNA, 1001 bp, Homo sapiens
attgagccctttccagggtcctttctattgaccccctcatgcaatcagacctggacttgattgtccagtcccttggtaaggactcagtttatgattgtcagctaccttgctaggctgtaattgtctcaggcttccctagttttttctccttaatcctttttcagtccctgagaagcttctacatgtttcaaggggtagtctgctctttctgggagctgttaccgtcaaggttgctataaacaaatccatgttgtttatctgaggctgaagaaaattgacattaaactgatgtggtttttgtctgtgttggggtttgatcaaagaccacatctccttttgggttagaagtctgcctgatattttattgccatactaatgccaagcatctcaccctttttaatgtcttgtgcaggtcaacgtattgaaacttactgttgaagacttggagaaagagagggatttctacttcggaaagctacggaacattgaattgatttgccaggagaacgagggggaaaacgaccctgtattgcagaggattgtagacattctgtatgccacagatgtatgtgtttgacatgaggatattttctttccattttacatagaagggttggtgaactctgtgctgatgcttgttgtattccagtgttgcattcatcaaaagacttcatctttaacccctcaaagtcagccagagggcatctctgcccagctttagcttctgcctgaggtctgtgagcttttgaagaaggaataggacaaggaggtggctggcttgcccagcatctgtagtatgtggccactgataggtgatgagtgccacaaactgctcttagccagaagcaacccatgtcctcactccaccccacctcctattgcttggatccctcagcttcagttgctgcctccattttatcagggcccggggcatgcccggaaaagcaggcacatgctccctttttcacggcgtgcccacatatcacgtcatgtctgggtat

SEQ ID NO: 100460 - DNA, 1035 bp, Homo sapiens
gtcccaccaggcttggctagtttttttttttttcgagacattgtctcactgtgttacccaggctggtcttgaacttctgggctcaagccttggccttccaaagtgctaggattacaggcatgagccatcacacctggccttctttcttctttaaaaaacagttttattgaagtataactgacataataaactgcacatatttaaaatgtacctttgatgacatgggtgaaattaccaccataatgaagacaatgtaaatatgcatcactttcaaaagtttgagggtaaatttgactgtgctcagtttttgtctttggtgagatgcaattctactacccaagaaataaaatagcagtcacctggcctgtatagagccaggaagaaccattgtttttaagaggctgtaagtatgaggaaagtgaactcacagtagaaatggatctttcagtggctttcccctctcattttcctatttcaggaaggctttgtgatacctgatgaagggggcccacaggaggagcaagaagagtattaacagcctggaccagcagagcaacatcggaattcttcactccaaatcatgtgcttaactgtaaaatactcccttttgttatccttagaggactcactggtttcttttcataagcaaaaagtacctcttcttaaagtgcactttgcagacgtttcactccttttccaataagtttgagttaggagcttttaccttgtagcagagcagtattaacacctagttggttcacctggaaaacagagaggctgaccgtggggctcaccatgcggatgcgggtcacactgaatgctggagagatgttatgtaatatgctgaggtggcgacctcagtggagaaatgtaaagactgaattgaattttaagctaatgtgaaatcagagaatgttgtaataagtaaatgccttaagagtatttaaaatatgcttccacatttcaaaatataaaatgtaacatgacaagagattttgcgtttgacattgtgtctgggaaggaagggccagacct

SEQ ID NO: 100461 - DNA, 1079 bp, Homo sapiens
gctccccttgcccactggggactcctctttggctccttgaagtttgctgcttagagttggaagtgcagcaggcaggtgatcatgctgcaagttctttctggacctctggcaaagggagtggtcagtgaaggccatcgttaccttgggatctgccaggctggggtgttttcggtatctgctgttcacagctctccactgtaatccgaatactttgccagtgcactaatctctttggagataaaattcattagtgtgttactaaatgttaattttcttttgcggaaaatacagtaccgtgtctgaattaattattaatatttaaaatacttcattccttaactctccctcatttgctttgcccacagcctattcagttcctttgtttggcaggattctgcaaaatgtgtctcacccactactgagattgttcagcccctgatgtatttgtattgatttgtttctggtggtagcttgtcctgaaatgtgtgtagaaagcaagtattttatgataaaaatgttgtgtagtgcatgctctgtgtggaattcagaggaaaacccagattcagtgattaacaatgccaaaaaatgcaagtaactagccattgttcaaatgacagtggtgctatttctcttttgtggccttttagacttttgttgccctaaaattccattttattgggaacccattttccacctggtctttcttgacagggtttttttctactttaaacagtttctaaataaaattctgtatttcaagagtatcatgtcttctgaaatttgtcttgccctgggtatatgctgttaggttcaagtgatgggaaaccagtgcttctttcttcagtgaggactgatcttttcacatcctttactgatttttcagatgtgcttatttcttcttcttcttcttttttttttttttttttttgagatggagtcttggtctgtcgcccaggctggagtgcagtggcatgatctcggctcactgcaacctctgcctcccaggttcaaacagttctctgcctcagcctcccaagtagctgggattataggcacccaccaccacgcccggctaattt

SEQ ID NO: 100462 - DNA, 2168 bp, Homo sapiens
ctcccgagtagctgagattacaggcacgcaccaccgtgcctggctaatttttgtgtttttagtagaaacaggatttcaccatgttggccaggctggtctcaaactcctgaccttgtgatccacctgcctcggcctcccaaagtgctgggtttacaggcgtgaaccactgcacccggcctgaatcatggttttttgaaaccattggcatctgaacctgtagctctctctggtagtgttgtgtggttttaaatgtcatgtgagctgagttactgacctcaacctactgccagatgaaggtgtgatcctgtgataccaatcttgagggtcccttctagttttagcagtcagtgacttctcttgtttatttttgtttgaaaaagtaaaaggctctctttttggctatagagttgcatcttgaaatttttgacaaattacatagagctgaagaaggatacaagttttgatatcttaaaatcacagggttgaagcttgaaaggacagtattggcattgcagctaagtgggagtgtgaggaagcgccttctctagggcaggtaattgcatctgttaatgtggtccttgggcccctgagttgctgccttccaatcagaattcccttagcattagccagtgacgcctgaattaatctcaggtaggacttctaacttttttccaaaattatttttgtgcagaggtttatctagatttttcttctaaatgtcctcctccccacttgttttattattactgtttttttctctctttaatttttttttttttttaatagagacatggtctcactatgttgcctgggctgatctcagactcctgggctcaagtgatcctcctgcctcagcttcccaaagtgctgggattataggcgtgagccattgcgcctggctctgttactgtttttctaacctgagttacttaggatcatattttcattcttttttaaaaagatgggagttttctgaacttttccttaactaaaaagtggaatgcatcttaatattttcctttttttacttgtgtttctccccagggagggaaaaacatatttattgtgacagaatttagcatattttaggccacattaaaatactgataaatgtattaatcagtgaaaataggttatagtgaaaaatatataccatttgattaataaaaatgttattggaaaaatgcaagaactgctgtaagaattgctaacattgtgttggaaaataaatatactaagctaagaaacaatgggaaactgtcatatgtagggccaacagcctttttttttttaaacccttccaatttattaatatctagtctaataaaccctgatttataggacctctgcaccttttttgactttttattcatccattcttaatattctacactatgacaaaatccttaaaactccattattgatgaaatgggaacagacttttgtttttgtatgttggtgttctctgagtggtgaaggcccagggagaatgttttgtttggtggtcacttagcatttgaaaacatccacttccttgtgacttagctgggtatcttttaacatctggaagccacgtccctgattgaaatctctggagacaacttacctttcaccaacttgtctgccaaattgcaccatggaccaagattgcagtggctgcatcaagtctaggcctgccctgaagtctggatttgtaagtcccccatttcaaatggggcagaaggcagaggagcagaggagccactgtgcctttcgctgtcctggagccagttggccttctggttttggtgaaccctgcttttataagaggactccctggcatcttccagtttcccgctacttgttttatgtattattttatgtctgtgtttgtcctggagtgctgtaactcctttcactgtctgctgtaagttcaacttcttcaataaaagaaatgtttcaaattggatgaaaaatggttctgtgattatggtttgtgggacgggttctgatgcttcatttatgttcttcatacggaattctgtctcatttccctagttctaaatatgaccagcagacccagagttccatctcgacttcataaaggagctgtcttggactgggaacagctgccaatgtctttgttgagatgggagttggaaagtgttagcactttgccagactttgcc

SEQ ID NO: 100463 - DNA, 1030 bp, Homo sapiens
caccccaactgtcactgcgtgccttggagggaagaggggacatgccagtgtccttcttcctgttctgtaagttcccttttcctagcttcagtccaggttgtgccagatctttgagggaagtcagtggttcttaaagaggaaagagtgcctttcagtctccccaggaggttttgaaagcacacaaaggcagtttgactcccagctctgtctggaaggaggccgcagggctcatggcctgccccctggcatctatcttctacctggaaggaccattaagtgcttaagcaccttggctgtaactccagataaacaagatgggtccctcttttagcaaggcatgatttcttcaggctttccatttattccttgatccagcaacaaatataataataattactgttgtatcattgtgctgggtgttgtataaggagaatagaatggggttaagagcatgagttctggagccagattgctagggttagtatctggtgctaccacttaccagctgtgtgaccttgggcaagcaaccacgcctctctgtgccacattttcttccttatgtaggtagtcagggtgcataaggcacagagaacaatgcctggcatgaagtgccatcaccggcacatctcagtgcccacagaaaccctcaggggaccaatgtttgttgaagccaggacccagccctggggcaacaggctcatgcctgccatcccagagctctcaggctggagtgggagatagaagacagacagacaagagtgaaagcgagctgggcacggtggctcatgcctgtaatccctgcactttgggatcccagcgagctgaggtgggtggatcaagaggtcaagggttcgagaccagcctggccaacatggtgaaaccctgtccctactaaaaatacaaaaattagctgggcatggtggtgggtgcctgtagttccagctacttgggaggctgagccaggagaatttcttgaacccaggaggtggaggttgtagtgagccaagatcatgccaccacactccagcct

SEQ ID NO: 100464 - DNA, 1055 bp, Homo sapiens
tttccaccctccaagaacttatgactgtgacaaatccataaactcttctatttggtagtggattccaggccacatgtgagttctgggaactgttcagtggacagttcccaggttactctctttgcctgacttcatggagttttatgctacacatgcaagtgttagtgttcagtgaagactcataaggaccccctgcatatttctgaaattctttttccgctttgctcccttctctctagaatttgcttcacagtttctaactatttcagtctccctgaacattgatccctctctcttcagtgcaggggaggaccactgtgctgtgcttgagctctcccctcctgcttcacaggctcccgtctggcatgtaccttctggcagaaagcaggggtgattggggggctcactttgttttccttctctcacagctcacagtcttgtatgatctcttgtccagtatccgaaaacagttgtttcatatattttacccaatttgctggttattatttataaggctgaagggtaaacttgtttctgtctctttaccatggctggaagagaagggtttccgtagactctagaagttaatcccatcatagtgatgttagtatcttcctggctctgtcttctgtgtgttgtgttggagattctgcctttcagtctgtctattcagtgagggcaagtaatgcaggccaaacaatcccagaacattcattcataagtgactagtatgagactgggtgaagtgaaagttggttttccaaatgcatcgctcataagtctctggctttaggcctgttggaggtccattcctgcagaaggcagttctgcacagacttattgattaattgattcattataatatagttagcaaaactttacagtgtttctgttgtgggccatacactgcccttgctggtgaagcagcagcaaacactgagtcttcagtgattccttggttaaggaatgctctgtgggtcagactcttggggatccgagacagagaaggcacagtttctaccctccaagaacttacaactgtgacaaatccacga

SEQ ID NO: 100465 - DNA, 1068 bp, Homo sapiens
ttctgggcatatttcgtgtgtttataagcatgcctgtatgtattctgtctacactaaagttacatgtgttgatctgcactttgcttatttcaagtaacagtagattttggagaacaatccacattagtacatatagaactatcattctgtttaacagccgcacaatattccattgtatagataaaccataatttctgtgactacttgcctattgaaatatttaggctgcattgcatcttatgtcttcataaatagtactgctgagtaacctagtatatgtgagtcatttggtatatgtacaagtgtaacgttaggataaatatcaagagtaattttgagtctatgattttcatgtgctaaatttagaatttaacccttgcaaaaatatgactccactacctttttatcttggaatgctcccagagccagagaaacctcttgcctctggcttgggtttctgtacatgtgtctgttacttgtaggtagaatgaacatggtcgccctctgtgcattaagaatagattctacaagtccttggtgacctccatcttctctcttttttttttttttaatagaagacacgggcatatcataggctgaaggatgatgtcccggaagaggtaaaattaaggcgtttggaggaactcatcactatcttccgagaagaagcaacaaaagccaatcagacctctgtgggctgtacccagttggtgctagtggaaggggtgaggccatatgtgtgtgtgttatgttgttttttatgtttcagaacattagatctttgatttttttcctcattatgttgcctaggctggactcaaactgctgggctcaagtgattctcctgcctcagcctcccaagtaggtgggactacaggctgatgttttaaatcaaagtttttgtagttttcagtatacagattttgtccatgttttgttagatttacacctaagtatttcttttctttttttgagacggagtctcgctcttttgaccaggctggagtgcagtggcacagtctcggcccactgcaacctctgcttcccaggttcaagcgattctcttgc

SEQ ID NO: 100466 - DNA, 1104 bp, Homo sapiens
atatttttttgtttgtttgagacaggttctcactctattgcccaggctgagtgcagtggtgtgatcatggctcacggcagcctcagtctcctgggctcgagcagttctacctcagcctcctgagtagctgggaccacaggcatgtatcacttgcctaatttttaaattttttgtagagacagggtctccctatgttgccctggctggtctcaaactcctgggcttaagtaatcctcctgtctcagtctcccaaagtactgggattataggcatgaaccactgtgcccagcctaatatggtatttcttttgttctgaaggtctatcattaacttgggggtacatctggcaatttatgttatcttaagattgaagcaataggggacttagtggataaccagatgcctcagatatttctagagcatttgggaaggagaccttttgagacacgagaccccttgttgtctgtctaccatggattccccccaacctctcactgcagtctacctcgagacctatggctgccagatgaatgtgaatgacacagagatagcctggtccatcttacagaagagtggctacctgcggaccagtaacctccaagaggtacatgcatttcctatttcctttgtttcctggacctgggcaagattctgcatttgtgccagttcttaggtgtagtttcaggagcagggtgccccctggtgagagagagttcccttgggtgaagtgttcaccatgggactgagttgtacttttgttccagctgtttttgaaacttttatggtgatgtgcgccttcagacaaggagctaagttaagaattggctgtggagagggaagttggagagttactgtttaacgagtacagggttttagttgcagaagatgaaaaagttatggaaaatgcgtagttatgaaattgcagatgttcttaatgccacaggactgtacccttaaaaatggttaaaatgtccaggtgtgggtcaccatgcctgtaatcccaggactttgggaggccaaggcaggaggattgcttgaagacaggagtttgaggctgcagtgagctatggttatgctattgctcttcagcctgggcaagtgagc

SEQ ID NO: 100467 - DNA, 1022 bp, Homo sapiens
tctctggcactcctttgtgtggtcttgggcaagttgcctcagtttttttcaactgtaaaacagaggtcatattattaggagtaccttcttcatgggcttttgtgaggggtaaatagatgtatacacttgaagtgctcacagcagtgtcctgtccatagtgttcaataaatgctggtgatgtctgtcattcttttgcagactgtgggctgtttagtgccatgcaccctttacagtgtgtcctccaagtgcagaggtctctggggtggggaccattggcctctgtgtcttggctgtcgctgaggatgtgcagggcacacagcagtctctctagtaccatgtgtcccagtccagagaggcaggaggatggagctcggaaggatttcagctccaggctggctgctggaccgacttttcaacattttttaaaaagtgcctcagctcctcaggagaagctgtcttcagaagtggaagacccacctccctatctcatgatggatgaacttcttggaaggcagagaaaaggttggttttacttcgcttatccctttgggcttcctgccttgctcctctctgtcattcctggcatgattcttttattacagaactggcttggaaggttaacagtgtgggaaggctgtgggaatcattagactccaccaagtaatattaatatcaagaaactcgactggtcacggtggctcatgcctgtaatcccagcactttgggaggccaagatgggtggattgcttgagcccaggagttcaagaacagtctgggtaacatggtgaaacactgtctctacaaaaaataaaaaattagccaggtatgatagtgtgcacctgtagtcctagctactcaggaggctgaggtgggagaatcatttgatcaaaagctgattatcattcagctcttaacttttagttggaatttattggagtctggaaataagacctgctggtggggacgggggttgatcttggaatatagtttgaagctgccagaatgtgaaattcatattctta

SEQ ID NO: 100468 - DNA, 1105 bp, Homo sapiens
ggcataatcattgctcactgcagcctcgacctcctggattcaagcgatcctcccatctcagcctcctgaatagctgggactacaggtgcacaccaccacacccagctaaatttttgtgctttttgtggagatgggatttcgccatgttgcccaggctggtcttgaactactgagctcaggtgatctgcccaccatcggcctcccaaagtgctgggattacacgtgtgagccactgtgcccggcccctcattctttttaatggttatgtggtgtcccattattgggctggaggactacacatctgtagtcctatttactcctgaagctgaggttggaggattgtttgaggccaggaattcgaggccggagtgcactatgatgcacctgtgaacagccactgcactccagcttggacaacatagcaagaccccatgtctacaaattaaaaaaaaaaatcccatggatttgtttattcatgtaacatatatttactgagcccctgctctgtgccaggactagatgcaggcaccaaggatatagctatgaacaagactgagtagtgagtgtctgccagtcagggagttcacatcttgtttttagcagcccctattcatgaatattcaagttgtccctagcctcttgcaggatggacaatagcgctataagccttctgtgcacctgtgagcactcatctgaagggtggttcctggaagggttgctgttaggtcaaaagggtcacatgcttttgggattttgtataggttgtaacccctgtactactcaagggtgtggtaaggtgagattttatcccccaaagtgtggcaacccctgggctctgctggtcatccctgttatagggcctgccagagtctggggactatttatagttcagccttgctagaccagcaagaccttaaaggtcatcccttccagggcctgttggaatcccaagtcctcttcacaccatcctgggtggatgggtgggcagctggaacttgaatcctcaagttcaagttgagggttgacatatcagtgcccattatataggcaaagaaactgaggctcagagagaccttgcctcatgcaagtgatattacggggcctg

SEQ ID NO: 100469 - DNA, 1037 bp, Homo sapiens
agatcaggcttttatttatttatttaggatctcactctgttgcccagcctatagcacagaggtgtgattgcagctcactgcagcctcaactcctgggctcaagcgatcctcctatctcagcctctcaagtagctgggacgacggcatgtgctaccacacctgcctaattaaaaaaaattaatagaaacagggtctccctgtgttgtccaggctagtcttgaactcctgggctctagcagtcctcccaaagtgctggggttacaggcatgagccactgcgcctgatcctgttattgttttctttagtaaactggaagctgtttgagggcaggaaccacatgtagcttgtctctcagcccccaggtctggcactgagcccaacatacattagatcttggtgagtgtttggagactgatcagtggggtatatcttggaccctttctactttacctttcaccttttcaattgctgttgactttcctaaatgtttaagatgggacttgagaatcatgctgagcttgactgactcttgagcttttctgttctgagtcctcagaactctaaggccagctccctactggctcttcccaggaagatggccactgccaggtgtcctgcctttgatctggcttgatgcatcaccactgtcaaaagcgggatgtcattctggatgtagctaatttggggccaccctgtttcaacttagctgagtcatgctgtgccccagagatgctggagggacccctgtcccaggaagagggcatgaatggaactcctgttcagttctcccatggccgcaaagacctgttgttctgaccattgttctcaaggaaaagtttacttggctgtgcacacgcatagctttggaccatgtgactccccacaaacaaaacttggcttaatccagccctggcctgttccccggaccttgattaaaatgtcttgtgggcctctgtaggcaggttctggccctgacgagctgtgtgaccctggctgctgctggtggtggaggaaataatagtgataataatcaggat

SEQ ID NO: 100470 - DNA, 1031 bp, Homo sapiens
ctgccacccaagctggagtgcagtggcacaatctcagctcactgcagcctcgacctcctgggctcaagtgatcctcctacttcagcttccctagtagctgagaccacaggtgcctggctaatttttgtatttttagtagaggcggggttttcccatgttgcccaggctgatcctgaactcctgacctcaggtgacctgcccacctcagccttctaaggtgctgggattacaggcatgagccaccggacctaatcaaaaatgatttattattagtgttactagtgtcccaaacttccaagatttttctcagattccctttattctcccattgccttttccagcactgggctaggcaccaagggaagccttcagaaataattgtgtcttgatgtgactcccaagtgttggagtatctgcctaagtcttgtcctccttctgtacctgtgcaggcggccgggagaacaagatgcctattctcatttccaagatcttcaagggattggcagctgaccagacagaggccctttttgtgggggatgccatcctgtctgtgaatggggaagacttgtcctctgctacccatgatgaggcggtgcaggtcctcaagaagacaggcaaggaggtggtgctggagggtaagcactgacgttccagggttcagaggggctgggtggaggtgttccactgcttctctacctcccccaggcctcagaaggccccatcccagcactgggggctgggaggtgggcaggactgaaaacagaaacagaatttggggacctgcctgaagacagtgtggggtggtggagggagagttggcatagagccaagcagacctgatttgcattttctgtcttccagtcactagctgtgtagccctggacaagtcacttcatttccctgatccttagtttcctcatttgtaaaacagggatgtagctcctgcctttctgggttgttgcgactagggcaaaaatgtacatggcagagtgtgccagcacctgagtgacacagggagagaggggtgcgga

SEQ ID NO: 100471 - DNA, 1036 bp, Homo sapiens
gatggcgtccggcaggcgcgccccgcgcaccgggctgctggagctgcgcgccggggcgggctcgggggccggcggcgagcgatggcagcgggtgctgctgagtctggcggaggacgtgctgaccgtgagccccgccgacggcgaccctggtcccgagcccggcgctccgcgggagcaggagcccgcgcagctcaacggcgccgcggagccgggcgccgggcccccgcagctgccagaggcgctactgctccagcggcgccgcgtgacggtgcgcaaggccgacgccggtgggctgggcatcagcatcaaaggtgggcgcgggacaccgagggcgcggggtcgtggtgtctgggggcagccgagggcgcagggggctggcagcgcgcccaggacatggagctggaggcttcctgtctgggggtaaggggggtctgaggaaacaggtaacggagggcactgggcacaccaaggttggagggggtttcagtagttggtggccttagggggcacggaagacacaggtgtggataagattgtgggagcaccaaggacacgtgggtgggagttctgtgtggaggcgggggggtctgaggggtaaccagcatgaacatcaaggacaagaggggtcccccggaaagcagagtgtggagaaagggggttgaggccgggacaccagtgggacagggaggagggagtccctgagaagcaaccaaggtgggtgcagaggggaagcctggagtctgggaagcacaggggtggataggaggcctgggtgcaggcacaggctggggtcacaggcagaaggccagcaaggacctaggaatctaaggacccaggaaggctgcagggagccctgacagctggatttgggtctcctgatctgactatctccaccttgcacaggatagagctttcagcccccaggactgaccgctagtggggtgcagttagggtgcaaccagactgtgtttgaatccaggatcagctgtgtgaggttgcaaaagtcccgtcccgcctctgaatctgtttcctcaac

SEQ ID NO: 100472 - DNA, 1369 bp, Homo sapiens
cggcgggggcgtgcccggcgggcggggcggggccagccgggggcggggcggggcgcggcctaacggcggcggcggcggcggcgacggcgacagcagcggtggtggtgtctggttagctcggcggctgcagatctcgcggcgacgcctgcgagggacccgggccgcgggtcgaggcgggcggcgcctgcgagggacccgtgtcgcgggtagaggcgggcggcgcgcggcggcggcgctcggcgatggtaggcgtccctggagcggccgccttccagcgtaagtggggcgtgaatgcgggcggccgaggggggcgtgtgagggcctgcggctccgcaggcgcggtgattccgagtgccccgggcgcgaggccgggagtggaaactgaggcccgaagcggggcggcggatccaaggtcacgcagcggggcgggccttcccgggctcctgaggccaccccgtcgcttcctgcgccgcccgaagagctcggggctcacggtgtgagggaaattgtggggcccgcggcctcggaacttaggccgggccggcgtccatgggacttgccggcgggcaagaatcattttgttgtcccagcgctggggccacgaagtccggctcctggggaaatactacacccgcccgatgttgagggttggaggagatgagaatggcccctcggagggcctgtttgagcgcaggctcagtagttggctacctgggttcacatccaggcttccccatttaggtagtgaccttggctctcccggtgcctcagttcccccatctgcaaaatggggatgtggagcgggttccctccctcccccagggttcttgggttttgtgaggccagtaaaacgcttgacaccgaccgtggcacacacacaattgtgaaaactgtcattattgtaatcgtcctttattaatctgatccagtgtgcaccgcactcggaaaagtccgaaattaggctctagccgtgttaagattttgttttgttgtctgttagtcctgctccatgatctaattgttattcttacttccatttagccattccagtatttatctagtgttcctccttgatgtgtgagatccttgggggaggggtggcttctctgaataagaacaataaaattttaattgtttttcattattgtaattataatagccaacatttttttgagcaccagacattttgcattctattcacttaatatttattaaatcatatagtaagtttaaaaataccattccaggccctgggaatacaataaacaagatagaccgaactggggttttgagtttagttaggagagggagagacatagtaaatgaggaaacagataaacatgttttgcatgtttttttaattgtttaa

SEQ ID NO: 100473 - DNA, 1050 bp, Homo sapiens
caattttcagctgccatcctagatagtttaccaatattgatgagtctttcttaatggggggacatttctcggaggatttaagtataggttaagtcgatttaaggctttagggggagaagaaaacatttctcaattataaagtatacaactaggaagaaattcttatttctcatattctgtttatttagcactatccattcatttagcacatttacttgtattgacactaccatgcttatgaagccgtgatggctagggagtaatgagcttgttttgctagtgttatcttctataaatgttctaaattaagtagttggggaagtggttaatgacaaccaaatttgtaatctaggattgttaccctctaatcaattctttttaaatttcttcctgacatttatcttgttataataataactctctgacattattattataacaaaattgttgtatttgtgttttggggataaaaggcatattttagcatcctatagtttaaaatggtgtttgttttaatctgggtgataagatggaaatgctgacctgggcttgcctgatctacagctaacattgttctaataaactgcatggagtccaggtgttttactttaactgcagctgtaccatctgtgggagcaggtggacagattctgtgtcatcaggaaaatacagctggtgagactaaggagaagagctaattgattgcttttccagctctctccagtcatatatacctaagcatagcatttaccttggcacaggtgttgcctttggtctggatagtaacagcaaaattgaacaaaaaaagatgtaaatttgagctgcgtgtgtgtgtgtgtgtgtgtgtgtttcttggttggcattgagaaagataatttaagggttttttgtttgtttgtttaggttttatttttgtttttagttacttgaagatatttccagctcgttaacttctctgagagagttccttgtaaggctacttataaatagtagtatatatatatatagtttatggcagggaagatctgggaagtaagcaaaaagagcctt

SEQ ID NO: 100474 - DNA, 1001 bp, Homo sapiens
cggtgcgtgttccatgaaaataaagatggcgccaggcgcggtggctcacacctgtaatcccagcactttgggaggccgaggcgggcggatcatttgaggtcaggagtttgagatcagcttcacctacgtagtgaaaccccatctctactaaaatacaaaaattagccgggtgtggtggcaggcgcctgtaatcgcagctcctgtaatccaggccgtggcaggagaattgcttgaacctaggaggcggaggttgcagtgagccgagatcacgccattgcactccaacctgggcaacagagcaagactccgtctctaaataaataaacaaacaaacaaacaaggcttctagttgcagtaggagggacgaattgagagcaagggtttaaggactaaatgcagggtgcagtacagtgtcagtgtcagtgtgcagtgctcaggaaatatttgttgaaggggaagagtatgcttcttcagtccaaggtggaagcatgaaggaaactgtaagcacattgatctagaccacagtttcaggtacagaggggagcgttaactaaagctcagagcggggaaagcacagggtgcttacaaaatggcaaatgctgtcatttaggccagaatcctactcacactgctgctgtatatcctcttcatctgtgtttaggattttgaaatgcatttttgttggattattgccccactagaaaaaacagttcagatctgttgcagtttcacatttgaaactactttcattctggaatccttatccttagaccttcctaataatttctgtggtcacactggacctgatctcttcctgtgctaaacaaaagcacacaatcacaaaactgtgtaggcataaatgagaggcatatgggagtggtgtaaaaggaactggaagagtcttaatatgcctgggtgggcgagctaaactaatagctcccagcagtttttctgaatcagacattgtggagccaggagtctagcatttggaattccactgc

SEQ ID NO: 100475 - DNA, 1246 bp, Homo sapiens
gaagagggaacttaggaaggcattattgagaagttgacatttgagtttacagcagaaacgttgggcaaggggtagggaatgatctctgagatagcagcatacccgatctactagctctttttcaccaggctatttagagtttgacatttatgttacatttataacaaggtacatttcaagtgtagctttcctttttgctttaagcaactgagacatgtaagtcaatttcagttattttctgctaaactgtgtgtctctttgaatgttcactatcaaggtgaattatacaaggtgtgttagatccttttaacatttcagagcaaccaaaaccaagtttgaatgtctcatttaacactgtgagaggatgtatcttgtctgcatcttgtgtttcagttgtatttatcggtaaaataagccaggggagtattctgacttgcagtttaaaagctgacaggcctaggggaatgttccacaaaatagtatattttgtatatggcatggtattatagataaatgagctattgtgctgcctggcactgtcttctcccttgtgctgtcttctgctgtttctcaaggagtgattcctctctgtgttttggaaccgtgtttctcactgcctacagatgatgtccatttggcttatttcactgtcatctcatacacagctgtttcaaactgcatggaatcctcagagaactacacgccccttcctgaacaaacagtgcttcttcctgcattttcttcttaaacttttatcacttttccccccttacatatacttttgttttattctttcactaaaaaaaaaatgaggtttaattgacttacaataaactacacatatgtaaagtgtacagtttgctcaggtttggcaggtatacctgtgaaatgatcactgcaatcaagatagtcaacatatcattcactccataaagtatccttgtgcccattggtaatctctccctcccatgctccccctgccctgtctccaagcaaacactaatctgctttcagtcactatagattagtgtgcattttatagaattttatgtatatatgttttatatagatgaaatcatacaatatgcactcctttccttccatcctttcttcctttttaggtctggtttctttcatccagcataattattttaagatgtatgtatcagtagtttattccattttattgttgagtagtattctgttgtatggatatatcacatttgtttatttgcctgtggataga

SEQ ID NO: 100476 - DNA, 4768 bp, Homo sapiens
tgaggcgatctgcccacttcagcctcccaaggtgctgggattacaggtgtgatccaccactcctggcccaattgtgatttttgttgttgttgttgttgttgagacagggtcttcctctgtcaccagcctggagtgcagtggcatgatcttggctcactgtaacctctgcatcctgggttcaagccattctcctggctcagcctcccaagtagcttggattacaggcgcccaccaccacacccagctaatttttgtattttttagtagaggcggggtttcaccgtgttggctaggatggtcttgatctcctgaccttgtgatccacccaccttggcctcctaaagtgctgggattacaggcgtgagccattgcgcctggccaattgtggtcattttttattgctcctcaaattaccccatctttgttagtgggagcctcttcacattaactctctctgagtccttgggacataactccagaagtgattgatggcctgattgctttctgttatgacaagttttgtacattttctgccctatacctggagttgactattttcctgaagagctctgcttccttttattggaaaatgctatttaggatccataatctgagtgctagaagtgaaagacccaccttgttttcctttttaaataacagtatttatcacctcacatggtttgtatgggtcataattctgaggtgccttagttcgatggtagtggcttggtgtctgctgtcaagatggcttacttacattgtaggcaatttgataccggctattggcaagatgtctcagtctctccccatgtggaaggctcttaggactgcttgagtgtcttcacaacatggtagctggcttccttgagaacaagtgatccaagacagccagcagcatctttggattcattttcttgtcagcagtggggtgtagtgctctagctgtgaattcagacaacctgatgctgacactagctatgtggcattaacttgtttgaacattactttccttagctataactttgagacaataatacctaccttataggccctttaacataggacctttgtagcaatgcagggaactagaatagtctctgacacttagtgagtacacatgacaaacactgaacctgctggtgttactattattaccaccatcactggtatgaaatgaagccctaaaacctagtaattaagttgcccttgacagaaatagccttccttcctatttgtcaaaaattgccatgacagaaatattgtttacagattgcagatatatcccaagtatggtagaaggttaagggttagagaattataaccacacctgtttgactatatatatatatatgcaggggatctttcatgccgaatctgtattcatgtagattttagtataggatatgtgtcatgtaatgtgacccaggaagaagccaagacccccgccttcccctggccatctttttttgcttttgcttttgctttttttttgagacggagtctcgctctgtcaccaggctggagtgcagtggcatgatctcagctcactgcaacctccacctcccgggttcaagcaattctcctgcctcagcctcccgagtagctgggattacaggtgcgtaccaacacgcccagctaatttttgtgtttttagtagagacagggtttcaccatgttggccaggatggtcttgatctcttgagcttgtgatccgcttgcctcggcctccaaaagtgctgggattactggtgtgagccacagtgcctggcctttctttttcttttcttttttaaagatggggtctcactgtgttgcccaggctgatctcaaacgcctgagctcaagcgacctgaccaccttggcctcccaaaattgcccaggctgatctcaaacgcctgagctcaagcgacctgaccaccttggcctcccaaagtgttgggattacaggtgtgagtcactgcacctggctaccaccacccacaatcttttaactttttattttaaaatgtagattcacaggaagttataatgaaaaatgtacagggaggtccgttggacccttcactcaatttgccccagtggtaccattttgtgtaactatagtatggtatcagttgtcaaccttcgatttttatttagcagaaattgactgagcagctattatatgctagctctttgaggtataaaggattaaactctgaccttatgggtttctgtcatctctctggattttcattgttattgttcttaaaatattttttattttggcgactcattgttgacacttatattagcagttattttaatgttaaatattatgttatttctgacatttatatttgctctgttttaaaacaattttgcattgtgtccccatcttccatttataatctttacagcatcagaaccatgttgcctgcattgtcttattttaatcacgtgccagttttgcagtgctaccaagtctggatctgagaggcagcttgtgtgaatcatttacatacatttctgtttatattccccaaattaatttgcaactttatatttttcatccaattatatgttcaaaacatatttttaataattgattttaagaaggaatttgttatattaggatttaaaaactggctcaaaaaacagaagctattaaacaatagcagaaaccagacagtatataggactttaaatggtaattgctaaacatttgaatgttcccaaaaatgtgagtctgtgtgtctctgtgtgtctctacgtgttattccactagggatttgcacagataggttttgcacaatatccttgctgttattgtcagccataaacaaattacacgtatttaacaagttaatgtcagattggccaggagccactgggaggtgtgtacttagtgacatcagctggcaaagagccctggtaacagggagggttggaagggtagtggagagagaggaagcaggagggagggagaaaaagagagagactgactgtatctggggattctggcaaggtgaagagctggtctgtttggcaggaccttcccatctgggatccatctgtgtttccctggaatgggacaggcagctctagtcagtgagaaatcgcagatgtgagagagctgacacatgtccagctaatgaaaggaggaggaaggctggtctccgattgagctttgaagattaggaggagaaaaagaggagctttggaatatctatttcaaataaatttggtgtatttaagaatctggattgtttataatttgggcatttggggtaagtacattttaatatagttttgggggttaaagtgcacaattctctgcctttcaaagctttttacttctttcaaattacgatgatatgaatgtttcttggtatttgatacaagagttcagcctttctactcagttttattttaatgcttcattttatttatgtttctatttttctgttgccaaccttatatttgaatgtcatgcttttttgaatgcaaggtttacttaataattagatgtagtatatgaattctacagctagaaaagtagtcccacaaatatttctgtaaggttttccacgttggattgttctgtgatgtttagagggaatttttttcccctttagtatgcataatacaaataggccatattaaaaagatggctcataaaacgctcttttctattgtcagattttatttcagtatatgcaggcaaattataactaaaagaggttgaagcaaaactaacagcatctcttcgttttagatatatctaacagtttttcatttacattttgctcctatgctgttttcttctgttttcttgctacatataaaataaataacatcaatgaatctgacttgaattgtgagtttggggtagttttgtgatgcaataaattcatgtgcatataactacgtactgtgttctgtagtcctggttagtttgtgatgcctattttagatttttgctatttcttatatataagaaatagagatgggtctcactgtgttgcccagactagtctcttaaacttctaggctcaagtgatccttctgcctcagcttcccaaagtgttgggattgcaggcatgagccactgcacctggccactttttactgtttccatacattgtattcatgtttttgaggccttcgaatctaggcttcctttccatgttctatggaaagaacatgagtttgggagttacacaaactgtgtacccattatttactagttctgtaatctcaagcaagccactgttctctttgaatctctattttgtgtaattcctgactgatgttgttattggggaaatttgtctggcacatagaaagcatacaagttggtttcaagagttctagatgttcactttttttgctgcgatagattcctaaaccccttgcatttttaacttcagctcctgggcaagaatgggtctggcctgtagttctagttttcagggcgcccttcctcttgctgtactcgtctcagattgtctgcatctattctaaatgttctatgctatatttgccaaactataccagaacagaagaactttgaaaaagtcaacaagcaggagtgaggtactgaattgtactgctttgtgacgacactgttgaaattgttccccccactccgcgacctcccgctggaaaattgtttttcccccgtgtattacaagtcacgcaaaaattctaccatttctcaaatagaaactttaaaaaatatttttattccttaaagttcttcagcctttatttatattaattgggt

SEQ ID NO: 100477 - DNA, 1203 bp, Homo sapiens
gtggggttttgccatgttgcccaggcttgtctcaaactcctgacctcaagcaatagagccacctcgacctcccaaagtggtgggattgcaggcatgagccaccacgctgacttgaaggagacttttaaaatggaacttttcccaagttttcttttcttttcttttctttttgagacggagtctcgctctgtcacccaggctggagtgcagcggcgcgatctcgactgactgcaagctccacctccccggttcatgctattctcctgcctcagcctccagagtagctgggactacaggcacccgccaccacacccggctaattttttgtatttttagtagagacggtgtttcaccgtgttagccaggatggtctcgatctcctgacctcatgatctgcccgccttggcctcccaaagtgctgggattgtaggtgtgagccactgcgcccggctccaagttttcttttataccaaattgactaaaatgattttgtaaaaatttgggggcatctcttttgataggtgcattgttcaacaagcatctttgggacttttctgaatacttgagaggatatagtgtttatactgaattcacatggtactccttcagtgagaaaacactttccattgtagcctaggagacatgagtggggagaaaaggacttaatgcttttctgtaggatagggcctactatagagggcctgaaaaggggatttcatatgactatgtccatgctaggaatactttggatgctagagtttcaggaaacataataaataagaaaaaatatgcattttaggatgtgaagattcactcactgtaaataaagttgggtgattaaaagtcttgctaggaccagacatttcaggagagtattgcttgctactgaggttataaccaagatacatttgagttgaatactggagaaaatcatgattctttctgaagattatggaagcatcatgagaatcttactactaggaggaaattctcctaaattggcttccagtaatgacccaagcatattttcatagcgagggtccttgttggactggaggcacataatgcaataatgccaataaactggagatgaggataatgacatttaagtggctttgcgggaacatcaaaaaatacatttgagtgaacgaatgtatttaatacacaactggaaaaattcagttggatccgaaagattggttg

SEQ ID NO: 100478 - DNA, 1092 bp, Homo sapiens
ggaggcggaagttgcagggagctgagatcatgccactgtactccagcttgggcaacagagcaagactcagtctcaaaaaaaaaaaaagtacaaaagtagtaagtcctgaaaattagcaccaactgtaggaatcagagaaccttcctaaaggaggtcgcgtttgatcagaatttagaaggacaggaaggatttggacttctcatgtttggaaggagcatagtggcaggatggaaaggttccctttcttctagagccttaaattaaactttattaaatgcataattacatagtattcatttctaccatgttttgaagtatgtctagctgttgctgtctttccaaatccaagatcagttgtttacttctgagatacttacctttatgcatgcatagccgtcttttatatgtgtgatttatataccaggaagctgtgatttaaaagattgctaccatgatggactctgtggattgtttaattttccctccaagttcaagtcagtaaataaaggaattagtggtggttgtatcttgcagaaaaacaacatattataactggtgtttgtattttcactggctgatggactttccaaacagcatttgacttttgagaactatatgatgacacagattgatactggggaatttaaaatgcatatggatttaattttcctaaagcatgccaaaacctgaaaaagcaactctttgtgttttgtttaaagcaacagctcgtggaaatcctgttatcgttcaatcctcagcagtttgttatagatgcctggcaaggtgggatgcagttctgtatatgtatacatattatctgcagttgtctctcgtagctggagctctgcagtaaatggagtgtgtacagtagtctccccttagtcgaagtttcgctttccagggtttcagttacctgtggtacagtacgctaagacattctgagagagagaccacattcacataacttttattacagtatattgttataattgttataatgttttattcttgttaatctcttactgtgcctactttgtaaattaaactttttttttttttttttaatttgagacggagcttcactcttgttgc

SEQ ID NO: 100479 - DNA, 1335 bp, Homo sapiens
accataagctgatttaaccttcacctctaagcctcagttttctcagctgtaaaatgggaataaaaatgagttctaaggatttaattagaaagaaattagcatgatacttcctgcatcagcactcaataagatttctctttccatgtgatttttcccagtcccccaaaaacattgaagtcacaataactaaaagatttacttaaaatgggagtcttggatatttttactgtctcacttgagactgacagggaacccagttccctaactaattctaagtcatgggagaagggtgcgtgtagagaatgctgtagagaatgcggcagtctttaaaaactcaaacctgttgctgtgtggcaagctgttaacatttagggaccttgcaccacttactctgctggaagagctgggggatgggctgctttgagggtgacagatgtgtcctctgctgccggcgggcgcgtgcctgctctgtccctctgctcccagcaccaggtgcagccattgttctggctggtctctcttcatccggcctcgtctgttactctgctctttctagctcattgtttctgtaggaaattagcattaaaaacccatctgaaacccccatgtccctcaactgcaggtgactgttattggccccagctgccacccttgcgcttgattacttccatatgggtctatgcaaagaagtagtagccatttattgatttccaccacaaccccaacctctattactcaaactataataccctgaaatctattagacccccagtaggctgtatagctcagttggcgctacaactgtgatgaacattttacaagcaaaactaattacacccttttccccacccccatcacctcctccctaaatattaaatgtagaaacaccagagtgtcataagtggaatagtaaatcttttaaatgtctggaaatgaatctgtttctgagtagtaaagcttttagactttggatgggattttatggaaaattttagtcactgctttaatatttcatgccacacccataatattcaagcaaatcgtggcccagtgcccctagggtgggggtagggcacacaaaaattttcatcacttgctttttggtttgttaaatttaatccagtgggcagtatgttaggaaaggggcctagtttaaaaggataatatgttttgtgggagaaaacaacatgcagtcattgttaaatgctttaattttgcattattttgttgtttgttctctgtgtttacacaaataattgttctagtttactcattagaataaataccacaatgagaaggtcgatgttttagacttctttcttccttcatcagtaa

SEQ ID NO: 100480 - DNA, 2276 bp, Homo sapiens
aacatggagaaaccccgtctctactaaaaatacagaattagccaggcgtggtggcacatgcctgtaatcccagctactcgggtggctgaggcaggagaatggcttgaacccgggaggcagaggttgcagtgagccgagattgtgccattgcactccagcctgggaaacgagtgaaactccatctcaaaaaaacaaacaaacaaaaactcttataaaaagttgttttctttttaagcagggaagcctgacttcattggcattttgagatggaggcttctgggcaaaagaagaatttcatgggggtattttgagatgagtatgatcaatctagtcaagagatggggaaggtctaagctttgtctcttgtaggtggaatggagaagggcaaagggtttgaattttggttgtgtggtgtgaagaatgattggtcttaaaacagatttaaaatgaaaagattaaactgatcaatgttttttatgcttttaaaaaatgtggctgataaagcgtttttgtgcttttaaagggagcctggatgaataggctttggtactgtatgtattgtattaaacatttggagtggcaaaataatttctaaaatatttctagcaacttcattttcattttatctgcaggatgaaaaagtaaatttggggattgttgattaaattagcaaaccatatggttgtttgcgcagactgactgctatgcgaggtagctgtgttatttttctttcaggatatgctgttgtatctgatgccagtgttctgaaacacttattttctagtcaacagtaggtgaagcaattatttctagtcattatggtttttcttgatgccttaattaatgtcacaatttgtgaatgctttaccctgctgtttaaaattagtttaatattttaaaagattaaatcttcacatttatgtaatgcttcccaacctcttttcacatcatagcatacatagaaagtattaagttctgattggctgtcccaggctgaggaaatcattatctcagtaaactgataatcattcttcataactctctggcgttggtccctggcacacagcttgggaagttctgtcttaatagaaaagatatagaaacctttctgtactgtattgcagttagttaagaggaattaggaaagagttatagagtctttcttaatagggttttttttttcctttttcgctagaagcctaaatctcaccaaattatcgggtgttatactaggaactatggttataagagtgaagagctcaaggaactcacagacagacaggcacagaaacaaatcacctgtggcacaatatgacaaatgacatcacagaggtgtttatttttatttttattttttgagacagagtctcagtctgtcgcccaggctggagtgcagtggcgcgatctcagctcactgcaagctccacctcccgggttcacaccactctcctgcctcagcctcccgagtagctgggactacaggcgccagccaccacgcctggctaatttttttttttttaatgtatttttagtagagacggggtttcaccatgttagccaggatggcctcgatctcctgatctcgtgatccgcccaccttggcctcccaaagtgttgggattacaggcgtgagccaccgcgcctggcctaagaggtgtttataagaagctgtaagagtccaaatgtgggaggttttatttctgtcaaggtgcacttgagtctaccagggaggacttggagttagaccttaaagtaggagtttctaaagtgccagagacagggaaagcagggcattgcaggtggagagcacaacctgttttataggctttctgcctccttaatatctagcagaggtctcatcttaatataaaagtagatactggaacttaggagtttgctctgatggcagacatggatacttgccctgccagagtgcccatctaccttccatttatgttgtttggattcagtctccactatactatagccttatatttgcatggtgcttttaattttcaaagctttttatccaaataacagcccctcagggataggaaataaaagccagctggtagtgtttttatttttatagaggagaaaactgagacatcaccatcatatcagcatttcatttcccagataagaaggtctttttttcatctcttgattgcaaagggtgctgcccaacaggaataacctctcccaattttctgggcacagcccagagtgctgactgaggcagccaccaggagggcgccagcaaggcagacagcatg

SEQ ID NO: 100481 - DNA, 1021 bp, Homo sapiens
tgaattgagagggtgctgattgtgtcactgaaatgtttgccaaagaaattgtttttctagctgattttgttctgcctccatctttcagtctatttggaaaacacagtagagtacctggttatctttcagagtgtcattgttaaataatcatttcagtaagcagtgatggctgttgatcattttagacttgtgcctatactaagtatttatccatttttctaatatacctggatttttaaaaatattgatggataaaaactttctggattgttgattttgaggaggtataccaagaagagaagggtgatcttggtgtggagccaacatctttgaaatcttggcttatttgttcttactccttaaggcaccccattgccactccttaagcccatgtatttgacagtggggctttttgtcagaagcctctctgattgtcatttggggacttaaatgggctcctacataacagcttctatgcttcaattttctaacttgtccagggtgtgcttcagctgtagactgtgtatttacgttcatatatttgtgaagaaagacaggaactatatagtagaatgtgaagtctctctgaactgtaatcaatgtgttttattaaattcttggtcacaatgtgcaaacttcattgagtcctacaataattaattctttttgcattatttattttgctatagtatggtctctggagctcagcagagctgccatttcttagccatatgacttgggacataatttttgacttctctgagccttagcttctggttaaataaagtggtattggagatggtaccttctactgtcttagtgtcatttaaataagaaaatattttagcaccattctttgcgtgtaataaatattttgttatttctaaatgaatatatgaagatggagagtaatggtagctattactattatagttatttcctgacttgtatttatccttcccagcaagaaagtcttgtcctactcaaatcttgggtaaatatgaaacttgcttcattatca

SEQ ID NO: 100482 - DNA, 1943 bp, Homo sapiens
acaaatgatgcatttcaggccttgtgatgtgaacagaaatttttttatattcttcattacgcagcagctgatagcagcatcacaatttgataggggccaggcacggtggttcatgcctataattcagcactttgggaggcccaggtgggcagatcacttgggtccagcaattcgagaccagcctgtgcagtgtggcaataccctgtctctacaaaatacacaaaaaattagccaggcgtggtggtatgtgcctgtagtcccaggctacctaggaggccaaggtgggagaatcaccctgagcccaagaggttgagactgcagtgagcagagatcacaccactgtattccagcctgggtaatggaatgagcccctgtcttttatttatttatttatttttaaaaaggcagactccatttgggtaggatgtatgtgcagtatacagataacattgctgtttgtttttgaatgaaaatgtttcctgaagccatagcatgagtattggaatgagtatatatgtctgccctcccttcccctcccttgccctcccctccccgtcctgtccatccatcccgtccctccttctttccttctttctttcctgtcttgagacagagtttcactctgtcacccaggctggagtgcagtggcgtgatctcggtgcactgaaacctccacctcccatgttcaagtgattctcctgcctcagcctcctgctgggattacaggcacacgccaccacacctggctaatttttgtatttttagtagagatggggtttcaccatgttgatcaggtgggtctcaaactcatgatcttgtgatccacctgccttggcctcccaaagtgctggaatgacaggcatgagccaccaggcccagccatgtctgtcattttctttgttaacctaatttctaaagattactcatcttttaaacttctttgaaacaagttgtttcatacctgtgatttgtactgtaactcaaggttttttgttttttgttctttgtgtgtgtgtgtgtgtgtgtctgtgtgtttgtcgtctttgttgttgttttgttttgtttgaatcctggggaaccagaggtgttagcctatgttttaaaactcacatttggcaatggtatcaacagctgtcacactgaataattgtcatgtcattataagggtttctgttgctcactaatctgtaggtataaatctggattttaaccacatgtgattggtaaaaattagttcttgtgagagattctatgctgtgtaggccatctgttccctattctcaaacccagaatgaaaagttagccttagaatttgcaaatcagtgaactaagaggtatgttataataggaagatgggctgactgaagtctctggagctaagctgggacctgtatgtgggcactgctggcagaaacataagtgtgtgtggataaactcttcattagtggaaaggaatcttagttttcggctgattttcagtggtgggcatgaccccaaacagaatctgagatgatgtaataatcatctgtgatttgattgtacttataagattcagctaaatcttcccttttttgtcccagtctacttgagatgtaccttccttgaacccttattgcccagctacatcatgaactccttgaaggttggaatatcagcttcaagtttgtgtcccaaacacttagtacagtgcttgggtcatgttagccttttgatgatgttgatcaaatgaatcagcagccgggcgcggtggctcacgcctgtaatctcagcactttgggaggctgaggtgggtggatcgtctgaggtcaggcgagaccagcctggccaacatggtgagaccccatctctactaaaaatacaaaattagctgggtgtggtggcacattcctgtaatcccagctacttgggaggctgaggcaggataatcacttgaacctgggagg

SEQ ID NO: 100483 - DNA, 1018 bp, Homo sapiens
tcaggagcctgaggcaggagaatcacttgaacccaggaggtggatgttgcagtgaacgaagatcgcaccactgcactccagcctggatgacagagcaagacagtctaaaaaaaaaaaaagaggaaagacagcactaccttttattaaacaacttctttctttccccatattcccttctagttttttcttatacatgtgcatactctttccattttattttcgtgagtatacattatatccagctctttccttttacattatatcaagaccttttctgtgttgctatatatttatctgtcattatttcagtggagaagtagacccagaatgtgcattgtttttattaatatcacatgccattgtttccattagattgtgttaccatctaactatcctttgtacaagaacactattgtatcgatttgaaaaatcaactgaaaaatcagttgttttagtagtcattactacaaagttgtaggtacatgataattgaccttttcccagggccaaaggccaagtcccaagccataaccttgcctggatttcattttctttatctgggtagactgagtatatgactttatagtttaaagttctttgactaatcgttaaccttatttggggagatgaaatgatttttatgaaccagtaatttgaatataatgtatgatgaagttttggggctttttttccctttaaattaaataatttagtaaaattttaaaaaattatcttgtttccaaaaacggataattacatataattgaaaatgaattatttgttgaattggatatatttaagttcttaagtcaacttgtttggatttagatggtgacccaagtctaccagcactgcatttagtaaccatttcattagacagatgctgtctacagggtgtgctgttatattatgcattcatcctcagtacttgactgtcctctgggaggccaagtgtctcaaaatcctgtaagcactttcctgtaccccttctcataccaaccatgccacactgtgaact

SEQ ID NO: 100484 - DNA, 1101 bp, Homo sapiens
ttgccatgttgtccaggctggtcttgaactcctgacctcaggtgatccacttgcctcagcctcccaaagtgctgggattacaggcgtgagccaccatgctggccagattaagtgacttttttttttctttttttttttttgagacagagtctcactctgtcgcccaggctggaatacagtgatgcgatcttggctcactgcaagctccacctcccaggttcacaccattctcctacctcagcctcccaagtaggtgggactacaggcgcctggctaatttttttggtatttttagtagagacggggtttcaccatgtgtttgccaggatggtctcaatctcctgacctcctgaactgcccgtctcggcctcccaaagtgctgagattacaggcgtgagccaccgcgcccggccttaagtgacatttttaagagtttaagatttttccctcagcccatcaggtaagctctagtcagcttctttagctggcttcttagtagaagtaatagcaataataatatagatgatggtggtcatgatggcaattataaccataatatattttgtaaaatggtgtgcagtttagaacaggattactagcatcatttcctgattacagaacaggttggagacagaggcagacttaattgcttattttatagagcttgagccactgttttggtgtgtttaagcatttactatataccaaaacatgatatcctttaaactaccagtgggattttgacagggtaacttagatgccttttatcatattaccaagttgctgagattgtaacccagggcatttggtctaatttgggagcatgtttccattcatctctgcagctcagatggagaagggctggggtttagggcttctgacctcaaaccttgttttttttctgtcatgcttgcagggtattttaaataccctgtcctgttgttccctcaacccaaactacctgttaaaattttggttttgaaaatgaggtccctatagctagatcatgctgcctgtgtgtgaagaaagactaacatgttaggaatgcgtggcattcaagtaggtgtctaataattcttctggagaaaagcaaatttagtc

SEQ ID NO: 100485 - DNA, 1117 bp, Homo sapiens
cagctacttgggaggctgaggtgggaggatctcttgaacccaggaggttcaggctgcagtgagcctaggttatgtgactgctcttccagcttggacgatgctgtctcatctttttttacaaaaaaaaaaaaaaaatctgcaatccttttttcctgtgcacaaacagcttccagaaaatagttaaaagaaaccatcaaaccctaaggtaattttttttaagtacctgttggcccaaacagagggcttaattagcggcaactcttagaaaccagattgcgttaaacacatctagctttgtttttttttcttggcccccacaaaggctatgcgcatgccccaggaatatacttcttctttgattgggcacaataagattgttttcttcaaatatttgagagtggtaggaccccagaagaactcttaccaactgatggtgagtgccaagatcttctcatttatctggcagtggcatattccatctctgcagcaaggtaaagccctgggtgctagaagttccttcacagaacctaggtgtcagccagtcatggatattgtcctgtggcttcccataaagaaagctaaatctttgcttcgtgctactcctgagcatgcagttttgatttttgtggttctccatctcaaaacaaaagctgatgggctgactgggcctttctttgcgctgggggaatattaaaaactcggtttttcaaatattaaggtacatggagccaggtggaacccaggctcttttaaagattgatgagggcaggtgcagtggctctcgcttgtaatccgagcactttgggaggccgaggcaggcagatcacttgagaccagaagtttgagaccagcctggccaacatggtgaaaccccatctctactaaaaagaaaataaaaatttgccgggtgtggtggcaggcatctgttaattccagctacttgggaggctgaggcaggagaatcacttgaacccgggaggcagaagttgcagtgagccgagatcacaccattgcactccagcctgggcaacaagagtgaaactccctctcaaaaaaaaaagtactgatgaatagctgggcatggtggctcacacctataattccagtgctttgggag

SEQ ID NO: 100486 - DNA, 1718 bp, Homo sapiens
tgccaccacgcctggctaatttttgtattttcactagagacggggttttgccatgttggccaggctggtctcgagctcctgacatcaggtgatctgcctgcctccgcctcccaaagtgctggtattacaggcatgagccaacacgcccaaccttctgactggtttttaatacaagatagctagatttttatatctgcttctgcattaatcatgtaatctctgtaaaaagctaccattcactcatgaaagagtaaaaaggataaatgacctcttcttgctacgattatgaaaattgttttgacctttccccttctgtccacacatatcccaaagggtctccagggcccccaacggtcccaggaccatattttgagaactgctgagtagatcatggcattcaagccaaggtaagtttatgttttattgtaagagcaataggaagccattagaagagttcaggtctgtgggaagatctgttttaggttttaaatcagcactttggatactacgtgatgaatggactgaaggggttaaaagcagaagcagaaagaatagttaggaggcagatgaagcagtccaggtgagagatgacagtggctaaattctagcaatagagatgggagacatgacatactgtgacatatttaagagctggactgtcagaatttactgctatatttctttcttttctttttttttgagacggagtctcactctgttgcccaggctggagtgcagtggcgcaacctcggctcactgcaacctctgcctcctgggttggagcaattctcttgcctcagcctcccgagtagctgggactacaggcgtctgccaccacacctgtctaatttttatgtttttagtagagacagggtttcactgtgttagccggaatggtctcgatctcttgacctcgtgatcctcctgcctcggcctcccaaagtgctgggattacaggtgtgagccaccgagcccggcctactgctagatttcctctagaaggttctgtgttccgcagacatttagcacagatgtatcaaatgctggaacccaagagacctggctttttgaatcgtaggaaagccattaactagctgtgtgagaaattgatagcgtttttccctgtctcccgaaaaaaaagtgaggtttatttttggccaagaagactaaagttagctgattctccatcagtctcagattctctgagttctctgactttggctgcgtatgtgtggcccaggcagtaatgtgacacacctttaagtggttgggattcagtcgattttgattgtggtaggggtggcttccatacaaaggcaagatgctaatcaaatttaatttaagtcttttctgttcatgtgagaaatactaagctggtggagacctgaaacagatggtgtgcagttggagtagataactatattattctaaataaatatttgctggagctgggaagcaacaatccatatttcattttttccctatttacattttcaggtcagctgtgttgctactgtttttaacttgcattaaggttatcaacagacttggcaattacaatatatctttaaatgttgaaataattagcattggaagagaccctcagcacgtagtgctgtaatgattcttaatgcatttctggtggatagctgtctaataatatcttacacttgaaaaaattttttttttgagtcggagtctcactttgttgcccaggc

SEQ ID NO: 100487 - DNA, 1046 bp, Homo sapiens
ttcctacagggacttactataatcctgtgaccccaggcagagggttaaaatgcctactttggaacataccctttcccatcatctgagcaactgctgaatttgtcaccttgtaaaccacttggatagatctcactccatgaagggcattcatgccacccagcttccatcaaaaatgccactttacattgtgcttggtgattttgcagctattaattcttggatcattccatacattatctctgagtttccatggataaattgttgatagtatacctattttccacagaaaacagatgttaatattaacttggtcaaggtcacatacctagttaatagtatgtccagaatttgacaccaggatttctatcttctaatcatcattcctgttaattaagcaccttctgtataccttgcagtgatttaggcatcatctttaatcattacatgtttcctgacaggtaggtcttactgtcactcattttacatatgttgaaaatgaggcctagaaaggtgaaatgaattggtgaaattcacttgcattgtaacagaatgagaattcacacggaatctctcagtcttcatacctgtgctttttctgcttcattcacttgaaacatgaagaaacactagtgttgtaggttttgggtggtgaaatgaaaagtatcaatctgtaaacagttctctagtggctgggtttggcccactatcaaagcttttggttggtaagagcacagagttcagcgttctgcatttgggctgctctaacttttttattctgccaagtgctgactgttaaaactcatctcactgctaagccttcctcaagtctttggcacccttgctatagagccaggtggtctgaagaaaagctccctctaggttgttgcacactgtacacaacacattacagtgcgagacaactgtcagttccttcctttccttctcccctacccttccagaaagctgggccccagatggaagagctggaaatgtgtcaactgttctctgaagggcattgagaaaatactgtcaggaagaaaaggcaa

SEQ ID NO: 100488 - DNA, 1062 bp, Homo sapiens
gtcacccagcctggagtatgatggtgcgaacacagctcacttcagccttgaccttccaggtttaagcagttctcttgctgcatcctcctgagtagttgggactacatgtgcatgccgccatgcccagctaatttttttattttggtagagatgggatctctctatcttgttcaggctgctttcaaactcctagcctcaagcagtctgcctgtctcggcttcccaaagtgctgggattataagcatgatgtttaattgtagattttatgtcagtgcttatcaaagaaacaatcgataatgtttacttgttatttaaggtggtgatttaattccaataagcaactttggattttttttaaaactgctctcaacaggcccactggtgtccaaccaagttaatgcaaggttttgtaatttaatatattcagtgcttagtgcattgtttccaaaccaaggagagtagagaggtagcaagtttaattttcaaaacaatgatttctaaaattacaagttacgtggcctaaataaatactatcaaaataaacagtatcaaagggattgcattgttcagctcctcgtgcatataaacttgcttaagaatttgcaaggtacacataatttttctttctttctatactgcacgtggtgaacctgtggcataaaggagtgattttctgacttcgacacctgggtggggttttattctcagtgtttataagggaagtactgccagttcccaatgtttctaattgaatttacctccaataaaagcattctgtgctcctttgtgtatgttaacccctttatatgggataaaaagatgaatcacagcactaatccttgaagctgcagctctccgagtgtaaatctagggaccctgaagattctccaggatcctttctggagatccagaaggtgaaaactattttcataatataacagtagactaaatgcaaaagtagagagaatacaactggcttctagtatgctagatattaaagagactttctattatgctagatattaaagagacttgcaaaatgataaaacagtgctgctcttc

SEQ ID NO: 100489 - DNA, 2023 bp, Homo sapiens
ctttttggctagcatttggggttttgtcaatttatttctgctttaaaacagtcactaattatggtgcctgctaaattaaccctcagtgaagggatggctacttgcatgtattaaaactctcctttcacttgctcatctgtcccttgggattaagcctttgcttatgagcccagcctgcattgcttttaaatttggtgagaaaaatataatttctactttatgttttttttaataaaaatgggaaaagtaaattctgtatatgaaagagatcgagttctgagcttttaaagatgtatagggttttaaaatgtgatttgttcctattgcaggttttctaagtatgagagacagaaaaatacctacttaatgaattatctttttacattttacatcactcccagtgctccttttcaaactcccatgtttcagaataatcacagtttccagaattctgttgcagcttttatacagagctggaaggaaggttgagtagtgctatcagagatgagttggggtccagaagagagaaaccagggcttggaatgactcccacataggcagtagtaattctctcactgactaaagtcttcagaagcgtatgttttaaaattattatgttcaacaaccctttattgagctttgactgtatactaggctgcaaaggtaaataaggtacaatctcttccttaagcatatttacatctggttggggcaagagacaattgaaccagtaattcaagtgcagtataagagatatcattgactcacagaagaagcatttgaaaatcagactgccaaggagagaaaggcttttatcttgtatcatctgctttgtgaaagccctttgaggtgctgagccttcttgtgtagggcctaacactggaaaaactgcctcttcctttcaaggccaacctgcccctgctgcagcgggaactgctgcactgcgctcgggcggccaagcagaccccatcccagtacctggctcagcacgaacaccttctgctcaacacaagcattgcatcgcctgctgactcgtcagagttgctcatggaggtgcacggaaatgggaagaggcccagtccagagaggtgagcagatgagctttgctgtccttgccttcctggaaccgcactggtcctcccctttgcttataaaagagagagaatttgattgctgtggttgtaatgtctcaaactttttttgagacaaggcctggctctgtcgcccagactggagcgcagtggtgcaatctttgctccctgcagcctccatctcctgggctcaagcgatcctctcacctcagcctcctgagtatctgggattacaggcacgtgccaccatgaccagctaatgtttgtttgtttgtttgtttgtttgtttgtttgtttgtttttggagagatgaggttttaccatgttgcccaggctggtctcaaacttgtgagctcaagagatctgcccgcctcaacctcccaaagtgctgggattatatggatgtgagccaccatgcccagcccaatgtctcagactttctgtggttatttttgctttattccaatacctagctgcataatacatctaaaatctatgggagtagcttccagacatgagtatttttcgggaactcttcagatgcctgcacacccggtaagaaactctactctagagaatttatgggtcgactgttccagaagcctcaggagtacagttctgccttttccttgatgctgtttgtagaaagaattggaaaaaaaaaaaaaagaaaagaaaagaaaaaacaaaaaaaaagaaatacaatctgccaaatgccttttatgtcaaacgcatttttttctgatctgagaagttttgaaaaagtatagcaattaattattaatatttgccaatgactcacctttactgagattaaaattaatatgaatttattttagaaaactccctatgagtggctatcaaaatattctatgggttatcaaagaaggcaatatcaacaatagtggataggctttaatgacattttttta

SEQ ID NO: 100490 - DNA, 1032 bp, Homo sapiens
aacccgtaactcagaaaaacggtgtcatctccttagtctctcctttgctttataagggttaatgtttctgtctggttatggatggatttgacctcttttttcatgctggtataagtcagcaatttacatgaggtgcctggcccttgaagacaattcagctcatgcctcatgtcacacctttccttagaggcttcctgtttatgccagcatgtagcaaaatacctaatacatagtaggttctcaggaaatgtctgcatgaacacttgttgacaggatcagatacgcacttctgcttcttctacaggagagaagagaatagttttgatagagacacaattgctcctgagcctcctgccaagagagtatgtaccatcagccctgctcctcggcacagtcctgctctcactgtgcccctcatgaatcccgggggccaattccatcctacccctccacctcttcagcattacaccttagaggatattgcaacttctcacctgtatcgggaacccaacaagatgctagagcatcgagaagttcgtgatagacaccacagtcttggtaagcaaccgaagcagcatggtaaattcagactggattcttggatttctttccaactcaatgataaagtcaaataatatgattgctttttcccactgattggataaaacaatattatacatagactattagaatcatagttgatcttatttgatatcaatctcatttgataccttgttgctatgatatgatagaagtacagctaggtgtggtgactggtgtctgtaatcccagctcttagagaggctgaggtggaaggatcacttgaagccagtctgggcaacatagtgagatcccatctctacaaaaaattttaaaaactagccaggcttggtggcatgcgcctgtggtcccagctactagggaggctgaggagggaggatcagttgagtccaggaagtcaaaactacattgagccatgatcttgccactgcattcagcctgggtgacagagtgagacctgtctaaaaaaga

SEQ ID NO: 100491 - DNA, 1028 bp, Homo sapiens
agagattgctttttagcccacatactcatgtttcgtagttttagaacacaggtcagtaacaaacttctaggtaattcaaccccccaaaattgtttatattccaaaattattttgcactctgaaagatagcagccttcctcatctcatcaaaattcataatttctgttagaaatgtgtgtgtgccttattttatggttcagccacagcaaatttacagtgctgcagaccctagggatacaacaaatgctgctgcaacatgaaatagtagactgttggccagaaggccatgcatctgaggttttgtccaaacactggaagccctggtagttattgtcctctttaggtatgtcagcctcaacaccaatgtccttcctagctgatggagaaacagacagcaataaaggttttaaatgtaaacttgatattcctaaatctgtactttaaggaacctgaattcctcatattgcgttggcctgatttacagtgttggttgtttgaatgttcttatctcatctctgcctggccccctctgtgactcaggcgctgaattgcattatggaaatggtagagaaaacaaggcgctctatggcagttctgcggcgctgtcaggaatcagatcgtgaagaactcaactactggaaaagacggtacaatgaaaacacagagctgaggaaaacggggaccgagttggtctccaggcagcacagccctgggagtgcagattctctcagcaatggtaaggggagagtctacgggaaacccaaaataaatgtcagcctttagagcccaccaatctgtcacagaaggcgttttctacttgactttaaagaaaggtggtactcaattgtggatttagggaaactcaggtgattatgaaaagtaaatgagaaaatatatgaagcccctggcatgttttggtgggtggcgcaggaagggggtttttttgttttggatagacaggatctcactgtgttgcccaggctggccttggactcctggcctcaagcaatcctcctgcctcaccctcc

SEQ ID NO: 100492 - DNA, 1070 bp, Homo sapiens
agcttgcagtgagccgagatcgcgccattgcactctagcctgggtgacagagcaagactccatctcaaaaaaacaaacaaaaaactccaaaaacagacaaagctaatcttctggtctccctcactttctgaacatttgcagatccctgtgcgactttcggacagggagaaaggcttttggagacgtagctaaagtttacacccaagccatacctcattcatcagtgagtccacatgtgtgcaggtgagaagcatagagtacagagggagctgcagtcgtgagccagtggttgctgagccaagatacagctcttgctggagtcattcaggtcttgctggagtcatttaaacatggctatgcatgaccactactcacctttctcaccttttgcatcaaggattagctctggggagcatgttttctgatttgcctgagacagtccagtttatacctgtgtcctgttaatagttattactagcatttccctcattctcaacaatgaaggcaatctggatgataagttatattgtcattctaggtttggtttctgacagcactatcaacctgatttagatagtatattttagtgtcatttatatgtttatctcatgtttattacttgtccattttagtatagtatgacagtataattcatatcctaaataaatgtactatgcaaaatgtgaaccaaaatgactccaaaaagtgccactggtctgattacatgaggagcttgggcacggttggcttcatcaagaaagtcttactgtgaaattagttctttttgtttgtttgtttgttcgtttttgtttgtttgttttgaaatggagtcttgctctgttgtccaggctggaatgcagtgcacattcttggctcattgcaacctcctgggttcaagccattctcttgcctcatcctcctgagtagctgggattacaggcacctgccaccatgcctggctacgttttgtatttttagtagagatggggtttcaccatgttggccaggctgggctcgaactcctgaccttgtatgatccacccaccttggcctcccaaagtgctgggatt

SEQ ID NO: 100493 - DNA, 1044 bp, Homo sapiens
ggtggcgcacacctgtactcccagctacctctcgggaggctgaggtaggagaatcacttgaacccgggaggcagaggttgcagtgagccaagatcgcaccactgcactccagcctgggtgacagagtgagactccgtctcaaaaaaaaaaaaaaaaaaaaatctgtgtgcatttatgttttatacatttatattttagggggtactgtaccttaaaaaccgatgtttataggggaaaaaattaggacataataggtaagtaaaaagaagaaagtgaagatcacttttaatctcactactttgaaatactgttaatttgttcatttgatgggggtgtgtgttttaaaactaaatatttactgtactattttataatctggtttttagcccttatatgagaatttttttatactaaatgaaatatatgtttgagtctaagtggtgaatgagaaatctgatcaaaaataaaactgctgatcatagacagcttctgaccctatgctttttatgtctcttctgcagattctcagagagagttcaacagcaggccaggtacaggatacgtacctgtggagttttggaaaaaaacaggtatgtgtctgactgcttgtaggtcatacatactcactaatttgtgggagcagagaacagataactgggtgaatggttggtaactgggtcctttggttgtataataacttgctcctcatagagctctaggctcctgcctctcctgctctggcttgtcctgcatgtctcctgatacctgtcttgttaatttgcaggtcaggagtttggaatagctccctccagtccctttcacactcttccactgggtcacgctgaggcaataagtacctgttgacatgtcctgtttctgggcttgcaacagagttcattttgcctgatctcttcactggtggctacagtatactgtgttcacactactgccacatttgtgcccaaattctgctctgggcacagctctgtaatccccctgtgctttctttcaccttctctgtgcctaccatagtgaagactgttc

SEQ ID NO: 100494 - DNA, 4323 bp, Homo sapiens
cctgccctaggctggtgctgtgtaaggtattttcacacacacatctcatttcactgttcctgtcatcttgcagggaagtagttttcttgttttacagatgaaggaaactcagaaaggcagtgtgtatttctcatagttaaacagcagtagagggcggagttgaccacaggtgtatgtagttccaaagctggggttctctacatacagccccttgctttactgtgcagggaatgaatggcaagcctgcccctcaatcccagcaaccactaactgatgcctgtgtcttgcagaactgctggaactgtggccgcaaagccagcgagacatgcagtggctgcaatatcgcgcgatactgtggctctttctgccagcacaaggactgggagcggcaccaccgcctctgtggtcagaacctgcatggccagagcccccacggccagggccggccgctgcttcctgtaggcaggggctcctctgccaggtccgccgactgcagcgtgcccagcccagccctcgacaagacctcggcaaccacatcgcgttcctcaacacctgcttctgtgacagctatcgacaccaacggactctgagccccggactctgcttaccctgatggctgctcagcaccacagagtgcttgggctgagggactgactgttggaacccgtgcatgtagctgccgggtcatcagcaagaaatgaattggaggcaggaagagtccaagcctgaataataacaccccacagcctctctgtgcacttgctgtctgcggagccagtgtgccattctctgcacatgggcagccagcctgagctgcctcctccatggctttcctggtttgttcctctctccactgaagctgacttagccggccccttttcagtgtagaccaccagctcccctccccatctccttgagtcagcagactgtccaatgtgctcagccaggctggaggcggcaggcggcaggcagcaggctgtggaggaggcccctcggtcagggagcggcctgcctcacccctgaatagctccttcggccccatctccatcctcagcagatgacactgattggcctcacggggacttgggtaagcaacaggcggcattcaggactcttctcaaccctgctgttcagacttgataagatctcagagtccacaggaaagaagtcactgttgcaataaaagcacccgtagtagcaaaaacataaaacaaataaaacttcccccacatcacagatgattttggacaagattttccaaccttgctggctactttagtttgggacctgttttttttctcatttgattttgcttgtgcagaaaatagtttccagcacatggattgatctgagagagaatgaggctcagttgtggatagtctgttttctctgagcatgttggccaactagtatcgtcaaattattgagtggatcatctcttggaaatgcagaacttctgccaccacttggctatttgcacagtcatcttgttctgtgtccttttatctctcagaccacacacatctggaacgctgtgggcatcttctgcccatgggctccatttggcacctgctgagccacagttgtcctgctggatgtgctgtgcaggttggtaggacttgcccccactgtcaaggcctggtctcatctgaaaagccctcctggacctcaaagaattcttcagacctcatagttacaggtcattatatctactatgttgatttatcatcaggcacacaacttctgtttccttctcttgtgttatctgatagcgtccctccttgagctcatcagaaaggttttatgaaatgtgaaccattttgggaaaagctgatcaatttttcttcctagcttcccattttcaaatgggacatcactcatatccctttcagaatgttaggaactgcctcccacattcttccctgtctttttgggttttgttttttgttgttgtggtggttttttaacacaaagtctcactctgttgcccaggctggagtgcagtggcatgatcttggctcactgcaacctctgccttccaggttcaagcaattctcctgcctcagcctcccgagtagctgagattacaggcgcccaccaccacgcccagctaatttttgtatttttagtagagacagggtttcaccatgttggccaggctgatctcgaactcctgacctcaggtgacctgccttggcctcccaaagtgcagggattacaagcgtgagccaccatgcccggcctgtctttttggttttgatgggagtctgaggaccccgacccctcctgctctccatctttgagcctctggcatcctctcacacccagaaatcagttggagtaagtttaattggccctgctccagctggcctttgaagcacaagtttaaatctccaccttctgtgcactgaccagagtctaaaataaaagttgtcagtaccataaaggaaaagggatccacacaggtagccttctccttggatacaggtacatcttactgtaagaatttcaagtcctggctgggcgcagtggctcactcctgtaatcccagcactttgagagaccgaggcaggcagatcacttgaggtcaggaattcaagaccaacctggccaacatggtgaaaccctgtctctaataaaaaaaaaatagaaaaatcagccgggtgtggtggcacacacctgtaatcctagctactcaggaggctgaggcaagagaatctcttgaacctgtgagccagaggttgcagtgagccgagattccaccactgcactccagcctgggcaacagagcaaaactctgtctcaaaaaaaaaaaaaaaaaggcaaaattaaagaatttcaagtccctaatttactctaaccaagcattttcagtcttacaaagaaatctagtgcacgacacctttaaaatgcctagatttccattgcctaaagtaaggtgtgaccagtgaaacaacagcagagaatcatgttcctttgctgtggaacacataagccccacagttttccagtcagcctaatacatgggtatcccccgaccccatctgcctccttaagccacagtccttggtggggaactctaagggggacggagtcagtaccccggacagggccacatttgcatgagacatggctgtctcacaggtcacagagccattacaacagcttactagtttttcatggatttgttggattaacaccttaagcaggttttttattgttattttgtttgtttgtttgttttgagacgggagtttctctcttgtctcccaggctggagtgcaatcgcgcaatctcggctcacggtaacctctgcctcccaggttcaagcgagtctcctgcctcagccttctgagtagctgggattacaggcatgcgccaccacgcccaactaattttgtatttttagtagagacggggtttctccttgttggtcaggctggtctcaaaccccggacctcaggtgatccccccaccttggcctcccaaagtgccaggattacaggcatgagccactgtgtccggtcttgagcaggtttttaaaatctccagtggccataaaactagccagggtagctcatgcttttactggttggaataaggagccaaaaccaacaaaataatatttattagggctcgatgcccatttctgtggctaaggcttaggtttggtgtgcagagcctggcctgctcttgtgggctgtggttgctgtgacagtttcgttttctgaatctttgtaatgctcttccaccctgctcgtgctgcccagaggctgatctgcaaacctgggcagtattccacactgaagctcagtttgcaaaccttctgctgtgttaattctggtcagtttcacacagaagtcacgagggcctctgcccaggaccttctattcacatttcaagaatccctttctgaaattctccaactctctggtcaggaggaggagcaccattggggcggggtaggcagctagaggcgcaggagcgaatccaggttccttgcgtggttcccagcctctgctgacagcacctcagctaccaggtggggagtggaaattcagcctgcttagaggactgacctctacagttcatatttgcagtgacataaaaggcaaagaggagctggcatggtggtacagaaggtatcagtcaagcgcaggctcttcagaaacctagaaactaaaaagagatgcaacatgtgactggccatcagccagacatgtctagggtgagaccagtgctcagcaccacccgccaaggaacactgatgagttgtgggacattatggtcggccaagtgaggaatgattgcagggaccagaga

SEQ ID NO: 100495 - DNA, 1014 bp, Homo sapiens
cctaggcagtccacttcgggaggtgggggcactccacactggggggccctgcagctccagggctggtgctctagcagatccgctcaggcacggttgggtgaccgtggggtcaccgattgcgtagattatttctagggcagtgctgggttagaaatgtctgtctggaaacaggacacatcttgccaccacaagtccacacctggccttggctgctgcccgctctctgcagcgtggatttcctttgcccatttgggccagaaggtcaccaggagttcatcactgcttagtgtcaacttgacatcttcagcttccagacagaaaacccatgctttactttgtacagccctgtcccagagttagtaagcctcggcttgtcacctgcttgcaaagggtatagacatcattctgggtagttctagaggatatcgcaacaagtgcgtttgaaggttcagcacagctggaattgtacggtagtgagctcttcaaaatgaaaacagaatgaccggatggccatctgtcctggaaactgtagaattgaataaatcactgaaaatagaacacttcttggaggctttcttcagaactgaactagaaacaaggtttccaggctcccaggtcagtagaccaaaccaacttccttagatttttttttttaagctgtttgcagaaaactgggtggtagcgtgtctgaaccaaacggaagaatagccagcggagcatggactgttccagcacgggccagatggccagctgtcgagagcagccctgcccagattgcggtgggggctgtgccagcggctccgcagggcccttccaactctggagtgtctgtagttcttgtgaaaccaaaacgttgactacctgcctctttcctcgggcatcgacgtgctcatttccaaagatgatggtgcaggtgaccttttccatcgtgagctaagagaaggttaggaggcctgaggggcgggccttgtgtcccctcctccccctccacagcccctgaggtggagcttccct

SEQ ID NO: 100496 - DNA, 1024 bp, Homo sapiens
cctttttattgactactttaagtagaacaaactaaatacatatttaacagttttggttcatttatacagtacattaaataagttatgcacagagttaggtaacaaaaattcctatcagagtaaaatgacaaagcacagaaaaaccagattctaatgcattctgtgggtggtgtcacattcatcatccccctttaaaaaccacgcgtggaggcttcgttttctatttatttacattattggctttcttttgtgagcggagcctttgtagcctcgtcaggaagttggaaagccacgttaaggggactgaaggcctcttggcgcagcagccctttcaatcattcgcctaatgcttattgctgcttctctgccgactccaaggtagggatggggctgtccccaacagacaccagcgcacatgccctatttggtataagcatcactgagtgtacactgggcagccgtaggctcgaccagatggggtctgtgagggaagctccacctcaggggctgtggagggggaggaggggacacaaggcccgcccctcaggcctcctaaccttctcttagctcacgatggaaaaggtcacctgcaccatcatctttggaaatgagcacgtcgatgcccgaggaaagaggcaggtagtcaacgttttggtttcacaagaactacagacactccagagttggaagggccctgcggagccgctggcacagcccccaccgcaatctgggcagggctgctctcgacagctggccatctggcccgtgctggaacagtccatgctccgctggctattcttccgtttggttcagacacgctaccacccagttttctgcaaacagcttaaaaaaaaaaatctaaggaagttggtttggtctactgacctgggagcctggaaaccttgtttctagttcagttctgaagaaagcctccaagaagtgttctattttcagtgatttattcaattctacagtttccaggacagatggccatccggtcattctgttttcattttgaagagct

SEQ ID NO: 100497 - DNA, 1018 bp, Homo sapiens
cacccagcctagctgtggctgggactcactggctatgacagtgctgaaggtggtagccccatcagggaaggggccatgaggtccagagaggccaggcacttcgctgggcagatgccccctgtgagttggcctcacacctccggggagggaggccagtcccggacaaggagggatccagaccctccctgcccatcaggtctcagtaccctcctgcctgtgccaggtttgcgtgcccctgctcttggcactgccaccgctgctctgatgggcaagaggcaggggacccactcaagagatcagtgcccgggctgggagatgctgaccgtccctccttggcccacaggagtacgagagggcctccaaagtggaccagtttgtgacgcgcttcctgctgcgggagacggtgagccagctgcaagcccttcagagctcgctggagggggcgtcagataccctggaggcccaggcccatggctggcggtatgtaagggtgctgtcaacctgtggggctagtgcacaagcgcccattgtacccccattccaaatccccacagtcccagcatcctggagcctgcattttcgggcggggaagccatggcagggtagccatggcggggtgaaatgagactggctttggggctaggcctcggagtcccaggaggcttgtcttccccacccaggcttatcccgtcctggggccccagtcctcggccctgtgagcctcacttcctctaggtcagatgcagagagcgtggaggcgcagagcaggctctgcggcagccggcgggcaggacgccgagccctgaggagtgtcagccggtcatccacctggtcccccggctcttctgacacaggtgcgcctggggtggggtgggaggcctggccgaggcaggcaccgcatccccccttcccccagggcccgctccttcactgcccctcacttcattctgagcacctgcgggacctgagaggcccctgcctgaccctgcacgggccccacacacagggcgcagctcag

SEQ ID NO: 100498 - DNA, 1056 bp, Homo sapiens
taatcaacctctctggacctgttttctcatctgcaaaatggggtcaattatggttcctgtaaattgttacaaaggttaaatgaggcctggcatggtggctaatgcctgtagtctcagtactttgggaggccgaggcgggtggatcacctgaggtcaggagttcgagtccagcctgggcaacatagtgaaaccccgtctctactaaaaatacaaacattagccaggtgtggtggcacaggcctgtaaacctagctattcaagaggctgaggcaggagaattgcttgaagctgggaggcagaggttgcggtgagccaagatcatgccgcttcactccagcctgggtgatacagtgagactctgtctcagaaaaacaaaagactaaatgaaattcttcttgcagtagtgcttggctctgagtgggtgcttctgtctgttctctggttgaaagcaacagaaactaatcatctcaaatacccaaaaaggaattttttgggaagatttcatggagatagaaaccctggcctgtctgagaatgaaaagacccagcctcttctctgtccctgtctcctagctcataagcctggcccaggaggtcccatccgatggctgagctgaggcaggtcatggcaggagatgaagtctctgatggatggggcttctggagtctcctcggagagggcaggcacctggactgcagctccccaggactcccaccctgatgcgtgtgtgtgtgtgtggtaggggttaggcaattctcaggacatctgtgactcctgggtgtacaagtgggcaggccctttattgtattacacttgacgatagatggctggtaggtctggcatcgagagcttacgtgccagaccctgggctgagtcctatgcaggaattaactcctgggacgttcttgcagctccatgtgctgagtttcatctttcctgtttgatagatgaggaaatggaagctccaggaactgacggttgttgaggagcctcagaatcccatgctgggccatgcagggcctagcatttgggcagcctccctgcctctctgccacc

SEQ ID NO: 100499 - DNA, 1041 bp, Homo sapiens
aaacagaataaaacagacaaaaatccctgccttcgttctcactggtcacagtgatgtatgaagggcagctctattgttatgatggtttacagatgaggaaacaggcccagagaggtcaaggggcacagctacaaagtgggagccaggatttgaacccaagcccctagctctataaccctgagtcaagactgtggaggatcccacagcacagcagatgcccactgcctcacagtggatcccccaccatcagccactccactcaccagcttggtggcatccatggcagcgagcactgcacggttcagcgattccaatgcagccagcaccggccggtagacacccaggtgctctgagaagtagtctgcaggcagaagaggtgctcaagggttcctggacccccacccatctacccaccctgggattctggccccctggaattcctcagcagccaagcaggccttatatcctgagcccagcccaacctgtcccatcaggagaccagcaacagtcccttgccacacgtaccctggggcccaggggccacaggagaaaagagctcccatgggcctactcaccacacagtttttctgtttctaaattgctgcagggaaaagagaaggcgcccttcagacctgggcctggtaaactgggactaatggggccaatgccccacatcccaccccaccaactcccagcttagcctaacaaggccacttctgctccaccccagattaagttgctcctgtggacagagtccttgcagggttggagaatgggttctactgcccccaccaatcactctaagggcaaagattcagacccattcttggctaccaagaggatctcaggccaggggaagatggatgtggacacaggccagtgagaagtggtcagagctgcgaaggggaagccaggtgcaaggcaatgaagtccagggacggcatggggtatttagttgtaggttagggagggtttcctagaggaagagctgcctaagtgaggccctgaaggacaaggaactgggtggggagtctggccagg

SEQ ID NO: 100500 - DNA, 1181 bp, Homo sapiens
tatgtccctttgtcctctaggttttccgcagagcagacaagaatggtgagtgtggcttcccctgggtcccacagtggggcagggtgggaggcatccaggaggcccagggagagttgggaggttgggtgggaagtcaagagttgagacaaatcttgggggcccaaaacaggagaatcaatcaaggcacttcccagaggaagtgctgttctcagccaagtttggcaggatggagagtggagagaatgtggtttggccacggactggagataggggctgactttcacacagcaccctggcatggtgatgggcacttcctgtacgtggccctctgttgtcctcacaaccaccagctagattggaattcaccctatttcataaaggagcagagggccagagaggtgaagcaagttgcctaaggtcacacagcctttaattgataggctcgaacttgggtctttgcagcatttaatcccaggctccttgtgtgaggcacttggaagagtgaggtaatggagatgaggcctttttggagattttactcaggtttttagagggctcagtaacttgtcatgtgaccaaccatctggaccagggaggtcttggaggacacaactaaacccacgccttgggcaaggataaagctgggtccagtgccaaaggagtcggctcctcctgccttgggtcctgggcagtctcagaccctggtctgggagaaacttggaagctaaagcaggagccctaggggacccatccagcaacaggctgctccccctagatgacttggagcagcccactgtgccctgtgtggcccgtggagggtctgagcttcgcagtcagcctggggctcctttcatctgggtcttcacgccctcttgtgtttcatcctcctagagacggggtcctgtccccactctttgccccttctccttgggtctcttcaaattgatggggattgtttgtcccaacccattgatcaggacacatgctctcacttggaccagggagttctgtctggggaggttcagatcctcccccgggtcagctccccgcacccatctgctcagagacctcacacatcattcaggccaaatcccatgtctttgtcccacataagtactcccagcctctgcttacatgcccctgtgatggggagctcattcccttctgagccagcctgctgc

SEQ ID NO: 100501 - DNA, 2658 bp, Homo sapiens
ataaattcccagcaccaggcctggagttgtgttgaacattttacatggaatcgttcccggtagccattattaccttgggattcaatgggtagagtgatttcattatacagatgtggaacttgaaactcaggcgtgaggtaggttttgagtgggtaggaggttgggaggacaggagtgactaggcaggtgtgagccctgccttgtgagctgttggagtgagtgaccccctagaagtcaaaggtcatgtggtccttgactctgccaaccctggcctacgtgacgtgtcaggaccttcgtagcattgcagaccctgcagagcagatggttatggtgatcaaagcccctcctgagacccagctccaagccgtggactcttcggaggtgagatctgggaactccgggcccaactgggctgggctgggctgggctggtggtcacctgggcctcagtttaccctgcctgctgcttccacccagaactttcagatctcccttaagagcaaacaaggcccgatcgatgttttcctgtgccctgaggagaccgtaggtgggatcagccctgggaagaccccatcccaggaggtcacttctgaggaggagaacagggccactgactctgccaccatagtgtcaccaccaccatcatctcccccctcatccctcaccacagatcccagccagtctctactcagcctggagcaaggtgggtgatgggtaggtgggtggggtggggcagggcccctcttctggggggtgggcaggcacgacagcccctgccttcctccctgctggggcatccccggcctgtgatgctccccgtctccccagaaccgctgttgtcccggatgggcagcctgcgggctcccgtggacgaggaccgcctgtccccgctggtggcggccgactcgctcctggagcatgtgcgggaggacttctccggcctcctccctgaggagttcatcagcctttccccaccccacgaggccctcgactaccacttcggcctcgaggagggcgagggcatcagagacctcttcgactgtgactttggggacctcacccccctggatttctgacagggcttggagggaccagggtttccagagatgctcaccttgtctctgcagccctggagccccctgtccctggccgtcctcccagcctgtttggaaacatttaatttatacccctctcctctgtctccagaagcttctagctctggggtctggctaccgctaggaggctgagcaagccaggaagggaaggagtctgtgtggtgtgtatgtgcatgcagcctacacccacacgtgtgtaccgggggtgaatgtgtgtgagcatgtgtgtgtgcatgtaccggggaatgaaggtgaacatacacctctgtgtgtgcactgcagacacgccccagtgtgtccacatgtgtgtgcatgagtccatgtgtgcgcgtgggggggctctaactgcactttcggcccttttgctctgggggtcccacaaggcccagggcagtgcctgctcccagaatctggtgctctgaccaggccaggtggggaggctttggctggctgggcgtgtaggacggtgagagcacttctgtcttaaaggttttttctgattgaagctttaatggagcgttatttatttatcgaggcctctttggtgagcctggggaatcagcaaaggggaggaggggtgtggggttgataccccaactccctctacccttgagcaagggcaggggtccctgagctgttcttctgccccatactgaaggaactgaggcctgggtgatttatttattgggaaagtgagggagggagacagactgactgacagccatgggtggtcagatggtggggtgggccctctccagggggccagttcagggccccagctgccccccaggatggatatgagatgggagaggtgagtgggggaccttcactgatgtgggcaggaggggtggtgaaggcctcccccagcccagaccctgtggtccctcctgcagtgtctgaagcgcctgcctccccactgctctgccccaccctccaatctgcactttgatttgcttcctaacagctctgttccctcctgctttggttttaataaatattttgatgacgtttgggccgggttttgggactctgttgggaacatttcggggcgggagaggccaaggttgctggggaaatgcccattctccacttcccttctccctgtccgtgcccgatttgatttgagcctcataactcgaagaaaggtcagcttcctcgctgttttggtcctaactcaaaagcagatccagtaaaggtttttgttgtagaaagccaagaatgctattcagtgctgcccgaagtgcagagtaatgagtggcctctcctttccccagccccagaggccactctgctcagtttgctgtcttccttccagacgtttctggacattagtaaacatgtaacaaatacagtgggctggttctgtgtcaggtatttaacagttctggggacacgggtgttacctcctttcatggtgctctcagggtctgaaagaggagatctgcataaatgagaaaatcgggaaaggcgttctggaatgggtggtgcttaagctgagcgctgtaaaataagtaggagttaaccagaggaagaaaacaccaagc

SEQ ID NO: 100502 - DNA, 1067 bp, Homo sapiens
tgtggttttttgggtggaggggggtggtttgagacagggtgttgctctgtcgcccaggctggagtatggaggcacaaatacagctcactgcagcctcaacctcctgggctcaagctccgtacctgtagctaggactacaagtacatgccaccatgtctggctaatgtctttgattttgtgtagaggcagagtctcactgtgttgcccaggctggtctcaaactcctgaggctcaagcaatcctctggcctcagccccccaaagtgctgggattataggtataagccaccaagcccagcctttttttttttttcatttgacagcatgtcttggaaatgcatgtgtgtgtgcatgtgtaatatttcgtggcatgtcagtcccatcatttgtttatcccgccctggttgagggacatgtaggtgtttatattcgggccagacttcaagcccatgacactctgatttggagcccagctgaggagccagacccagacagaagcaagggcttgcctaggcctcacagaacagaggcaacagcagactctgtcctgaggcccagggctcctggccagaggggccaatcgctgttaaccctaccctccctggtgcctccccacaggggcagccacaccacagtgggcgtcggcggacggcttgaggggttgacccaggacctccgacagctgcaggagagcgagcagcagctggaccacctgatgaatatctgtactacgcagctgcgcctgctctccgaggacactgacagccagcgatatccttggattggccgtagggtgtggaaggcaggcttagcaggcaggggctccacccaagtgggactagagaggcttggatttaagagagagctctgattttggttgcaagtcctggctcagcattttctcactgttgtgacactggataaattgcttaacctcttggcctcagttttatctataaaaggggaataataatatccaattctgaaattgtacagattaaaaaagaaaagtggctaggtgcggtggttcatgcctgtaatcctagtgcttcaagaggctgaggtggg

SEQ ID NO: 100503 - DNA, 1014 bp, Homo sapiens
gtgattcagacacctctgagggtgagatagatacatctgcagaaatgtgtagggagagacagaatgtggcaaaaggttgggtttgaggcagttcagagggagaagaggtgacacctcctagctgatgcgtaaggtttctgcccacagaggtagagggagcaggcgtgaagtggggagggtgggagggatgcaagggcagtctagatttctgggaaaacgtgactcgggttcctctagagaagcagtggcagatgagagtacaaaggcaatggggagctggaggaaggccttaagcaggggcggcggcatggtaaggtttgtaggaggactggctgcagcagaggcagggagaccagtgtggagtctgctcagcagcccactgggaaggtggtgatcgccgtggtgatgagcagttcttggtagctgcatgtgaggagggtgacaggtcaggaactctagctcaggaaaccctgtggatggtggaggggaagatcagtctggttttggtccgggtacttttgagcagcctgtgagacctccaggacagtcccaatcctggagtgtctgaactaagccagagtgcttagagcttgggttcttcctcagaccgtcttgggtacaaatcctgactctaccacttcctgggcctccctgggctttagttgccttatctggaaaatggggccatttttatacagccagtccgttgaatggaatgaactaatggatgcaaggaacttgatgagcaccagctgctaccatgcgtatagattagtcaaaaaccagagagaaggtgatttagccaagggacctatgtaatcagtggcttagctgggcatggtggctgactagtcccagcacgactacagtgaaggctgagatgggagaattgcttgagcctaggagtttgagaccagtctgggcaacatagggagaccccatctctacgagaaatagaaaagttagctggtcttggagggatgcgcctgtggtcccagctgtttggaaggctga

SEQ ID NO: 100504 - DNA, 1272 bp, Homo sapiens
gccgccgccgcctgtcacccgggccgcgcgggccgtgagcgtcatggccttggccggggcccctgcgggcggcccatgcgcgccggcgctggaggccctgctcggggccggcgcgctgcggctgctcgactcctcgcagatcgtcatcatctccgccgcgcaggacgccagcgccccgccggctcccaccggccccgcggcgcccgccgccggcccctgcgaccctgacctgctgctcttcgccacaccgcaggcgccccggcccacacccagtgcgccgcggcccgcgctcggccgcccgccggtacggaccccagggacgccgcgccgacagcgccgcctgtgccccccgcgcagacccgggagggcgccgtgtttggcctggaggcggcagggggcgggggaggggttgactgaggcgcccaggctgggcggtgcagagccggggttgggcctccgggccccgccctggggtgcggggtgacctcgggccggtccctgtttgctgctctgtgctctgcgcctcagcttcctcaccggagcctccccagcgtcggactcagtgataataatagcccacgtgtattcaactggcgtttactgcatgccaggcctttgggcgacttcaagccagctaaaactcacaaccccgctgtgagctgtgttgtcactgtgcccatctgacggaggaggaactgaggcccagagagggaaagtgacttgcccctggtcacacggctgcaggtggtggggctgggatttgaactgaggcctgctggcttcagctcagaatttgcatctcggtagtgagcacagctgctaggggaagtgaaggcggggcggaggaaagtcctggggcctaaccgttggtgagccattgaggagaccctccttcctgcctcgatgctgactgccaggtgcaggcctggccggccaggcctctggggacagccctcctggctgggaggccttctctgcaggggcggggcagctggaccagctgctgatcccctccctctgcctgtccttccatctgccaccctccaccctcccaggccctggttgccatggaacctcattaatcaggcaggccgacccctgagtctctgtagaaggactaggtgggctgggcctctgggagctggagaggaggcccccagtgccaggagagaaaatgtctcagggagatcctttaataaagccctccctgatcgctgagctcaagacgaattcagactggagggcccagaagaggcggctgaattccagtgg

SEQ ID NO: 100505 - DNA, 1024 bp, Homo sapiens
aggtggaggttgcagtgagccgagatccagtaagcccactctctctagcctagccgacagagccagattctgtctcagaaaaaaaaaaaaaaaattagtacagaaatcaatgaaattgcaaacaggaaatcaatagagaaaaggacctaaaccaaaagttgattctttgaagagataattaaaataaataaacccctagccaggctctctaagaaaaaaagagaaatgaaacaaattattaatatcaaaaacaaaagagggacatcactattgatcaccagtaattcccatcattccctctttgcagatcaacatgtacctgttgtcacgcgtcctgtttgccctgagccgcctggctgtagagaagggctacatccctgaacccaggtgggacccgttcccgctgctcactgcggtggtgtgggggctggtgctgtggctctttgagtatcaccgatccaccctgcagccctcgctgcagtcctccatgacctacctctatgaggacagcaatgtatggcacgacatctcagacttcctcgtctataacaagagccgtccctccaattaatgcagccctgaggtgtctggctgtggctcaagatttggccccatgcagaccctcccaaaggatactgccttctcaagatcataggcctcagactccaactggtgttatcccagggttccgtttgctgaagtaaaaacactgattttaaaatcccagtgggtacctttgtatggtggcacaagtggccgaatcaggctgaggaatctacggcttggttccagctgtgcagctgacttctgtgagactggggccagccacactactctctaggcctcaggggtcaaggagctcagaggagggccctgaggtctctttccggtgggtatgttcattcttcaactgttcttatgtcacagagggctccttgctggtgggcagtgggttgtaaatactttttaaaaaacactaagttccttatctcagatgctgttctactggagaagttctagattc

SEQ ID NO: 100506 - DNA, 1069 bp, Homo sapiens
aactgcgcgggaggcgacggcggggcggtctggaacagccgcggccagggaggcggcttggcggcgcgcggggcccgggacgggggtgcggtcgcagctgcgggcaggagggcctcggcggcctgaccacgaagaacttctgcggagcggactgtatgcctcgtgctaggacgtagtctcaaaatcagaccacagcagcagaggcgccacctgtgtgcacagcctggactcagagcttagggacccaagccagcaaacacctggcgcctgcagtgcgcaccgtggccggtgcagttttacaaattaaactgacaccgtgggtgctggcgcggtgtgcccggccgggacgcggtgttcccagacccaggccagcaaacgctgggtgccgacagactgttccgtgctctgcaagaacctgggatggggttggtgctcaggctcaaaactgtgggctttggagacagcaaacactgagcacctccatgtgtgcatctgctgggcgtcggggaggaagggcagccttagcgactcggggccatggcgcagaatagatattgtgggaaatacagaccaagaatggtcttggaggagtgggatgagatgagtatacagatagggtgcaaactcgaagtactggactggcgggatgaagctgaagctttgagtcctgcagcttcctaggagatctcagccactccctgcactttttaattttttgagacggagtctcactctgtcgcccaggctggagtgcagtggcgcgatctcggctcactgcaacctccccctcccaggtttgagcgattctcgtgcctccgcctcctgagtagctgggactataggcgtgcaccaccacacccggctaatttccttttttttttttttttttgagacagagtcttgctctgttgcccaggctggagtgcagtggagcgatctcggctcactgcaacctccgcttcccggggttcacgccattcttctgcttcttctgcctcagcctcgagagcagctgagactacaggcatccgccaccacgcccggctaatttttttttttttttgtattt

SEQ ID NO: 100507 - DNA, 1076 bp, Homo sapiens
tctcgaactcctgacctcaagtgatccacctgccttggcctcccaaagtgctgggattactggcgtgaactactgtgccaggccagaagtcctcatttaaatgggcttgaacaattaggaaatgttctgtcacagtatgagatggtcagaggagggcggctccagggtttgttgatgagcagctcagtaacgtgacccggaacccagggtctttccatctctggtctgcctgcctcagcgaaggggcttgtcgccgtggtgtcagaatgtggcaagtggcatctggatgttctttctgggccttccttgtggctgtgagctcctgggctgaggcctcgtccccgttcctgcaggagggcactgacaagcttgtcttccacagccacaccggtgagaagcccttccagtgcattgcatgtggccgtgcctttgcccagaagtctaatgttaagaaacacatgcagacccacaaggtgtggcctccaggacacagtggtggcaccgtgtctcgaaactctgtgaccgtacaggtcatggccctgaaccccagcaggcaggaggacgaggaaagcacaggtgggtggaagtagggaacgccatgcttcccacacctctcttctgccgcttcacaggttttattgctagctgtgtgaccttgggcaaaccccatgacctctctgggcttcaatctacctttatctataaaatgtggcataagatgaaaggaaggatgacaaacatacaacatgtgtggcattactctaatactgtacccatggcagacatcactattcaatcacctacccattttttgctgagcctggatctcacctcagaatctttttttttttttaacttatgagttatttctggaattttccatttaatattttcagaccatgattgactttgggtaattgaaatcatggaaagcaaaactgcaagtaaggggagactactataaaataaaaatttatgatcccctactgttaaaataaatgaatgaataaataaataggggataaaagaaagccctttctttttttttttatttttactttaagttctgggataca

SEQ ID NO: 100508 - DNA, 1026 bp, Homo sapiens
cgcctggctaatttttgtattgttagtagagatgggctttcaccatgttgggaaggctgatctcgaacttctgacctcaagtgatccgtccgccttgacctcccaaggttctgggattacaggtgtgagccatcgcacccggccagatgattacaattagaagaggggactggggaggcattaggagtacaactaggatggtgtttagaatttttaacaaccatggagaggtctacagtgtctgaggggaaggccagagaggggaggctcgaggcagcagctgtttctcactcagaaaggaagcatttctgtatttgagcctgggaatggccgtaccagtgcacagcagctgagtgtgagtgcagcaccttaagcacagagtctgacccaaagcgagtagcaggtgccgggtgaacacagaggagcacggagtaggggttctgtgcatccttcctgaatgggccggctccttgtcctgacttccctggctttctccacagggttgggccagcccctgccgggtgcgccacagccccaggccttgtccacagctggtgaggaagagggggacaagccggagtccaagcaggtggtcctcatcgacagctcctacctgtgccaattctgccccagcaaattcagcacctacttccagctcaagtctcacatgacccagcataagaatgagcaggtaggtggatggtggcagcaggggcccacaccacaccagtcgaaacctttcactggtgctagggtcttgaatgctgcctagaaaggggtaggaaccagtgagtcagaccttccacggctctattccccccgggttagattccgagcaggggattgatgaagtaaggttacccttggggcaaatcacagaaaactttgactctcctccagacctgagacagctgactccacccagcgtaaggactctgtgtctttccagctctggtctctgtcatctcagggtgtggccttgacctctcctgatggctcaccttgtactcctgtcctgggatggtg

SEQ ID NO: 100509 - DNA, 1041 bp, Homo sapiens
ggtctcaaactcctggcctcgagcgattctcccgtattagcctcccaaagtgttgggattacagccactgtgctcagcccttggctggcttttaaagcagagagtcatcatatctgtttggaattttgaaagagcactctagcagcagcttaaaggaagaagtgtagactgaccaggaagggactggaggcaagaatcccatcaggggcaaggatagtgcctttcagacctgggtttgagctgcagcttcatcatttccttgctgggtacctggggcaggttactctgtacctcagattcctcctccacaaatcagggtactagtatctgcctgattggatgaaaatatgttacgcatgccaagctcctaggacaatgcctgccatatggtaagtgaccgataaatgcttgccattatcattattacaaggagacttgcaattcttcaggtgagaataaagggcctagtgtagaagcatgggaaactggaagagaaataatacatgtctgagacttttctgaaggagaatcaaaagagacttggtgatttgttgtaattgtgggagtgggcaggacgaaggagagaggggagtggaggatgattccccagttcatagcttgggcagctggttggatggtgatggcagtaatgaagttgggaaacaggagaaggagcgtgtacttgataattgtatagtcctggtaggtttggaaaaccgctcagcatcccctgaaactgtgaggtccatgaagtaagatgtgatggtcacattcatcactgtgtccccaccacctagcacagtgctttgcacatggttaatggtcagcatttgttaaatgaaaaaaacaatcttgtgggtaagttctgttattcccattgtacaagagaggaaaatgaggctcacgacgggacgaactcaactcaaagaccagttctgttgactgtgggcatcttgtgttgtttactcccatgatgactaagggtgtcatcatgaccatcaccatgttcattaaacactcagttcattaaacacccacctg

SEQ ID NO: 100510 - DNA, 1017 bp, Homo sapiens
ggtacatttctgtgaatttatggatgcaaatcagttcatttacaggttaatttaggtttagctgagaatgtctgatggatgcatagaggccagaagctcacaagagatatatcttcattaagttctgctcattgctggagtgagggtggttttctcatgtttaataaagtctctctcaaacatgagcatatgtgaagacactgtaataagtttatagtcttatgagacaaagaacgtggctctttggttctctggaatcaagatctcaggttgaaaagcacagtgtcttaatggcgcatgtgccagcagtatctcttatcccagaggcccagggatagaaaactcgaaatccacccagggaagtgagcagtgggaatttccctcagtgacgcttaagtttcttgtttggaaaaatggttggctagattgagtttggtttacttcctaagacagatggagtaccagaggccctatgtgttggctatccaaacacactggttcctttaattcaaatgacaaatccttattttgccccatttggcagggagattagatatttttaattgcctgccagagtaggtttataatgtgatttgtaactcaagatagattttgtttggaagtttaactaaacgtgaagacctgtgagcaggactgttttgcttggagaaaccttgagttgtccagagttgggtttgagtgtggagcgaggtcttggagagcatcctatgaagatgtgtgcgagccagccatctccgaggcgtaaagccaggacctaatttgtttacagtggtccagagccttgacatgaagccagagcccaccaggaggaggggcagagctcttggggccttgaggaatttcttatgaaaacttagtcttcttgctcagaattattttgggttgtgccactgtctttaagagtgtgagagagaggatattagaaaacaactttagttggtcattttgcagatggatgattatatttagaaggggaaaatctgagcatagcaatgg

SEQ ID NO: 100511 - DNA, 1030 bp, Homo sapiens
tttctttctttctttctttttttatttttttgagacaagagtctcattctgtcacccaggctggagtgcagcggtgcgatcttggctcactgcaagctccacctcctgggttcatgccattctcctgcctcagcctcctgagtagctacaggtgcccaccaccacgccgggctaattttttgtatttttagtagagatggggtttcactgtgttagccaggatggtctcaatctcctgaccttgtaatccacccgcctcagcctcccaaagtgctgagattataggcatgagccaccgcgcccggcccagttaagtaattttcatcatgcttaaaaacattgtatttcaaagaaaaattttttttttttcaaaaaaagtatccccaggaaatgaaaacatttcccccatctttgggaaataccatgtactttacaaacttgatcatgtttgatcttttcagcaactccatgtgtgagtggtattatcctattttagagatgagaaagtcgaggttcagattatatgagtcactgggcagatctagctctgtgacttggggatcctgaggtgggctgtatcacagtagattttctggtgtgtttgatattccataggatctcagctctgtcgcccaggttggagtgcagtggtgtgatcatggctcactgtagcctggacatcctgggctcaagtgatcctcccacctcggcctcctgagtagctagaactataggcatgtaccaccaaacttggctaatattttattttatttttcagacagagtctcactctgttgcccaggctggagtgaaggggcacgatctaggctcattgcaacctccgcctcccagattcaagcacttctcctgtctcagcctcccaagtatctgggatcataggcgtgtgccaccacagctggctaatttttgtttagccatagggtgaagccaatagggttgcacgatattggttaggctggtctcgaactcctgacctcaggtgattcactcggcttcccgaagtgctggg

SEQ ID NO: 100512 - DNA, 1094 bp, Homo sapiens
ctacccttttgttgttctgctggggaaaccaaggtctagagacttagcccaaggccacctggctctgctttctagaggtctggctagggctgggaacttgacctgaatccctcccactcaggactctgatcaacccatagtccctagtcttttcaggttgaagaaaccttttctaatttcaaaaaatatcaagaatgggtgtatgataatagttgtacttttaatacccgttaattgagaagatcagatattaattcccttcaaccgatattcactatatacccaccgtctttcttccctaggattgtgtctgcgtaaatggtagatggtcacatggtagttgtttttattattgtgtgatatattcatcatttagtgcacaggcagggcacagttgggcacattcacagagcgctggagtgaccactgtgaaccctatgagctcacagtccataggttgggaactgattgacacattataccaggagacttgagagaacagcaggtctgaaactctgggcttttcctgaaaccatgagctgtcttcacacttgagatggaaatctccacactctggaaataaaaagccaacaggctacccagagtgctcagtgctgctctctcaacagctatacactagggcatttgtgataaaagaagaggtatttggctggaaacaagctttaagtttctagcattagttggtaaatggtgcatgggtctaaggggagtataaaataatggccttgaacttgggaatctgtgtttgcagaacctctcatctcaaagcactgagcttctctgacaagaaccattgttcttatttcagaggtaagaggcagagaggccaagcccacacaaagggtctctgaaaaagagccagctccttccaggtttaggagcttggacccctgcttggcatcctagggtggagctgtttggttttatcaggtgatggtgggaaaaggaaaaaaggttgttaagttccacccagtttggcaaatattttgagtgtttactgtgagagactcaatttgaagggatggtgtgggtcatagttcttaccctccaggaactccctgtctggtgagggc

SEQ ID NO: 100513 - DNA, 1060 bp, Homo sapiens
gaattagaagaactagaacaggaggaactagacaagaatttgctggaaatcagtggacccgaaacagtccctctaccaaatgttccctctatagccctaccatcaaaacccggtgagtgcttctagagtcatggcacaccgtgaggtcatgtggcaggtgatcttgtggtcggttggctttggtttgtggtcggttggctttggtttgtggtcggttggctttggtctgtgtcctgagcttgcccaagattgagaaccagacaggatccattgtagtggccacagaggccatgtcacctggctttttctggtttctctctggaacagtgtttcttaatcttgacgctgtggacatggccagatacctctctgggccgagagatggagggtgggggcggggttgtccggtgcactgtggatgttcagcaccatccctggcctctgctagatgccagtagcaaccgccatgagttatgtcaaccaaaaatgtcttcagacatggccaaatgtcccttggtaggggttgggaggatcacccccagttgagagcctcttttctagaatgattttcctatttcactaaagaagagaaagttccaggcactgtgagaaggtgtgagagcgtgagtccaggacagctctttccctgcccctctagtatcctgtgctgcgcaccctgcaaaagccccggcccctagagacagcccctgggggaaggaaacagctttgactcctttagagacctgattctataaaaccttcatttcctcccttcatttcttcccttcccccatcccctcgcacaatatttcacccccaggtagaagtaatccacacagaacttctagaaaaagcgaggcaatttgatgtggcatgagagagaaccctgggggcagtgcatgaccagctgtggtcacctccctctcccatgtataaagagggaacggcctcctcaagtagagtcagctgcctagagtcctgtgtaggcagaggccgtccagcaagcctcctggagctgtgtggccatgagtcaagccacttgaggtggagttgggggttg

SEQ ID NO: 100514 - DNA, 1353 bp, Homo sapiens
agggtgggtgctgccaaactgtgcttggttttccagagttgtatgttgcagcttttaggcaccaaggagcagtctccctacagcctggagaggagtctggccacagggcagggctgtttgacagacaccatggagcacaggcagccctcatttccggccagaacatgttgaacgcaccagtcatcctaaatagccttttctgtcttcacacagccaagaagaaagaagaggaggacgacgacatgaaggaattggagaactgggctggatccatgtaatggggtccagcgctggctgggcccagacagactgtggtggcctgcgcagcgagcaggcgtgtgcgtgtgtggggcaggcaggatgtggtgcaggcaggttccatcgctttcgactctcactccaaagcagtagggccgcgttgctgctcactctctgcatagcatggtctgcacctgggagatgggcggggggaggggggcgggcggggtgggaagtgcctgctgtttataatgttgaatttctgtaaaataaactgtatttgcaaatccaacattgagcttctggactacgctgactccactgctgaatcctcaatggaaagggtcgactggttgcagttgaaatgacctgaaatgtagcctctgtccttgtaagtcagttgacttgccgcacatctctttgtgtacttgtacggtactggcagaaaagtcatttttcaaaagccataggcttttccttgcccttagctgtaataatgcatctgattttgatttcctccagagctgtgtttctgtccatcacctgtgtattggccctgtgtttaccactctggcccactcctcacccccttgctcccctggtcttctggagtttgtgacattgatttgaaatggatggtgttctcttgagagcaagtgagattgttagaattaagttccaactatacagttttctaacatagctataaggtccttgttgctgtttgtgataactgatagataactcattggaaacgtgcatacatttatattcagatgaaattatggtttgcactgtctattaaatatctcgattaattttcatactttgctgttgtgtttaatctatcatttgcctcgggagctgaccctttccagaccagcaaggtgtacagtggagtctggaaacatggaagacttaaccatgacatgtgtcaacagtttgaaccaaagagcagagcttgtctcaccagaagtctgttcaagtcctagattggccctcaccttgcctggggactctctgggtacagttcagggtgagttggttcttgggtacttcagggtcttccctatttcttctctgccagtgtccatg

SEQ ID NO: 100515 - DNA, 1740 bp, Homo sapiens
tttagatgatcacaatgctaaatgtcactcctttgaacttagtcttcatagtttcattgctcatttatctaggtcatccactcaaaactttaaggatgaggagaaacagcttctcccatcagaaatctaggcaagaggcgctcactggctcccaaccagcgggagggtcgtcgtgtgcctgcgcctgggttgggggagccttcgcgcctaggcctttccctcaatttttcctctttccccctcgccccgcactggggcttcctggtcggcgcttgcacagggaactcagtgctgagattgtctcaagccccaggaaaaatggtggaaaattcactgtcaccattgccagaaagaccgatttatggccttctgcttctcttaagctcccaatttggcttcatactttacctcgtgtaggcttctattcctgaatcttggctaaactccttaggtttaacctattggcctcaaaaatattggacagttgcattacctctctacttccttattactatagtaattggctatgtgctcttgtttgtaccccattcactcgactccattcgtacaatcacagataactatgctaaaaatcaacagcagaagaaatactaagaggaggccattccagcattaagagctatttctatttagtgaagtaaaccaaattttctttcttgtagccaaagacctttacaccaaaaactgaaatgtacctggccatactaatgagaggtgaagctggctgggcttctgggtcgggtggggacttggagaacttttctgcactgacggggagtgtctgcagcttcattcctgaagtcagcgagaccaccagccgaccggaaagaagaaacaactcccgatgtgccacctttatgaactataacactcactgtgaaggtctgcggcttcactcctaaagtcagcgagatcacaaacccacgggaaggaagaaactctggacacatctgaacatctgaaggaacaaactccagacataccgtctttaagaactgtaaccctcaccgcgaaggtccgcggcttcattcttaaagtcagcgagaccaagaacccgctggagggaataaattccggacacactaacaccaagcatttatttatttataagtttttgccatcgtaattttgaccataaattaattcaaccatctctcttattaatagaggagatgtaaaaattgtaaattgatcttctcttagattatgttcaatgaatattgtaagtgttctcatgtattgttaatgaacagaataaaatacagcattaccattaaaaaaaaaataagtctaggcaagaaccatttcaagccatgctggcaacagagtcaccagactgcagttaaggtagagacacgatgttctttgtagttctttgtagagagaaggactaagatctgggtcatggagagatgatcactcaacagggaatgcgggaagctagagtaaaatttggctggcagaccaagtcgtgagaggaaaaagagaccaaatgaggctttgaaagataaataaacaggccgggcgtggtggctcacacctgtaatcccagcgttttgggaggccgaggtgggcagatcgcctgaggtcaggagttcgagaccagcttggccaacagggtgaaaccccgcctctactaaaaatacaaaaaaattagccaggtgtggtggcaggcgcctgtaatcccagctactcaggaggctgaggcaggagaatcac

SEQ ID NO: 100516 - DNA, 3669 bp, Homo sapiens
tgcagactccaggtctcagacacaactcaaattccctggggttttggctcaaggaagctttgagactgtaaacggtgggatccaccctttagtttgtgtgtggtgtgttcctcctcccagaccttgcaggttctctgtgtttagatttatcgatcctagtttgatgggggttagggggagtagctcaagtcatctgccttcaaacaaatattactcctattttcagataaggcccagagtggttaaagtgaactaaaattaactttggcaaatgttccagtttttcaatgtgatccggttggagggagtgtctaaaaatcaggcaagggagtttctgggccaggtcttgaggagtctcttgatgttcacattagttctttggagtctggtacgtctgtggtgcctggccaggattctggatttacgagtcctatgtgggagctgaaaggggtcttaccatctggtccaactttttcatatctgcctttccccgcttccctgttaactgaaccttggaaaggggaagtaagttgtctgaattcagactgccttagtgtcagagtgagaactaaaatttccagtcttcttcctcctaatccagtaatatttttatttctcccataccttgccacttcttaaaagggcacgaaaccacttattcaggtcttaaggtcaggaatcctgagtaattggaaatcccaaggaagttttatagtccccacccctttctgtgccttatggttagtattaagaggaggccaggtttaagcacaggtgtactagttctcgtaagtcaccacttcggttttatgtgtttatggcttatatactcttccataaccattatctgatttaatttctaatccatttctgtgaggtagtttgcagagcttggtttatgtctctttttttactgtgagggaatggagacacagcatagcacttgccttagatgacagaatgagtaagtagtgaggacaagacacctctctggagcagaggatttgatttgacatcataaactgagccactcattgtggctctctgagcctcagtttccttatctgtaaactcatagggttgttgtggggattgttaagaaaatggctatgaaagtgctttatagtggtagtaataatagctaaatttattaagtacttaacgtgtaccaccagtcaatggactgaggactttatggactatattactaattcttagagcaacctatgaattaagtactattattatccctgttttatagaagaaacaggcttagagaggttacattacctgcctcagggtcatgtaactggtaagtggccatggcagtattcagactgcagacagtataaccttaaagctggcatgctttttttaaaaaaaaaattgtggtaaaatatatataacataaaatttaccatttaaccgtttcaaagtgtacatttatgtgacattaaatacattcgcatggttatgcaaccatcatcactgtccattatcttccccaactgaaattctgtacccattaaactaactcccccttccctcctccctccagcccctgaaaactatcgttctactttctgtgaatttgactactctaggaacctcatgtaagtggaatcatgcaatatttgtccttttgtgcctgcaaagctggcacacttagtgtcttctttagtctcagagtgcattgtaaatgcaaaattattagtcctcacctgcagcagagatgtggcatgcagctccagggcaggaacccaggcctctctgagtaagacctacttttctcccccttaggttgatgttctgtatcactgaagcctgttttgaatctctgctggccccccagtatctgcagaagagaccttataccctgttttttttggagacggagtctcactccgtcgcccaggctggattgcggtggcacgatcttggctccctgcaacctcaacctcctgggttcaagggatctcttgcctcagcctcccgagtagctgggactacaggcatgcaccatcacgcctgggtaatttttgtatttttagtacagatagggtttcaccacgttggccaggctggcttcgaactcctgaacctcaggtgatcctcctgtcttggccttccaaagtgctgggattacaggcatgagccaccacgccaggctattacacccttaaaatagaaccgagataactccccaccctcaccttgtttgcacctgcccttctgacagtccagggtttggggatattgggctgcagttatcaggaataacagtgcagtgacagcagcttggatcaaaactactcagaatgattaagtagatcacctttatgaaatgttccctctttcttccccctttttccatagaggcacacaggagggattagcttttgggttcttggaggatgtttatggatactcactgcttgcagttggttaagatggagttagatgctgcatatagcctttcaaaatgccctttgaccgttttctgtgttggtccatttaggggagtgggctcttcatgtttatgaagatggttggaatattgtcctgataacaactgggggttgggagaggcagtgtctcagagatggttaatagggtaacaaacacatgatcatgtgtctggtcatgtcacactctccttaaaaatctgatggccccaacattgcctgcatattaaagttcaaacaaatatgacccatgaggtcagtgtgttgaatttattgaatagaatcttgtagttgagggaccttacagtcatttagaccagccacctggctgacatttgagttggttacttgttgagattgtctttctttggatacctcatttttggaaagtttttcattcactgaagaattaatgagcctctgttagacctggtgctacgcttagggatttgggtttgtatagcgtagtgggaaagataggcaaggaaacaggcagtgtgagaagtgttgtcacagggacagacaccaggagagcacagaaaaatgatgcctaacccagcattggaaggtcagggaaggctttttaggaggagaagttggttaagcctagccctcaagagaacagacataagccaggaaaagaagagatctggggagtcagggaagaggcagagataagactgttctaggtagaaggaacagtaagttcagaaatggtgataataggttaagaccatcccgaaagtacgtactgttactattcccattctgtagttgaaggaaacgggccaagagagctaaacaaatttctcaggattcttgggtggagcataatgcttgaggtgggtggatatggccagacaggagactttcaaggtaggcagagcagaggccaagtcaggaaagggccttcttgcctgtgttgaggagtttggacttcatccggaggtgagggggccatgattcaatgtgcattttggaaggatatctctggctgcctgttcaggagcggactggagagctagaacactgtgggcagagagaccagttaggaggttggcaagaggtgatggtgtttcaaatgaaggttgtgggagagcgtgtgcaagagtgtgtgcagaaaaaagatggaattgctgggcgtggtggctcacgtttgtagtcctagcactttgggaggctgaggtgggtggatcacctgagg

SEQ ID NO: 100517 - DNA, 4259 bp, Homo sapiens
gagaagaaggagcacgtaagggagggggtagggtttcttatgcagggtctccttacatatgctttcacttacctctggttatggattctagttctttgtgtcaggtctgaaagggagagagtgagagtatggcacaactggtcatgttcctggctaaactggatgatgcaaacattagtttaggaagagaggagatattcaatcctagacatccgggtgtggcacagcctggaaactgcttacgttaagccaagaaaagtttacattttatccaggctacatcctttggcactggtcttttcgtgtactagtgtattcctaagtccctctctaagccgaagccacttctctgcttactctctgctaggcactgggaaaacaaagataagtaaaacgtatcctaaggagctcatgatccagaagggcagaagtctcagtagcttggatacagcggtggcctggggagagggtggatggggcagggcagggtaggacaggatggagagggacccggaagggtttctattagggataggagtcaggagaccccactgtgtgctccagtctttttctcgggtggcacgtgtctaggtttattcatctgaataatgactagatgacccataaggtcccttctagcaattacattttatgattctaggtggtggtttagataatatatctctaggagaggtatttctttcttcttctcccccttcttagtttggcattggtgaggggatatagtaggggtggagatagcaaggttttcacttgagtgtcttggtcttattcaattttggcttcatgtctatatagctggaagggagaaaatgacagccgtaatgttaacctgcttgtcctacaacttccccctgggtactgtaaggaaattgtgctcagggtgcagctcacagacccttaggaatagagacagagtgcagtggaataaataggaagtcttgtcactagcctgagcatcgtttggtcagtgtgtgggctggactaaggtcctttctttttatagccctgtttcctcataaaatcatctgggggggtccctgaaattctataaaggcccaaagagtgggggtggggaggtagggacagaaaaagggttggaggtccctgtctctctcacttctcccctctcttcgaacgaataagtagaagcaggtatctggccaagtattaatgttggtcatcttttgtttccacagccttgccttatttcctcagtgttagtgtcttctgtcatttcataatggctttcatggtaatcaatgtcctgtacctcctgggaggaaggaaggaaagatgggatattgtccctgggctctagtctccatctccagaagagccatttaagacatccactgccccctgttctctattctggggttggggtagggggttgtggctgaatacttgggtttcttagagggtacatacttgagtttcctagggagtgctctactaactaaagtgcaaatctggctatcttcccaacacaccaatgagtttgactggggaaaatagcagtcagtgggcttttgttgcttgccaaacccatgttaattgtaattatctaatattctgtgggatctctgtcttcctgtctgtgaaacaagggaattggactagataatcttgagtgatatttctacctttttacagttttgtggaagtggcttgagaatttatctctggaaggagaaagggctttgctaaagtattgagagtatctcagagggttaaattctgggttcacaaaagatacctttcagtatataaacagatggatattgctttttagagtggacagattgctgaaaaattgcttgtgagatgaatttatcaaattgtatgctgagttccattataaacttggagctgtagcctcatgggacaaacttggagtccaagactataaaaaaattacattaaaatatgtagcaaactgtttaaaatcacataataaaggaaaaataaaaaacattttaagattttcacacaatggtaataatggaaaaacactagaccagaaacttgcatttcctaagagctttagcttatggagtagatgcctctactgaggttacctggcccttgaagtgccatctgtagagactgaatagctctgttatttgtcaaggtaagactcattgctttattccaagtaaatattctcttttagaatgccaggtttggaagcttaatgttattggccagattttcttcattccagaggcatttatctggtatttagctgtctcctgtttattttattaaggattttaataagcttagttaacggtactgcttacatggtgtctcttgatctatttgtctagtttcctttgaaattctttgtgttagtgaaagcaagcccagcagtagatttaaaagggtcatttccataacttcatttatctagatttgggtttttttggtaagagatatgaccacactatactgagaaatcgaatgttgtttcctttttttttgagacggagtctcgctctgttgctcaggctggagtgcagtggcatgatctccgctcactgcaagctctgcctcccgggttcatgccattctcctgcctcagcctcctgagtagctgggactgcaggtgcccaccaccacgcccggctaatttttttgtatttttagtagagacggggtttcacagtgttcgccaggatggtctcgatctcctgacctggtgatctgcccacctcggcctctcaaagtgctgggattacaggcgtgagcagccgcgcctgaccacgtcgtttcctttttacctgaagcattaatttaaggctttggaattttgtttttgcggatacctgtaaggtggtactgaggaatggtgctgctgccaaagtaataatgagggctgtgcgtgaatcagttgagcacaagaataacttctcttcagactttaaagattcaccctaattgattcttacaccaattaaaatcaacccttactaaaattagggttcagaggaagttacttagttgccgtggcatgattatttatgcttgggagtcccaacagccttccatccctaatctcaaccattcgttccaggaatttggagtacctcctatatgttcttcttatggaaaacataaaaaccaacaagacataattcctgtccacaaattactttcagtcttgagaggaagacagataagtaaagcaaatccagcctgccgccctggctcatatatttggattgagggttcaaacggaaaataacataattggtggctgtatcagtagacaaggagaccagtttgataatctgacttccagtgtgtagactttatttttttggcattcccttctctcccttctgttttttacagatatttatcctctgttgctaaggtgtccaacacccagtgtgtaaagtcaagaatattagagtaggggacaacatttcctttcaggtttaggtgtccagatatctgcatctggacacccacacagttctctggctggcttcaggaagatttggtattgtctcgcttcttatgtagaaatgaagaaaattaagtttcatgttgaattattttaagttttattatgctctattttgaaataaaatagctctattttgtatgcaggtggaattatctgaggtgtggtttctggcatttgatcagtctgtgatttgataattgtgtttatattgtagttcgtgaagcccattgccactgccagccgcctttgaacactttgcagcaaggagccctagtaaatggaaatggtgggcacattgaggctctcctggttttgaagggctcttccctctttcctacccttcagagagaaatattacttgggatgctgtgttgtgctcccgatttcttccaacaatttagcattgcctgtggggtctggaataataaggccatgtaaactggagatgtcatcttctctctctttgaagttccattttctcatctgtgaagtggggttaacactccatatcttgccttcctcacaatggtattgtgaggagcaaattagaacgttgtaaaatcacatgagacaatttatatgtgaagaatccatcagtcatttgtcagtggtaataggtaagtggcagaattttccttaagaggggagatcgatctctttgtagggagcagggagagtgatctcagctggtctctgggattgggaaaaagtgtgatgaaagcatctggacaggggcaatgatggagcaaaagactggagg

SEQ ID NO: 100518 - DNA, 1515 bp, Homo sapiens
atggttagtgatgagaaaattgctgttgttctgtgttgttgtaaatacttggcattgtctatctttttcatttgaagccattctggttagtagttatagatatgaattttaagaaccatactatgaattctcacatagcaagtaccataaaggggtacaatgattgggaagttcagaaggggaagagattgcttcctttgtacatggaggaggggcagagggggagttcccaaggaacatttgtggaccagtgagtatttgtgctggactttgtaggataaggataatgaccatctgttgtccaggaccattttaatttctaatattctgtctggttgtacttacagattatgaaataccaatcaatattgccatgtctgtaccttatctcccatactatgcagaagcaacacccagttatcttttctcaaccgatgtgcttcccttccccccttttccagaaagaatggtcacaggtgattaggctgcagagatggagaacattctgtgcaatgggaacaacttgagtagaggcacagatgaatgactagaccgagtagtatccatattcctgctaatgagcaggtggtggaagtgtcccacactttggagatgggtgataccttctcatagcctctcagagcagaacaaggtcatgtcgttatgaagccaatttgtatttaaactggataaaaggatgagaatgagctctttgcttatacttacatcatttcaagaaagaaattaatccagtaaacagtcatacctgaagtatatcaaaagagagtttttcttcttaaaatggttggggagggaatactaaaacctaaagaacttagtctctcagagctcatctattagttgtatatttgctcagggaaaaattgccatttctttgtcagcttttatcctgccggtggaccctagctgggtgtttattttgtgtagttttaccaaatcactttgaaggttggcatgaacattgatcatgtcttagagcctttcctctttgttctgtcagcaaatattagaaaatgtaccttaaattacctggttggggaaaatagggtggccctgcctccttccagagagcagcattttcatgttaaacattagtcagcttctgatcctgtgtcaggtcgcggggtgtttgtcaagatagacagggtgctagagatgccactagggacattcactagagaatttctaggccccctctcgaggagactagtcgagtagttgatttaaaaatctgatgggctgggtgcagtggctcatggcctgtaatcctgacactttgggaggctgaggcaggcagatcatgaggtcaggagatcgagaccatcctgacggagtagtgaaaccccgtctctactaaaaatagcaaaattagctgggcgtggtggcgcgtgcctgtaatcccagctactggggaggctgaagcaggagaatcacttgaaccagggagttggaggttgtaatgagccaagatcgtgccactgcgctccagcctgg

SEQ ID NO: 100519 - DNA, 1043 bp, Homo sapiens
tcaaggagcatatagtcaatcagggactgcaagaccatatgctatttcagacaaggtcattgtgggactatgggatccttaatctcccttaagagtttcctgcctccctgtcatcctgtcttgctgttttctgtgccatgctattcactgttgcctggtaccttttcctacaaaccatttttgttgtattctccctgctgtaagtctagtatggaagttttggtaaataaaagttcttccagcaataaacttttctttggattgagttactatttcaagggcagctactcttttttttctcttgtgtttggcaaaggtgttattgcttttatggagatgctgaaggaatctggggaacatagaataatgatggaatgaagcatggggaatgccatcctgcatcaggggagaacatatatttagcgttgtactgttcactcccaacggcatctgactgtaatgggggtaattttgctcttttgcaaagacaaggaacttttagttgtgatgttcagggagcagaattttaaaggtattccatttaggggaaccaagctgctgaactttcatcctcattgggaagtccttggggcactcttaaatcctttctgttccagatctgttcagtcttatcctctagatcagaggtcacatactggtagccccttgggctgtatctggcctgtgtacatattttgtttggcctgcagtagtggtgtcattgttttttaaattgagacagggtcttgctctgttacccaggctggagtgcagtggcacaatcatagctcactgcagcctcaaactcttaggcttaagctatcctcacgcctcagtctcctgagtagctggaatgacagagacatgccactacacccaagtgttttttaaatttttttgtagagatgagttattactttgttacccaggctggtctcacactcctggctcaagcagttctgctaccttggcctccgaaagtgttgggattatgtgtgagccattgcacctagcctctatttttattttgagtggaataaaag

SEQ ID NO: 100520 - DNA, 1120 bp, Homo sapiens
tgaaggtgactggtttctcatgaaaaaggaggaagatttttgagaaagtagcagaggctagagcctgacgctgaccatgagcaatttttccatttataagagtgggggtaggcctgtcttctccttgagtcctctaccagggatttgttttgttttgttttggtgtgtgtgtggtttttttttgttttgttttgtttttgagacggagtctcgctctgtcacccaagctggagtcagtggcatgatctcagctcactgcaacctctgcctcccgggttcaagtaattctcctgtctcagtctcccaactagctgggactacaggtgcgcgccaccatgcctggctaattttgtatttttagtagagacagagtttcaccaatttggccaggctgatctcgaactcctgaccttgtgatctgcccgcttcagcctcccaaagtgccaggattataggtgtgagccaccacgccccagcctctaccagggttgttatattgtgactccttgtacactggctagtccatgctttagaagcttgtaaactgaagcaaagagacatggcttggatctttgggcaactctttggagcttcggccaaatttggcagaagctttgagtttacaacttcatgttcttcatttctctacttttttccacattctgcttccttattgactggcttctttagacagcatatttgttctcaagtttgtcaaagccacaccatttcctgttgtttctttgatactcaagcccagtgtcagttgccgtttatcaccagagtatagcactttttttgggaaacacttggtcaattcatttttgctacctgcttgccaccaaggtccagcccagctctagaaggaactctaatattgaagagactttacctagttaaggtgctggtgaatcccctgcgactaagtgaattatcttcattttactgggaacttttggtgcccttattggctgataaatctgtctcggcctatcttaggacttcatatggacagcaaactagtcaaggctcagtggatcatgtccttgtcaagttggcattttttgcaatccctattatatatttgtaaggtagagtggaagtgagtctgatgtgtcat

SEQ ID NO: 100521 - DNA, 1041 bp, Homo sapiens
cctctgaatgttactgtttatgacccaaggtgagtttgaacctgagttcactgctattggaaggtgatccccatacttagcacaagaaagccaaagctactgcatgtgttccaaatcagaatctctggggtcaggcatagaaactgatgtttttaatgaattccttgagtccttctgttgtgtagccaggttgggaaacacttatctagagaaagaactagaagtaaaaagatatgcattatcttctgataccaccttggacaagtttcttttctggacatcagctttctccactgaaatattaaaaacctatactcataaaggaccctttcagttctaaaatttcatgctgctttatgatgagtttagtctgggatctttttctacctcatagtgtccgttctctgggtctgcctggggcggggcattttagggcatttggccagaggccagcgaggcagcccaggccctgaccttctgccagaagcactgacacagctcctaattagaaatggatcaatatgggcctgtagccaggcctggggagcctgggaggaggctggagcagtgctcctaggtagggagaatgattaccgtgaaatggatctggttacacttgtcaatacaacagttctgctggtgtagcccacctcccctggggaccagcaggcagggctaccctgaacaaacggggaaatggttaacttgtatccctatttgatgtgttttcctcacctttataaactcttacctaatgtgatgctaggtacatcgtataggccccctcttcagatggaaaaatcacttattgaatacctactaagtgttaaatactgagcctcattgtgtttatttctccttgcaacctactggcataggaaggaaaggaaactgaagctcagaaaagtcaaaatgaagtgacttggctgcccattgtcatatagcataatctctattgtactatgctattaatacatttctgagcatttgcaacaccgattccaatctgatgaactgttttctaccagggccctctcttac

SEQ ID NO: 100522 - DNA, 1820 bp, Homo sapiens
gatgtgtccaggaattactggtaaaggggtgggcattagagcagtacctaacgtgtagcaaaacagatggactgctctgagcccttatcctttgccagatttaaggttgtagtagtagccattggatggcagtaatgcaggtgcagcaggtagggaggagaagattgatttattagcaagtaccaactgaaacttatttctagacttctgtgggggagaagggaggaagcctgaagagcagcagtcctctgtcctctgggccagacctgcagaggtgttgtggttcttggcattggtttgaaagttcgtctggcccaggcaaataaccttgcttctctcatggcaaaatcttctgcttcacacagcctgcccctcctttctgtgttcttttacagaaagaaattaatggaatctgttcaaaatacccctgaaatgaaattacatttttaactctaattaccctaattaaaacttgacagccgtaatcctggaatggaagatatgctaagtaccccttgcctgtgacaagctcacttacccagatggaatgttgttctgttctgggtttagaagaaaatttcttttggtgtttgttttgttttttccattagcaatttagtcttccaccccacaaatgccccaaggtaggatagctgtacttgtggactacaggtttgcccaggacccctaatctcaatagaggttcctttgcatccggagatggagctcctaatgatccttactacatacctttgagttttttcttcagttgaggttgaactgcagcctttccctcagtgaaatcacctgccttggggaaccaaggatctgtacttgttagaaggctgtcttctggtctagggctaaatacggattgggggtcagtttagggctagtatttaggatacagtttgagcccagggacaaggaggtctaaaaataggatccctcggccgggcgcagtggctcacgcctgtaatcccaccacttcaggaggtcgaggcgggtggatcacttgaggtcaggagttcaagagcagcctggccaagttggtgaaaccctgtctttactaaaaatattttaaaaattagccaggcctggtggtgggcacctgtaatcccggctactcgggagactaaggcaggagaattgcttgaacccgagaggtggaggttgcagtgagtcgagatcatgcatcttgcactccagcctgggcgacacagcgagactctgtctcaaaagaaaaaaaaaaaggatccttctgctcttcacatagctccagttcctttaactcagcacaggtgagagcaacctagtgagatgcctggtcttggcctctgctttaagtggttacctggccagacccgaaaacatgatgggatgggaggtaggggcaagcccataaagcagactgaaggattctttgatgctgtgggtcgtctcacatttctgctagaaccgaagatccccatgttctagtaatctactcagcttagaagcctgttcagtaggcagacactgggtgctctgttaggtactgcaagggacacagagttgagtaagacacagtccctgctcttgagaaacttagaattctgggggagtggggaggtagtggtgggtgagggacaaccatacacatacaaattatgtaagacagagcaagctttattcggtagataggaagcttggccgggcgcggtggctcacgcctgtaatcccagcactttgggaggccgaggcgggcggatcacgaggtcaggagatcgagaccatcccggctaaaacggtgaaaccccgtctctactaaaaatacaaaa

SEQ ID NO: 100523 - DNA, 2485 bp, Homo sapiens
agtgaagccttatggtcagcactgatcatatgctggagtatcacaagagccccacagtcagtctatggtataatagggccagaaccagtctccttattcccaatcaggccacctctcacctcactcagacttaatacagtatagaataactttggaggggacctcagtgtggaggctggaactgcaaatttcaagcttacatatcagtttttgaataggtattcaaaaaccaatgacaggctgggtgtggtggctcacgcctgtaatcccagcactttgggagtccaaggcgggcggatcacctgagattatcaggagttcgagaccagcctggccaacatggtctgagtgaggtgagaggtggcctgattgggaataaggagactggttctggccctgccactgacttccctctgtgactttggacagattcccctccctgctctggtcttacctccctttttataaaatggttgagcccttccaactctggtctcatcaggggcatgaaagccattttctacacagtctcagttgcacagagcagtgtctggtcggagctttggtgtgttggttactgattataaagctttagattctcacttccagctcaagagggggaaggggaaccatccaactgtctcattagcatggagaaaagaaaacagtaattactcgtgcctcccttgataattcctgcagggttggatcttctagggaaggaggaggggaaaactagagatagcttcagctgagaaaggagaaatgctgttagctgcccagaaaatgcagaggcaagaatgattgtcttgcacatctgttgtattctgtggacgttcctccaggcagcttggagactgcctagattgagtttcatctatttatggcatgcattatgttctcatacgtgaacatgggttgggctcaagacccctaatgtcacctgtcattaagaaaccagctgtcctctagggcctactttttgatacactgggcatcctgacacctgtctttgtttgggagtatgggagggttttactgacccattttgtgtcctggctgcattttttattatgttgtgaggtcattttttttacccccacagcaacacagccagtagttttattatgcctgggcataggcaaccatacagtagagccagtcacaagagtcaaggtcaggtatccttgtgaggggaggagtctgggagaactgcaagaccatggggtttagtaaaggctgggataagcaagccttacagaagggttgaggcagttttgaggctgaggggttagggggagctggaacccaactgtcaaatagattggcaagttggcttgtgggacaagggctatttgccctgtgcctttgccctgtgccagtcttttactccctgtgtgtggtcggttgtgagccctgaagtgctgactctagcagaaatgcgttggaggctgccttcaggggagccctgcctgagggagcctggagccattaggctgagattatctcccgtggctgctcactggtgccttggttgccaccccagaggcctagagaacgcagcttccctttctcttcctctctcctgaggaagataacccttcagcaacacgtctctctctctctctcttttttttttttaagacaatctcagtctgttgcccaggctggagtgcagtagtgcaaacacagctcactgcatcctccgctgcccgggttcaagtttttctgcctcagcctctggagtagctgggactacaggcatgcaccaccacaccacacccagctaatttttgtatttttagtagagacggagtttagccgtgttagctaggctggtgtcgaactcctgacctcaggtgatccgcccacctcagcttcccaaagtgctgggataacaggcgtgagccacctcacctggcccaacacctttcggtcagtcttcctgcaggccctggagcttgcttattctaaacaacaagagttctgtagggacatgctattttaaaaaaaaaaaaaaaaattgttttacaaatgtaggagattatttcctctgttaaaatcgtcttcggtccccagggaatgctccctttctcttgtcccagaccgtttgcttgattccccaccctttgatgtccacacccaggcttcccataattttcactcttcattcacttcctggctcctttccctagcttccagcagtagattcctggttgttttttttttttttttttttttgtggggggtggggataaggaaggtttttcaacaaagctttcatgatggggagctactggagaaaggtccagaggatgtcagtaaccccttagccacaaggaacgatatactcccaaggcttgttagcctggagtaatgctggtagaggaggaagctgtgacaagaggaagaacctgcttgtcttctgacctctgcaggcttcagcttaaacctggcagaggttgggctggggcagggcaatagt

SEQ ID NO: 100524 - DNA, 1924 bp, Homo sapiens
ttgagatggattctcactcttgtcacccaggctgtagtgcagtggcacgatctcgctcactggaacctccgcctcccaggttcaagcgattctcctgcttcagcctcccaagtagctggggttacaggcgcccaccaccatgcctggctaatttttttttttttttttttttgtatttttagtagagacagggtttcaccatgttggccgggctcgtcttgaactcctgacttcaggtgatccatccccctcggcctcccaaagtgctgagattacaggcatgagccaccgcgccaggcgtgccttatttttctttatggcacttagcactacttgaaattatatactgtaaataattgacctgtcttttgctaggatgcaaaatgtgtgagggcaggaattttgaatgcctgctgcctgttctgagcagcacccctaatggacttctctctctattgtaggtgagccctattcccagaggcaggtggtgctgaccctgtaacccaaaggaggaaacagctggctaagctcatcattgttactggtgagtgaggttgcctgggaaagctctgggcaagcttgggccaacatggagggtaactcgtttggggattgtttttacctttagtacagataacttacaagtgattatcttcctactccatgtctaaaagattggatgttgcacaggtaaccttctgaactgggagggttgagactgctctcctagaattgccacaagaatgtctgagatcatttgccatgaataaggcagagcaggtctgcttccttcttgcttctgctagctgctttctgctgggatgtggcaggtggggggctatcctgggacctggcggctatacctgtcctctcacaagctctttaacatgacctcacagcccttagagacttgttttttgagatggagtttcgctcttgttgcccagactgcagtgcaatggcacgatctcggctcaatgcaacctccgcctcccgggttcaagcaattctcctgcctcagcctcctgagtagctaggattacaggcatgcaccgccatgcctggctaattttgtattttttagtagagacggggtttctccacgttggtcagactggtctcgaactcccgacctcaggtgatctgcctgcctcggccttccaaagtgttgggattacaagcgtgagccaccgcgcccggccccgtagagactttcttagctttagtttttactgtgatctgccaagctcataggtcagctccagaaaatcctgtagtttcttccattctgcaaaatgtcgtatgaataatggtgagagtggagtgattagggttttatgaagtggatgtcaggggaagctgacagatggtgagaaggaaggaaaatcaacgcattaagaacttactatgttactgatctcaatctagacaaaatccctttttgtgtgttggggggggttttatttttgtttttgggagacaggtctcactgtgttgcccaggctggtctcaaactcctgggctcgtgtgattcaagtggtcctcctgcctcagcctcccgagtagctggaattacagatgtgtaccaccacagcctgctctgaaacctcattttatagatgaggaaattgaggctcaggaactgaaataatttgcccagggtttacacctgggaatctataaagttgatgttagaacccaggtcagtctgaccataaataccattgttcttccagacctgaccttccttgggctgttaatctccctctctaattctgatttttcttataaagttcaagaaggcctacttacttagggattcagaaaggagattcagttgaggggctgaacagggcaggtaggagttaggggtccctctgagcagtggtatttctagtgagggggactactagactgaaagata

SEQ ID NO: 100525 - DNA, 1051 bp, Homo sapiens
tctgttcttctgtctgcctgagagtgcacagagggttttgacccctaccttccctcctactctgaatatccaggctcttgctgccacttctttttgccttgttaatctaaagttctacagcttctggcctttccctggcctgggtgccaagcttggatcttatatgcttcctgtaacaactgccctgtgaaaaagctccactattaacttttaaaatatgaatgattccacgtaaataagtgtgtaatatatacatttatatatgataagctacccatataatagcttatttatctaacagcctcatttttccagagtccaactgaaaaacaagagggaagtaaagcattgtcatccttaagtatttgcacagtgctaatttattcttatttttatgtgttgttgtaacaagtttagcatttggtttctaaaaccccataagattaaaagaagaatatcaaaaaagggagaagagctgctatattaataccatctaggggtgagagctgaaagctgactgaaaggggaggggtgaaagaagaagttaaaacaacagtctgggccgggtgcggtggctcacgcctgtaatcccagcactttgggaggccgagtcaggtggatcacaaggtcaggagatcgagaccatcctggctaacacggtgaaaccccgtctctactgaaaaatacaaaaaattagccaggtgtggtggcgggtgtctgtagtcccagctacttgggaggctgaggcagaagaatggtgtgaacccgggaggcagagcttgcagtgagctgagattgcgccactctactccagcctgggcgacagagcgagactccatctcaaaaaaaaaaaaaaaaaaaaaaaaaaaaaaaaaaacagtctggaggccacttaatttaggagcagcacctccacaaacatcggtgtccctcagtaagatgagggtggggctgggtaatttctgtggtagttttgggttcctctcgaaggctagagttatcagaaaatgttaattatttatagtatctactatatattatcaggcactat

SEQ ID NO: 100526 - DNA, 1012 bp, Homo sapiens
ccaggcacagtttcaagtgtttgaggtgtagcagtgaataaaatagttttctctctgtagtttacgttctagtagaggaaagcagataaatgaataaatctgaagaaaaatagcagggtaagggaatagggagacactggattattaaagaaggcctctcagaaaataaaatttgtgcagaaatatgcaagaactggagtagtgagctatgtgtatctttgggggaataactttctaggcatagagcgtgcttcttgattctaaggaacgaaaggaggccagtgtggctacagatggagtaaacgaagggggagataggaatatggagaagtcacaagggtagacagggaccagatcatggagagctttattctgagttaaataggaagacattggagagttttgaatagaggaatgacataatctgacatccattaaaaaaaaaaaaattcccctgcctaattgtaccagctgggatctctagtacagcgttgaatagaattgataagagcagacagccttccttactttgttcccaattttaggaggaaagtattccatctttcaggctaaggaagttcccttttattcctagtttattgagaggtttcattatggatgactgttggattttgttgattttatggtctttgttctttattctacattgacattacattaattgattttcagatattaaatcaacttcacattcctagaataaatcccacatggttgtagtgtataatcctttttatatggagttagatttgatttgctggggaatattgttctgtagttttcttaggtctttatctgcttttggcattagggtggcctcatggaatgaattgatgtgttccctcctcctctgatttctgaaagagtttgtaaaggattggtattatttcttctttaattgtttgatagaattcatcagtgaagccacatgggcctgggcttgtctttgttggaagagtttaaaattactaattcaaatgtcttacttgtt

SEQ ID NO: 100527 - DNA, 3669 bp, Homo sapiens
gcctgtcacccagcatttggaaaataaatgtcaaagagaagatcataatggcctagaaggttggaaactgagtagctagcaagtgtgagagagggaccatgagacataggacccagattgtgctctatcacccactcattgggtgttcccagtcaagctatttctctttgcatcctccatatccccatctgtaaaaatgagttaggcattgtattctccaagtgcctcttcagggctttctgaaatttcattggccccttttttctggctcttgtgtttgtactctagcttttgcctttggtactgaggatttcatttatgagaaggctttttaaccagccaggctttgtctagccctagagtatttagaatgctcctgaaactatgatttcaggccattcaatttgcatctagaaatgccttggttcacctgatcctactccctcatttaacattgagagataatgcaacagagaagaaagactacaggcttgacaaatgacccccaattcagattcctgccagtactagcttaatctttctgaaccatatcaccatcatttaaaagtgcaataatgggctgggcgcggtggctcatgcctgtaatcccagcactttgggaggccaaggaggaaggatcacgaggtcaagagattgagaccgtcctggccaacgtggtgaaaccccgtctctactaaaaatacaaaaattagttgggcatggtggcgtgtgccagtaatcctagctacttgggaggctgaggcaggagaatcgcttgaacccaggaggcggaggttgcagtgagcagagatcccaccactgcactccagcctgggcgacagagtgagaccccatctcaaaaaaaaaaaagtgcaataatgataatagattcagcacacagagaattatttagaagaggaaagaaaaaactgaggcccaagaggtgaagtcacctgttcaggttcaggttcacacccgaatccagatctcttgtgtctcattccagagtttttttcccctctagagccaaggtcagttgtgcccatatggatatggtagcaaagattggaactgaaagcatgtcagcttttttaacatctccgccaacagccctctcaattcccctgtggcacgtgtcaataacacagcccgtacttgttttagaaacaagcgctccataagcactcctgtttgatttgctttggctggtacaggatccagatgctcttagaatagcacaacagactctccaaatcagcctattcccattccgagccactcacagctctgatctgctgctggctggggttcatccccgagtcttccctacctatcatgtgaatcacgttcagacttttgctagtttgtcctttccctcttgagtagaagtaacatttattgtgtgcatactgtgtgccaggtattgtgacaggtactttaaatagattatctcccttaatctttataactcattaagctattaatagctccaaaggggaaagctgaggctcagtgaagtgaatgaatttactgaagccacatatctagtctctgaaagagctagagtttgaactgagtcctgaccccattgactaagctgtaaggtaagctgtttcctgagtatcatactgcctccctgtcctctggccacggcccttccaggagggtagagtgtttgggagtacccaagaataggcgtttggtgccctgagtgtaataggaatgtcttccatgccttcagtgtattttcctgagagtttctgcactctgtgcctcaaaccaacttctctagaactcagatatagagcccagagatccaagcactgagttagaagctatgtttccatcgtgatcatggaacagagtccctagtgaaaagtatatttgtccttttcaaagttgaatagagagagtatttcaagcaataacccctacttgtatgaccaactccaaagtacagggaaggaaagggaaagggtctgtactcctcaaccgtgataagtctcctccagggacctggcaggagtggagacatgcacacacaaaagattttaggactaagattgttctgataggttctcaaatctgtactcaacagtttgcaaagcagtttaccttcaagaaaccgtactgtgaagaaactgaaggaatctgcctttatgtgacagagccaggggctagagtccaaatctttagtcttgataatgccagtgaggctaagtcttccctgagagggttttctctctggcgttgggcgtacccagtctccacttgcaaaaggagcaggcccttagtctctgtctttttctcagccttcctctgccctcttgtccccctcctcactcattcatactcaattgctagggacttatttcaaccccttatagggtgttatttttaggcacagggtgataggagatattttttgtttctgtattttccccaggatcaattgccataaaatcatggaattttaggatatcagagtgggaagggaccttaattgacaatcatcaagtttacatagtaaccctttttttaaaacatgtaacatccagaacagagcttctggctgggtgcagtggctcatgcctgtaattgccagcactttgggaggctgaggcgggtggatcatttgaggtgaggagtttgagaccagcctggccaacatggtgaaaccctgtctctactaaaatacaaaaattagctaggcatggtggcatgggtctgtaatcccagctattcaggaggctgagatgggaggattgcttgagcgcgggattgccatcccggcgggtggaggttgcagtgaggggagatcaagccactgcagtccagcctgggcaacagagcgagatgccgtctcaaaaaacaaacataaacaaaaacaaccaaacagagctgctttggctgaagcagcagcaagaggcctagtagctcagcctccccactacccttaccaaacaaagacgatccccgctcccgccgaggcagctgccttaaacttccagggttcccaggatcacagttcgtaaaacgacactgacctgaaccaactctcccattttatcattgttaaattgaagcccagcaaaggagagtaatgtgccaaggtcacagagtgaattagtggcaggtgccctgactctctgcctggtgtcctttttactaccctgagctgtatgtcattatgtcatttcgttaagtgaccacttctaacacttgactggcatcctgtgcctgggtgtcaggcttctcttgcctcatgacatctggttcctgtgaggtaggcaggcttgtgaatgtgtgtacctcgtcagggcataattttcatacatagagtgagcatgtgtcaggttttgtttaactgattaatgtggaaaccagcagaagtagaatagctgagaaatcagatttagattgttaatgaaagaaggattgctgaaataaaattgttttggttagtaccctaatgaaaatataacctttggaaatattttatctgcgtattaaaggtatataccttcttagttttttacacattaacctcttactgcagagttttaaaacatttgggccctaatcgtttgtgaagaataacaaaattccatttcccaagagtgtcagatgacttagttcatagtaaacaatgtgtctaacatgactttt

SEQ ID NO: 100528 - DNA, 1866 bp, Homo sapiens
gcactttacagatgggcaaactgaggtccagagtccctgaattgtacatgtcagaaccaggattgaatctagaagtcttgggctcctgacaccaaacaggtgctcttaacttgcagaatgtaggttcctttgattcagttcggttcaaacaattcttgaatataacccatgtgccagagactttgctatgcaagagagcctctagttaggctcaaaccgtcttggtctagtgccttacttaagaacagggacttgtattatttacttctctgtccccaggcaggaccttgatccaaaaatgctttgctgttgtttttggccttaatctgccagaaactagagggagcagatggccacagcaatgtgggttatgaggatgtgatatcaggcagggttgaaggatgaattgagagccctgcacccaactacttctgtgtctgtgcctaggcccttgtcagggtagtctctatctgagagtgtagctggtcagcctggtcccatttctcatttccagtcacctccccctcttgccatcccatataatggggttagtctcctggacagatctcatacagaggctgctgggatctgctgtccaaatgaccctttggacctatttcccagccatgttccaagatgatggtgaggagtctagccccacagccagtatgctatctctattcagataactcccagctcacaggcctcccaccaggctctcacccactctgatgttttcactcctgactcctaagaagcagattggcaatttagtgtgagtctgtcagacagcctagagagtaatcaatactgagagaaatggacatatttcctgtttattcaaaatcctgatgaaaattttaaggagcactatttgggaagggatgactgggaaccttgcaagaacaaacagcttaaaattcatgaacagaaatagcaacgtttattcatgatgtttcaaatgcccctaatattcacatctttatatattacagacccctttcatacgtgttactgcttttgaaccttagagcaactctgtgagggaagcagtgtaaggattactattcccacttgacagttgaggaaactaaggcccaggaagctttaaagagagttagggaccatctgatagtcatggtggcagagcccaaaacagaaccaagatttggaaaatgagtactcctgggtttgaaatctggtgctcgccactttctagttgtgtgacctttggcaagttacttggcctctctgagctcagtttccttctctgtaatacgaggataacaatgtctactccttatggttgtgtatggatttaatgatataattaatggaaaatgctagcacagtacagaacatgtgttaggagcttagtaactgcaggtatcctatctcataggatagcgttttcagtatattgcactctgagtctttgaaatttgatactttttttttgtttttgagacagagtctcgctctgttgcccaggctggagtgcagtggcgtgatctccgctcactgcaagctccgccccctgggttcatgccattctcctgcctcagcctccccagtagctggggctacaggcgcctgccaccacacctggctaattttttttgttgttgttgttgtttagtagagacgggttttcaccgtgtttgccaggatggtctccatctcctgacctcgtgatccaggtgccttggcctcccaaagtgctgggattacaggcgtgagccactgcgcccagcctgatactttcactacagtaaaatggactacatataataaattctcattaaccagagtatcatttaaatgcctcactaggttaagagaactggataagaagggaagcagggt

SEQ ID NO: 100529 - DNA, 1023 bp, Homo sapiens
agtaggcccacagtccccacagtccagctcctactaagaactaagctctgacaccagtaatataaaaaagatcctgagaggggtttgaagagaatgtgtaagtttctgctcctctgtcaccgtctccatcacaaaattgagggggtaggaatgttctgctggatttctatccagacagtggcagaggaagttggctttggcatttagtggggctatccttgcattttactaagccctctagttaagatcaaatcaagtttaaaaagaaactttttttttttttcactctgttggccaggctgatctcgaactcctgacctcaggtgatccgcctgcctcggcctcccaaagtgctgggattacaggtgtgagccaccacatccagcccaaaaatatcacctttaaatttgcaagtttatatggtagattgttcaaagcacatctgatcacaacacaatcccgtgacatagaggttcttttccatgtatcatatgaggacgttaaggttcagaaaagagatggtgacttgtccagggtttgacggcaaattagtgatagacccttttcacaagtgcctagtgcaaggccaacatttagtagatgttcaataattttttttttttttttttttttttttttttttgagacaaggcctcgctgtgtcacccaggctatagtgcaatggcacagtcatggctcactgcaggtccaaccttctgggctcaagcagtcctcccacctcagcctcccaagtaactgggactataaacatgtaccaccatgcccggctaatttttaattgtttttagagacaggctcccactatattgcccagactggtcttgaactcctgagctcaagcagtcctcctgctttggcctcccaaagtattaggattacaggcgtgagccaccatgcctagccaagaaatatttattaattgaaaattttagtacattctcagggattaacttatggtctcctaactctttgcccagtattctttccattaagatagcttgg

SEQ ID NO: 100530 - DNA, 1075 bp, Homo sapiens
ctggcctttgctgctgtccttatacatactacccactacagaaagcccagattcagtagtctctgggctgcagactcaagcttttgttgcctttgctccctgtagtatactgaacaatgatgccagtgacccccagcttctcactctgccttctcctttattttctttctcatcagtgtcttacatctccttctattctgctgatggatgaggaatttgagctcatctcacaaacatcagctacacggttcactgttaaggagttgttgtatcatgtaccttgggaaaccatttactgaaaaacgcccacctaggattctttcacctgttcactagcagaaatttcactggttgctagtatagtgctggaggctgggattgcaaagattaataaaatagtctctgccttcaaggagttcagaatttaatggagggagacagatgtgtaaatacaaaagtgcagcagatgttgcagtagaggtcagcagagagtatctgggtccagaggagtgagtggctggatctgcctacggggtgggatacaaaagctttcccgaagagttttctacagggacgtcacatcagtgggtttgtactcagaaaactcctggccccagccaccactgccagatcagaaattggttgcaggctgggcatggtggctcaagcctgtaatcccagcacttcgggaggctgaggcaggtggatcacttgaggtcaggcgttcgagaccagcctgaccaatgtggtgaaactttgtctctactaaaaatacaaaaattagccaggcgtgatggtgtatgcctggcatcccagctacttggggggctgaggcacaagaatcgcttgaacctgggaggtggaggttgcagtgagctgaggtcacactccagcctgggtgacagaatgagactgtctcaaaaaaaaaaaaaagaaagaaagaaagaaattggttccagttgtactttattgatgaagcggtctccctcttaaccttactcaatgttgagtatgatattttgagctatctgttaaatgggggcaatagtaataccattttcatttagaaaattcc

SEQ ID NO: 100531 - DNA, 1077 bp, Homo sapiens
ccttgctattatattgattgttaaaataataaacttgttaatatctttgacatcattaaagtcactgttattaatgtagaaagtagcagtatgtcttattgcatatattacctccagttaatggatccatgggcactattggtgcttccatcacatgtctagcaatgtgcccaaaaatctctatgttgcttgaggagaggagactaatacatgagacaaaaagggtttggcacaagatgggatgctctgctcaggggttggattggtggttcagatgctcagaagctatagggacttacaagtgcctccttactgagcactgggctgcgtacaacatcagaacgggtgatggctcactcttcagtgtccacaaagccctttctgatctgatctcggctaggcactctagtatcatcggcatcatttcttgttacatcctagactctgggcaaaccacaatacatcatattattcattaaatgtgggatctctgtcaaacttctgtaactttccttatgctatttcctcttaaatgtactctcttacctgtgtgtgggttaacttcaactcatccttcaggacaagattggaacttactgttgactcttcttgtctgagtcgtctccctttctttctgtcccttaggtaattgacatgcctccaagttcctagttgctcctgtcatagacctcatcaagatgaaacataggttctggttttcttgaggttttcaccactgactggactataaattcttccaggggggagattgtactttattaacctctgtagttttatacagtgtctggcagtaataggtgaacaataaatgattttttgataaatgagtaaatctttttagcatgttattcctctacctaggaacctacagtaacttcatggcactcaaaactttgtagactcaaaagctagtaaacacagtagactatacatcttcacatgtacatgaaaacagtaatgaggatttgattttccctactaattcacctctactctccctaccccaccacctgcccaatatggtaatacatggtgctgcgaggttgccatgaaagt

SEQ ID NO: 100532 - DNA, 1008 bp, Homo sapiens
ctatggcagccctgccaggcctgagtaatggccatagcctggagcagggttttccttgagctccatcggggtttccagtaattggaacatggcaccttccaacttgtaatggatggcaaaacaagaggggcatttgtcactgcctgacttccctgtgggaaagaggctcataagtcacagctgacaaaccctttgatgacttttaaacttcatttacagaacagaatagctataatcaaccaacagcaagcagtgactaatcttgccacattatcagtgtgaggagccaactcttaaggcataggaatggggcgggggccatccccaaagctcacagcaagtgctgattggctcttggacttgagagtatgccttcagctaggccctgtgagtttatgctcaaaggatcagtgttaggaggtagaggaagaaactgacctccaggcagatacagggcatgcccagttttgaagccattctgggccaagattatgagaccagctctggtctcgcacatattcatcctacctctgtcatttcctggcttgagcaagaccagacaccaagctttggtttcatcgtatgtgaaatggtcacaacatgtatcatcactatctcatagcagaaggcttagtgcagttcctgggatgtaagtactccacaagtattgatgatggttatcatgatcacatgtttgggcctggagtaccttttgtggtcacatggtttaaaacctaggtcatatggcatgtcagcaaagccaagaccattcttcctgtggatgggggctcagtgggagcaatctagtggaatgggaataacacaggctttagaatcagacaagcccttgggtctttcggtccaaagcatgcaacttaatgtgactgtagacaaattaagctgtttctgagtctcagttgtatctgtagagtgcagatgatactacatatctcattagattgtgatcaggattacaagagattatgcctgtaaagctttcaactcagt

SEQ ID NO: 100533 - DNA, 1033 bp, Homo sapiens
ggcatcaacctgtaccaatgagcagaagactgggccgggaactgccaaggcttaacttgaggcttttcctactgaaattgagcttctctcctttcccctttcctcttggagcctatgcccagccgtaaactgtacgggaaaaatttgtacagccctttggggtaaaagacctggccagaatatagagagcaaagggtaggtgcagtctcatctctaagccaaacagaacaaaatttgaacgagttagtattaatatgggtaactaaaaaataaatttattaaaaataattctcaggtgaatgtgctgactttctgtggtatctaaattggctttagctctgggaagcaaaatgataaagttgaaagaaatagactttagtgacagactgacctgtgttcgaatgctcattactagtaagttaatgaacttgtcaatcagtttctggtaaaatatgagtaatcatgacattaacttgtgggatcttgggattattcagtattgtataccacccttagccacagcgagtgcctggtgaggctttgtgttagtccattcttgcactgttataaagaaatacctgagactgggtaatttataatgaaaagtttaattggttcacagttctgcaggccgtacaggcttctgcttcttgggaggcctcaggaaatttacaatcatagtggaaggcgacggggaagtagacacgtcttcatatggccagggcaggaggaaaagagacagtgggaggtgctacacacgtctaaacaccagatctcacgagcagtcactcactatcatgagagcagcaccaagggggaaatgcatgatttcagtcaccatgatccagtcacctcccaccaggccccacctccagcactggggattacaattagacatgagatttgggcggggacacaaattcaaaccattatcgggcttagctagcatacccttttcaaaatggttggtagcaattcagacaggtctgtgtctggatcagactaagcagttttcttttcttttctttttttt

SEQ ID NO: 100534 - DNA, 3162 bp, Homo sapiens
tttttagtagagacggggtttcgccatgttggccaggctggtttcgaactcctgaccttaggtgatgcacccgtctcggcctccaaagtgctgggattacagttgtgagccaccatgcccggcccctgcaattttcatcatatggtggtggtctagagtaaacatcacttgcaaataccatgtgaccatggttctacattgaagatcttcaaatttagatcctgaatgggataacatttgagatgagcattaaaggagtagactcaaaagaattagagtcaagcagatcagggggtcagatcccagccctgccattcactaacattgtggtctctctgaatgtgagatttctcccttgtaaaatgttgtggttctgcatatcatgtgagtaacaaatgagggaatgtatgtaaagcacctggcatgaggtcagcagccaatatgtggcaactcttggtaatatgacaagaaaacaagatgcaggaacaggtaggctggatgctataagggttaaggaaggtaagaggcaattcatttatccaggatatgggccgtgggcagtccttgagcccagcccagggacccagcttcaccgaggctctttttcttcaggtgggcaccatgtccttgaagcttcaggcaagcaatgtaaccaacaagaatgaccccaagtccatcaactctcgagtcttcattggaaacctcaacacagctctggtgaagaaatcagatgtggagaccatcttctctaagtatggccgtgtggccggctgttctgtgcacaagggctatgcctttgttcagtactccaatgagcgccatgcccgggcagctgtgctgggagagaatgggcgggtgctggccgggcagaccctgggtaagcctctcttcactatattctcctagtattctctagaatagctgctatcactatccagttctcaacccccttctctctttctctcaccgctaccactgctctgagattttataaatttataagctatgtttaagttttaaatagttataaaattaatccctatagggaagaattttagaagcctctggaaaacacttctgacctgtctctgctttctcagagcttcttagtgacaggctttacagttccagttaaaatgcagattctccagagaaagagaacagagtggcctagaacagcctgttacaccgggtacagatgacttaggttagaaccctttctgagagcgagcaggagggcctgagagcacaaggacagtgtgaatacgcttggttttggtgtcatgtccatgtgatatgactatgctagtggtctctcttgaagtatgtacagtgttcatgcatgtgcatttactcctgtgtatatgtgtatgtttgaaaaggggtatctgtatgtgttttttcctgaacaagaagtatatggattgactgaacatgtggagatatgtggacacaacccttgtatgtatagatgtagtgtgtgtgtgtgtgtgtgtgtgtgtgtgtgagagagagaacatatttgaatgtgtcagcagatatacatatattcatttaccaggtatttattgagaccttttcatgtagtaaggactattctaggcatgaaggtgtttggtagaacatccatgtgaatgtgcattggctcatttgcatgtgggtagttgtctatactgagtgtacttgagaatacacgttacctgtgtgtgagtttcttacctggatatgtgaatgtatgtgtgagtgtggctctgtgtatgcgttcccatgtacctgatgtgttacgcatttacatgagtgtatttgagaatgcatataggaatattcgacgtgtgtgtgtggtggggcgggggggaggacatgtttatgagcatgcctggatggatctgaaagtgtatggacatataaacaggcatatccatgtgatacctggatatgaatctaatgtttgaagattagatgtatgaagacctttgttggcaccatcagtgagcagaatccatgtgtataccgtgtaagcacatgaattgctgtgcgtgtgcatgaggttgatgtgtgtgggcacactgtcatgttagcattccaactctgccttctccctccacacagacatcaacatggctggagagcctaagcctgacagacccaaggggctaaagagagcagcatctgccatatacaggtggggctgtctgactgtctgtctgtctggtgggatgactctctctttccacagagggagtaaatgctggtgtgacagtgtgctgaatctagaacttggggaggtgtctggagatgagggcctgtggaaagtgggctgagtggccgtccctaagctccagccctctcccctttgtttccccagtggctacatctttgactatgattactaccgggacgacttctacgacaggtgagcaggggaggggcgtgcccaggcatgaaacagccaagctggaagggtcttgagagattgttggtgcagcccactgagttctccaaatgagaaccaaaacccagaggtttgcctggggttgctccaccagtcggtagcagagctgagactggggtcctgtgctgcaggtgctcaggccagagctcctaccaccatacaacactgtctgccatgctaactgccctttttccttcttgtccttgggtgaggctcaaggagaccgtacagccaagagctatgtaagtgtggctagttggaatacacaacagggtacagcgctggttgcagggagtttgagcccttccctctgtgaggtgcccaagcagctggtaggagccccagagctcagtctaagcttcttgggtttatatttagagacaagaggccagcagccatttggaagtctaattagtccctggcgggctgtggtctaccctgcactcccaagccctacccagactccagcccagaggctgtgggctcccactacaacagcactagccacattcttgagtagaaatcatggtagatactaactcaaatctctcctcctccctgcttctctccctctgtccagcttagcccaccccaggcagcccaagaagaacagtgcctctctgagcatgagtcgtccgcccccatccccaccccgcccctgtgagtcgtttcaggagacagtgtggtgtagtggaaagtgtcttagcctg

SEQ ID NO: 100535 - DNA, 1214 bp, Homo sapiens
gctagtgtcaagcctccagccccctaggtgacagccctgtcccccctccactcccagtaaagagcagtgagctgcaggccatcaagacggagctgacacagatcaagtccaatatcgatgccctgctgagccgcttggagcagatcgctgcggagcaaaaggccaatccaggtcagcctctgaggattctcacccacctccatgaccagggcacagggcagagcatggggaaatagtacatgggagagaggagctagggtggccctgcagatcctggaccacctgcactcaccatgctgaggccagcttccgctaaggtgctgccctagacagctaccccaggctgagttttattctcccctcctccaccccttcccctcaagatggcaagaagaagggtgatggaggtggcgccggcggcggcggcggtggtggtggcagcggtggcggtggcagtggtggtggcggtggcggtggcagcagccggccaccagccccccaagagaacacaacttctgaggcaggcctgccccagggggaagcacggacccgagacgacggcgatgaggaagggctcctgacacacagcgaggaagagctggtgagggcctggccaggggcacgactgggactcgactgtgctcctactctcaggaggccaacaggggaatgggcagcctgagctggttgcccccactgtgaacttcctgttctctccttcccaggggttctggtcctgggggaaagagggaagaatgagcagggggcacttgcctatctcagacaccatcagaagtcccactgaggcctagggcagacctcccccaaatgcgggcacattctggcctccggtttccacatgagttggagaatgggagattcggacataagggagcacacacggcctgcagagcttcagagcagggctggggtggcttgtggaggccacagccaggaggtgggtttttctaaaagccattgctgcttaagcatgaagcaaaagctgtctcataagggggtgagctccccgcctgttactagaactattcaggctgaggccggcaggccatttgacaaggagcttatgttgagtgggagggtggaccaaactctgagtctgtgggatatgggttgtacacttgctgctcatttacttaatgagcgctcattgagcaccaagacccagatcatactctctaacttcacataacctt

SEQ ID NO: 100536 - DNA, 2905 bp, Homo sapiens
ttttgaggctgggtgtggtggcctacacctgtaatcccagcagtttgggaggccatagtgggaggatcacttgagtccagtagtttgagaccagcctgggcaacatagggagacccctccatctctaccaaaaaaaaaaaattagcagggcacagtggggagtgcctgtagtcctagctacttgctaggcttaggtgggaggattgcttgagcctgggagattgaaggtgcagtgagccatgatcacgccactgcactccagtctgggcgacagagtgtgagaccctgtctcataaataaataaattttgggaaaccaagtagtatagcaccagtcctagagtttatcctatgctactgaatatattttaagttcattaagtttaaaggtgctggaatttggttcctttaggaaaaaacaataataatggagatatttttgttttctttcatagtggttctatagatggtaataaccaacttgtaatcaaaggaagattccaacagaaacagatagaaaatgtcttgagaagatatatcagtaagtgtataattcatttcattagatcaccctgaaatgttctcatgaggctgcagtgttagaggaagagccatttgattgcagtgagctgggaaaagctggccttaaaaagatcagagacaaaatgatagtgaaagggaggtggctcttgcctactaactaggggtatagatagaaaaggatttggatttttaaagaaagcccagctgattgaagctgctggttgattgtagggctgaaggccaagtcagagaaacttgcctgtgattcaggcctggccttggcccccttttgttcctagttatttaaaattggcatgtctgtcaacatgtttgagtggctctcctctagacagaaacgagaataagcaagctggcaggcttccttgcatcctggggcattgagtatcagcccatgtttagtgccggaagcgccacagcagacagcttgtgttttcttacccctcgaatagctgcgcttccctggtctgggtgcccagctaaattctcagcctgggcttgtggagttctttgtagatgtatttaagaaggcagaaacttctctacctcactgcagccaccaggtaattctgtgtgttgctttatttgcagaggaatatgtcacttgtcacacatgccgatcaccggacacaatcctgcagaaggacacacgactctatttcctacagtgcgaaacttgtcattctagatgttctgttgccagtatcaaaaccggcttccaggctgtcacgggcaagcgagcacagctccgtgccaaagctaactaatttgctaatcactgattttgcaaagcttgttgtggagatgtggctggacaggtttgccatcagagtggatataccgttgtattaaaaacaagataaaaaagctgccaagatttttggcgagtggttggtctgaagtccttgcaagacgctgatgctcaagctgttgacatactcattgcctactttaacacctgtcagagaaacgtgatatggggtaaggaggtgcttttttaaaatcgttcatagacttctgtaaaatgcaagataaattaaagttattataacagtgattctttcaatttggtttgtccttcagttttcttttctataaatgtgcttggtgaaatcagcaagaaaccaaccatataaaacagtgtgtgccgggctctgactgagaaactgaacaatggcaggcgcttcatctgggcagccatttttcttctctgcttctcttgagatacatagttaaagtagacacggcctcccacgcgagtgtggtgggaccttgagacttaggaggattgcctgttttcagtgtccagggaatgactccatagatttgaattcttttccgtatgtggggatggttgctactacctcaccgccaagtcctcccccagctgttaccacatgagggaatacaaggtgctaggtaccctccttcctcgttggccactaagaggtcttagaaacatagcctgtaaatgtgtcttgtaactggcacactaaaaaagatcctagttgagcatctctcttggtgaggaagcgatgtgtgtgcggttcaggaaactcctccaagaggaggaggagtccaaacagggatgccagaggaagctttccgttttcctagccaacttgtgttctgggtttgaaaaagacccaccacaaatgctttttctattttctgatttaaaagtcgcttttgaatatgaccatgagaaaccaagaaatgctgcttgtgtggtgctctgcttcctgaggatttggctggaaggggattctccgctggcacatgggagaaggccatcttctgtgtcggtgctgtgatctgccttgttctcacttgctgaggataagggcatacacgctgctcctcgctttcttgttgcccgacttcgtactaagcagctcaggagcagtcactcagacccaaatgtcttgactgtgttgtttttaatcactgtgacccttaaagtacaggccaagtgttgtcaaacaccttggctaaaacagtggagggtgatgggtaaagcagtagagggccctcaacccacacactggctgaaactgccaccaactgccacgatgaacccaactgctgtttatgcccccattttcctttttttgtatctacacccacacgattcccaatgttggatatttctacatgaataaagcaaggatcagtgcctcttatgtaattaacgctccattgcttttgtgtatgtatgtgtgtttgggttattctttacttagcgggaccctttaggagaaggaatgatactcttcagtttggtgacaggttgacaaatagactggtgatttcaacccgtttttaacttcattcttgaagcagat

SEQ ID NO: 100537 - DNA, 1860 bp, Homo sapiens
ttttcttaaagtcagacttttttttcctaaattggtaacaggctgttgaagaaatacagctagtaagttgatgagtggcactggagaaaccattgaaaccaggatctgtgatgaaataggtacttacctgtcttcagggctcaccttttgaaggcactgagcaagtcattcccattcaggaaggccaagatctcatggaccccatgccaatgagtttgactactatctggaagcctaatgtccctttaaaaataagtaatgtagagtaggtcatgataatgatgactaatgcatattgagcacctcttttgtgccaagtgcttttttgggtgccatctcaattaatcttcacaatagttctatgaagtagaaagtaatattcctatcttcacgttcggaaacaggttcagtaaagtgaagttgtagttggtcacatagctagttagtggcacagtcaagatagatacaatcaggtctatctgtccctgcagcttgatcacctaacaggcttgacacctgtgcgtcactggcagtacagagataattaaggtgttctcttcctactctctttaaactgttgggatttgctacacttggtgtggggttaaggggtaatttacttgaccgtggtggatacgtaggctctgttgtagaagaattgtgggttttgttgttttgttttgtttttttgagatggagtctcgctctgtcacccaggctggagtgcagtggcacagtctcggctcactgcaagcctgcttcccgggttcatgccattctcctgcctcagcctcctgagtagctgggactacaggcgcccgccaccacgcccagctaattttttgtatttttagtagacgaggtttcaccgtgttagccaggatggtctcgatttcctgaccttgtgatccgcctgccttggtctcccaaagtgctgggattacaggcgtgagccaccgcacccagcatgttttaaatataaatttgttaccatcgttatttgtaacttgcacaaactaatgagggagcaaaagctagcattgttttttctattgttagaataatctagaggttttgttagaggtgggataaactattataacaagttgtggccagtaaacttatggtcaatgggttaaatgggttttcgagaaaattccatttattttgacagtgaatgaaaaagaatttctacatcaagcattgcaatcactgtagcctggagattaagggttacaatctgtggaggaggaaatttaaccctgcttgactgaattttgttgtttcactttatgatttataattttgaatgaatgataatatctagcctagagctttgctttctcaaaagtgcctgtcaacagtttcctatcagtttatcattaagtaccattgacagtttgtggcttgtgattcaactatcctttttttttcttcaaacagctttattgagataacagcttacaaatttaaagtgtataatccaggagagtcccactcggacgtccgtctctctcgcaagacagagctattctttctcttttgcctattaaacctccacccttggaccccccccccccaaaaaaataaatatatataaataatatatacaatccaatggggtttttttttttttttgagatggagttgtgctctgtcgcccaggctggagtgcagtggcgtggatcttggctcactgcaacctctgcctcccaggttcaagcaattctcctgtctcagcctccccagtagctgggactataggcgcccaccaccacgcctggctaatttttttgtatttgtagtagagacggggttccaccatattggtcaggctggtctcgaacacctgacctcagg

SEQ ID NO: 100538 - DNA, 5307 bp, Homo sapiens
ccctcagcttcctgaatagctgggtttacaggcacccgccaccacgctgggctatttttgtatttttggtagagaggggtttcaccatgttggccaggctggtctcaaactcttgaccttaggtgatccgcctgccttggcctcccaaagtgctgggatgacaggtgtgagccactgcgcctggctggcagattggtcttgatagccacatgtggcactaagactacacaactggatttgggatcccgaatctgagctttatttactcccagctattccaacttttctgctggtaagatttctgaaatgactgtagccattgtcccaggtcaggatgtaggcacacacaaaatagatattaatgaatgagtaaggttgacagcacagttcaggatagggagctggataagctggtagaaggaaggagaaatcagaaagctggaaactgagactggccttttctgctcttctgggatgtttatgactcatttctaggttttaatatgccctgtttacatccatgcctctggcaactaatcttggggtcaagctttactttgtttccattccattccatcacttgatcctaattccccatggcttctgcctttccctctttgataatgtcatctattggagtgatgcccaaagaccacgccacagactggtgccaggctgactgtcatataataaaaaataaatatttgttctttacgttcttggctcacaactgctaaaatccttggaatctccgaagtgataacagggtctttggtacgctaatgagatttctgaaatgactgtagccattgtcccagttcaggatgtaggcacacacaaaatagatactaattaatgagtaagggatcccttatctggggatctctagatagctttaggatgggggctggtcaccagaaggacaaagctatgattttagagggttggaactttcagtggtccccctgccacctccagagagggaaggtgtggagattgagctcagtcaccagtggttaataatgtaatcagttggccaggtgcagtggctcacacctataatcccagcactttgggaggcccgggccggtggatcacctgaggtcaggagtttgagaccagcctggccaatatggtaaaaccccgtttctaccaaaaatacaaaaattagctaggtgtggtggcgtgcgcctctagtcccagctactcaggaggctgaggtagaagaaccacttgaacccgagaggcggaggttgcagtgagccgagatcatgccactgcactccagcctgagttacagagtgatactcagtctcaaaataataataataagaagtaaataatgtaatcaattggtcatacctttgtaatgaaacccctagacatgggttcggagagctaacatgctggtgagcacagcaaggtgctaggagggtgatgtccctggtgtggcagctccacgcctgccctccttgccacccctcagctcccacccccataacttgtcctatgcattgcttatgtttggctgtttgtgagttgtatcctttataataaattggcagtagtaagtactttcctgagttctatgagtcgttttggcaaattattgactcttgatggcgaatgtgggaacttccgagtttatagccatgttggacagaagcaggcagcatgggaacccaatacgtggtgactggcatctgaagtgaaggcagtcttgaggaactgagcccttaaacctgtgaaatctgatgataactctggatagtgtgtgtctgaaataaactggaggacacctaactggcattggagggttggtgtggaaaaacacatatttggtgtcacccggaaaaatctttcccaatgactatatcaaaatcacttagaaacttctttaaagtactcctgaaccctgttcctgctgaagatcatcaatccgatttaaacttttaaattttctcaagtgattcttttttttttttttctttgagacagagtttccctcttgttgcccaggctggagtgcggtggcacgatctcaactcactgcaacctctgcttcctgggttcaagcgattcctctcaagtagctgggattacaggtgcctgccaccacatccagctaatttttgtatctttagtaggtgtggggttttaccatgttggccaggctggtcttgaactcctgacctcagggatccacctgcctcgacgtcccaaagtgctgggattacaggtgtgagccaagacgcctggcctctgccgtgattctgacagtagcctggtttggaaataaggacaataattataagatcctaaggctgaagaataaagagatgaatgagggggaaagatcccacaagtgtcttgaagaattcacagttcaaatggcagagtctctgtgagccagtttggtccatttctgacaggcgtttcttatctgtaacttcaattttgaatatgtgatttttttccctgccaaaataatgtcagcccacgtcatttttaaaaaagaacaggctgggtgtggtggctcatgcctgtaatcccagcattttgggaggccagggcgggaggatctcttgaggccaggagtttgagactagcctgagcaacaaagcaagacctcctcatctcaacagaaaatgtaataaaataaataaaaaagaatagtcccagtatcaaatgttcagactcatctcactttcttaggatcttaagattgaaagtgatgttcaagaaccaactgaaccagaggatgaccttgacattatgcttggcaataaaaagaagaaaaagaagaatgttaagttcccagatgaggatgaaatactagagaaagatgaaggtaatgctgaggactcagcagcacatttagaggttactcaagcctttggccctggtctccttgatgggggtggagggtgcttttaaaatttttttcttgccccttatttctactgactgataatggaagcgaaaggaaacagtgtttggcttgataatggcagttaaagaatttgttaactgtgattacattaaaaacatactgattcaggcttgggaaaattactataaccggattttttttttttttttgagacggagtctcactcttgtcgcccaggctgaagtgcaatgacacgatcttggctcaccacaatctctgcctaccgggttcaagcgattctcccgcctcagcctcccgagtagctgggattacaggcattcgccaccactctcggctaattttgtatttttagtagagatgggagtttctccatgttggtcaggcaggtctcgaactcccaacctcaggtgatccgtccgcctcggcctcccaaagtgctgggattacaggtgtgagccacagcgcccggccccgattttttaattaaaaaaattttttaaactcgtgtttacagttttattagtttctaaatgctatagggtctttagagaacttttgtcagtagatgagttttatggatgttgatgtttcttaagtgctcaaaacagttggactttttcctctaattattccaatgcattattttatctttgatttgttaaattaagaaacatttcagtatgttatcaactcctaattagagaggtctctattaagggccttttttgaaagtcataacatccctgtttctaaggaaaagggttgtgagctttggtttctttatgcttaaggctgttgtgaatgcagctgtggaagggaagacagatgtctttgaaactcttcatttctctagacccaccccacttttgtattgtagtagggcccacccctcattcttaaaatcttttttatctgtagctctagaagatgaagacaacaaaaaagatgatggtatctcattcagtaatcagacaggccctgcttgggcaggctcagaaagagactacacatacgaggaggtaagacaaaatctgttgtgaaaaggggctaagctattcactagtgctcaaagaagagcaagataaatcttattggaacggccgttgaagtaatgactgatggtggaacagatgcagagaggtcacacagccagtgcacagcaattcctggtgcgcacccgtggggcagcctgcccagagtgcagcagtcattgtagtactactcactgtccccacctgaatttgtggactgctgagggcatgcagccctctaggaattaggagggcagtggtgaattagctaatttagggccagggtagtctggagtttgctagtttgggctttcctgaatcttacttttccatgtatcatgtactttgccatagaaacaacagaatgagtggttgttcattcatttcactttggacaaggagttgctgagcatctataatgaaccaaatgctggttggggatgaacctctgccctcaaggagctcccagacttgtagtaatgcatgtgtatatttaatcagaagtgaagtatttgctgttaagcaacatgactcaaaggggaactttatacccctgcagttactaagcgtattcatgaataccactttatttttatagctgctgaatcgagtgttcaacatcatgagggaaaagaatccagatatggttgctggggagaaaaggaaatttgtcatgaaacctccacaagtcgtccgagtaggaaccaagaaaacttcttttgtcaactttacagatatctgtaaactgtaagttggttaatggagtaccttcatcccaaatgccagattctcattgcagttttaagaatgttaaatgtccttattgtcgactttattatagatggaaagaacacacaggtgtaggggttgagggagttcaccgttcaagcctgtcattttcttcaattcataagtctcagggctgttttattttattaaagataacggtcttgctttgtcgcccaggctggaatgcagtggagtggtcatggctcactgcagcctcaatctcctgggcttcagcagttctcctgcttcagcctcctaagtagctgagactacaggtgcacaccaccatgcccgaccaatttaaaaaaatttttttttttttttgtagaaacgtgggtcttgctgtgttgcccaggagggcttgttttattagtgcattcagaggtgagagaaatcaactcatgctgacccactgaggatggatcctaactagatgtagtgaagagtgaggaggctcaatgtagttctcaggagccttgggagcccagggagtggaaaggctcatcagttgctctaggataggcctgccaagcaagcagtgagctcagggaaagtgcctgaatttgggtgcct

SEQ ID NO: 100539 - DNA, 1805 bp, Homo sapiens
agatttaaagttggagagttggaaattgtgttagagctctgactttgtcttgggaacagtgaagagtgatatggtcagattactaaataaatattctcaacatggtcccctaaccagatttttcctatagatctttgagatgacctaccattttgtttttcagaaccataacttttgtggccgggcgcggtggctcacgcctgtaatcccagcactttgggaggctgaggcaggcggatcatgaagtcaggagagcgagaccatcctggctaacgtggtgaaaccctgtctctacttaaaaaaatacaaaaaatttgctgggcatggtggcacatgcatgtagtcctagctactcaggaggctgaggcaggagaaccgcttgaacccaggaggcagaggttgcagtgagctgagattgcgccactgccctccagccttggcgacagagcaagactccatctcaaaaaaaaaaaaaagaaccataagttttgtgattgtggagggactaattaatagtcagtcttttctggtgacttgattaattgctgaactatgtttgtgtaactcataatttgatgctttgccttttagttgttaataattatgccttggtctttttagatgcttctgatgatctagatgacttgaacttctttaatcaaaagaaaaagaagaaaaaaactaaaaagatatttgatattgatgaagctgaagaaggtgtaaaggtagtattgctttcttgttgaaggtaaaatttgacctcttgcaaggttgctaatggctgatgtttccctctctttgactcatctcttactagctttgcttttgttattagcacttaattgccactggtagcgtcattttcttgggagtgtgtctgactaggtatcttaaagggattgtggttcaaggaatttaaatttaggtcttacatattgtattgtgtgccattaagatgatcacaaatgtcccttgtccttaactatactgagatttttggctgtggagaactatttctatgagtgagaaatccttctgagcaaatattcctttggtttcttaaacttttggtaacatattgaatatatacaaattgatatgtgtacctctaagcagcaaagaatgaaccacagtggtggttggtagctgatgacaatgtggcctgtaggcaaaccagagcactcaggctagttttatggagttctctgatcttgtggatacttgagaccctgtgagtcttattactgaattgatttctaatacaaatatctcaaaattcttttggacagggagtaagtaacaggtgggcaggaaggtgaataggagggagggtaggtggatggatgaaaggggaaggagctgaagatctgttttcctccctagagttaccattttaaagaccctgcctaggaatcactttagcagaatccacatgtctatttataaaacccaagataatagcagtacacacactcactcacatagagcgcgcacacacacaacagcaaacatacaccaaatatcttgtgccctctactcaaaattttctttgataagtagtttatttgctcaaactcaagtgaataaagtacatcccacatgtagcaggaaatgtatacagtaattcattgggttttagaaataatgtcataattttatgacagttaattcagtaaataagtatgagtgattacagcaagtcaagcttttgaagtattgtgtggtaattgctagagtactgaaatgagtaagatatttttcctgtttgcagagatattttggttcaaggataatttagaatcctt

SEQ ID NO: 100540 - DNA, 1102 bp, Homo sapiens
ctccatcctgggcaacagtgagaccctgtttcaaagaaaaaacaatacaaaaaaatttacaccccgcttaggtattgttttcctatatctgtaaagtgaggggcatagcataggttgttgccaaagtcccttccctaaattccatgattcattcaaatgtccaaatttgctcatgaaagtgaaagtgaagtatctgtgatactttacaaattgaaagatgtgtacatgtttcagttcacctgatgtttaatagtaacaagaaggttgggtggacaatttattttattttttggtaaactcccctttggtgttttaatgtatcacatactcttttaagagtatgccttttgaggataaagcatatttggaatgtgagcatcattaaaaacaatcatttggtccctttttgttttttgtcttttaaacagatgatttttgatcctactatgagcaagaagaaaaagaagaagaagaagccttttatgttagatgaggaaggggatacccaaacagaggaaacccagccttcagaaacaaaagaagtggagccagagccaactgaggacaaggatttggaagctgatgaagaggacactaggaaaaaaggtgcgtggttgatgtgagagagttactgttgtcatagaagccctggttctatgagcgttttggcttttggatatgcagcgacctctcagcctgacaaggctgttccagtgaagtcaaggccatcagtagtctgtatgcagtggacctttttagatttctgataggcttgttgcagggatgtttccatttaattcacaagttgcaaagatgaaaccttgctgttccagagctggttttccagttgaacccatcaggtctcttctctgactttttaatggtagttgtatttgagtgtgggcagaaagaaatggtactaagataggcagttttgtgtcttagcaagtctgaaaatgtatatgagagattaaaattatagcctaaagtatttggggttagacaccagctttagttacttacccctgtgctgtaacatagacataatttgactgttagagagaaatgtttctataaacattgtatgtgtctgttgaatata

SEQ ID NO: 100541 - DNA, 2556 bp, Homo sapiens
tcctatcacacagagatggcaacacttagcatttgttctggtcacctttggaaggaacttttagatcaatgtcttgcttctctgtgggttcttttgtgactcacacctgcttctgggtatagtatgactataaagttgatttcttgggtaaggtatgatctatgagaggaagcttctaatttgatgagcatcagggtaattttagctggtataccttttctttgccctctccaatcaaacgtgagaagttgaaaatagaaaatttatgcttttgaaggctttgttgtgaacctaaaatataactcaagtgatctgtagttttccatatgtgcactgtcaacagctatttgcttttcaaatccaaactagtttcataaaagaaaaccaatttggagtgtagtcagcttataatttggaagctagacatgaaagtcttaaaaagccattttagtcaagactaacatggcctcatttttggggaggtctgctttgggtgctgcttcgggatccctggtccttatttgtaaactgtacttcgcaggatggtatgaataaaataaggcaatgagtatgtatgttaagtatccagacagtaattgagagagatgttaattatttcagtttatgattcctggatgtttattatcctttacaaggctacaaccaaactgtttagctgtagaccataaggtttttcaggggataagaaggcacttgtgaggctgtcttctggtgatatcaggatccttgccatcttcagtctgtcttgatgaataatggttaaaaggcaattaatattctagggaacttgatgcttgaaaaaatgcaataaatggatggtaatcccttccagaaccaaatttatagtgtctagagttttgtctgtccttttgccaagtctccctatttctagaatgaagatgaaatgtagctacttccctgtattattgcagtactccttgcagtgggggactctttcctctttgctcttctatcttggtagggacacttctttaagttggccagataatgttcttcagactgactgcatttcagatttaattatttatacagttggatccttgttaagggagaaaagactaactttgaaaatgctatgcaaataccatacttctctactgggcaaggacagtaactgtattaccttattacagactgtagcttggtttcagtctagttccattaatgatcttgggacataaataagtttatgttataatcaattttgggaagcttttgagagttttatatgtttgggaaattagagcacctgaattgatgaaatttcagtgataggaatcaagagaaaaccatgctttatgaatggtaaagtattatataaattacaattgctaatatttatcgagtacttacgtaccaggcactatggcaagtgttttacatttacatacttctttaaccctcccagtaaccttgtgtggtttgttgtcattctgctacttgtctccattttacacatgagccgtggaataacacaggtacaagccagagtcagaatttaaatctagtcagatgggctccagacttgtgcttttaaacactttactattaacgctgtccacagcagatcactgggcaaaatgctgaatttaagcatggtattaatagaatatggagagagattggtaaggggttcaggaaaaaaatacttgggatttgaatcaggttctatttgacttcaaagaccctgcactttctttttttttttcgagaccgagtcttgctctgtcacccaggctggagggcagtggcacgatctcggctcactgcaagctccactgcccatgttcacaccattctcctgcctcagcctcccgagtagctaggactacaggcacccgccaccttctgctaattttttgtatttttagtagagacggggttttaccatgttagccaggatggtcttgatctcctgacctcatgatccgcccgcctcggcctcccaaagtactgggattacaggcgtgagccaccgcacccagcctcctgcgctttctactctatcaggtgtctgccctgtatgttgtttaaactattatgtctagataacttttctttcttcaagtgatcagtgcaagcagatagtctacaaattataaattagtttttcacctactctatagtggacatttagataagaataagagaattttggggcaaggcatggtcctcacacctgtaatcctaacactgggaggctgaagctggtggatcatttgagcccaggagttcaagaccagcttggggagcatggtgaaaccccatcaatactaaaaatacaaaaaatagctgggtgtggtggtgcactcctgtaattccagctactcaggaaattgaggtgggaggatggtgtgagtctgggaggtcaaggttggattcagctgagatcatgccactgcactccaacctgggcagcagagccagaccctgtttcatttaaaaaaaaaaaaaaaaaagaacctttaatgttaaacaaaaagcagagtgaaatgttgtatagaggtttctctt

SEQ ID NO: 100542 - DNA, 1350 bp, Homo sapiens
ggcgcctctagctccaactcagaatttctcaaacaccatgacgcccgggggtcatgtgggaaactaaagctccagcgggttcatatgactcagtgtctaacccactaccctaacccaggaggaagggaccccaattcactctacaagcagcgcaaaagaatgctccaaaaggctgaggcaatatcaacaaccgaatgttcttccggctgcagctcgctcagacgccgcgcacaggtcgctgggcggctacagcgcaagcgcaaccctcttataaatggactacaagtcccggcatgcctggcgacgcggcgtcgcctggtaactcgcgccacacgaagcgcgctaggttggctcttctgcgcgcctgcgccttggcgagctctgcgcaggcgcatttccaacgcttggaggagagggcggggtgtcgtttcctttcgctgatgcaagagcctagtgcggtggtgggagaggtatcggcaggggcagcgctgccgccggggcctggggctgacccgtctgacttcccgtccgtgccgagcccactcgagccgcagccatgtctggggacgaggtgaggatctgagcccggcgtaagggctaaggattgaggcgagaagcctaacccactccagtgtgggagaacgggcctgcggcctagcagccggccgccgccatgtgaggcagccgcgcctaggcggcccggagcggcagagccggcgaggactccggagccgcaggcttggccgcagcccgctttcctcagggcggcagcgctgaggcggacctcctgccgtggttggcgtttccggaatggagagcacacgttgagtcgtcctcccggaaggggctcgaatgcccggttaataaccccgaacgagactggggctggcgatccctgcattcctttctgctgggcactgccgccccagctcgcctcactgggtgccgggggtgccaggggtgccgcgaggagcctctcttggcttggtataacgccctcgttaaaactttctaggctatcttgtcggggccggtatcccgcccttgtttgccttcctagcattgttttttaaaaagacgagggggtgatggggttagaacgagagaaaaagattctgcagcctcaggaagtgactgaccttcccggaaagtttccgggcgagcccctgagcttcccttaacagagggctaccggcgacgtgagcgggaagtgcgggctgtgaaactggctggatctttttttaccgtggtacttggatctcagtgaatttcctcaaatccctttccctcagatttatcctagttgatataacgtctaacgacttaaaatgaagttgatgttaagtactc

SEQ ID NO: 100543 - DNA, 1041 bp, Homo sapiens
tagaaaagtgtttgacctgatttgcagagcaaggggaaataactggagggcgttgagaagatttctctgagaagatacatgttagaaatggctgctgcatggaggatgggttgtggtagggagactgggaagaagcgacagggtcacggactagagcagcggcagtgagaatagagaagctgggagttgttcggaggcagagtcactaggcctggtggtggcttccctgtaggagggcgttggggactcctccctcacgcgggtctgggtgattggggggcctgtgggatcagtcacagagatgggaacccagaaagaggaatggctttagggggtaaagatgaggaatttgcatgagcacaggtgtggcatctctgaggcttgtcctgtcccctcttgtttaggcatccgaggcatctctgaggagaccacgactggggtccacaacctctacaagatgatggccaatgggatcctcaaggtgcctgccatcaatgtcaatgactccgtcaccaaggtgagccgaggggcagtgacagctcccgctacagtggctgcagctcaggacgaggcctctgaagaagagtgcccaggaaggctgagattagggacatgaagccctcatttgagggggcaaaagcggttatagacaggctaatgagtgcgtttaaaaggggtgtcagagctgggtgttaggagctttatggctttgggaagaagagctttcaagttaagcaaggtctttgaccgggcaatctctcctagtaactgatgcctaggaaggctccacactggcagagaaagattagagagaagctctttgagccgatcggggtgaagggcttgtgggggcattgggtgctggaggggttcagcccaggccgggatgcttggtgggcccatgatgcctgggctcttcagaatactctgaggccaagttgtcctggccccagggccttgcctgcccctattgtctccttaccccctttcctttcagagcaagtttgacaacctctatggctgccgggagtccctcataga

SEQ ID NO: 100544 - DNA, 1036 bp, Homo sapiens
gtcggtgagtcccaggacctgcagccggttgcggccgcccggcacccgcccggggcttgttcgtggcgggggctgcagggccgactcggggctctctggaccccctggaatcgcagcctcggcgcgtttctggccgcgcgaagccagctggaagttggagttctcgcgcggccatgagcgggccgttccgggtggccgtggactacaagtcccagcatgccccgcgacgccggggccgccgcgcggtctgcgagccgcaaactggcggcgtgctccgcgggagagcacacctggccacggcctgggacggctggcacctgccggaccctgctcggggggcctgcgcccggcctcctaggcctggaccggaccctgtccagctgggcggccccgacgagcgtccacccctctctgggcctcctacagggacggcgagggcaccccggagggtgtatgaggagaggcctggaaagcgagccccaggccggctccgatcctcctctcccctgggactttgggccagttacccaacctgtggggtcccccacccctccagcaggggcagccttgcagaaatctcgaagaaaatttggagtggtttgaaaaatcctgctgtcccaccgattgaagtgtaatacagggatagttaacgtttacttagtgtttcctgtgggatcggcactgccttctagctttattctagtctcatggctctatagggaaactgttctcattttatgatgagaatcctgaggcagaggtaacttgccctcagtcttacagctggtggtgatggagcaagattggaacgcaggccatctagatctctgagcgcaccctttcaccactgtgtgcaagcgaatacacgcggaacaatcctagtgaattttcagcaaaaaccagttcagtttggctggtagcttttcaagtaactttgacactattggaccgggtgtggtggctcacccctgtagtcccagcactttgagaggccgaggtgggcgaatcacttgaggtcaagagttcgagaccagcc

SEQ ID NO: 100545 - DNA, 1036 bp, Homo sapiens
aaaaaaaaagcctggaggtgctgggagccgctcgcgcccatctcacctggagctgaggaaaactgggatttaactgatttaccaccgcagccagctcttcaagccaggggcgggccggacggctggcgcgcaaggcctgctggggcttgtagtctagaccacttccgcgctcaggcgcctgcgctttagctgctaactcgctctagtagctgtggtcggggctcgggaccggctgccatcttagtctagggactgaggagtcgccgccgccccgagtcccggtaaacccccgtgggcgaactcggggcagttctcgggagagggagggagtccggatgagaatgttcggggagaacaagggtagaggagtgggacgcgcggttcgggaccccagagccgcggctgctccttcttccagagccggtgtctgtcgggggcgcggggagctcgggctactggcccgggccgggcggtgggggtgggctgtctggacgttcggagggatcagtgtctggcacaggcttccggaggccttcgcctcgcgggctccaagttgtgaaagggctgggccacgacgggcgtgggtaccgtccggcccctcgcccctcagccccgcctggggccactctccagcggttcggcctacgcgcggggcccggcggcggggccggcgcgggcgacgtggccctgtgaggggcggcggccgggtcccccgccacccagctggccttctcgagacttttccgagcccccagtcgctagaagggcccagcacagcggctgcctccccttctctctcccactcgcctcctccttccattgtccccccggcgtggtggtcccggctccggcgccctccccgacgtccgccaccgtcgtggcggcgccgacttttgcagacgtggagctgtcactgcccttcctccggagagtgcccttttctttagcagagaaaagaaaaaagtagccgttgaacgtattctaagggtcgaagcatgatgacatgacttttaagtggagaactcaagttttccaa

SEQ ID NO: 100546 - DNA, 1031 bp, Homo sapiens
cagaagtctagttgagaaatgacaaagcctgaccttggagagaggttgtggggatgatcaaaggattggatttagctttttactagtgcaatattgttgccatatttctagatgaggatttttttttagagctaatctgggtaaagggctccttttctgtcaaaagaacccattagcaagtctgaataatattgccaggttatatatgttatgtatagtatgagagtgaattgttcattagcatctttgagaaattagaaagaactatgtcaggtgtaatttggaagagaacttgaagtttgttattgttactatttttgagatggagtcttgctcggccatgcaggctggagtgcagtgatgtgatctcggctcactgcaacctccacctcccgggttcaagcgattcgtgtgcctcagcctcccaagtagctgcctcccaagtagctggaattagaggtgcatgccaccaagcctggctaatttagaacttggagtttggactgaaatttatgcctctaaaaagtattgatctaggcttgttgggagtgtttttctctcagcctgtagaaacttgctcattgagttttagagttgggagaagttacagagattatctagtccataatggcaaatatattttggtttattggccagctctaattggaagctgccagaagcactgtgtttggaaggattctggttgtaggtgctctgagaaattgtattatggttgatcaatgatgtctcctgtggacagttacctagtaggtagtagacatgtgccaaatatatgctattcttagataagtccaatctcttagttttctgttttgttgttgtttgtttgttttaaaggttaaataatttacctgaaactagttaagagtaagaactagaactagaactgggttttgcaactctgggactggtattctctggtttacaaagatcaatgtgcactactgaagagcttctggtattagactagaaaaagaaaagggagatttttagcctatgcgtcttgactg

SEQ ID NO: 100547 - DNA, 1017 bp, Homo sapiens
tcttgttgcctaagtctctgttttgggttttggacattggtttcctttataagaattaagacaaaagtatgtaaggtttttttttttgtatttatagtacttagccaaattctgggctcataataagcactcagtaaaggcatgttgacttttatggctgtaaatgatactggctttgagtcaatataaattagttagggggttcacagaattgaattgcagcattctctggttgggaggttggctttcagctaaaaacgttaagttggaaactatcctcacaactagaagcagttaaccagaagctgttcctgcctctatcctcctccagtctagcagtgtactgtccttgaaaaactgctgccagctcagcttttttgcttcttttcagaactgactatatccagatccttggtgtgcgttttcttttcctgtccctaggagtctccaagttgcagggactatcattatggtgacccttataggctggtgtatttatatggccatcctcattttgccagatagccgtcatactcagattggtgtcttcccataatacgtatgaatcattttccctcagttctttcttttgtcctgtctgctccattaaaaattgtctatcccatgaaatttttaaaagagactttgtgcttttagagtcgcaaggtcgttgcagatctgatgtgtttaactatagaggtcagctgggtgtggtggctcacgcctgtaatcccagcactttgggaggctgaggtgggtggatcacgaggtcaggagttcaagaccagcctgaccaatatggtgaaaccccatctctactaaaaatacgaaagttagccaggcgtgggggtgcacgcccgtagtgtagtcccagctactcaggaggctgaggcagaagaatcgcttgaacccaggaggcgaaggttggagtgagccaatatcatgccactgcactctagcctggcgacagagcaagactccatctcaaaaacaaacaaacaaaaaaatatagaagta

SEQ ID NO: 100548 - DNA, 1055 bp, Homo sapiens
tgatccgctcaccttggccttgcaaagtgctgggattacaggcatgaagcatcacctctggccagaaacaaggattccttagagccaggaaattcaacattatatataattagatgtataatttcacacaagcattgtttgcaagagaacaatacttatagtagtacaacaatatttatatttattgtggcaaatgctttaaactctagcagtagtcaaagctagaaacaacttgtaataatagttaattttgaaatgtttgtcagaaagctgtttgtcagaaaggggaagagatcaccttctggaatattaggtacagagttcaaaccagcaaatgaatgctaaaagttagatcctggtgccaatttccttaaattctgtgttcatactgttgaacctcgaaagttgtagcttcctctttttctctttgaacagtataattgtccttttttgcatatgctttagaatccatactgatgtatttggttggaaagtgggaaaggagcttttagtgttctgagatcattgtgtgatgttcagaaccaaagtgtcactgttacatggtagagaatggttcatattctacctccttgttaagtcaattaagtcaatttttcctagtaaatgggaaagcaaccgccttccctatcatgaggggttttgggtttcttcccacttgctttgctgagaaattaaattatggaaatgggtatttaccctctgctccaatctaaataaacttttattccttctaccaataccttcagtagcccatgcaccaaagtcggctcctttgtttttttttttgttttgttttgtttttttgaggcagagtcttgatctctcgtccaggctgtagtgcagtggtgtgatctcagctcatggcagtctctgcctcctgggatcaagcaattctcagcttccaagtagctgggatcacaggtgcctgccaccacacctggctaaggtcctttgtgattattagcagagaatgggatctaaaaatgttcctgtgttccttctagctagtctttgctactgtgcccctagataat

SEQ ID NO: 100549 - DNA, 1028 bp, Homo sapiens
tagctgggactggcacacgccactgtgcccagctaatttttttgatttttaggcgagatgaggtctcgctatgttttccagattggtcttcgactactgagcttaggcaatcctcttgcctcagcctcccaaagttctgggattagaggtgtaacccgctgcacctggcccatatgtgtactttttaattgatctgagttctggacttttgataccatggaattctactgatgggaatttgggttgatggtacggggaacctctatatttatttactaggatgggaggaagtacaaaggttatgagtgaataaaattggtaagtattttagagcaaaactgcttctctgagtaaatttagtaaatctgcctaattatgaagttaaattgatttcatgagtgaattaacatctcaactattgaaatgtttttcatttcttttacatagtcatctcagcaaaacttaaggaaaataagaagaattggtttggaccaagtccttacgtagaggtcacagtagatggacagtcaaagaagacagaaaaatgcaacaacacaaacagtcccaagtggaagcaaccccttacagtgtaagcttggaagtatttttctgtagtatgttttgtttagtagatgattggaaatacaatttaaaaaaatgtttctcactttggttttttgttgttgttgttcctcctttctctcttctttttttttttttctttttcctaggactccttctggtttgcttttttgtttctctttagatagctgtttttatagtcactccctttctttaccttctctagtttagttggtgatgatattgctcttgtcactgaacaatagctgaagagagcccatggtcacggacctaaaaagatttctggcagcactttttattaactttgggttgaattaagggattatgagtactccccccccccccggtttttaacttaatttttaaaaatagtgttttagttagttttttctttgttttattttgagatagagcctcaccctgtc

SEQ ID NO: 100550 - DNA, 1565 bp, Homo sapiens
ccctaagaagaggagcagtgtggaatttttagtttgttttatctacccattgccgttgaaatggtgctggttaataggtacaggtagacttcaaaggaggaaagtgtttctttgtcccctcaaacttgatcacattagagagaatgagatatagagaaattcaaacatttctggaatttgtctttatatcattgaaccataggactgtggtagattatatagtgctcctagctttctgatccttgactctaacattgattctacgtgtattgcaaattcaaatttcccagtttactttggaaataccattatagagagtattccttattggcatttagcaaggaatgagtgagtctatatttgatagttggactgggcaacttgcctctagcagtgtgaaacttgatgtatgtaatgtaatcttcaaatcatgtagctgacgtgaggaactttttaatataaagtttaatgtcaggattttattcacattacagttctgctacttactggctatttgaccttaggcaatttgctttatctctgaatgtcagtttctgtatctgaagaaggaagtgataattcccatctcatagggttactataaagataaaataacttcaagctctgtaaactactgacataaggatttaatttgtaaagttactcttctgtactactaaagtaaaactagttttccaatagtttgttgcaggataagcagttttacttttgttgacaatatgtgtatgaatttacttctgtagttcaactgcaagtgaaaatgaccatgtaagcatgtagcattcagataattttcataagattactgaacataggccaatattgattgtatagtaaactgtaaggggtgcagtgagaagactttagactttaaaactgaattgtaatttatttaggatctcattgtgatattcaataaaaataatattttttccctcttttttcacttttagtatcgttacccctgtgagtaaattacattttcgtgtgtggagtcaccagacactgaaatctgatgttttgttgggaactgctgcattagatatttatgaaacattaaagtcaaacaatatgaaacgtatgtatgtaagactaatagaaattgcacttagctgtttgtttttctggaagaaatttatatgtcaaacatgcataatgactcatgttctctcatacttttaagttttacttggttataggatgaacagatagaagaattttacactattgaaagtattctgagtaaccttggtttgaccattcattttggattcagtatttttagtaaatatttatttacttagtaaatagatattagtaaagtaatacatatttaattgtggaaaaactaaaatatagagcagagatgaaagaaaaaaataaaaatcccacttcagagacaaatcaaatgaatatttttacagatttccttttcagatgcttttttttttgggagggacatggggagacaaggactcactctgttttccaggctggagtacagtggctatttacaggtgcagttgcagcacagtgtagttttg

SEQ ID NO: 100551 - DNA, 1050 bp, Homo sapiens
aatatatcattttaaaacacatttttttctacccctcgactatctaaaacatacttctaaaaattttctcatttaggacttattagatataatttatccttaaattatgtttttactcaatttaattcaggtatatattactaaataatccttattcttatgctagcccattttatactatagtcttacaaggatggaatgaacataataaacgatggagatactattttacatcatgaatatgaaacattagcatattttgtcctttttaaaagatacagtgttttggtgtcaaaagtgttcaaaccttgggtgaaacatagttaaacagtttatatgcacatatagttatattttctcggacatcacatttttaacagttaatttttaacagttaagatgccttaactgggaaaaaagtgaccattttttctgtaactttattttcttccagttgaagaagtagttgtgactttgcagcttggaggtgacaaagagccaacagagacaataggagacttgtcaatttgtcttgatgggctacagttagagtctgaagttgttaccaatggtgaaactacatgttcagaaagtaagtgactacctttttaaggtctttaatgattcttcttaaataaaatagccattgtagtatgctgtatgtaattattttgattttttttttcagattaataaaatgtttttttctggccggtgtggtggctcacgcctctaatcccagcactttgggaggctgaggcagaaagattgcttgagcttggaggttgaggctgctctgagccgtaatcacatcactgcggtccagcctaggtgacagagtgagaccttgtttctttaaaaaaaaaaaaaaagaaatgatttttttctttttaaaaaatagacattgatcactttaaacattttctttttagtgtattatttctgtgaataaaagcatgtatatttttacataagttgaaaaattagccaaatagaagttgaatcacatttgcctccatgagtaatgagttgatttatatagtatttatt

SEQ ID NO: 100552 - DNA, 1270 bp, Homo sapiens
caggtgcctgccaccactcttggctaatttttgtatttttagtagagacaggttttaccatgtaggccaggctggtcttgaactcctgacctgaggtgattcgcccaccttggcctcccaaaatgctgggattacaggtgtaagctgttgcacctggctcctccaacactgttacagtaaaaagatctggactgaatcctaaggatattttccatcaataaagcaagaagaaaataagaatattgtggcattaatttttggcaacttggattcccatttgtggctttcctaatttttaagctgttttccaggcccctgcaataagagagacgttatgggtttttctgtttctggaatcgattttattctgctggcgatcagcacttttttatgaggtatttgggatacaaagatggttaaaacactaggtttaaattagagttagacatatttcaaaaaaaaggcaggaatagtagtgcatgagtaatatacctttagtaattaacatcccgtatccattaattattaagcatttgcacaaaattttggcagactttttttgcagtcatgaaaatcacatttttccttttaaagtcatgttggaatttaagttatagtatgttctttattacaaagatttaataaaaggctttgcttacatggcatgtttagaaaagaaaaaacatgaaaactactctcttgaaactcattttctgtttaaactttgatgttaaaggtgcttctcagaatgatgatggctccagatccaaggatgaaacaaggtaagcattcactgattgcttaccacagaatgcggagagatagatttcctaaatattcattttagtgtaaacttcaggttcatgatataagaataaatgagtgtcagaaagaattcagaactcaagaagggaaatatttgcaaaagattgaagactcttagcttatcggattagagctatctggagtgggctagggataaccaaattgttgatacttcttcagcttgtagaaaataaatatactggcaccttttcagaggcagggtgttctaaactccagagccatcattgggctgttaagtttcttttccagaaaaactgagataggagctttacacatatgtgaaggtcaccactagctatggtatcatctgggccttcattagaaggggcagagctttgtaccagctgtttgctgttagcccaggtttagcactttcatgtgcctatctgcgttcaagtttggacctaaatgtggggaaaagaaa

SEQ ID NO: 100553 - DNA, 1011 bp, Homo sapiens
tgtacatgcttcgtgattagtaatgggacataggggtagacaggaccgaaaaagtaaacaagcctattaactggcagcgttggttatttcccattacttatttctttaagtaattttcacctgtgcatctacatcttaagttttatatttatcatctgccttttattttttacagttaaaattctatcctgaattttagaaaatgaaagattcttttcctattttccccaaatcttttatagcatctgtcaatggttcaccatctgccacttctgaaagtgatgggtctagtacaggctctctgccgccgacaaatacaaatacaaatacatctgaaggagcaacatctggattaataattcctcttactatatctggaggctcaggccctaggccattaaatcctgtaactcaagctcccttgccacctgggtgagtaactttttaaattaacatatgttgtctttaggattcttcataagcctacttattaataaggaaaataacagtaaacaacagtaaactccattgttttgatgactgttttttaatttcttttttttttgagatggagtgctctgtctcccagactggagtgcagtggtgtgatcttggctcactgcgacctccgccccctgggttcaagtaattctcctgccttagcctccctagtagctaggattacaggtgtgcactaccaagcccggctaatttttgtatttttagtaggggatttcaccatgttggccaggctggtctcgaactcctgacctcaagtgatccgaccacctcaacctctgaaagtgctgggattacaggcatgagcacccagccaactgtttttatgttattgtaactgattttgggggatctggagtcaaaatgaacaaggaaaacacaccatatttgaaatcttcagggcaaagtggaaaaatatattttttcatcaaaggaccctgaaagttaaccaaggccaattaataaaataatcacctaattccaattgccttt

SEQ ID NO: 100554 - DNA, 1062 bp, Homo sapiens
cccagctaatttttgaattttcagtagaaacggggtttcaccatgttggccaggctggtcttgaactcctgacctcaagtaatccacccgtctcagcctcccaaagtgttgggattacaggtgagagccactgcgcctggccatttctttccactcaaatcctgattataccctgattgagagtgacttcggtatcctaggtagacggacctcaagcctcttcaggaatatgttttctcctagagcagatacttgcatagaagaaattgaattcactgtgtgccactgcctgaagattacatttcttcactttattcctaaattgtatttgtatcatctttctaaactgatgtccttatttgccttagttcaataatggtcatttaatggaaatgcaaagacaggattaaaaagccaggtaactcatgcaagtattttaccagccttttaattttgtatttaagttgggagcagagagtggaccagcacgggcgagtttactatgtagatcatgttgagaaaagaacaacatgggatagaccagaacctctacctcctgggtaagtatctaaatttaaaaagaataattttatttagtcagaattgtggattacaactgtataatcttccctacatttctgttttactttttcttgtcagccctttctctgtccactttgttttgtggtaagtacaaattaaaaagaagagagctagacaactgattaattcagagcctgataaacaatttttgttttcacgcatatttctttcttcttttctttattttatagaaacaacatctcgctatgtcgcccaggctggtttttaactcctgagctcaagccatcctcccgcgttggcctcccaaagtgctgggattacaggcgtgagctatcatgcctggccctattttcactcatttctgacctaaagattccttaggtgggctgggcgcagtggctcacgcctgtaatcccagcactttgggagggcgaggtgggaggatcacgagctcaggagattgagaccatcctggctaacgtggtgaaaccccgtttc

SEQ ID NO: 100555 - DNA, 1050 bp, Homo sapiens
ggtggccaggctggtcttgaactactgacctcaagtgatccgcctgctttggcctcccaaagtgctaggatcacaggtgtgtgagccactgcacctggccaaaaagtgctttttgatatctgtccaaagctatatatttaatttgtgtccctgttatgattgaaacagtaaaaacaacattgaaaagaaactcaaaacttaatgactgtttgagacttactcactaaatatgtattgcattttaagaacctgactaatgcatcttatgaactttcaagaaataaatttttagaaacatttctcttaagttcacttacaaactatttaaaaatacataaaagactccagataaatcaaaagtagtttctcaaggtaaaatattctatctgtttcacaagtatttgttgaattagcttgtttttttttttttttttctgatttagctgggaacggcgggttgacaacatgggacgtatttattatgttgaccatttcacaagaacaacaacgtggcagaggccaacactggaatccgtccggaactatgaacaatggcagctacagcgtagtcagcttcaaggagcaatgcagcagtttaaccagagattcatttatggggtgagcagcctgttgtttaataaactaataagagtattttgtttctagccccttccagcatatgtcatggaaagcactaaaaagaaggtgcaagtagcatggcaacccagttgttgctgttagtaggtattatttttagaccttgtctggggtattctgtgtgtgatctagtttttcctttttgtaatttgcttaagtccaacttcctcttctttttaatgtcaaaaataagcaaaaaataagttaggacaacttaaaattcatgaacaaaagagtagtaaaaataaacccaagcagcttgaaaataattaaaacatttctaaatttactagtgccttgggtctaagagcatctgactctaaagtggttgtgcaaaactgatgataagagtttaaccactttttaccatttggagataaggcttacctaata

SEQ ID NO: 100556 - DNA, 1029 bp, Homo sapiens
cctgagtttccatctcatctctgctacttaattctgaggtttcaggtagattatttaacctatctgagttttcttatcttaaggataaagatgaattcacctaccctatgggactattaagaataaaatgaaggtcctgtgtaaaaaactaaataactgttcattattcttgctgctgttggttggattgagtagaaaggtcctatggttaggacattataaagtacgtctacttagcttctaagatgtaatatttctataacttcagtaaggatgtgcatttaatagtcaataaattaaaccttttaaagctgtgatttaaaaactataaaataaacaatgaaatgagaaatgggcaaattcaaataattttattttaccttgagcaagaagactatgccaatgctaatgctttgctttcccctgcccctgcccttcccaaagagaagagaacagacagcaatggcagagtatatttcgtcaaccacaacacacgaattacacaatgggaagaccccagaagtcaagggtaagaatagttacttgtgtatatttaatctcttaaagattataccttatttctaacaactgaagaagatcaaagttcatattcttttgccaaagacctaaaacgttaatcacctacatactttggaaagagaaaattatactattattttcatctaatggaaagtttgaagatttcttcaaagtgcaggaaaaaactttaactgggcatggtggctcatgcccattatcccagcactttgggaggccaaggagggaggattgtttgaggccaggaagacctgcgtaatgcagtgagaccctgtctctacaaaaaaaatccccaaaattgggtgtgttggcatgtatacctgtagtcccagctactcgggagactgaggtgggaggatcacctgagcccaggaagtcgagactgcagtgaactatgattgtgccagtacactccaacctggaggacaggttgagggctgtttcaaaaaaaaagaaaacaatagaaaagca

SEQ ID NO: 100557 - DNA, 1010 bp, Homo sapiens
agtcccagctgaggctgaggcaggagaatcgcttgaacctgggaggtggaggttgcagtgagccaagatatcgtgcccctgcactccagcctgggcgacagtgagactccatctataaaaaaaaaaaaaaaaaaaaaaaagcaggagagaaacaaagccagagaaaggatggtgttggggattggaaatagagatgaacgtgaagatttctaaggcagaatggttagaacttggttaacaaaatgtttaggatgagtcattagctaatggggaacataagccaagtagacggcagaagacttgagttgtgtttgatggactttgagtttaacctgtttgtaggatgtccacatagagatgtctagtatacaactgaattactgaactgaatggttttctaaaagatttctgctatgtttattgacatttgtagcttctgtacttggcaaacaagcaactctttaatatttttgtttatgttttttcctgtgtttcgtagtcaattaaatgaaaagcccttacctgaaggttgggaaatgagattcacagtggatggaattccatattttgtggaccacaatagaagaactaccacctatatagatccccgcacaggaaaatctgccctgtaagttttctaaacattgtagattaagagtaaaatactagtccttcagattttgatataaagatttgtattagcaaggagtggaagtcttagtatttcttgagttagcttgacaataggtttctgttcattaagtattttgcatttccatctccctcttggatattttatcctagagattttcatatttgttaccatttgttcacacagcactaaatgaaactatttagaatttataggtattgtactgcttaccaattagtctctgatttctgattttcagcttctttcattcccttaactttttgacgttaaaaaagctctcattacttatcccccaccccatttctgagaaagtaaccttttgatttgcttatgtgct

SEQ ID NO: 100558 - DNA, 1064 bp, Homo sapiens
ataatcttatgttaatattggttcatattttcacaatatttgacttagagtctcagcatttttctaatatgtgagtggctggaattaagaactttactgcctctgtgaaattggaagaattttcatattgatttaacgtgtagggagtagtggcacttgatggggattattatgggacttagtaatagatggaatattagattgatttcagccactttactcacatgggtaaatagtgaattttaaatttgcctatgaatagtatttcattgattctaagactaatattttcattttataatatctctgaaattacgatgtatctcaggtaaaattggaaaatacaatttagtcgttcatcaaataaaggtgcaatgttgtcttagattttttgaaatgtaataatgtatatattaccatctaccaaagatggtgtatactaccaactctgtgaaacagatgtgagtttgaacagaagcaataaaaatcaacatgagattagaaaactatcactagctgaggggtatagatccctgagaactttatagcactgttctttgatttcttggtaacctacaagatttttcatcgtaaattttcttttgatttcagagaatggttctttcttttgtcacatgaagtgttgaacccaatgtattgcctgtttgaatatgcagggaaggataactactgcttgcagataaaccccgcttcttacatcaatccagatcacctgaaatattttcgttttattggcagatttattgccatggtaagtgcaggtcaagaattatgtttactttgcttattcagcaatactaaattttctcttaggtgccataacagatcatatgagagaaagggaagtggttttttgttttgttttgttttttatttttgagacagagtcttgctctgtcacccaggctggagtacagtgacacgatcttggctcactgcaacctctgcttcctggactcagtcagttctcccgcctcagcctcccaagtagctaggattacaggtgtgcgccaccatgcctggctaatttttgtatttttagt

SEQ ID NO: 100559 - DNA, 1191 bp, Homo sapiens
catttgattctttgcatatttccttttctcaaactaacaattcttgcttttagttttaatcgcctggacctgccaccatacaagagctatgagcaactgaaggaaaagctgttgtttgccatagaagaaacagaaggatttggacaagagtaacttctgagaacttgcaccatgaatgggcaagaacttatttgcaatgtttgtccttctctgcctgttgcacatcttgtaaaattggacaatggctctttagagagttatctgagtgtaagtaaattaatgttctcatttagatttatctcccagtgatttctactcagcgtttccagaaatcaggtctgcaaatgactagtcagaaccttgcttaacatgagattttaacacaacaatgaaatttgccttgtcttattccactagtttattcctttaacaacaatattttatgtgtgtcaaaagtctcacttgggagtagtgtttttttcttttagacattctgcagacatgcagggaagtcctttggtaactgcaatatacaagattttcctattaagcctcttggtaagaggcatttgttaaaagtgcaagcttactcctgcttctggggatgtgagcaaaattcgggcttgtgttctccctctcattttagtctgacttgactattgtttttcctttctggcgcatgaatccatacatcattcctggaagtgaggcaagactcttgcatctctacaaagtagttttgtcaatttgaattcagggaaaagttggtcacagcctgcaaatgacttcatttggaagtctgattgtttcagttgcctgacaaatactacactttacaaacaatgttaacactgtgattccttcattgttttaagaagttaacctagggccgggcatggtggctcatacctgtaatcctagcactctgggaggccgaggcaggaggatccctttagcccaggagttaaagaccagcctgggcaacatagggagaccctgtcttttttttgggcagcgtggtgggggataaataaataaaaggaaaaaaaacttagcctagaattagaattaatttaattgaattcatctaaagatgtctctggtgatttttatatgttccgctatataattgatgctttatagttttatcataatccaacaacttcagttatatttaattattgttaagga

SEQ ID NO: 100560 - DNA, 1036 bp, Homo sapiens
ataagcagcagaaccctgttccatatggaaaaaagaaaaacaattttttgtccctaatgttcttccttttacatcctggaacaacaataaaaacatttttttaaacttgtctactgtaagatactgccatcataaagcagagacttacatgagtgaaagggttgcctcatcaagcagctcagtgtaaatggggaggctaggctctccccagccctatggtttttttatttcatgtaccccaggaaatactgtgtggtttctaaaagccctggttgttaaaagtagggactctgcctttttgttggtagggagaaaaaacgctattgctttgtcttacagagcgaatgtctgccaactacccgttcattatataagtctgaacttggtaatatatggctaatgaagattaagccctctataaagacttcctgttgaggtgaattctcatactgaaatgtagttacctacaatatttactagagatttatgaaattaaattaagagataatgtaagaaaatacatttttttggttctatataatgcttcatgattcatttagggacctagaaatattgtgtgaaaatatataaatatcacccaaaaggctttctgccctatatttttaaaatacagaatagttatatttgaagtagccctggccctagttctatagggcttggctatttaatatttttatggaagaagtgtttagttctggaaaaggtaaatgcttgtatatatttttgcagcctgggatctccctactccattttttcctttaatttaagtggccacatgtatatgtcttccctgctgtgttaggaaaatgggggctggatatcccaagaatcagaggttatataaaaatactgcaaatagaccgcagacataaatatctaccaaatgctatcttaaattttggtccaaactgaacatatggaaatagatttattgtaagtatttacttagagctttttcttaaatctgaactaacttgcttttagaagtctttttctttgtaagcattgtaaatgc

SEQ ID NO: 100561 - DNA, 2162 bp, Homo sapiens
aagggtggatttgagtttagggggaattgacaggtcatggtggctcgatgtatgagagaagtgtcagggcaattttgtggcctgggcacctggctggaagatgggggcatggatgctgagtgggagaagtgtatttgacagagggaaggtgaggagtttgatgtggacctggctgggatggaagtggctgtgggaggatggggcagaggcctctggttgcacaggcaccaggctggcattcgaggccagagcctgggatggaggtgtagaccatgggtgggggcagggggagtccaggcagcttctgagaggccagaccttgcagggtcaattatgggccctgaggtgggggccctgaggagggcctctccagtgattgtgatccagagccaggcaggggcgttcctgtcttccaacaacacctgccagcagttcagggatcctgggtttagggggaggtacccagcagcgcctcacaccctctctctccccccagatcctgctcatctctgattacttctatgccttcctgcggcgggagtactacctcacacatggcctctacttgaccgccaaggatggcacagaggccatgctcgtgctcaagtaggcctggctggcacagggctgcatggacctcagggggctgtggggccagaagctgggccaagccctccagccagagttgccagcaggcgagtgcttgggcagaagaggttcgagtccagggtcacaagtctctggtaccaaaagggacccatggctgactgacagcaaggcctatggggaagaactgggagctccccaacttggacccccaccttgtggctctgcacaccaaggagccccctcccagacaggaaggagaagaggcaggtgagcagggcttgttagattgtggctacttaataaatgttttttgttatgaagtctaccctgagaccacatctgcattgcactcctagagggggtggcccctaataatgttctggaacactacacacaggtgtgggtttccagagcgagcaccgcggccacagaacacaagtctgtgcgccagagcccggggatggtgcgggcagccccaccagcaccctccccactcccaagcaagcggctggaggcacagggccaggcaggcctgagcaatctttattctgcagagggacaatgaccacagatccatacaccacgtggagaccgaggggcggggagccaggggccagtctttcaggggtgggcaggtccaggcggtgggcagagcctcgggtgggtgaggggcagatgggcagacaggcaggggcctaaaaaaaagatgaaccacacagcaggggtgctgggagctgctccccaccctcccccatcccaccagccagcacccagagggacaaccctaacacgaccggcccaggatccacccaggggcagagtaggtgggttggtgccctctgactaggggggcacatgcctgcccagcccaccacggtagaggcagctcagttcaggaaccaggagctctctgggcagggcctgaccggggccgcccgactcccaggccgagcccccctactgctggctcagaagccgaaggtttcctgggaggcgtagaccatatagaggaagccgtcctcgtctttctcctgctcgtagatgtccgcgatgggcgtggacacactcaccatgctgtgctggttcaccagcaggaagaaggcctgcgtggggttcagctgcaggcggcgcctgcagccggcgggagagtatgcagctgtgaggggcttggctgcgggacggacatagccctgacccccagaatgattcccagcctttcacacccattctcaccccagctgtcacctctgacccaacaccgactgcagccccgaccttgacctttccagccaccccagaacaggggcccaccgcccggtcccatcacccctgaccccactcccaccccttctcggcgggaacccggctcccctcccgaccctagccacctcctggcggcggctgcccacgcaccggatgatcttgaccaactcgctcatgttgacatggtccgggaccaaaaacttggtcttgtccaggacgggcagctgcttctcacccttgtagcgctcgatgatcacctgggagcagggcgggcgggcagggggtcgtgt

SEQ ID NO: 100562 - DNA, 1121 bp, Homo sapiens
ccacagtcggccgccagcctcctctgcctcccagcttcctggatcccaggcaggtgggcagaggctgctgcactttgccaactgtgacggccacatgcattccccccagcgtgggctgactgtcaaatgtcagtgtctgtgtccccaacagcagcaggaggcctggggaaccaggacatgcctgggtgatagcacctgcttctctaggaatctgcagccctggtggtggacaaggctgctgtcctgagcccagtagtttcaagacacactgtattaacaacctctactggctttttacaaaaaaagtcaatctctctctctctccactgagtgacagagctgtgaactggggagagcagactccgcagggtgtaaaggtacctgaggtgtcagcacaggcctggcatgtagcaggactcagttcatgtgggtgcagaccctagggggttgtggaagaactcaggattgggcctctgacaggcaggactggcccctaactcttcacttcctaccatgtgaccttttgcagggcccataacccctgagcttcccttctctaagtaggcattgtcagccctaccctggggggttggaaagggacaatattgtttttttgttaaagggcctggaccagggcagacactcagaagatattcatttccctgtctctccatcctgccctgcactagagcatgttctgagggtttcgttctacttctgattcatcctgtctgtccctggtcacccctttatcagctagctgccccatgagctcttcatcatggtcccagagggaggcggccctggagccctcatggctgccatagagaggaatgtggaccgagccgtccctgggggcagcgctgagagggtacagaccagcaaacaactcagagagagctggccctgtgccgggcctggggccatagaactggagcaaatgcagccccatttggttgggaggccagtgggcagtgacttcacttcagggtccatgtaacaatgcagggttagagaagactcctggcaggagatgagcctctgagggataggtgggagctgcagcgctgctgggcagggcagggggagccagggaacttctgagcaggcaagcgtgcgtg

SEQ ID NO: 100563 - DNA, 1029 bp, Homo sapiens
tccagatctgtgaacccctacccagtgctgtccagcagggctttatgatgatgaaaaagtcctctgtctgcacagttcaatagggtaactagccacttgtgtgcctgagaacctgaatttttaatttaaatttcagaagccacatgtagctaggctaccatactagacagcagaactctatgccctgggctttgaaccattccccagcgctgcacccaaaggttactagaaggcagaggggcaaagttagacttccctgcccactgtgacaacccctctaagctctaaccatcccctcttcagaggtggcttagtggtgacctatctgtgctgcctaggcccccagtgctcttagccctctatggtgggttcttttcattgtttgggggctccgtcagggtagatatcacaactcattcacctttgtgtccccagcactcaggactgaagctgacacatagaagaccttgcaaacatttgtggagcgggtttttaaacctccccaataaagaggcagtgtcagtggcccagcaccacctgattctctaaacgaggcatggaagggagctgttgaactttccttgcctgctgtgggtgtccagcaaggtgtcaagaatgaactagggagtgcaggcttcagaggaagtgaatctttgttgttgttttgggtgtcaaccaggaagtgaaactgactagctgtgggaagcagcctacctataggagtgtgcctctgagtgaaggtaaacagtggtgtgggcagctgagccagggctacgcctgcaggtgatggcctagtggggctgtgacccatctggcctgactgggaggaggaagcagtgtcttctgtggtgacatcctctctgcacagacaagagtcacccagtccagcaggttgagagtcagcttggggcccctcggcagagtggccagtgacaaaccatgagaccaccaaaacatggacatgcctcagtttgtgatagtggatttcaagaatgtagaatggatttttgtggttgcccatcccacact

SEQ ID NO: 100564 - DNA, 1021 bp, Homo sapiens
ctatgctgaattggtgtttatggtaagtaaccttccatataaaattgatatgtatatatttttaaattttatggtttattgtctctctctctcttttttttttttttttgagatggggtctcactgtgttgcccaggctggtcttggactcctggacttaagtggtcctcccatttcagcctcctcagctgctgggactatggacacatgacacagtgcccggcttgtcatcttgtgtttaagaaaaaaacaaaaaacaaaaaacataggaactcaggagtttctcagaaaataaaagcaaaaacttatgtctttactttgaattcatggaactgtggcagtattatggaagtgtgaggaatagtttctgatgtgtaaccagttccaaatacttactctttttagaatttggtttctggactatatatagtcttgaattttctagctctgagattctatgattggctttaattgtgaagccggcgtggagggcattctgaatttgtcctaagcattttgccaagagattctgtgagtcattatggaagaagaggacacaggtttgaggctttcaggggcgagaagcttcagaattgggatgacaggtctatgttttgagagcatagcaatttgaaacacttgtctgggattgaaaatttgagtcaagaaatacccaggaagcccactgaggtcttccttagtaattataacaaactctatttattgaggacctactgtgtgctaggcacttgacatacatcaggcatgcaaagcagtgggtattatttccattttacaaaaaacataagtatcttgcaattctagagcagatatgggccactaaactgaagtgaacctagatgggtcctgatcctcagggatttccagttcaccctgcctgaatgggccttatctttgggtagtcaaagtgagggttgaagttctacctgattgtaagagtccagtacttggtagtccatcactatctcaaaactccaagccctggtagcactctagtact

SEQ ID NO: 100565 - DNA, 1049 bp, Homo sapiens
aactgccctaagaagtatcatatctgggtcagaaggcacacacttagaaagcacatattgccctgtcgaaaagttaatacaaatgtcactcaaatgagcagcatatgagagtgactgcccatttcctcacactatggcaacatttctcaccagcttctaatttgttatcttattgtgctttggaatggggaagattaggcataaatgagacatttttgagagttggtaagagttacaaggaactaaaaggaagcagatagtttaacataaaactgtcttataatgagtgctgcccacaatgaaaaaggatgctgtccatgaaagagagtttcccgtcatcagaaatgttcaagacttaaagccacttgctggggatgaggtaaagggggttagataaacgctaaggccctttttggttgtgggggtatctaacaatttggtctgtagctgcctgcttagtctgagtgaacttgtatatctaatttttcagtggttgaaggcctttcactgttggacttgggagtatctccgtattctggagcagtatttcatgaagtaagtgttcttattttcttttctgggtaccaagagtagtttacagtcacagataccaaagcctaacctctgttttgtacaaacatttaaaaagatgtattcttgacgatcatatttagaaacagcccgtttttagatgtcctctgcataagaaagaggttttgcaattgcaatggaaatgatccagattaagattgtaactggggaagcagatgaggcttctgtagaagttaccatttgtaaaggcaaataagttgcaaacagtccttagtccgcaaataggttgtatgctaattagcatgtaatttgttgtttggaatatgatttcccatgaaaactacggcagtaatgttgtttccttagaaagcccagaaaaacttacttaacccataaaattagcttttttttttttttttggcagggtcttattctgtcacccaggctagagtgcagtgacacaatcacggttcactgcagccttgacctcctgggct

SEQ ID NO: 100566 - DNA, 1050 bp, Homo sapiens
gacgacagagcgagactccgtctcaaaaaaaataaaaataaaaataaaaataaacattttggcattgaaaacatacacgcaagagtgaatttaacatctgtttaaaagtctctcacaatcccaggaaggcgactacttccgcttctactttcagcagcgtttcagccccgctatagcggcgcggcttcacaaaacacctgcgatcgtagaaggtttcgccccaccttctgcatacgcagcttgaggcgcccgctttccgtcgctccggcccgcctcgccgcaaggctttctgggagccgtagtccccacgtctggcctctccggcgccagcggcagcgcgcgcccacccgcggaactacagagcgtggcgcacagcgcgcgaggctcctccgcctcgccttccctccccgcccgcgcgcccgccccagttatcatggcggctcccttggtcctggtgctggtggtggctgtgacagtgcgggcggccttgttccgctccagtctggccgagttcatttccgagcgggtggaggtggtgtccccactgagctcttggaagagaggtgaggccactggctcgagcagactgtcaggccccacctgccctcccgcggcctctgtgaatgggaggcgggggcagtgaccgccagcgcgcggttcctagagaactaactgactgtctcgtggggttcttggagagggcggggcctgagggcggggctggtgaggggagggggcgtggggaccggggcgtggggacagtgtcgtgaggtttgggccctgggggccggaccacctagtggtggggatctgagggggcgtgtcccattcagtgtcctgagccgaggagtgtggtctgtgggaagggttggaataagaggaggaggtgcttgtggagcgcggcttgcagaggagtttgggatttggggcgggatcgccaggggtgctccctgggataaaaggttatgtgtgagggggtccgggatgaggggaccaattttgcttaagcgaggagagtgtgcgtgtgctttagacgtctcttctcagtct

SEQ ID NO: 100567 - DNA, 1037 bp, Homo sapiens
tattggccctttaccttcccaacttcctaggtcgtcagctaggaagggcctgacctggcctagtgcagacaattgcaggtgttttgctgctccctcgtcacctctgcccacagagagtataggagaagggataggataaggagagtttctgacttaacaagtggatgggcctagaggctgaaccaggaactccattcctgctgggagtttgctcaaggatgggctgggggtaggggtggcttagggcacaaatgctattctgggcagagctgctgtagttattaaagggaatggttctccctggagcagaactgggaatgtgagaaccaggaagctggcagggctgggaaaggaaatctgggaggctccccaagtggtcaggagagggggcaggcactggctggctggtgactgctttcactcctggctgtcactgacttgctgtgtgacctcaggcagggagcttttcccctgagcctccctcccctaaacctatctgaaatttggggaggcacagtgcaggctctggtacacagtgggtcttcagtaaatgcatgctaaatcttggtgccagtaaccccagacccttttgtagctaggcgaggggtggtgtggctaggtcaaggtctttttcacctccctgtacccctgcatcattgtattcttggggattgtttgctgagtctttcctgactgtgtacactctggactggatgcacagtaacgtgggactaggtctgccctgccactatctagccatgtatttttggatagatttatgtcttctttctgatcatcagattttaaaatgggctgggtgaatatgatggtccctgaaacagctcttaacttctctttcatattccatgaattagtaggttcttggaaggaggatgtgcctcatcaaggcctcgatattcccttccttcaagaggggccaaactttctgggcttttggtaatggagtcactagctccctgtggctacatatgggttgggatacatgaattgtgctgggtggacactagttgggggtg

SEQ ID NO: 100568 - DNA, 1043 bp, Homo sapiens
cctttcctatagattctgtagcatttgagtgtggcaatattttaattgtgtatagatttctaagaaccaacactactcagtctcctgctagtctgactcctgaagcatcagcccttgtcatactgtattgactgtgtacgtgcctttcaccttgagcatgcttcaggatttttttttaaaccacagaacttgaatacatgagggaaccagagttcaaagtcctatgcaaccttaggagggggttagagagtctgttttgattgatgttttctgaggccctagaggagtttgtatcaatttgtgagtattaatgtcagtactaccagcactttgccaaaactgtcagagggacccgtttctagagtgagtcccagttacatcaaacagtgacttccagttattccccagtaagtctgagtggttccttcaagctgggtgtctttccagcctttgccagtctagccccagcagggcaccgtgtatgaatgcagtttggtgctgttttagagtatgcctgctccccagccccctgcctggaaccctctgagcaacttgctctgacctataatgtcttaggtgcaacacggaccccaccagagctcttggatacccccctagatccatgtggctttatgtgaggggactgaatgcagacacaccatagcccccttctactactttccctctcgccctgccacctagttccacatggaaccaacaagttgagtgcatccctgttgggtgttttgtgttgagactggctgaaatgaggagactttgaccatgtgacgtgtcaacagactcaaggagacaaccacctcaactgggtcatgtggcatgcctgtgtatgtgtgtaacagaattctgattgttagactgtaatgctattcctctatgggagaaaaaaattaatataaagaaaaacaaataaaaatatatttaaagcacatgatcctttctgcctgagttgagcttaagtatgagaagcatcttgtaatcttaagcacagtagtggcataggatattatgataaagctggcctt

SEQ ID NO: 100569 - DNA, 1182 bp, Homo sapiens
gattctgagttgagtagggctccccttaggtctgccctgcttgttgtggactgtctaaagggcactgctgtaaagagttacttccactgaacatgtcctttctttcccccacagacataaccagtgcggtgcaatccaagcgaagaaaatccaagtaaacaagcaggactgcgacttgatacttggaaatgtgtgtgacttttacaaagagcaattttgagctgtgacttttttaaatcaatttctgtacagttagtaattttaataatgtggcccttttcctagtccctgcaacctgtttcataaagtgcaatggggaaagcaggactgttgagcccttttggtgttgcgagttgaagttcaaggtttctaaaatgttgtcttgtattgaaaggagctaatgccattataaatgttactagttttcacatttcctaagcagcctagagtacagggtgagcatttttagatctcctaatgatgtattgtgccgtggaagtactgtgtgtgaatagcagtagtgggggcaaaagcaatcttctcatttggaaatgttgtaaataattttattatatagtgttttggatgtatttgttgtagaaatggaccagtgaataaagagaatctaaggatttgtacaatgtgaaataacgtgttaaataaatgtcattgtcatagaacataaagttatgttattggtaagggatttttgggtgatcagctctttctttggaccttaactaagcagacacagccttgtggatggaattcctatctagtcctcattgaacctgagatgcccgcctggcaagttgaggaaaatgtacatacttgctccctcacctcattcttggctttgaagaaactagccctgttcagcactgtgccaggtattttgatatatattgctcagatttcttttgatgcaaataacaaaaccaacttagagatcaatggccacccaggattttctagggacaggaagctgtcagcagctgagatggcactttttcaccatgtcacatatctgctcctccatttgcatggtggattgctccaaaacaattgtgctgacatctcctccttgcaggaggtaagcccaaactggcctgtaagattgtgccagcatcaagaatctagtccagggccgggcatggtggcttacacctgtaatcccagcac

SEQ ID NO: 100570 - DNA, 1061 bp, Homo sapiens
tgacatacatctatggcttcaacttcattagctctgtggagaggaatattaccattttccaaaagtcatgcctttttttggagacagagtcttgctctatcacccaggctggtgtgcagttgcacgatctcggcacactgcaacctccacctctggggttgatgcaattctcctgcctcagcctcacaagtagctgggattacaggtatgtaccaccacacctagctaatttttgtatttttagtagagacggggtttcaccacattggccaggctggtcttgaactcctgacctcaagtgatccacccgtctcagcctctgggattacaggtgtgagccaccacacacagtcttgtctcttttagtgtaggaatgcactggataatattttaaagaacttctcataattgtacagcaacttcataagacactttcacaatatttttttcatttaatcttcatatcatccctgtgaggaggttaatagccaccatttatttgaatgttgttccatgccatgcatccttaatagattgagctacaagtgccctagatgtgttatctcatctaattttcacagtatctattaggaaagtaaattctgtcttatagatgagaaatctaaagttcagaaaggttaactaaattgcccaaggtcacagaattagtaaatggtgaaggttagattcaaacccaagccttctgacttcagagccctgatatttaacctatgtattgcaacagacaagatgggatttatagatcaagaatctagaatgaggctgggtgcagtggctcacgcctgtaatcccagcactttgggaggccgaggcaggcagatcatttgaggtcaggagttcgataccaccctggccaaaatggtaagaccccgtctctactaaaactacaaaaattagccaggcatggtggcgcatgcctataatcccagctacttgggaggctgaggcaggagagtcacttaaacctgggaggcggaggttgcagtgagccgagatcatgccactgcaccccagcctgggcgacagagtgaaattctgtc

SEQ ID NO: 100571 - DNA, 1868 bp, Homo sapiens
gaagcaagtggcagtgaagcaccatctgtcccaggaggcccaaacaacatgccttcacatgtagtacttccccagaatcagttaatgatgacagggccaaaacctggaccatcgcccctttcagcaactcaaggtgcaactccccagcaaccccctgtaaattccctgcccagctctcacggccaccacttcccaaatgtggctgcgccaacccagacatctaggcccaaaacaccaaacagagccagccccagaccctattatcctcagacacccaacaaccgccctcccagcacagaaccttcagaaatcagtctgtcaccagaaagactcaatgcctccatagcaggactcttccctccacagattaatattcctttacctcctaggccaaatttaaacaggggctttgatcaacaaggcctaaatccaacaactttgaaggccatcgggcaagcaccttcaaatcttaccatgaatccttccaattttgctaccccacaaactcacaaattagattctgtggtagtgaattctggaaagcagtctaattctggagcaacaaaacgggcaagtccaagcaacagtcgcaggtctagtcctgggtccagtaggaaaaccactccaagccctgggaggcaaaattcaaaagcccctaaacttactctggcctctcagacaaatgcagccctattgcagaatgtggagttgccgagaaatgtattggtcagtcccactcctctggccaatccccctgtacctgggagctttcctaacaacagtgggctgaatcctcagaattctactgtgtctgtggctgcagttgggggtgttgttgaggataacaaggagagcttgaatgtgcctcaggacagtgattgccagaattcccagagtaggaaggaacaggtaaacattgaactaaaagcagtccctgcccaagaagttaaaatggttgtccctgaagatcagtccaaaaaggatgggcagccttcggatcctaacaaacttcccagtgtcgaagagaacaaaaatttggtgtctcctgctatgagggaagcaccaacatcgttaagtcaacttcttgacaactctggagctcccaatgtgacaattaaaccccctgggcttacagatctggaagtaacacctccagtagtttctggggaggacctcaaaaaagcatctgtcattcccacactgcaggatctgtcttcttctaaagaaccttctaattccctaaacttacctcacagtaatgagctgtgttcatcccttgtgcatcccgaattgagtgaggtcagttctaacgttgcaccaagcatccctccagtaatgtcaagacctgttagctcttcctccatttccactcccttgcccccaaatcaaataactgtatttgtcacttccaatcccatcacaacttcagctaacacatcagcagctttgccaactcacttgcagtctgcattgatgtcaacagttgtcacaatgcccaatgcgggtagcaaggttatggtttctgagggacagtcagctgctcagtctaatgcccggcctcagttcattacacctgtctttatcaattcatcctcaataattcaggttatgaaaggatcacagccaagcacaattcctgcagccccactgacaaccaactctggcctgatgcctccctctgttgcagttgttggccctttacacatacctcagaacataaaattttcttctgctcctgtaccgcctaatgccctctccagtagtcctgctccaaacatccagacaggtcgacctttggtccttagctcacgagccacccctgttcagcttccttcccctccttgtacgtcttctccagttgtcccttc

SEQ ID NO: 100572 - DNA, 1419 bp, Homo sapiens
ggttgaagatacacaacccttcacacttaggccactctcccctgtgtgtacagagggtatgttttgtttcttcctcactagttatttcaacttctttttggcatgaaaatgagagcgacattattttaggagtaacctttaatctacccctaatttatgtattttaaaattgaatccaaacaaaaagctaaatccatcatgatatcaatactttgtgttatttattacaaattatttgggcatatcacacttcccgtcagtgagatgcagcagcatagctgagactgggaggtcatcagtctttggggagtatgtccagaaggcattgagagcaggaacatgcctgcttgcctcagacacatctgaactcttcttataagaatcccaggggtctttgtatacatttattgccttctttctgcaaactgggggcctgcaggctgaatttggcctataatggttttgagttgctatgcagtgtcttaaacaaaagtccgagtttaaatgcctttaaatagggcatctgctctgcagtttggcactgttgacaggactcctgctgtcttataccagtccacttctattctctactacctgcctggcccctaaaggcataggagtttgcattccctgagtaataaattcagtttgtgattgtgttatgggcactatgtgtgtcctggctttccctcttcaccattctgtcacgtcagccccaatctgtcttatcattagtgccttttggactgctgcctccagcttctggactctgtagcagccatgcccttaactgttacttttgagaggctgctatattgtctatgctgtcctctttggtatttactgtctggtgggctgattttaaagataaaaggcatccatgtcataaccctgacatcaacaggcttttgtagcaattacaaatttcttaatgtgggaaccccagactgaatgtgaaaaataggaacccactgtatttgactatgtagtcgaaaggacagttgaaccatagaaatgccatgttattggctttataaaggtgaagaagttactcgggcctaaaataaaaaaggatttttttaaaaatcttcaaaactggattctacacattgtattcattgataccatggaaatctttggccagaagacattaattgagtgctgagtctgacccacaaaatttggtagctgctctatgaaaatgttgagtcagcatttcttttgactgccagagccagttgttcttattcctacaccttcttaaaacctccctaatgtactcttcatgcaacaatggaataaatctagtttgtggaactggaattgtatcccatatatgcccagctgtatgcccactttttcccacagaaccaccgttattcttggtttgcgtatctttttatcttttctgattgtaag

SEQ ID NO: 100573 - DNA, 1035 bp, Homo sapiens
attcatggcaacatgaacaatcagcaggctggtacttctggggttcctcaagtgaacctcagcaacatgcaaggccagccccagcagggcccaccatctcagctgatgggcatgcaccagcaaatcgtgccctcccagggccagatggtccagcaacaaggaaccttgaaccctcagaaccctatgatcctttcaagggcccagcttatgccacagggccagatgatggtgaaccccccgagccaaaatcttgggccctcgccccaaaggatgaccccacccaagcagatgctttcccagcagggcccacaaatgatggcgccacataaccagatgatggggcctcaggggcaggttttgctccaacagaacccaatgatagagcagattatgaccaatcaaatgcaggggaataagcagcagtttaacactcagaaccagtccaatgtcatgccgggaccagcccagataatgaggggaccaactccaaacatgcaaggaaatatggtgcagtttacgggacagatgtcaggacagatgctgccccagcaagggcctgtgaacaacagtccatctcaggttatgggcattcagggacaggtcctgcggccaccagggcccagcccacacatggcccagcagcatggtgatcctgctactacagcaaataacgatgtcagtttatctcagatgatgcctgatgttagcattcaacaaaccaacatggtcccccctcatgtgcaggccatgcagggaaacagtgcctcgggaaaccacttctcaggccatgggatgtctttcaatgcacctttcagtggagctcccaatggaaatcagatgtcctgtggtcaaaatccaggcttcccagtcaataaggatgtcacgctaacgagcccattgttggtcaacttattgcagagtgacatatctgcaggccattttggggtaaacaataagcaaaataataccaacgcaaataaaccgaagaagaagaaaccccctcggaagaagaaaaatagtcagcaagatctaaag

SEQ ID NO: 100574 - DNA, 1076 bp, Homo sapiens
aacagccacagggaattcgaccccagtttactgccccaactcaggtgcctgttcctccaggctggaaccagctgccttctggagcccttcaacctcctccagcccagggttctctgggcacaatgactgcaaaccaagggtggaagaaggctcccttgcccggcccaatgcaacagcaactccaggcaagaccatccttagccacggtacagacgccttcccaccctccccctccatatccctttggcagccagcaagcctcacaagcccacacaaactttcctcagatgagcaacccaggccagttcacagctcctcagatgaagagtttgcagggagggccctctagggtcccaactcccttgcagcagccccacctcaccaacaagtctcctgcctcctcaccctcctccttccagcagggatcccctgcatcctccccaacggttaaccaaactcagcagcagatgggaccaaggccacctcaaaataacccacttccccagggatttcagcagcctgtcagctctccgggtcggaatcctatggttcaacagggaaatgtgccacctaacttcatggtgatgcagcagcaaccaccaaaccaggggccacagagtttacatccaggcctaggaggtgaggaacactgtagctatttgtgttggtaaatttgctggagctagatcttagtagaacttcagtttttagagttaatggagggagtggagtaaggatataattatttggttttgtggatatggtggtgacacttgatataacttaaagttaacttgatacgttatgcagcatcttactggttaaatttaagctagctctctggactaaaattcaggtaaaattcaatgtagagatgttcattttgtttttcaaattatttttgcttgatcttgtactagtaaattaaaatgtccagaagaaaaatgcattttgttaacaatttaaacttctcagttgctgaaaaattaagattatgcaatagagcaaaataaaaagaacagggtctcattgaagaaaaggcccttttagttatcaattttgataatcctagttaa

SEQ ID NO: 100575 - DNA, 1078 bp, Homo sapiens
gctgggctggaggatcgcttgagcccaggaatttgagaccagcctaggcaacatagcgaccccatctctataaaatatagaacgattagctgggcacagtggtgtgtgcctgtggtcccagtggcatgtgcccatggtcccagctatttgggaggctgactcagaaggatcacttgggcccgggaagtcgagatggcagtgagctgtgattgtgccacttggcagactgggcaacagagcgagaccctgtcaaaaaaaaaaaaacaaattttccatatcttttcatattcttgaaataactcattaaaaaacaaaaattgtgccaattccagtactctattttagggatcttttttctaggaataataaggatgaacaaccctgccactgttatgatacccccgggtggaaatgtgtcatcttccatgatggcaccaggccccaatccagagctgcagcccaggactcctcgccctgcttctcagtcaggtaatgacttccaatctttgaggatgaagagtctgaaactttctgcacagatcattataaaattcagttatctctgatgctgaatttctaatttccaaactcacaatgtcaaccttctttacaaaatctgacctgatttcttcaaactaaatgtcattattttcttttcagaatttctcattgttttcttatcaattataccccaacatttctaaaagtgtgccttggcctgcgtagtcctgcaagatgctcattacatagaattctgtagtcaagtaaatttggtaaatgcatcattctttaccctccctcctggagattcaaaagtaacatattggaggcactgaaagtcctacagtgaagaaacgcatctaagtttgttaggttcagtgtttcccaaacctaattgttttgttttcttataatgctaattaacatagttctccagaatatgatttggtaaatactggtctccatgttttacacttcgctcttaatgtccactactgaccaagctctttttaagacagaattcatcatcttggtatgttgcttcatacatagaaggtattcacaagcatttatttta

SEQ ID NO: 100576 - DNA, 1029 bp, Homo sapiens
cccaaacttcctgccttttgctgtttggaggcctacatgtaatggaaaggaaattgccctgagaatcagagctgggttttaatgtcatctctgatgctactggttagccacaggcttctgagcaaatcacttagcctttctgggccttggtttcctctcctgtaaaatggtcttggactaaatattgtctaatcttttctaaattcctatgattgtgttatctcattccttttagcaagttttccctgtttttttttccacattagaacaagtgaactccatgtctggaaaagttaacattcaatgtacaatggtttaagagctggaaggggctttaggcaacatgtaggcactttcctctatccttagatatttctcattttgagaaagcatattcctctatgaccattatctcttttttccttcttttcacaggtgttgaatgaccattatcttaatattagaatgtataactgaatgaaggatacagaagtttaagtttagctgagttaataacaaaagagaaaattgttttgcctgaggttgttgaataactttttttattttttatttattttttgaggcagtgtctcaccccatcacccaggctggaatgcagtggcatgatctcagctcactgcagccttgatctcccaggctcaagcaattctcccacctcagcttcccaagtagctgggactacaggcgcacgccactgcacccagctaattttctgtttattttttgtagagatgaggtctcactatgttgcccagggtgatctcaaactcctgagctcaagtgatctgcccgcctcggcctcccaaagtgctgggattacggacatgcgccactgcacgcagccaaataacttttttatcagctaactgtgcctgggatttgctttccaatctgtaaaatgtaactacaattaataatacctcctcaattacttaacttttttaaaaagtattttttattgtataatacatgtaacataaaatttaccatgttaaccattattaagta

SEQ ID NO: 100577 - DNA, 1011 bp, Homo sapiens
tgtttgtttgtttgtttgtttttggagacagcatctcactcccttgcccaggctggagtgcagtggtgcaaacttggctcactgcaacctctgcctcccaggttcaagtgattctcctgcctcagcctcccaaatagctggctcatacctgtaatcccaacactttaggaggccaaggtgggtggatcacttgagttcaggagtttgagaccagcctggccaacatggtaaaaccccatctctactaaaagtacaaaaattagccaggcgtgctggcatgtgcatctaatcgcacctacttgagaggctgagccttccatcaattcttggtgctccttggcttgtagctgcatcactccatctttgcctctgttgtcacatggcgttttccctgtatgtctctgtgtccaaatttcccttataaggtcactagtaggtcccaccctactccagtaggagtaacttcatcttaattgattacctctgcagcgactctgtttccaaatcaggtcacattctgaggtactgagagttaagactaacatatttggcagggatgggattggggggcacaagtcaacacataacaggtagtgtttgagataacatagaggcattaaattaaaatttattaaaatggaagggtaagattgcaacaaatgggattaaggagagagtaaccaaaggaatgatggacataggaaaatgtaaggaatatttaggtaatgaaatagtgagaagtctgatttgctggtttgttgaggagttgtggagaagtgaagccgacgtactttcttggggccctggatgccaggtctaagacatttgaatgttgctgagtgaccagtgtgtgggagcaggatggcactgcggaattttgaaatggtagataattgattcaagctttgagtaactgagtcaagttttagagacattctaatatgatcaggtgatcatggataagtaaacaccctgtagaaaaacagatggtcaatgacaacacacccagcc

SEQ ID NO: 100578 - DNA, 1041 bp, Homo sapiens
ggagttttttaaatttctggtttggggtggtgtctgtcaaagaggtttaaaaaagtgaaaggaagtctgggcgtgttggctcacgcctgtaatcccagcactttgggaggccgaggcgggcggatcacgaggtcaggagatcgagaccatcctggctaacatggtgaaaccccatctctactaaaaatacaaaaaattagccgggcgtggtggcgggcgcctgtagtcgcagctactcgggaggctgaggcaggagaatggtgtgaacccgggaggcggagcttgcagtgagccgagatcgcaccactgcactccagcccaggcaacagagcgtgactccgtctcaaaaaaaaaaaaaaaagtgaaaggaaaatgaggggagaattctcattgataataagggcgaaaaggtttttttggcagagtaatagagttttggaaaccattgcaaagctgtcaagtgtggtgtagtttttggttaaggaaatcagaggtgtcagcagacataaaagacaggggaaaacatgggaagtgtcctacctatagtgtagaaaaagcacaactatctatgtcagaggtcgacagactgtggtccataggtcaaatctggcccacgatctgtttttgtaaataacgttttattggaacatagccacactcatttatttatatattgtccatatcttcttttgtggtaccaatagcagagttgagtagtcgtgacagagatgtgttgtgtcagctcacaaagctggaaatactctttacaaaaacatttgccaacccctgatctatgtgtttgagtgttggatgttcaacctctaatttgccatccaatgtctatatgatgatagagaatgaataaacgtcttggctctgccctttgggctggattacccatgctctgtgtacctgcagcataacacagacccctgaatatttatatcagtcagtgatggcaaggtctattgttctggagtgtactgtgtggtaactgtggtagtgccagctttacacggattagataatgctcgggcttgt

SEQ ID NO: 100579 - DNA, 1038 bp, Homo sapiens
ctccaggcctggggaacaggcgggagccggtcgtggggtcgtggtcagggtcgcggagaaggaacactgggtccgaagggaaccgggattggggtctatgggctgagaggatggcaggacgtggaactgggttaggccttaggcggtgttagagccctaatgcaggtaggacctggggattggggtggaggcatgggggccaagctcaggctgtcagggctggagcagttctttgctgggagggaaggaggtgattgatgaggaatgagggccctttgggtacagacgctggttcagattggggcagtccttggggtactggggctgaattgcaaagctgtataactcccaaggctctgaagacttatgtcccaagcatcctccaccccctcttgggggaagcaacaggaaaaaggaggtgtttgatgagagaaaagggggacaaagggagactgaggtttgggtgcaggagctggccagcaaaagaggcacagagagtggaactggttggcaaggaaggagagaacctttatcaacttagggagttgtgtgtgtctttaaaaggagggacctggctgtttgggggcggtgacccaaggtgtcttccctggaaggggacagcccacagcttaagagcagagtcacctggagaggtcatcagaaaggcgttattgaagccagtaaaatggtgaagaagagtgaatgtataaaaactacaaaggcctgagagatcaagtaaagatttcaaatcaggtagtgattttagctgaaacatagaaaggtaaagttgacttttcaagatcttacaagttagtggcagaggggtactagaaattgtcggctgcttcctcactaaacacattgccttaaaggaatttgctagctgggagaaaggtgttaagaaatgaagcataacattcttgtgatgaaactaaaagcaaacaaacaaaaacaacaagaaatgaagcataacagtatataccagataactattaaatttgttttcttcctgtaatgagtgtggcaatacaaaggctg

SEQ ID NO: 100580 - DNA, 1048 bp, Homo sapiens
ggcacactattaacatgtagtcctctgccagcacacaccatgggagccggaaacacttaagaaaactgtttcttccattgacttgaaagctatgtcactctaccttctgcccactccacccctaaattatctccatatgctttggaatatccctcaataagtctttagaaacacaattttggcctctctttcatagagatgggggtagggatggaataagcaaagggaattatcttttttttcccactcactctgatggtgtgtaattgagtgtgtgggcacaaatacacaacagagggactattatgagtgtgctatgagtgctcatgtgtgagtgatgtgggtggctctgaaataccatctgagggtgctggtatgaatgatggcctgatagacatatgtgtcatcaggagtgtgataaaggagatgagatgggagcatggagaaaaggagatggaagggagatggatgctgtgaaaagggtgctggcagggctggaatccctgaggaggatcttcctccagctctgcccagcctccatttggtggtcagtaggggtgggcataagaccctaacctgttccccattcttcccacagggtgtggttcacacagttgggggctacatgctctatgtagccacaaccttcaagtatgtgtttgacttccatgcagaggatgtgttctggtgcacggcagacattggttggatcactggtcattcctacgtcacctatgggccactggccaatggtgccaccagtgttttggtgagaagggagccacctggcctagctgggggatggacaagattatcctgggtgactacctcccaaggctgcttggtctagagggagggggacttatacaatcatctgttttctggagaaagagaagtcctgagggggttgcgtatcctgactaggatggtatcttggcttgtctggccagggagtgaagatatggttggtcagaaagggcaaaatactgaacctgagggaatggtagggggatgaatagaaggactattaggaaagactgggaatgac

SEQ ID NO: 100581 - DNA, 1028 bp, Homo sapiens
ctttggttcgaagtagatgccccacgtgcttgttcatcacgagtgtcttttcctgcctatagaaatggaggcaggggacacacatcacctggactcagccccaaacccaggaccttccctggacccagctgagcagtacctgggtaactgtctataccaagaaagtgctaggattttagagtctctatgcctctctggagtctccttctagtcctaggttgtcaaaccatgtgttctgagtcctcttggtgctatttggagtttccttcacggttgcaaaggacttctcatcagggcttcatctgataccctggtaaggtgggcaggtcttgggtccttggcctcatttaatagataaagaaacaggtaataaagctagtgattggcagagctggcaccgaagcccaggattcctgactctttccagtgttcccctctaggctggctcacttggctggcactcttgcaagcaggtagtggaaagagcttctcctgattggctcacctgacatagaccccaaagatgcccagctctgaaatgcactggaccactcgggcagggctgccaggccgtagcaggcaattctcaaaaggctcaggttcgatcttctccatgaggatgtaggaggccctctcctcactgtccttcagctgtttcagggcctgtaccatttcctccccatataggttgttacctgcaatgaaactggccagtcaccctggaccctctgcctacctcctccatcccatgccctcacttttggggccacatgggcaagtcagcagcctcagttcctggcacccgctcagtgaagccagggcatatctggcttctcaggagggaagctcactttgacaggagagcccttactcatgcagtgaacacatcttccactacactgttctgccctggttctcctcctacctacagctgttccttctcaagctccattgctggctccttctcttaaatgctggggtcccaggggaattggtcctccacgcttgctctctcccccatgtacatt

SEQ ID NO: 100582 - DNA, 1048 bp, Homo sapiens
ctttctgcctcctgccagggtgaagaaggggaccaggccatcgccgaggcccttgctgcccctagccggtttgtgctaaagccccagagagagggtggaggtaggtggatctccctttgcagggctcctcaatgagagggactagcaggctgtggccagtgctcattggcacttactctgggcacagtcccgggcatgggggaaactattggaactgacacaggccacatgttggacagtgtcccctaagaccctgtgaccaagtccgggagcacaggggaatctgattaaccagcattgaagggtttggacaagttttacctgaggtgcctgtgggtagattgttgggaagtagagtagggtcatattaggagactggagagaatacatgtctgttttcctttctagtttgaaactccttgaggtcaggggtcatgtctgcctctccagaggagaggatttttttaatctttgtcttaagaggtgggtaggaatttcccaggtggaaaggaggaagagtgttccatacaaaagggacaacctcaagccaaggcaccgggccatgaaagtgtgagatgtttggaggttaatgagaaactggtgaggctggagggggagctgggaggggacagggatttaggctggaaaaatggtttgcatcctgattataaagggccttgaatatatactgagaaattggattttatcttaagggcagtgggaagccattagggagttttaagccaggaagggacacattgatccaggactcaagtggttagcagtggtgggaacttgcaaaacttacagtttctgcattgtagaagatgtcctggaatgaggggagacactggaagcagaaagaccgtggaagaggctgatacagttgttcagaagagcaacgtagaggcctgggctagggctatgactatggggccaactggagagacatgtcctagatagtgagagggtagtggaagggaggagttaaatatgactcaggggtaccttttgcctgattgggagtaggaaggtccaggaggggcag

SEQ ID NO: 100583 - DNA, 1050 bp, Homo sapiens
taaattttaatttgcacagaaattcatcaacccatgacatcattacaatatttcatctgcccactggagaagggtcagaggcatcttcatttttgaagttttctattttcaggaaatcatatgtgatagcatcaggtgtctatgcctgaggtaatctcaaggttcctgagagagggaacatctgttctttcagggaagcggtgttcttattcttattccaggaggtggggcggtatgggggttgaggggagaaacaaaagaagaacaagttctatagtagcctcgggccacctgtgctctttccccagtgctctggtgctactgattgctcaagagaaggaaagaaacatatttgaccagcgtgccatagagaatgagctactggccaggtaagtaaaggaagggggacttctaggtgtggctccaggattaggggtggggcactcagaacatagcatccattccctctggctcttgcccatttttcccaggaacatccatgtgatccgacgaacatttgaagatatctctgaaaaggggtctctggaccaagaccgaaggctgtttgtgtaagcattcccaagaatccagtggaaggctggtttatgaaactcatcctgccaccctcttccccaaaatgattctttcttctgggagatgtgatggcttgcttccttctctcataattcctgaaatatctcatcctcccaggaaattttggagaaagccagccacgctgtgcttctatcagagctgttgacattctggatcagggtctccttagagatcatcttagttttcatatgccctaagttcccaaaagttttcttgcctctcctagtaaggtgaggtcaggcctgagaagctgagctgggcagtcagggaggaagaggagcagctggctcatgctgtgattggtctggatgccactgtctgagctcgagcctggatttgtgttccaagccaagccttatccttttctctaggggccaccaccaggtagatttggtgctacatatttgggtagcattgcagcacatatatttagac

SEQ ID NO: 100584 - DNA, 1098 bp, Homo sapiens
caacacatcaaaaccccatctctacaacaaacaaacaaacaaacaaaaattagccaggcatggtggcatgcacctgtagtctcagctactcaggaggctgaggtgggaggaccgcttgaacccaggaggcagaggttacagtgcgccgagatcacaccattgcactccagctgggcaacagacccagtctcaaaagcaacaacaaaacaaaaccgtaccctgtacaaaaacagaaattatgaaaaattatccccttcgggccatccctcacctaggataatagaatactgacttcttttttatttttattttttttataccgactcttgcttgatccacaatataatactgacttctaacctcagagattagtgttgtctattttcagaatttgtttgaatggaatcctacattatgtattcctttcttctttctctccgcattgtctctgtgagaacctcactgtttcaattctctttgtagagcttagattgtaccttgcctacctcctgccactagaaaagacctgcacaagggcaggagcttggtctgtgtccccggcaccttgccaagtgcctgcacatcatagaaagtcaataaatacctagtaagtgaacgaaccaaacctgatagataataggattttaatctcctatggcatcagaggctggagagctgggctggagcaatttatagaaagcccagaaagtgggaaaaattcttttcattgttcaaggatgctcagaaggtagggtttcttgtcagggaccaacagaattagcctggagaatcagaacctctagcaagtctaacttacacctatcatgtgggtctgagtcctagagttacctactcagtgtatgaacctggggctgagaaaccaagcctcaaaatgggtctagatcttcctcgtaggttcccttccaccacccagggtgcatcttcctgctgagataagctcacaaacaaacatgacaacgcaaagaggaaacccaatgctctgagtgatttgcaacaaatactataacctgcaaggacttaagtaagatactgactttcaatacctgaagagcttgtaatcccagcactttcggaggc

SEQ ID NO: 100585 - DNA, 1031 bp, Homo sapiens
attcaagagattcaataaatatatcaacaccgatgcaaaggtaaagttaacccagggctctgtggagtgtgctgggttgtccagaagttcacctggagtcctggtctgccaggctttaggcacaggttttacgttagagacgacgggggagtctgggcagtctttggcaaacattcattggaacctgctctgtctggctttgtgctagaccctgggaatgcagggatgaaaaccggggctgcttgtgggtagggagtgagggtgggaatgggtggcttgtgcgcctgccgtgacgcagcatggtgggtgccacggtgggagccgctgtagggagggactgggcctggtgtgttaggctcaccgagtgtgtgtgacagaaacccagctcaggctagctgaagtaaaattaaaagtaaaaattaaaggaatccagcacccttgagcgtaaaaccactggagagagtgtcggatctgtgctgaattccggggagtgcctcttagtacctgggtggtgaggggaggtccctcagcttatctgagcctctgtcttcctatctgaagcagtggggctggtagaggtcgctgatgccccttgtagtgactatccccccgggccatggccatacctggccagcagcccactgcctgctgtgagcttggtttctgtatagttccaggtattcctgaagcagatcaacagctccctggtggactccaacatgctggtgcgctgtgtcactctgtccctggaccgatttgaaaaccaggtggatatgaaaggtacatgaaaggcaggctgtcaaggcaagtcatgcagggtaagaatgctggcatcagacaccctgtctccagcagggagacaagaatgactgagggagctgcaccagatgcccacgtggccggcctcaaggtggcggcttccagggcaattggctttgctgccttgttcaacactttaataaggtgaaaatccattgttgctagcaagatgcaaagaaaaccagaaaaagaccttcctcttctgggctggt

SEQ ID NO: 100586 - DNA, 1028 bp, Homo sapiens
tccatcacccaggctggagtgcagtcagtggtgcgatctcggctcactgcaacttccgcctcccaggttcaagtgattctcctgcctcagcctcctgagtagccagaattacaggcgcagcaactatgcctggctaatttttgtatttttagtagagacagggtttgccatgttgcccaggctggtctcaagctcctgacctcaagcgatctgcccgcctcggcctcccaaagtgctgtgattacaggtgtaaccaccacgccccgccttattttttattgagtgtgatggcatgtttttagcaggaagggggccacattagcttaatctgctgttgatcagatgtggaagtgaacagatggttttctaactaaagaaaagtcctcatggtacatgaggacagaggcttagagaagcaggctcccaccagagtgtctgcttgtgttattttggaaccttgtggctgtggtcctaacattgaggctgtgcatgtgtttcaggacatcaccttgaagatacagtttttgaggcttcttcagagcttcagtgaccaccacgagtaagtacaagagtgtccctgcaaggagagttgttgggctgtcttcggaaggcctcgatctccttgtctggtccctgacctcagctcgagaggaggccctggagctggtggaagcccactgtcccctcagtgttagcaggtgtgacactgcagtcggacctcccgtctttccagacttccttatggcaggcactgccccaagctttcttctaaccctcatagccaccccaggaactgagtatggaagtcgttggccccttactacctttggaatcaatggatttctcaacctactgcccctctaaagcaagagtggacagcgtggctattcccaggggccggcaggaacttcagacaggcaaagccgactgcttactgagcagctggaggattcttccctccacaaggaggtgtgctcccatttttcttgaaagacattctgcgctcatttattttttaaccttcgatg

SEQ ID NO: 100587 - DNA, 1017 bp, Homo sapiens
aggagacaaatcttaaggaatttgtttaaggttacaaagtttgcacatggtaaagctaagagtcaaacccaggactcttgcatcccaaaggactcttgaatcatatgcaggactctctgaatcccaaactcatgcttctgtgataggaactaccggacattatgccttgtaggattattgtgagcattaatgagcaaagttagaaagtgggtttgtgtgtgctgggcataggggatacacggatgttttcttcagaccctggccctccttactgacagtactgatacttgtcctgaatatcattatcgtgtgtactgagcacgaggttttgctagatttttcaagcacatttgtcttaatactttttccttcctatcccattcaggttcacagaatgattgcagagttcaagctgatccctggacttaataatttgtttgacaaactgatttggaggaagcattcagcatctgcccttgtcctccatggtcacaaccagaactgtgactgtagcccggtaagcaggagacccccggggacagatggggcctcactggcttggagtagttgtttcaagacctgctgctgaccctttgaccttttttcctttgggagtagagcagaaactaaaatcatatcttatagtcccctaattggaagctaccttggagtaggatctgagtgaactccactccccaccccaacctatgcagaaatcccttttaagatcttcctaggctgggcacagtgactcaggcctgtaatcccagcactttgggaggccgagcgggcagatcacttgaggtcaagagttacagaccagcctggccaacatggtgaaaccctgtctcactagtgtgagagacacttgcgtctctcactaaaaatacaaaaattggccaggtatggtgttgggtgcctgtaatcccaactcttcgggaggctgaggcaccagaattgcttgaacccaggaggcagaggttgcagtgagctgagatcacgccactggactccagc

SEQ ID NO: 100588 - DNA, 1580 bp, Homo sapiens
tcaggagttcaagaccagcctggccaacatggtgaaaccccatctctactaaaaaatacaaaaattagccaggcgtggtggcgggcgcctgtaatccccactacttgggaggctgaggcaggagaatcacttgaacccaggaggtggagtttgcagtgagtcaagattgcgccactgcactccagcctgggcgacaatgagataccatctcaaaaaaaaaaatattaaaaaagtagccaggtgtaatgacacgcacctgtagtcctagctacttgggaagctgaggtaggaggattgcttgggcctaggagtttgagtctgcagtaagctatgatgacactactgctccgcagcttgagcaacagagtgagaccctgtctcttaaaagagagagatgattaaactgtggggtaaaacggcgggaagtgattgaatcagctgcttgtatcagtgtagataaacttcaaaatgttggatgaaaagtaaggtatagtatggtatcattcacactgtgcatgcagagcagtaacatgtattttaatggaaatatttgtaagtataaaaacatgcacgggaataataaacacagagttcaaaataatgtttacgtctgcagggagagaaaaaaatgcgactggatgggggatacacagaggcctttagctatatttgaagtattttattttttaaaaaagcaaatctgtagcaagaatggtaatttatgatttccaaaacttgagtggtaggcatttcctttttttttaaataggcaaaatataccacaagaacaattgaaaacagtggtgctcaaaaggtaaatttagtcctcagactaatcctgtgaggtagattagttccgttttacagataaacaagcaaagactcgaaaggtttttgtaacttaaccaaagtttcagagctgcaagttacagagctgggataggaacctaagtgatctagccactaagccccgtatgtaaggggatgcgaaagagaggcacatccaatctcttgagtgaattgagcatggggattgtttcatttttgtcttctgtaggaaatgatccgactagatgaagtccccaatctgagttccttagtatccaatttcgatcagcagcagctcgctaatttctgccggattctggctgtcaccatttcagagatggatacagggaatgatgacaagcacacgcttcttgccaaaaatgctcaacagaagaagagcttgagtttggggccttctgcagctgaaatcaatcaaggtaaagtctccaagttctcagaattttgagattatagctctgaggcccttactaaatcatctagttttttttctttttcttttcttttctttttttttttttttccttttttgagatgggatcgtcactatgtcacccaggcaggagtgcagtggcacaatcgtggctcactgcagccttgacctccccaggctcaggtgatcctcccacctcagccacctgagtagctggaactataggcaggtgccaccacaccgggctaatttttgtattttttgtagagatggggtttcgccatgttgcccaggctggtct

SEQ ID NO: 100589 - DNA, 1059 bp, Homo sapiens
tgtctctactaaaaatataaaaattagcccagcatggtggtgcatgcctgtagtcccagctacttgggaggctgggacagaaaaattgcttgaacccaggaggcagaggttgcagtgagcagagattgtgccattgcgctctggcctgggcatcacagtgagactccgccttaaaaaaaaaaatcttaaaatttaagacaaaacaaaaaaccataagaagtgggctgggggtggtgggacctgttttgggaaccatatactgagttagacagggctagaggaactggtgagctacaagttacagttgccaataatagtagtagcttacatttgttttgtactagggaaaaggaaaagtggaagcagttgttccccaatgccccctgcacagcaaattcctgtcctccattactagaaatagaggcgagtatgggattcatgagagcttctaggaatcatgcactcgttttgggcacattcactgatacccttgctaccaggtcctgtgcattgagtctcaggagaaagggtaggatatatgccttcatcaaagtatggtcagattatttgggaaatagatgcaggaacagattattaaaagttcatgtgatctgtgcagtgaaagagaaacacccaatccagtggaagtaaattagtgggatgaaggatagcaggtgttatctgagtagcacggggatggttcaaaatgagaaaagttgatgtagtacatgccatttacagattttaaggagtaatgagtgagaatagaaccaaatagcacaaggcattccataaaattatcattcttaataaaagctagcaatagaaggaaaacttataaactatatatagggtatttattaaaatttaacttataggatattaaaatttacagcaaatattgaacttaattttaatgttttggaattatttctggtaaagtcaagaaaaagacaagaattcttgctctcactctggataaatggtcacatacatgtgtacacagagagtacctgtaagaatgttcattgcaacattgtttaatagtgaaaaactgta

SEQ ID NO: 100590 - DNA, 1059 bp, Homo sapiens
atattccccaccacctccaccttagtttattttctccgcacatagagtgatataccatatacacggctacactattctgtaccttctttcttcttctttttttttttttaattaaaacaattttaggccgggcgcagtggctcacgcctgtaatcccagcactttgggaggccaaggcaggtggatcgtgaggtcaggagttcgagaccaacctgtccaagatggtgaaaccctgtctctactaaaaataccaaaattagatgggcacggtggcaggcacttgtaatcccagctactcaggaggctgaggcaggagaattgcttgaagccgggaggcagaggttgccgtgagccaagatcataccactgcactctagcctgggtgatgagctctcaaaaaaaaattaaatggttagtgtttcctggtgtgattgtgccataatttatttacccaggccccagttgactggcatttataatttttccacaccatttctcttacagacaaggttgcagtaaagatcttttacatatttttgtatacatgtgagtatatacctttggaacaagaacgtatgttttttattgtttataaatctgaagtttacctacctaagaagttttgtcagtttatatccccaggaacaaagtatgagcgtctgtttacccataccatcaccaacatactgtgtttatgtgtgtatttttatagactttgttactgaagtataaccttcatacagaaaagtacaccaataattaccacaaaatacattcacttttgcactaccacccaaattaggaaatagaacattaccagtacccagaagcccccttccacaaacagtgtattttaagtatttactaagcagttatgagaaaagtgatatttttccatagttttttttaatcagctttattaagatatggttcatataccatacatttcacccatttgaagtacacaattcagtggttcttagtatatttgcagatatgtgcaaccatcaccacagtcaactttagagcattttcatcacctcaaaaaagaaactccat

SEQ ID NO: 100591 - DNA, 2180 bp, Homo sapiens
ggtgagggcaggaagggagcaggggccaggtcatgacttgcatttttatcctgcatgaaatggagggctcacagaaagttgtgagtagagaattgacaggaagacttatgttatacagatactgtaggagcttggtgtgtgtctcacgcctgttatcctggcactttgggaggccaaggtaggaggaattgcttgagcccagggatttgagaccagcctgggcaacatggtgtgagaccctgtccctattttttaaaatagtgtgtgtatataaactgcagggctaagattggaagctgggagcccatttggaagcttatgtgataatccaggtgagagatgatggtggcttgggaaagagtgaagttctgaaaagttcagtgatttgctcacaggccctcagctgctttgtggcagaacaggccttcttaagggattgcctgacccttactactaaattgtgatggtgttccagcttgcttccttctcccacatgtcagatcaaagatctgcgagaccacaagctggacaaccgcatggagtcgttcttcctggccgagactgtgaaatacctctacctcctgtttgacccaaccaacttcatccacaacaatgggtccaccttcgacgcggtgatcaccccctatggggagtgcatcctgggggctggggggtacatcttcaacacagaagctcaccccatcgaccctgccgccctgcactgctgccagaggctgaaggaagagcagtgggaggtggaggacttgatgagggaattctactctctcaaacggagcaggtcgaaatttcagaaaaacactgttagttcggggccatgggaacctccagcaaggccaggaacactcttctcaccagaaaaccatgaccaggcaagggagaggaagcctgccaaacagaaggtcccacttctcagctgccccagtcagcccttcacctccaagttggcattactgggacaggttttcctagactcctcataaccactggataatttttttatttttatttttttgaggctaaactataataaattgcttttggctatcatattttggttatcatgttttacatattgggctgtctcatgagatttcattcaaagaaaggattggtggctacgggcaattgtgactctagttaattttctcatgcagctggagagacggctaaatgcggttagctggctccaaagatcctaggggtcgatagttgaatctcccttccttttctggtgtctttgtggaaagtgttgtcataaatgtatttctttgttagttcttgctccaacatgtgcttcttacttttttttttttttttttttttttgagacagagtctcactcagtcacccaggctggagtgcagtggtgtgatctcggctcactacaacctctgcctcccaggttcaagcaattctccagcttcagcctcctgagtaactgggactataggcgtgcatctggctacaccgcatctggctaatttttttatttttatttttattttttgtatttttagtagagatgaggtttcaccatgttgcctaggctggtctcgaactcctgacgtcaggtgatccacccgcctcggcctcccaaagtgctgggattatgggcgtgagccaccatgccccggctgcttcttactctttagttgacctatctatccacctgtccttccaagcaacgaagatttattaagcaccttttttcttttgagacagggtctccctctgtcacccaggttggaatgtagtggcatgatcacgactcactgcagcctcgacctcccaggctcaagtgatcctcccatctcagcctctggagtagctgggaccacaggcacacaccactataatttgcctgatttttaaaaatttttttgcagagacggtgtctccctatgttgcccaggctgatctcaaactcctgggctcaaacaatcccctgcctcagcctcctgattaactgggatttcaggcgtgagccatggggctgggcaggcacctttgtgtgccagccgcagccccagaggttcagcagcaaacaaggcaaacagtttttattcttgtgaaactaaatttctagcagaaagaaataacctagtaaatagataaagtaacattgtgatcagttccatgaagaaaacacggggctgtgc

SEQ ID NO: 100592 - DNA, 1026 bp, Homo sapiens
gccatggtgtccttaatcccacctagctgttagaatagttagtgttggcagccaggcagcctgtgcttagctaaagttaggaatcctgctactaaggaggaagcggggaacagatattgggaattaggcaacaacctccgccaccttctctatgccagaacctggccacctttctctcccttgtggtggaagtcactggtcagccttaatgctggtctccactgagcttcaagctttgggtatactggctctgaaactcagcactgggtgaggtatcctgtgttcctgctagttggggccttatggacaagatatggaggggagtagtccctcacggccctaagaggccccaggccatctctgtgcagccactgagtgaggagggtctgctttggactttgcagaacttattgaaagcgcaatgtacctctaccgtgccacgggggatcccaccctcctagaactcggaagagatgctgtggaatccattgaaaaaatcagcaaggtggagtgcggatttgcaacagtaagtgtttgcatggccccaagaactgggaagagtctccccttgctgctaaaaagcctctttaagggtagagctttgggagttctgacatatcagcactagaagggaccttggagatatacataatgctcatattttacagatggggagaccaaagaacagagaagctaagtgccttgctaaagatctcacagctagtagaggtagagctagaattagttccttgggatcttgaccccggcccttggcattcctcccacagtggagatctttgatctgtttgaataggtgactttgaaaaggtgagtttagcgaaaagttttgtgagacactaaaatagattttaaggggaatccagagtcccatagccctatattcaaacctgggactccttaacaaagcagtcctgcttagtctcacagatatttcttgaatgtctttcacatgccaggcactctgctaggcccaagggttacagcagtggccttgctctcatggag

SEQ ID NO: 100593 - DNA, 1061 bp, Homo sapiens
taaatacataaacgcgtaaatggttgtttattaaatatcacgtactatacataattgtatgtgttatacttttatgactggcagcacagtaggtgtgtttacaccagtatcaccacaaacaagtaagtaatgcattgcattataaaattacaacagctgtgatatctttaggctgtggtgatttttcacctctattataattttataggaccaccatctctacagttcagtgttgaccaacatgttgttatatggcacatgactgtatatagagtttatttagtactatccatggtttcagacatccactgagggtcttggaacgtattctcctcacataaggggggactactttactcatttattcaacaaatatttattgaataccacggatgtaccaagcattgtgccaagctctgaacatggactgtttcatataatccttacaactcctgtttgagattatcttatttatttgcatgtatatttggtactttgttcattcagaaaatgtttattgctcattgtactagtgtgggggattctgcagtagacaaaacaaagtcccaggcctcatggatttacaatctaggggagagatatgagggataaattcaagttcctactagaatgtaagttctctgaaggctggattttgtcttgtttacaaactcataggagcctggaacctagtaggtgcttagcgaatgtttgtggtataaataaatgactgaaaaattccacagatacctaacattactgtattagaccattttcactgctgataaagacgtactcaagactgggtaatttataaagaaaaagaggtttaatggactcacagttccacatggctggggaggcctcacaatcgtggcggaaggcgaaaggcacatcttacatggtgcaggcaagagagaatgagagccaagtgaaaggggaaacctcttataaaaccatcagatcttgtgagacttattcactaccatgagaacagtatgggggaaacggcccccatgattcaattatctcccaccaggtcccttccacaacacgtgaga

SEQ ID NO: 100594 - DNA, 1038 bp, Homo sapiens
tagaaccactctgtcagcttcttggtggatgttcttattgagttaatttatggaaatacgtaaagcacgtctgtgtcttcagatagtggaatcacatgctgggtgctgagaaatcagacagattgcggcaacagcaaattctcatctcccatctcacactcactctaggcaggacataaacactccaaatcatttttctttttcattttttgctcaatgtgtataattaagtcctcataaatgtgcatgagatgcatctctactatgcagatgtacaggaaggctggccatgatccagcattgcccttccctctcagggtctgcatgtttcccaagaagcactggggcacctgccctgcatctccctgggcagtcagggttgggggtgagtagatccttctttggccatcggccttcccgttgggaccgtgtgtctttctctctctcaggtcggcaaccacattgatgtgctcactggcaagtgggtggcccaggacgcaggcatcggggctggcgtggactcctactttgagtacttggtgaaaggagccatcctgcttcaggataagaagctcatggccatgttcctaggtaaaaatggcagagtaagggagcttttcccctcatttttcttgctgatgtgtgatttgtttaaaaacttttttttgagacagagtcttgctccatctcccaggctggagtgcagtggcacaatctaggctcactgcaacctctgcctcccaggttcaagtgattctcatgcctcagcctcctgagtagctgggcatgtgatggtgtggactacaggcgcacaccatcacatccagctaatttttgtatttttagtagaaacggggtttcaccatgttggccaggctggtctcaaactccggacctcaggtgatctgcccgccttggcctcccaaagtgttgggatcacaggtgtgagccaccacgcctggcctgagtgcctgcagaatcagttctgaattcagagtcactatggacttacactgcccacttcatgcccactacagc

SEQ ID NO: 100595 - DNA, 1026 bp, Homo sapiens
gagagctgaggatagcgggtgagctaggttcaggtctcactcatggctcatggctcatggcttgagcgtctccttgcagacattgtgtcctgtgtgattcatccctggaggaaactctggaaactctgcctagctgctcctcctttataatttaattatttttggtcattggtcattttataaaaaaaggtcaagaaacaggattttgtcactcctcttctttttattacagcctgactttttctgaaatattgcttagagcccttcctggttgtgacttgctctcccgctggtgcctgccagattgcaagtttcttgtctgtggcagacacagttgctagaccctgtggttcttggaagtgtcgacacctttgttcacagtttggtgacgcataggctgctctggagttgtttgacctttaggcccagagaggaaatctctgcctctggctggttgtccagttctcgtcttgaaccagaaggcacttgggtgccacttgggtggggcgggcagagaactggactggggctggggtgggcacaggggaggcgttcccatcccagctctgtttgactctctctgtgtgacctgtggctgaattacttctttacaggcatggttttccctacctataaatcgagggtcatactatatccgtggtttagtggtttatatcctattttgcttccctttaaaaataatttagcccctatactctttatttaaagcagagatctttatttaaagtctatgaatggctttgtttattattattattattttgagacagggtctcgctctgtcacccaggctggagtgcagtggtgcaatctcagctcactgcagcccacgcctcttgggttcaaacgattctcgtgcctcagtctcccagatagccagaattacaggcgtgcaccaccacgcttgcctaatttttgtatttttagtagaaatagggtttcaccatgttggccaggctggtctcgaactcctggcctcaagtgatctgcctgccttggccaccc

SEQ ID NO: 100596 - DNA, 1096 bp, Homo sapiens
caggagtttgagaccagcctgatcaacatggtgaaaccccgtctctactaaaaatacaaaaattagccgggcatggtggtgcataatcccagctactcggggctgaggcaggagaatcgcttgaacccaggaggcggagtttgaagtgagccaagatcacgccactgcactctaccctgggcagcagagcgagactctgtctcaaaaaaacgaaacaaaaaacctaagacttctatgcgtagtttgcgttctttatattgtgtccatttaaatgacaacatcgtgactcttaattgggacctaggaatttacttaaccagtctcttggtatgaagtctctagatgatttctagctctcagtgttttcttctgctgtcaccaatcctaggacagaaactggaggtcttaagtggaattagtgagggccacatcaacataggatcccagactctgaatctgcctccatgcatgtaagagcctcattgtcaggtctcttttttatttccagattttggggaatgtctcagaattccaaagagtggttgaagtgctccaggacagcgtggactttgatattgatgtgaacgcctctgtgtttgaaacaaacattcgaggtaagggctgctctctaggacctttaaaagaaaaaagagtgtgaagttgcctctgtaaaccaagaagtggtaaataggattttaaggactgaccatgccaggacccttggccaaaacctctgaccgacagagctcttcttccctcctggagggtgaggtggggaagtctcaggatttccccatcagtttcagatatgaaagtgagcaggagactaagagactggaaagaaatacaccagattactcacctctttaatatgtatttgatactaggcatacagctatgaacaagaaagatatgatccttgccttcttggaacttattgtctgtccaatccaattttctgcagtgatggaaatgtcttatagctgtgttttgtccagtatggtagccacgaaccacatgagctattgagcatttgaaatgtatctactacaactatggaattgaatttttaatttcatttaattttaatgatatt

SEQ ID NO: 100597 - DNA, 1031 bp, Homo sapiens
agcacatagaagtcttgataacaatctttttgataactcatagttttgcactgtttataacacagtttaatcacccattaatgggtggacagttgggttctttccagcctcttgctgttctaagcaatactgccatgaacactctcaaacagctgttcactgtgaattaaattcctagaggtgaaaattggtgaaaggcctgtgctttaagctgcaatcttatactgcctcccaatggtagaggagaatgccagactataggtgatgtatttaattacaattgagctacatcagccaaccctcccaggtgcattaagtgggtcagagaatacctgcgattttcactgtggtttctctgttgtgactgtaagtgggacaggcagaggcattactttgcctcatttagttttagggggatcagatctagggcagccataatatctggtatttgattttcttactaagcggctgggatttctgtccttttgcagtttttctctgactctaattgatgcactggacaccttgctggtaagtatctcgtctgtttcttttcctttccactgttacataaccaacatccttcctcttttggcagcgtgactgtgggtgaaaaatgaattcctctcctaggccttttatttgcatctcatgattctgaagcgtccggctgtggttgcctagctagataggggaaaaacgaactacaacttatgcagattcatttatttagcaaacatttatagaggacctgttatgtacggagaattgtgataggcttgcatagctctatgggggatacagagactttgacatctcctgttttcagaggcttacattctagtggccatgttcaatgataataaaagggtatcaggctgagcatggtggctcacacctgtaatcccagcactttggaaggccgaggcaggcagatcacctgaggtcaggggtttgagaccagcctggccaatatggtgaaactccatctctattaaaatacaaaaaattagcccagcatagtggcacat

SEQ ID NO: 100598 - DNA, 1070 bp, Homo sapiens
agagttgtaagctcttaaaagggacaggaattgctcactcggggagctccgtttttgagaagtgagtcagctgacgctcccggccgaataaagctccttccttctttaacccggtgtctgaggagttttgtctgcggcttgtcctgctaggtaataatggtaaaggctgaacatttctcatgcttaccctgccttcatacttaataaggttgttgaaaaaaatgaatgagagaatgcattttaaatgctccgtacagtactagtacacaataagtgctcaatacatgctagctgttattattaaaacattaattaataacagtagtaacaacagccactgactttaagacacgttgatcagtgttgccgaaaccgtacatccgaagttgctcttcggccgcgtttcgctgcccattgcattcaggggcttgtagtccggaagtgagaggctgatttctcagcgcgcaggcgcagtggcgcggattcccggaagaacccgcagcagctcccaggatgaactggttgcagtggctgctgctgctgcgggggcgctgagaggacacgagctctatgcctttccggctgctcatcccgctcggcctcctgtgcgcgctgctgcctcagcaccatggtgcgccaggtcccgacggctccgcgccagatcccgcccactacaggtgaactgtgacccgccctttcgcagttggggaatgggaagcgtgaacccggtcctttccctttccgtccatcccagaccccgacttgctccgacacagccgctaggtcccagggagaaatcagctagtgattcccactttccgccctgtatcttgttcttcccccgcttgtttttgtgttcttgccccatgcctgatttctcgtcccccacccagggagcgagtcaaggccatgttctaccacgcctacgacagctacctggagaatgcctttcccttcgatgagctgcgacctctcacctgtgacgggcacgacacctggggcaggtagtgcgagcggaggggcaaggggcggccagggtctgactctctgggcctcggcgggcgggtcag

SEQ ID NO: 100599 - DNA, 2220 bp, Homo sapiens
tctcattcgtcagcactccactcccctgctgggctccagacatggacttctgtccctcaaggcacagctggactcatccctttccccaaacctgcccttcctccggcttcatttccatcaatacctccatcatcaacccttccgcgagacactcctggcccctcctctccctcatgcctcacaaccgaccagccggaggtctaggtcgatgacagctcctaaaaagctcctgaatgaataatgaatgaatgaacgcgagcaggctaggcgtggggccaggcggggtcgcgcccagaccgctcgcgaccatagagtccgccggaggccggaggtagaggggctggatgcgtggcggggagcgccgggctctcccggaagtctccctggacggaagtggaaacggaaacctttttagggagtccaaggtacagtcgccgcgtgcggagcttgttactggttacttggtaagctggtgtgaggggaacctgggagggtcagctccggtcctgggtcgggaggggtgggggccagaggattcagggccggaggttctggtgggggcccagtgggcgggacccgaggacggaggggccgggaggccgagaggggcggggtcgcggcggggcctgagggacggaggccgggatacttgggaaaggatccgccggccttgaactcccgcctccgccgcccctaggcctcatggcggtccgagcttcgttcgagaacaactgtgagatcggctgctttgccaagctcaccaacacctactgtctggtagcgatcggaggctcagagaacttctacaggtgcggcgggagccccggggcttacggtggcggggaggcgtgcgcaggagtcaagagctccggcagtgggagggtgccggcccctctgccccgccaccaccgagtccatgtccctacagtgtgttcgagggcgagctctccgataccatccccgtggtgcacgcgtctatcgccggctgccgcatcatcgggcgcatgtgtgtgggtaaggcaggtggaggacgccgagggagggagtggtctccaagcaccattaattacacccccggagggaacccggagtgacctagggattcccagggtatcatctgttatctctgggcactatagaatctctcaggccaagcgtcaggagatcggggcaaccctctagcaaaggctgctggataatagtaataacaaataatgtaaagtgctttcactcctgttctcattccttcgtcacaaagacactagaaggtaggagttactggcctaacttgactgatgaggaagttgagacttgacctaagtgactcagtaagttccacacctagttcctagtgttggagaaggatttttctcttttttttttttttttgaggccagatttttgctctttcgcccaggctggagtgcagtggcaagatcacagctgtctgcatcctcaacttcttaggctcaagtgatcctcccacctcagcctaccaggtagctagggccacaggcacgtgccaccacacctggctaatttttacatttttggtagagacgcggcctccctgtgttgcccagcctggccttgatctcctgggctcaagtgatcttcttaccttggtctcttaaagtgttgggattataggcgagagccactatacccagccgaggatttgtatctcatctctccctgccactgactgggcaaggtgctttctctttctaagcatccatttctgtctctgtaaagattagctaagatatgcggtcttcctgctcagttacgttggaatcttaaattccctttaccacatctctaccctaccttcctacctgtcagcactgttaattctggtcgttggtcctttcctttttattattattattatttttttttgagatggagttttcgctcttgttgcccaggctggagtgcaatggcacgatcttggctcactgcaacactctcttcaagtgattctcctgcctcagcctcccaagtagctgggattacaggcgcatcccgccacacccggctaatttttttgtatttttagtagagatggagtttcaccatgttggccaggctggtcttgaactcctgacctcaggtgatcctcccacctcggcctcccaaagtgctgggattacaggcgtgagccactgcgcccggccggtcctttcattaagctggatctgtcttccattactgctg

SEQ ID NO: 100600 - DNA, 1047 bp, Homo sapiens
tgactgctttctctgaaccaccttagtgaaattatctaggagatcagagacggcttggcctgggacggcttggtctgggacctgggatggtcagaagcccccctcatgccccgtccccttccttcctctcctctgggaggctggttcctgacgctggctcctcacctctgccctgcctctgtcgcttcctccttccccctcccctggttgcagatacagtacctggactccatgaacggggaggatctgcttctgacaggggaggtgagctggcgccctctagtggagaagaatcctcagagcatcctgaagccccattctccgacttacaacgacgagggactttgatgggctgggccctccgcacggcccgccagctggcttcgaggaacctccaggagagaagtgcctgttggtccaggaccctgcagaaagtggcctgaactgacctctgaacagcatctgtcaaatacctggccccatttgtgttgagtttcctcttagtgtgcccaggagtctgatctgctggggtacagggctgggagaacccctagctctcccggggtgtcctctcccttaggggaagccccgagtgagagtcccccagcacacactccccaaccccctccagcaactacatgtgactgatagcttttcccaaaggccaaggaagggatggtgtaggttcaaaagggaaaccccccagggcctgctgtggcctaggagcagattgtaatgctgccgagtccggtcggtgaccacgcgttgtccctcggctttcagccatggggttgagttggccattaaaagaaacagagacttctctctgccatggcccttctttattccagggacttagaaacttgcctgagatggtggacgcagtaatgagggcaccgcgcagctcagttagagacggagaaagggaagaggctgggatggtctctgctgctcttgcctctagttcatggagatgtgtctctgttcaggccaagatacagccagccaggcctgtcgtctgggacccaggaggcctctgatgaccaa

SEQ ID NO: 100601 - DNA, 1008 bp, Homo sapiens
gcatggccatcaagtgacacagctggcattcgaactctgtgctctggctcccagaccccacggttttgactgtatccccgctgtctgccaaagcatgctcctaatctttgtatccaacagattacacttaacaaatagttcaagaatgctataagtagagcaggtaacttcatctgttttgaagaagtagaagattgagactttggtttagtcagctgccaccatcactgatcttggcagaggtggaattaggacttgatctcccttctaactccaagtcagcacatcgattccacacactaccttggcacctggacagagcaacttctcagggcctgttccatcagccaccttcaccccaggaagcaagactctcagccctccctcctctagaggtccaagctagaaaatgtccttagctggtggctggggctcttattttgctctgtaatctttaagcttcccaacagaagtctcctctgccaaaagaggcagcgttaggcacacacacacatgcaagctctgagcctggccctctgtggccccagcaatcctgctgaacatcctgttcccctacttagggagaggctgggcccagagttgggtaagagtgaagacaaggtagctggctcccttcccccaaggaccagttgccttgccttggtccttggaccaagcaagaaggcacagtccatgcccacctccattcctgggagaaacatacattcacaatattcccagcccgtgccctgtggacagcagggggagcattgctgctatggacagcagggggagcattgctgctactgtttctcttctcagcctctcaagtgttgcctgggccaggcgcagtacggagtactgcctgagtcccagctctgcatcacctaactggtggcttggcccctctggaccccctgttctccctctgtatgtaataaaatgaagggattgggccagatacccttgtaagaccccttccacctctactgtgtgactgccccattt

SEQ ID NO: 100602 - DNA, 1108 bp, Homo sapiens
gttattggcacttggtaaataatgaatgatgggacccgtctccagacttgaatcactttggggcacctgtagatgggggagagggcagacttagtagagaaaatatgtgtgctaagtcttagaggataaggagttagcatcccttccatcagtggataaagaagagaagaattcctggcagcagtatgactaagaaatagatgacagcatgatgtatctgtgcacatactttactgactgcagggtgaagtaagatggggaggcaagaggaggggaggcaaaaaagatggccaagagcagatcactagaagccttgtagagtccatggaggagttaaaacttgatctcccatcagtccctgtatccacatagtctggttcctctgttaagcagtcacataaatatctttaaggcagcaacagtgaaaaggggaaagagagcagcgaattggcctcaaatgaactggcatctctttaaagctaatattcctccttgagaatgctactttaattaaacatgtgccctgcaagattcattattgccttacttgtgttctctgttggttgtctcattcattaatctgccgattagtaaccctgaactcttgcatcccttccttttttttgcattccctttttaatatactatgctgtttcccctgggacataaactccaggacccgtccctggcctgctcgtgtttgttttctttgccccttgtgcctgcctctgctataatatttgtagtatgtgttaagtaatccttaaggtaacatttttattatgtcataaaaagtgcatggcaaatatattataactcatggactttgtttaaaaatgaacggataatttattgagtgtgttacatgagcctcactcccctccccatttcagctgagacctgctgctcatttagccaagcctcctattgagtgctccctccctgtgacatgctgggaaagcaggcctgtggttggctagaggtgacatcatagtttatgtactcaataaaaatttaattaagtcattacaggaattgcagtcatcatttaaccctctgatttcttctgtttagtttattattaaacattcagtaataccagtcactg

SEQ ID NO: 100603 - DNA, 1021 bp, Homo sapiens
gggtgtggtggtgcgtgcctgtaatcccagctacttgggaggctgactttagctaatttaagcaaacaaaggatttattggaaggtaactaaggctcatggaatggagagtttaacaacagagctcaggaaggaaagatacagggcagctaagggatcttagcaataggaacttatgtatagtctctttggggtgacccaactttactattttatttatttattttttagaaatgaggtcttgctgtgttggccaggttggtctttaattcttggcctcaagcagttctcctgccatggccttccaaagtgctaggattacaggcatgagccactgtgccctgccaagggtgatccaactgtagcttccttttatatttggttgtttgtactctcagaagcaagagtcagattagctaagcttcagctatgtgcccatctctgtgatgagaggacagcattctaggatcaacagcctgccaactcgtggaaatgggaaagagtaggtcctgaacataaggaagaaatgcagagagagaaacctcagtgtcacagtacttctaagatctactgacccattgaggcagatgatggaggcaacctgaccaatccatggaatagcctctgggtgtttctcttggccatagaatcttgaacgccctggcctgtgaccagtgccaacccattgtaaccatatatatctgacattctttcttgaaacctctctggtttctccatgttcattcttaagtacggttggtaagacaaagacttttgactattaaaataaatgaggggagaaaactttttgacctttgcatatggcttttcctttaatatagataataataattaccttttcatatttctgatttatctgttcatgagaaagatttgctctgggatgctattacatctacttggtcagacccttgcttcatcctgttatttttttattttgatatagacataatactgtgcatttgaccttgtcgaatctcatcttctttttaaggacagtt

SEQ ID NO: 100604 - DNA, 1208 bp, Homo sapiens
caggatgctgtatttggacattttcaatagcacctagcataagctgtcatatcttgaagggatttataggtgcatctgtgacaccacactggattctggctttctggaggacaaagatcctatctttcatccgtctcctgttctgcctggcatgagtaaggcacatagcaggcactcagttgatgttggctgaatcttttaggatgacttgggcagagcagggtgggcataaatgctttagtttctccatctgtgcctggggaaatagtaaccccttattttggagcctttgaggacaatttaaaacgatatgtgtgaagtgtttggagccctttgaaaggagggtactggagaaattaatggtgtttttgctgttcttgggaaagccctttgtggttcccagtgaataaattacttggagtgagttttctcacacctcctactctgctctgttcaccgtagcttttttttttttttttaaataactgtctgctgtaatacttctttgcccatgacttataaagatatatatttttggtgttggacttttgacccctttctgctcccaggagagaaattttgatcagaataataaaaggtgtaaactgtgtgtgttgccccctttcctaggccttgggcagtttagctgctggggttaggaatcagctggcttgtggtatgtgtatggttatggggcaagtaggagatgattcctgttaagcgctgagcaggcttctgtctcctgctcttcttttcatccctgtcccataccgttttgctaagattcttcagatttcaaatgaaccttgttgtctttggcattttcgataggtgtttgtggctatactccttctccttcaaagacagaaggtgtttatcgtctcctgtgctttaggtcccaaggtgagttggctgccagagaagagcctccctctagaaggacagtgggagaactgaaaaacactcaccaatcttggagctacaagagtggagttagacttagttccacaattaaccagcaggctccaatgcagagcctggaccaggttatttctaagggcctttcctgcttgaaaaaaaatccatgagataaaaattttccagcccagggtagaatttccaagagtgaacacagtttgcaaaactttctacttttctccaagcctctcttgccctgtagcactggaagaactggctccgtccctaat

SEQ ID NO: 100605 - DNA, 1242 bp, Homo sapiens
taacatttattagataaatcatacctgctttattagtctctgatccaagtgtatatcagtgcagtcctgcaggaattggggaatttttcccctatcgcattttatccagccgttttttctatttggattgttgtagatagggtgctgccccataagggagtgttttagatcagcgtttctcatactttaatgtgcctatggttcacctgaggatcttgttaaaatacagattctgattcagtaagtttcaggacaggggtgagaaaatctacagttctgaaaagcttccaggtgatgcggatgttgctagtgacgcagggtggggtaggggacaatagcaaggttttaggtggtcccccaatacaggctcttaaattgccttcatgaagagaagtgcccaaattccggtttagttacaaagactataactaaaggatgatggttttaaaataatagagatttggaagagttggggaattactattactgctttctgctatagttgacttgataccttctttctaacctcatggcataaatagacatgccttatataggcaagacaattgtatattaatcactgggttgtgagtgcatgcatggatgagtgtgagtgcatgtgtgtgtttgaggggatctcagtcttccgtgtgtgtacaacctataaatgggacacgtggctagggagaagtaataggcagtgtagagccagtctggcctggttctcaccctgactggcaaatctttcctcttctgtgcttcagtttctgtattaaaagaaaggtggggacaggggaggcctaactacatgagccccaagttttcagctttttttcagcttgaaaatctatggtttgaaggtggtaatttgcaaatctatctctgtgttatttggcatcccaggtgtacctctgtaagaaaacatataaaatgtagaatttataaaaccaatcaatgtagtagtgatttttctcatgccaaaaacttagaggtgattgctttgagtggattggtgtgtggaagatcaagaaataagagagccactttcgagttagtgatgaataataaatttgcatcaaaaactcctttgaaattagaattctattctgatttggtgggaaattttttattttacaaaaatttgcttttcaccaactttttggagcccaactattgtgaaaaatggagcagactcatatatcatcgtgaagctggtacaaaaagcaggtgttaaatttgagg

SEQ ID NO: 100606 - DNA, 1007 bp, Homo sapiens
atacaactgtgataggtgcaatgagaggatgtgacaaggctatgtgggagaagctgggaacctcatttagtttaggggtgggtcagtcagggaaggcttcactgaagaggacatttacattgacacctaaagggtgagtagaagttagcaagtgaaagagtggatgaaaaagccttccaggtagagggatctagtggttttcaaactttttatcagcagagtcctttttaaaaatgaaatcttatgctcagccaccatatatgataaatatgatgaaaggaggtgggaatgacctgcttgcttcacatcttcacaacatgtccactgaaaaaagactgttaagtagttccatggaaactcagaatgtagtttaaaaactacagatctagtccaattctctcattttgcaaatggggagacagttttggcaattttaaggaattgtctcaggccacttactcagtagtggctgacccgagacaactctgaagttaactatggttacctgccccttctaaacactttgcttcctttctgattgtcctatttggtggtcaggggataggggtctcttcccctgagtatgaacatgtcatatgagcacagcaaacatttacggatcaccagctgtatgatgggccccgtgtttcttggcgctcactatctgtgtcctgggagaggccacaggtaaacctgaaactagcacagggtgatgtacagattatatgggatcacgggggaaggggggttgcctggggatggtcaaggaaagcagttgccttggccttctgggggccagaacagactatatgggattgaggagtaattaagaggcaaagaagttattgtaaactacttttcaagaagtttcaaatgaggggatgatcgcttgagggaaaaacagttcagaagggaagcattaattgttttttattttaaaatggggaaacactggaatgatttcataagctgaagggaagaagcctttgggaaagaaaagaaggaat

SEQ ID NO: 100607 - DNA, 1032 bp, Homo sapiens
tttgaaaggatgtttactagataactttgtcttggccagctgttcattattgaaggttcttcagttaatattgtagtattgaataataagactttttacgtatttaacatatcatgtttcaattcatagcctggtgtaaactacttataaaacttaagaaaagtttataaataactgttttatactattagctcatatagtatggttttatatttgtctcatttaggagttacaaaatattgtgggctaggaagggcttgtattactgttttcattttgttttattttgttttcagaaacagttgaggctcaaaggggctaagtgactcacccagggttgcctagccaagccttgaacctgtgttgtctggtttaaaatccagggatttctccactataacatattgtctgtgaatgagtgtaattgcaaattagaaaatgtaattcattttaatattttttgtattttgttatatttaaatgcaaactacctctgtgagattttctattagtattggaaactgatgtttatactaattatagtgtgaatctattggtgagctttgtcttagcttagtctttgaagtagttacctagggagaaagtaaattttttagtaacgctactcttcaggttttctgagactcaatttgagaatttccttttgagacctatagcatgttcatttttattacattctgttgtggcccatctttgtcatttgtgggtagattaagttttcatatcaaaccaaagtgcttccaaactgtggctagtgaataaaaagggaacaaatctggaatataccttctggatgcagaagatgacaaatatctttcaaataattacactgactttcctgtggcttggattctaaagagtaggccagacaggtttgaaataagagaaaggggctgggtgcagtggctcacacgtgtaatcccagcagtttgggaagccaaggcaggaggatcccttgagctgaggagttcaagaccagcctgggcagaaaaaaaaaaaaaaagaaacaag

SEQ ID NO: 100608 - DNA, 1776 bp, Homo sapiens
tccctgcagcctcgatcttctgggctcaagtgatcctcccacctcagcctcccaagcagcttaagactataggcatgcaccaccacacccagccaattaaaaaaaaatttgtagaaatagagtcttgctatgttccccaggctgagtcttaaactctggcctcaagcaatcctctcaccttgacctcccaaagtgttggaattacaggtgtgagctattgtgcctggcccaaattcttttatttcttcaggtattcaacagatatttcttgggcatctaccatgtactagacacccttctaggtgctgatcttgggtcttcctggtgagctgatcacggggaagtgggctaagtaaggttggaaagatcctatagtctttactttgaaacagctctgttcagattaaccctgtaagtgctcagtgttgcatagatctgtgtttttattcttcagtggccccagatgagccagtcccgagcatgtggtggatcagaacagattcctggaatagacatacagctgaataggaagtatcacaccacacgtaaggtgagaattatcagtgcattctgtgtttatagagtgctttcacacaggtgttctttggatctcaacaaaattgttagctaggtgagttttagcgaatgcagaaggtgaggctcagggggtaaagtgacttgcccaaggtcacaaggatggtaagtaagtggcagacaaaatgaatttttttttttcagggacaaggtcttgctctgtcacccaggctagagtagagtggtgccttcatagctgactgtagtctcgaactcccaagctcgagctatcctcctgcctcagccttctgaatagctgagacttacagtcatgcaccactgtgtactgccaatttttaaatttttgtagagaccagggtctcgttttgttacctaggttggtctcaaactcctggcttcaagcgatcctcctgcctcagcctccctaagtgctgggattgtttttaaaattttttttaacagatgaggtcttgctctgttaccctggtggagtgcagtggcatgatcatggctcactactgccttgaactcctgggcttaggtgatcctcccacctcggcctcccaaagtactgggattactgagattataggtgtgagccaccatgccagcctgaatatttggacctaagccttctgaggctatgtcctatgtttcttccattgttgtgtctggaaaacacttaagaggaaaacatatgaattttttacatgttaaaaataaagtgatatttaacttttggataattttttattggttagatagcttgcctttgcttggagagggttaacattagaacagactttccttggaggttatttgcaaactacaagactctgtagtcattaataaaatttgtgatacctttactaaaaaatgcaagagtttaaaaacattcagtgcttgattgcagttttgaatgacttttgactgctttcaggcagtatttttttttccttttcctattacatcaataagcatagaatgttttacttctcagaattgttcttgggagatgggggtcaagatttccttttaaaagtcttctttttgatagaacttttattctaataccccacatctgtcatctgctagatatgggttaatagacatacagtcaatgaggtaggcatgtcttgctctgaaatttggagggcatctattaggtacagttccaaatgtgttttcactgaatgataagatgcttaaaaaaatgaaaat

SEQ ID NO: 100609 - DNA, 1746 bp, Homo sapiens
ctcactgtaacctccgccttctgggttcaaacgattctcctgcctcagcctcctgagtagctgggattacaggcacacaccaccatgcctggctaatttttgtttttttttggaggggggtagagatggtggtttgccatgttgcccaggctggtctctaactcctggactcaggcaaccctcccgcctcggcctcccaaagtgttgggattacaggcgtcagccaccacgcccagcctattgatattttctaatctaagcaaaggaaaaattgaggtctttaagggtcgagtgaattttttgcgggaagtgcaaggacaagagtgggtagtacaaaaaagtaaatgtgtgtgtttataagtgtgtaggtgtggagaaactagatgtccttgatactagatacataggtactttagtagttcaatatagtgtgaaatgttagctaatggtaggatagaaatacagtagatggtaggacagccacagaaggaatctactggttactcctagagctgtgaggaaaaagaaggatctaatagaacctaatagaagaggacccagcccaaagcacagcttgtggaaactgctgttggctgtgttctttgaaccagtttaagtgctttgtgttttaggtggaccattgcattgatgtatgtgatgtaatggggaggtgttctgtgtttagtctgtgttttacaaagcctgcttgatacttatgaattaaagcctaagtgtccttgggactgaccagaagaatcctgactaattttttaatatcctcgtttggaaagaaaagtaaatagtaacattccacaattagaaattctattttttcttcgttagggttaaagaaaaaaaatcattttcattccatgtgttccatttcttcttggaataaaccagaattgaagagtcagccctcttcctgctccctctcacccttttttattgtaaaggtaatatagcattagtgagagtttggaaactagatttttttttttttgccagaattattttggctatagattcttaaatttatccataattctaacttaacaaaataactctttggtttcttgtgtgttctttctaaacttgcccatatgcagtctacgcagtcatgttttacctataattttatacatattataagcatttaacatttttcatgttgttaacaataataataatctctgagtaaaccgtgcagtctgagtgatgatgatgtgtcagtgtaggtttgttctttgtatcaaatgcaccactctggtatgggatgttgatggcgggggaggctgtgcatgtgggggaaggggtatgtgggaactctgccctttccaggaagttttgctatgagcctaaaactgctgttaaaaaaaaaaaaaaaagtctatttaaaaaaaaaaaaatcccagccaggcacccaggctcatgcctgtagtcccattttgggagttcaaggcattttgggagttcaaggcaggaagatcactcacttgagcccaggagtttgaggccagcctgggcaacatatggagacactgtctctacaaaaatacaaaaatcagcagggtgtgatgacagatgcctgtagtcccagcaactcaggaggctgaggcaggagaattgcttgagccggggaggtggaggttgcagtcagctgagattgcaccactgcactccagcctgggccatagagccagaccttgtctcaaaaaacaaaaacaaaacaacaacaacaaaaac

SEQ ID NO: 100610 - DNA, 1050 bp, Homo sapiens
cagagtctcgctcatatagaaagtattatttaaatgcccaaataaggccaggcacggtggcccatgcctgtaatcccagaattttgggaggccgaggcaggtgtatcacctgaggtcaggagtttgagaccagcctggccaacatggcaaaaccctgtctctactaaaaatacaaaaattagctgagtgtggtggcgcatgcctgtaatcccagctactcgggaggctgagttagaagaatcacttcaatctgggaagcggaggttgcagtgagccaagattgtgccactgcactccagcctgggacacagagcgagactccatctcaaaaaagaaaaaaatgcccaaatagaaactataagatgttatggccttaccttactgtcaccacccatttcccctgttcatagcaagtttgcctaagatcctcaggggcctttgctttgggctgtttgtgccagctgtgttcattgcccagggcctgttctttttgctgcaggtgctgcagtaccgaagctggtgccaagagctggagaagcggctagaagccactggagtgagtgaggctgagctctctgcaccccctgggtcctcagtgaatatacttgttaggtttcatttgttgactgagggaggttggagtgtacaagtgaggtgtttggtggaaggctctctttctcagcctctgagaggtttatcacactgatatcttcattggacctagctggcctgtcagattccaacccttggttttcaaaggacgaaatgtaaattagattggaaggagtgtgggattagcaggaagaagtgcatgtttcctccagcaggtgtcagtgtttcttttagaaagatgcaggcctttgcgagcctacagcatgtctgcagcaaagggatgtctgtgctattagaactggctttgaaaaacccatttatttgcctttgttccagctgcctctcagtacctcctcacattttcctcagaaaagttctctcagaggaaggaaagaaccaaaacttattgagcaccctcaatgcagtccaggcagcatg

SEQ ID NO: 100611 - DNA, 1054 bp, Homo sapiens
gaagcatattgctaacaaaggggagaaagaataaaaagaaagtggactgccatggaagggagccttagggaactggtctgagtgatgttctctttggaggtaagtaaggcttgtctctgtctggcgcagggaccaatcccccagaggtgggaaaatgtggaggagccaaacctggatgagctgctggtccgattggaggaggagcaacagaggtgatggaccccaaactttctgacctgggtgattggccagttggtggagaaggctgatgggaaacttctgccctgagggctaatgtggacttcagccatagccctctaattcctgcaatggaaaatttcagtggttgccatcttactcccaggaggtccaagggttggactagacctttattttgcacccacttttacccctccccagtgcaggtgtgagagtctagcagaggtgaacacccagcttcgactgcacatggaaaaagctgacgtggtgaataaagcccttagggaagatgtggaaaaactgacagtggactggagccgggcccgggatgagctaatgaggaaggagagccagtggcagatggagcaggaggtaggaagaacggggactggaactgtgagaggaagcctgtgtattctggatgctgccctggtcagtactggaaggagttaacttcaggacttggatgaaaactgagctgttgctgttaaagtccctgaccatccttacctgcgcatgctggcagcctcagccttcttgggccttcagcttagacctgccactacccgcctagtctaggttctgctgggaggtagcatgacactcagagcaactctgttcctgcagcagtgacgagcttaggtttttgatggatctgaaagcttactgattcctggtctggaggtcttgcatatctagatgctaaggaggtagatatgaaactgaatgggaaagaaagagctgttatgggccctggggaattttcaggtcccagctgaaggaaacaaatgtttcctgcatttttgctttgtgctcagtggtttatgtatatcat

SEQ ID NO: 100612 - DNA, 2228 bp, Homo sapiens
tttgtatttttagtagagacagggtttcaccatgttggtcaggctggtctcaaactcctgacctcaagtgatccacctgcctcagcctcccaaagtgttgggattacaagcgtgagccactgcaactcgccgaaatgtcacctcttctatgaagccttctctgacctcagtagcctgctaagttactgtgcccttgtagtcttttgacctcttattacagcattgatctcactgatgatttagtttcccctaccttctttttttggtgaggctgttttactttttggattataatgaagtaggtttttaaaaaataatgacatagaagggcagggaaatgagcagagagccccattgaatctcaggacaaagttcatatatgcccatgacgagggttgtatcttcacctgttggaggtacatacataaaatgcagggctattttgttttgtttttgcttttggaggcactgagaagtacaaaagcaggccatgtcttcgtaagtttttatttctagtactttgtacttcacctgccgtatactagacactcaatacattttgtttctttgttttttgagacagagtctagctctgttgcccaggctggagtgcagtagtgtaaacacagctcaccgcagccttaacctcctgggctgaagcaattctcttgcctcagcctccaaagtagctgggattacaggcacgcaccactatgcctggctaactttttaatttttttgtagagacggggtctcactatgtttcccaggccggtctggaactcctgagctcaagcagtctttccaccttggcctcccaaagttctaggattacaggttgagccaccgtggctggccagtgaatgtttgttgagtgatgcaatacttaaacaaatgaccatacagtgtgttaaggttcttagagatggtatagaataaaattattaagacttttgctgagtgaggaggatcacttgagcccaggagtttgagaccagcctggacaacatagtgagaccttgtctctactaaaagtaaaaataaaaaaagaatagccatgtggtggcatgcacctataattctagctacttgggaagctgaggcaggaggattgcttgagagtgagctatgattgcaccactgtattccagcctgggcaacagagcaagaccctgtctcaaaaaaaaaattggaaaaaaatttaaacttttagatagcattcattcaagaaatatttatttagccactcacataatagcaagcagtaagctctaagatatagtgttaagtgtttggtgattttgctggactttgagattaatatcaagaaggttgaacataatcttccccaaattgcccttcctttttccctatcagagtcagaacctcgggctggagggaccttgggactatcccaagtgcaattctgatgttcttattggcttcagggtgcttgacttcaagatcaagcgaggcctggaagggcctgggccagggctttccttcagctcttgggcccccaaacacgtgttccagccttgagatgtggtaaatccctgcatgtgtctgagtggttttttgcttccccacttcaaggctatagcatcatgtggtattcagggagtgcagacgggctgggggtgcctaagggatttgggggaggctgcagttgggagtggttggggttggggctggggctggggtgtgctgcatcgtagctctgtccacatccatgggctgttctggtgacagtgctatgctcttctctttagggtgaccgagctctctgctctgttgacccagtctcagaagcaaaatgaagattatgaaaagatgataaaggctctgagagagacagtggagatcctggtacatgatcctttgctctggaaaggagttgggcgtgggcttgtaggttccttgtgctttatggacagatagtgcaggataccagttacatattccatgatgaaatcctctaaagctaaaaaataaattttggctgaatctgaaaattaattaactcattcatttattcattgaataaatactattgactgtctactatccctactgtattcctggggaaattgcaatggcatatgtatgcagtgtgtccttaccagagaattggcacatacattcagagacacattggcaaattagtgagttaccaggaagcggatatgtggagagatttaaaatctagtcacatgggaaacaactga

SEQ ID NO: 100613 - DNA, 1182 bp, Homo sapiens
tcacatggacagattatttgtagaatgatgataatatttaccttgaagggttgctgggaagatgagagcaacgttttggaaaacgccagcatagaacctggcatatggtaggtctttaataactgggagcagggatataccttcatctttgctgtatttccctcctctcctgtgccccagttccttgtacctggtaggcatgaatagtggaagcttgaagggctgccataagggtcatgacttgtgctaagaatgatctccctgtaccaaggagaagggcagacaacccctaacaacaaaaaattagctgtagctgaatgtggtggcatgtgcctgtagccatggcaaggtgagatgggaggatcacatgagcccccaggagtttgaggcttcagtgagctaagaagatacacagagaagtctcactctcatttgtgctttctccatcccatttcccttccccctttaggcaaccattttagctgacttcttgtttatcttgccagtgctccttcatgcaaatacgggcatatattctttcttcccccactttcttgcataaaaggtagtgtatcatgtatatactgttctgcaccttgatttttttcacttgacatgtcttagaaatctttccttatcagtgtttatagaccatcctcattctgttgcatagcaaaggtgattatattcctgttacctttggggttatggcccatccctaagagttcctctagacccctctctttcccatcttagtcaggagatgctgatgggcctggaagccaaacagtcagaatcactcagtgaactgatcactcttcgggaagccctggagtcaagtcacctggaaggggagttactgaggcaagagcaaacggaagtgaccgcagcgctggctagggtgcgtggcctcctctcctcacttgctgggtgggcggcttcgaaagtgtgttcccatgcagcctgcctcattcttcaccttcaagccaggatccctcatctttcctcaatcattagtctgcttctgggttctctattccaacataccctctatattggaattagaatgggctttctaaagtatatacctggttatgtcagtctcttaaaaccattcaacggctttctagctctgtggtgccacattcaaagctttttgtcatgtgcctcaaagtgtgtttt

SEQ ID NO: 100614 - DNA, 1031 bp, Homo sapiens
tataaaaaattaaaacactacagaaattatctggaaagtgaaaaagtcttacttcctagaaatgaccagtgttactagtttgcagtatatcttccaattttaaaaaagaatgcctataacaattcttcactgaggctgggcgcagtggctcatgcctgtaatcccagcactttaggaggccgaggcgggcggatcacgaggtcagaggttcgagaccagcctgaccaacatagtgaaaccctgtctctactaaaaatacaaaaattagcccggcatggtggcacatgcctgtaatcccaactactcgggaggctgaggcaggagaatctcttgaatctgggaggcggaggttgcagtgagccgagattgtgccactgcactccaacctggatgacagagcgacactgctcaaaaaaacaaaaagaattcttcactgattctccactacttcattcacaccacccagtttgaattagaagcttctccttatactctgatagcacctcatgcttattttaactaccacattcctcatgctataattatctgtttatatgtctctaccattagaccaaaagctccttgaaggcaaagctatatcttatttgtttttatttctccagcttttagcatagtgcctaccacataacaggggccaagtaaatttttttcctgagccaatgaatgacctggctcaaaggtcatctttctcctctacaaaacctctcattgtcctaataattgtacggactctcccttcacagagtccctttctcgggacattgatgactttcttcccagtattatgtgtgcatcttctcaaggccaaaacctccttaggggcaggtcttctgctgtccctagcacagggtcttgctcacaggggagcattcttcctgggctgggggctctgtgggcggatcagggaaatagataaatgccacgtgctattgggtaagcaatccgggctcacagagctgggtccagaatctctgaagaggcaatgaccctaacctggtggtagcggcccc

SEQ ID NO: 100615 - DNA, 1036 bp, Homo sapiens
tgtgtcagccattgtaggagcttggattttgttctaagagcaatgggaaactgttgggtggtatgtatgtatgtatttgtttgagactgagtctcgctctgtcacccaggctagagtgcggtggcactatctcagctcactgcaaccttcgcctcccaggttcaagcaattcttgtgcctcagcttcccaagtagctgggattacaggtgcccgccaccatgcttggctaatttttgtatttttagtggagaaagggtttcaccatgttggccagggtcgtctcaaacttctgacctcaagtgatccacccaccttggtttccctaagtgttgggatgataggcgtgagccaccgcgcctgggcagttggatggtatttaaaaagcaggggtgggatatgatttatttatatatacgtatacatatgtatatacatatatgtatatgtattctctactctcctgagtagagaatagtgtgtgtgtgtttttaggggatcgtggcatcaagtggaagtagggatatggttaggagactgtttccatggtctaggtgagagactattaccaattcatggactctgaccaagaaacctgggtgagccagtgcactttgtgagggaggagagggactaggaagtgagaaggtgaggtggaaacaatgtggattgctggctcctgcctcagcttttgccaccccaccaaaaaaaccagtatttctatgacacagatttcctctactcaatgatttcttatccctcttcaggagaccactgggatactacagacccagctccaggaggctcaacgggagctgaaggaggcagcccggcagcacagagatgaccttgctgccctccaagaagagagcagctccctgctgcaggataagatggacctgcagaagcaggtcccctcctcctccccaccaagtcccatggtccttccccaacacagccaggctttcccacttcctcttgcaggacagggagaaccttggccctgctgcctggtttgggagggtagatgggtgggcc

SEQ ID NO: 100616 - DNA, 1147 bp, Homo sapiens
tgcagatcataactcactgcagtcttgacttcccaagctcaagcaattctcccacctcagccccctgagtagctgggactacagatgtgtgccatcacactggctaatttttaaatttttatagagacagggtctcactatgttgcccagactgatctcgaactcctggtctcaagcagtctgctcgccttggcctcccaaagtgttgagattacaggtgtgagccaccgcacccagcccagccaagatttttatttgtgcctgcctctatgcagcatatgtgaggctgggaggcagatgaccaggccgaattgtattgaggaagggggtggttaagaacagtgtgtaggaattggtagaatcgccagagcattggaaatggccactgactatggtaaacctcgaaggaccctgaagccctaggtgaggagcatcttcccaccggccccctgccctgccatcttggtcttcatgcccttaattttccaggtggaggacttgaagtctcagctggtggcccaggatgactcccagaggctggtggagcaggaggttcaggagaagctgagagagacccaggagtataaccgaattcagaaggagctggagagagagaaagccaggtaggctagataggccatggaggtggcttttgtctatctggctgccatggtcactgtgatattgacagttgtttgctcaggccaccttgcctttcatgtctgcaactctgggatgtacatgtagccatgtggagaggacatggttcctgtcttcaaagcttgaacttcatttatttagtaaatatttcgtgaacgcctgttatgcaccaggcaccatgcttggggatacagtgataaacaagactgtatggtccctgccccagtagaatttatagttttgtggggaagacattaatcaaataataactcaaattattacaggttatgacacatggaggaaacagggtgagagagagaagagactttagaaccattgttagggaaggcctttctcaggaagttgcatttaaactgagcactcagcatgaagtggagctacccatgtaaaagggtgagggggagttctattccgtaagaggagaaataatatgcaaaggccgtgaggcagataaaagtttacagtg

SEQ ID NO: 100617 - DNA, 1016 bp, Homo sapiens
aggggaggagaggaaagggatggggaagatttggacatgttgaacgtgaggtactaatataaggtatgtgtgaaatttgccagagaagaataaggttgatagctaggcatggtggcgcatgcctgcaatcccagctactctggaggctgaggcacgagaatcatttgaacccgggaggcagaggctgcagtgagccgagatcgtgccactgtaccccagcctgggtaacagagcaagactctgtctcaataaaaaaaaaacacaaaaaaacctgtgaggttgaaatggggcatcatctgcaggaagtacctaggagcacttattatagtaagtgctcaataaatgatagcttttattgttacatcataatcattatcattactatttctattttgattattaatgctatgtttagaatactcagatgagaaggtaatttttcattccctaagagaatggcccagcactctgacccctctctttttagcctgactctgtcactgatggaaaaggaacagagactccttgttttacaagaagctgactctattcgacaacaagagctgagtgccctgcgccaggacatgcaggaggcccagggagaacagaaagagctcagtgctcaggtacttcccactctggttatgagctctgcatccctggcagaagcctgattctgaagcggtggattgattgctctgagtcctctcatggagaggacccatctatttttcctgattacaggataggctggtgcctcaacacccctacaggagggggaagccaggactagacaaggcgggggcttgggaatctgacccagagatggacatggctcctgtgggaaacctgacagcccacagcaaagtgcacacgggtgtagcccatgcaggcctggttccagcacaccggcttcaaagtatgctgggtctggttggcaagatgtagcagggagaatgagcaaccagaaatactccagatcaggcaggcagcagcaagacttccagggactcagt

SEQ ID NO: 100618 - DNA, 1035 bp, Homo sapiens
ggcctgggcctggttcccgggctgctgctctgcggccagcgcttctagctggctctctgtgctgcgcagtcgcagctgtagttgggctgccttggcttcctgggcccacaaggaggctcgcagctgctgctccgtgatatgagacgcctccagctcctccagcagctgtgcttcctgggccagaaagtcagcctccttttccttcacctcttgccttagtaattccatctgtcaaggaagaattttacataatataagcaggaagcggataccctctcctcaggccttcccaggccagaccccactcaatccttgtacaaactctgatcagggctgggaggatttcagctcagctctcaggcaggtagaggggctctgaaatgagtgttaccctagatctaacacctggctgcctgccgactactgaacacatgggcccaggctgctatgctaatgggcttcagccctggcttcctgggcagatatgctggctccttgctatgaccagaactctgccctgaaacctcgacgctgcgcctagtaagaccagtcacaataacatagctaccatgtattgaatgcttattgtgttcctgacactttatatattcctataatggttataggaattaggaacaagaattgttcacccttgttttatggatgaagaagctgacgttcacacaattagaaagcttacattcaaactcaagaccattgaacagccaaacctgtgtgcccttaacccctgcaagccaccatctggctcttacaccccattccttccctcctagttccatcttttctctgtatacaatatctggggttctgatgggggcagactgagtccctggaagtcttgctgctgcctgcctgatctggagtatttctggttgctcattctccctgctacatcttgccaaccagacccagcatactttgaagccggtgtgctggaaccaggcctgcatgggctacacccgtgtgcactttgctgtgggctgtcaggtttcccacaggagccatgtccatctc

SEQ ID NO: 100619 - DNA, 1027 bp, Homo sapiens
gtaatcccagctactcaggaggctgaggcaggagaatcacttgaacctgggaggtggaggttgcagtgagccaagattgtgccattgcactccaggttgaacgacaaaagtgaaactccatctcaaacaaacacaaaaaaaccctgggcagatgtatggcattgttttccatcatcttccactcagctatgaattaattcttggtacccaggcttccaagagaaaccctagaaatcagtgaccactgagatttgaggttggcatttataggcatgttctaggcctaggtctgaaagagctcataaattccacctcacagtgaacctatcagtcaatacaaattgagtgtcatccatatgtcagccactctgggctgggtatacaaaaaggagaaagacctggtctctgcctaaagaaggcttgtgacatggtggaggaaccaaactgcattctactggaaagcagaactgagagaattaattggatcaataacagacgcaagtgatgcactgttggaactaggaggagggggcaattcatcctgatttgggaagggtcagaaggaaagaagagatgacctttgggctgagctttgaagtaggagtgttgagagggaagtggtgacccctgggctaactttgagcaggagctctgtttcaaaagacatagataggtcagaaggggatggattctcacactccatccaagtggagcagagcctgtcatcacttcaggaagctaaatacacatgtgtttaaaggaagtaacccggcaatctgggagtaggtccacaatggcggcccaccacagaagctgagaatgaggagagagcttgagccctgcattgttttgtggaagatgaggaactcacgtttagccatgcccttcctttcccaggatgttctgagggatcaggtccagaaactggaagagcgtctaactgatactgaggctgagaagagccaggtccacacagagttgcaggatctgcagagacagctctcccagaatcaggaaggtgagaagc

SEQ ID NO: 100620 - DNA, 1091 bp, Homo sapiens
ggcagccaaggagaacctgacagcccaggtggaacacctgcaagcagctgtcgtagaagccagggctcaggcaagtgctgctggcatcctggaagaagacctgagaacggctcgctcagcactgaagctgaaaaatgaggaagtagagagtgagcgtgagagagcccaggctctgcaagagcagggcgaactgaaggtggcccaagggaaggctctgcaagagaatttggccctcctgacccagaccctagctgaaagagaagaggaggtggagactctgcggggacaaatccaggaactggagaagcaacgggaaatgcagaaggctgctttggaattgctgtctctggacctgaagaagaggaaccaagaggtagatctgcagcaagaacagattcaggagctagagaagtgtaggtctgttttagagcatctgcccatggccgtccaggagcgagagcagaagctgactgtgcagagggagcagatcagagagctcgagaaggatcgggagactcagaggaacgtcttggagcatcagcttctagaacttgagaagaaagaccaaatgattgagtcccagagaggacaggttcaggacctgaaaaagcagttggttactctggaatgcctggccctggaactggaggaaaaccatcacaagatggagtgccagcaaaaactgatcaaggagctggagggccagagggaaacccagagagtggctttgacccaccttacgctggacctagaagaaaggagccaggagctgcaggcacaaagcagccagatccatgacctggagagccacagcaccgttctggcaagagagctgcaggagagggaccaggaggtgaagtctcagcgagaacagatcgaggagctgcagaggcagaaagagcatctgactcaggatctcgagaggagagaccaggagctgatgctgcagaaggagaggattcaggttctcgaggatcagaggacccggcagaccaagatcctggaggaggacctggaacagatcaagctgtccttgagagagcgaggccgggagctgaccactcagaggcagctgatgcaggaacgggcag

SEQ ID NO: 100621 - DNA, 1035 bp, Homo sapiens
ggatgaagagctgagacatcagcaggaacgggagcagctgctggagaagtctctggcccagagggtccaagagaatatgatccaagagaagcagaatctggggcaagagagagaagaggaggagataaggggccttcatcagagtgtaagggagctacagctgactctagcccaaaaggaacaggagattctggagctgagggagacccagcaaaggaacaacctggaagccttaccccacagccacaaaacctccccaatggaggaacaatctctaaaacttgattctttagagcccaggctgcagcgggagctggagcggctacaggcagccctgagacagacagaagccagggagattgagtggagggagaaggcccaggacttggcactctccctagcgcagaccaaggccagtgtcagcagtctgcaggaggtagccatgttcctacaagcctctgtcctggagcgggactcagaacagcaaaggctgcaggtaagtcactccatggggagtaagggccaggggacacacccctgtctggctgagctcagggactgcccaccaccctgggccctgtggcacctcaggggtatgagaaagctgagatcatgagcacctcaacatcggtgggattcaggctactgtgctagtcgggagatacagagaggataagacccccacagtccctgccctcacagagttcacagtctagtgggtaaacaacgataatgcagtgtggttggtgcctaatgggggaagtttagtatgccccaggcatgctggagggatgcccaccctttcctgggagtgggtcctgaaaggctttctggtaaaagtggtgtttaagattagacctgggccaggcacggtggctcacgccggtaatcccagcactttgggaagccgaggcgggcagatcacttgaggtcaggagttcgagaccagtctggccaacatggtgaaaccccgtctctactaaaaatacaaaaattagccaggtatgctggcatgtgcctgtgatcccagctact

SEQ ID NO: 100622 - DNA, 1024 bp, Homo sapiens
cagagcctctaggaaaaataagacaaaagcctgaggagaacattgaaccgctgtttgtgtggaggatgggttggtctggatatgaggttggcaaggtgtgattttgctccatacctccgtaccctaggatgaactggagctcaccagacgggctctggagaaggagcggctacacagcccaggtgcaaccagcacagcagaactggggtccagaggggagcagggtgtgcagctgggagaggtgagctgggggctctgggggaacaggtgacccagcagggagctcctgtccaggggtttgtccccttcccttgggaactgggttcctgaagcttaaacctgccagattggtctgtgtgtcctctgtctgttccctacctgtcttaggggctgcccaggtgagattcacaggtctttcccacaggtctcaggagtggaggctgagcctagtcctgatggaatggagaagcagtcatggagacaaaggcttgaacacctgcagcaagcagtggcccggctggagattgacaggagcaggctgcagcgccacaatgtccagctgcggagtaccttggagcaggtgacccctcttcttgtccagtgggcatgcatctccacttctcgtgtggtccctagagcataggctcagtaaattacagcctgtgggccaaatccagcctgctgcctgtttctgaaaattaagtttgtttttttttttcccgagacagagtcttgctctgtctcctagagctggagtggaatggtacgatctccgctcactgcaacctccacctcccgggttcaagcaatcctcctgccccagcctcctgaatagctgggattacaggcatgcaccaccatgcctggctaattgttgtatttttagtagagatggtgtttcactatgttggccaggctggtcttgaactcctgaccttgtgatccgcctgcctcagctttccaaagtgctgggattacaggtgtgagccaccacgcccagccctgaaaattaagttttattgga

SEQ ID NO: 100623 - DNA, 1038 bp, Homo sapiens
gcatgcctggctattttttgcatttttagtagagatgaggctaccaccatgcctggctattttttgtatttttagtagagatggagtttgaccatattggccaggctggtctcgaactcctgacctcatgatccacccgcctcagcctcccaaagtgttgggatacaggcatgagccaccatgcttggcctacatgtagagtcttgaaagccaggcagaaaactttagactccatgctgaaggcattgaggagcaggaattttaagagaagaagatacaagaatctttcctgccggggcacagttgtgcaagacacagaacaaagccttgggccccagggatgaccctgaccctggtaagacagccagttgtcctggttgcacctggggaggaagggggagggaactgacctggggcccttcccacagcaacccacagccacatcctaccccttttcctattccccctcaccgtgtctttgctatcttccactccactagggaaccagaccatcttccaaaatctgagaaagaattggaggtgggggagtttgggccacaagacctgggaaagtcctgcaagtgtccccagtaagccaatagaaggtcttcccagagcccctgctgttactccctgcagtgacctcccctcacccccacacagagaatgtctggggacacctccatcaccttatcacttagagcatctgaagtccacaccaggtcagagagcttccgcagtagcatctccagctgcatccaggagccctggtcgctggcattcctgggatagatgaagcattgtgtgtggtttggttccccacgtccatctcaaagccctggacttggggcctgcttcatcttgggaaggggagcagaaactgatggaactgtggggcaggcctggccttcctgctcccgccctctccccagcacccacctgaaaaccacggggtattggtcgatgtcgttgccaaggctggagccctgcgggatctgtgggcgccccaacagcacacaagtcccacaatagaaatca

SEQ ID NO: 100624 - DNA, 2434 bp, Homo sapiens
ctgggggttcacagcctccagcctaggcctccaggcaaagccagcacctgctactctgtgtgcctaacgtacaagtgaagctggtattttaagaaatctggaacctggccaggcatggtggctcatgcttgtaatcccagctactcaggaggctgaggcaagagaatcgcttgaataaggcgaggctgcagtgagccaagatcatgccactgctctccagcctgggcaacagagtgagaccttgtctcaaaaaaaaaaaaaaaaaagaaaaatctggaaccccaggagtttgcaggctgtggaaggaggagtttctaggcagggaatgggggattcttatctcggggaggttgtccccttaggaccatagcctccccttcctcccacatctccgcagacggacccaggtgtccctgtctgctactgtcatcagagctttggatgagctctggatggtgttgtttacagatcaacatgacccactacatccagcacctgtcatttggggaggactatccaggcattgtgaaccccctggaccacaccaatgtcactgcgccccaaggtaccagcccgggaggcagcccccagccgcagaaggccggccgggcacccatacccagtgctttgttttcccctcagcctccatgatgttccagtactttgtgaaggtggtgcccactgtgtacatgaaggtggacggagaggtgagtcagggagctccctaccagagtctcctgcgcggtgccaagcactggagttcctgcattttgttccgtcagcctggggagtgaaagctgcctcgtcctcacatggcgaataaaagactgaggcacagagagggtgggggatttgccctcccaggcagagtgcaggcctggggctgttagatttaaagcgcctgctctttctgctgccctcaccgcttctatccgttcctccggtgcccaccgtctgcctgcctcactgttctctgtggtctgcctgggctgggggttaggcaaggcaagtctctgtgtacccgctcccaaggctgccctggcctgtggagcagcatctcagcagagtggcaggatgcgaggggctgagggcagaggaagtcaggtcagccttggtgcgtctttggagagctgcttctcagcctggacccccgtgagaacacccaccaaatgctgccaggataggtaaactgtaaagacttggcacctggaggggaaggctgaggccaagactaggagagggggtctggcgggccaggccttgcagtgcaggccactagcacggtgctgtgttctctccttacacggccaaggctcaacaggaaaggggaaggagcaggggtggggctgatggtggctggagccaggtcctagccctagccctggcccaggctcccctcccaccccaggtactgaggacaaatcagttctctgtgaccagacatgagaaggttgccaatgggctgttgggcgaccaaggccttcccggagtcttcgtcctctatgagctctcgcccatgatggtgaagctgacggagaagcacaggtgaggatgggggcaaagcggcctctgggggcctgggcctgagggaggaggatgcctgctgagcccaccctctccttctaccaggtccttcacccacttcctgacaggtgtgtgcgccatcattgggggcatgttcacaggtaagaggcccagggcgtctgtgagctgtggggtggggagggtaaagcctgggtgccccaggtttggttgggggtgaaggggcagatgctggcctggccagttaagtgacaaggctctcagcgtcaaaagccaaggcccccactgggccagtgccagcccttgtctctctcccagtggctggactcatcgattcgctcatctaccactcagcacgagccatccagaagaaaattgatctagggaagacaacgtagtcaccctcggtgcttcctctgtctcctctttctccctggcctgtggttgtcccccagcctctgccaccctccacctcctcggtcagccccagccccaggttgataaatctattgattgattgtgatagtactcactggtctccgtgtgatccttgccatggccagagcctcatcctggccactcactgaaggcaattgtgactgacagatcggggcccagagccctcgggagccccacatgggcatcccctagttaaccggggtttattcaaaccagattcatgtccagcccacagccctgtcctgggtccctcctccactgtggtcctcaggcctctcgggttcagccccagggctcagatggaccttttcagcgtgagcttcctggagccaccatggcccccaggctcatgagtgatcaaccccaggccactaattcagggccctgagtgcatattggggcttgccacttcttcattgatgggtaaagctgg

SEQ ID NO: 100625 - DNA, 1150 bp, Homo sapiens
cttgagggttatggaacaaaggacttttttttttttttttttttttgagatggactcttgctctgtcacccaggctggagtgcagtgacgcgatctcagctcactgcaacctgcacctcctgggttcaagtgattctcctgcctcagccttcctagtagcttggattacaggcgtgtgccaccatgcccagctaatttttatatttttagtagagacgggctttcaccatgttggctggggtggtcacaaactcctgacctcaagtgatccgcctgccttagcctcccaaagtgctgggattacaggtgtgagccatcgcacccggcctgtaacaagggacttcttatgagtgtggggatgtgtggctggggtgtttgcaggggtttaggaggaggatctgcttcaggacatgaatgggcttgtccccagcaatacttcatgctgttgctgctgactgatggtgctgtgacggatgtggaagccacacgtgaggctgtggtgcgtgcctcgaacctgcccatgtcagtgatcattgtgggtgtgggtggtgctgactttgaggccatggagcagctggacgctgatggtggacccctgcatacacgttctgggcaggctgctgcccgcgacattgtgcagtttgtaccctaccgccggttccagaatgtgagtaggtgcaaatttgatctgggagtttaccctttcacctttccctgatgtgagtagggttgaggcccaagggatgctcaccttttcctctaagcctgggatatggttgggttcttgagcatgaaatacagactttgggcagctgttctgggccaccactgacttttcccttttcttggcaggcccctcgggaggcattggcacagaccgtgctcgcagaagtgcccacacaactggtctcatacttcagggcccagggttgggccccgctcaagccacttccaccctcagccaaggatcctgcacaggccccccaggcctaggttcccttggaggctgtggcaagtcctcaatcctgtgtcccagaggtccctctgggccacaacccaacccttctcactctcctcagtgctagcactttgtattttttgatacttttatacttgtttctgcttttgctgctcttgatcccacctttgc

SEQ ID NO: 100626 - DNA, 1090 bp, Homo sapiens
tgacgggtcacatgatctcatcggtaccttccacaccagcttggcccagctgcaggcagtcccggtgagtgctggtcttgccaggggtgtggaaatgggcctagatagctgaagcttgtgggagagaggaaggagaaggcagctcgagtccttgactgatgctctgagaatttcctaccctaatttttctgtcctcaccaggctgagtttgaatgcatccaccctgagaagcagcagaaaaagaaaagctacaagaactctggaactatccgtgtcaagatttgtcgggtgagacaaaagcccatgtaaccaaggctctgattcctgagctccatgacaccaactgctatcaccccaggcatgaccctggtttcatttgcaggtagaaacagagtactcctttctggactatgtgatgggaggctgtcagatcaacttcactgtaagttactttaccaagggcaagagaacaggtctggggctcagggtggcctttagctgccttcctcacctcctcccaggtgggcgtggacttcactggctccaatggagacccctcctcacctgactccctacactacctgagtccaacaggggtcaatgagtacctgatggcactgtggagtgtgggcagcgtggttcaggactatgactcgtgagtacctgcttctctgggctatacccgctccctgcagatgcttcagcctctgagcttacagtcccctcactgccttttgcccaatacactgtcctcccacagagacaagctgttccctgcatttggatttggggcccaggttccccctgactggcaggtgagctccctctctttctgccactcctgttttcagtttcagggtcctgattttgggggatgtggtaaatttacttgctacttggcactcagctttaagaggagatgcagggttggattcctgcaggcacgtagacagcaagtgctcaggactccatagctcctataggaatcttggcacacgccagtgtcctttttcattcttagcagaggtcatggggaaagaacctcattttcattcttgtctccaggtctcgcatgaatttgccttgaatt

SEQ ID NO: 100627 - DNA, 1043 bp, Homo sapiens
cccttttcaatatcttcagaccagggttggttgtatctgccatcttctgtgccagtgagctcacctaggggtggaggggtttggaggctatgaggccttctcttccttgggtgtcacgggggtggacgtatgctcagccctgcctgggtgatgcctgctggccttcccaagctgggacctgtagtcggggaaggggagagaaggctccctggtgcttgacccagctccttttccctcagatggcccactgcgtgaccttggttcagctgtccatttcctgtgaccatctcattgacaaggacatcggctccaagtctgacccactctgcgtccttttacaggatgtgggagggggcagctgggctgaggtgaggcggattatggaggttaaggttgtggagggaggctaggattgtgttttggggtggaggctgtgactgtgatgcttactggcctctgcccacagcttggccggactgaacgggtgcggaactgctcaagccctgagttctccaagactctacagcttgagtaccgctttgagacagtccagaagctacgctttggaatctatgacatagacaacaagacgccagagctgagggatgatgacttcctagggggtgctgagtgttccctaggacaggtatgtagggctggggattaggatccttcagatgcaggtctgtgagacaacctagcctgcctggaggtagggggcaagcaggacctaaccctgcctgttatcctgaaactcccttccctgcttttccccagattgtgtccagccaggtactgactctccccttgatgctgaagcctggaaaacctgctgggcgggggaccatcacggtaaggaacccagcaagggttgaggagggacttaacatcaatgaattcatgaggtgatgtagtctcccctacctaggtctcagctcaggaattaaaggacaatcgtgtagtaaccatggaggtagaggccagaaacctagataagaaggtgtgtctggaagtaggccctggtaatccaagagttaaggggc

SEQ ID NO: 100628 - DNA, 1038 bp, Homo sapiens
ggacacagggataacaagaggtctgagggtgattgttatggtggctgcaggaggacggaattacccaggtgttgtcgtggtgaaccatgcaagaaaataatgttcccagcagagggaaggggtgaatcagagaagcttggtgctgcctgattacaagggcgagacatcagttagtttggagctggctgggcagggagctggggctggagatgaactttcagatttcattctgcaaatatgtattgtctaggtgcttgggatagagcaataaacagaacagctaaatattcctttctcacagaatttatattctagtgggggaaacagtatatacatgtatataatgttagacattgagaaaaagcaaaaaaggggtatgcaatgccaggggcagtggggttgaaattttagaggggctaaaagggagagcctttatatatatatgtatatataaaacagggaagattattttgagtaaagacttgtggggaaagggagcagtgagccatgtggatataatgcagagaaagaacacattccaggtactgcaaagtgtttggggtagaaacaaacttggctggctgggtgtggtggcacacactatcatgccaggactttgggaggctgaggtgggtggattgcttgatccgaggagttgcccagcagcctgggcaacatagtgagaccctgtctctacaaaaaaaaaaaaaaaaaaatagctgggtgtggtgatgcacacctgtagtcccagctacttgggaggctgaggtgggagggatcgcttgaacccaaggggcagaggttgtggtgagctgagatctcaccactgcacttcagcctgggtgacagtgagactctgtctcacgaaagaaggaacaaacaaacttggcttatttgaggagtgacaaagtggctgaaatggagtgagcaagagagacactccgagatcaggttaaagaaatctggaccttccaggaccttataggccatggtatagtttggactttttttcttttcttttctttttggaaatggagt

SEQ ID NO: 100629 - DNA, 1609 bp, Homo sapiens
agctttgctagggagtttggctccgaacctaaaggcagctatacggggcttttacttggaatagagactggaagctggcatctgggatgaccaggtggagcagtgctaggacagaaaccaagcaggacgcaagagactaataaggcctgaagttaggtaggggttgttgaactggaagtggaggctttgggcttagaatgaacagtcaagaagatttgaggtgtggatttggggggaaagctgatgaggcctttttatttattttgcttgttttgtttttgttttttatttcatataaggccttttaaaaaatacaaaacagtataaaatattgaaacaatacagaattatggagttcacaaaattcttatcttccactcctttgagctacctaaaacatttgatgcatcttctatttttctgtgtgtgtatttatttatgtttgtattcaaatctgttataaagatacacctacaattgaagtttaaaatggaagtttacaattgaagtaaaaaatggtcatactcttcctattattattattattatttgagatggagtcttgtgtacagtgccatgatctcggctcactgcaacctccaactcccaggttcaagtgattctcctggctcccgagtagctgggactacaggtgtgcaccaccacacccagctgatatttgtatttttggtagagactgggtttcaccacgttggccacgctggtcttgaactgacctcaagtgatccgcctgcctcggcgtcccaaaacgctgggattacaacagtgagccactgcgcccggcctatttttgattttttcataggataccaatataatatagttctggcttgttttttagccactattcagcattccgttgttcagatgtatcatatttagttgatagacctttaagctgccttagatttttcactattcccagcattagtgaaatgagcattcttttttatttgtctctgtactgtgtaaacactgcctgggagagcatgtgaggtgacatgcatggagttcagattgtgacttgggggaagctgtgatcctgatcccttgagggagcatgtattctgctctgggtctgtccttggggaacccccaagggagtgatcaggatggtcagaagtctgcaggccacattctaggggcaacagccaaaagaactgcggctgtttctccagatttcagctgggactgttcacagcttccaggtatcagatgagttctcatagggagatagggtaaggccttcccatggagccctaggctggggaagaactaccaggtagaagtaagaattccacagagttaggtcagtttgggtaggatttgtatggacctagactttctgatgattggattgtaagactgggttttctatcactgggactgttcatgcaggggccagggtgctgtggaggggcagtatgtgaagcaagttgaactctgaagcattccaactttgataacagcattccagatggaaactatgagggaccaagatgaggtgctgtgggctgcgagggaggagcgattgactgaggatcagtataggggagggctgacgctggaggcatctcagggtatagct

SEQ ID NO: 100630 - DNA, 1829 bp, Homo sapiens
gtgttgccaaatactttgtgtcagcctgactccttagtagtatatggatctaaaccaaatttattgaaaatttcagtttatgagtaccattcagtagcccttagtcatatgtatgaataaggaatgtgtagttttatagaaaggattttcatttttggttcagtttgtgacctgtgaggaatatccttagagctgctgatgtaaatttggagaatcctcgagttagaaaagtagggataagaaaacttgtctaccttctccatgtcctttgatggggccaaaaaggaaaaagaagagtggtggtggttggtgtagtttgtcttttcagtcttacgggaaacaatgttccatgggtggtcctttgtaagcctatggaggattttctgattggctttcaagacttgatcctgcatctgtgagctgatccagcatgccaaggtaggcaataggagtgtgagcatgacattggtttattaaaggagtggccctgccacccagaccttcagccctctatgccaccttcttgcagcctctgtacaacttctggtcattacctggggtggataaggaattgggaattgcaggctggtgcctttctgggttaggactttggaagtggaagagggaagtgttaaggactgacaaatgaatttcagctcatttggcactgaattagatcccactggacccaggagaaatctgttcttggttatgaataggaaaattagaacctcccaaggcaagggaagggtggccatagaaaatgaagggcaagttactcccttgtagcagagaatgggattccctatcgacagtagtatgctggtaaactggctggcagggtgaaggaagccatgactttttgcagttgcccaatttctacagttttaaacttaccaaggccacctgcttcaacgatttcctgatatgtaacagttggctcttgcaagccatacaagcttgcgccagcacactgctgcagacttgcctcaagtatttgaattcccattatgtgctcaggtatatgctgtgtggcaggagatgctgaaacagtgtttattctgaagagctttgtcatttaattgacaggcaagaagctggagaaacatcgacagaatacagtcgtgtggcatgaattgaatatagtggtccagagtgagaagttgagtgctggaaagatcatgaaaaggggagcatatataagctaggcttgaaggataacgataatagctaacacgtggtcatagcagttccagcctctgtactaagcatcatgcatacattatttatattaatcttcagaaatagatactatcccccagtttacacctgaggaacctgaagtttagtgagattaagtatttgcccaagttatatagatatgacatcaatttagtgttgtagtatgtcattattgtggctaggaaggaataaggccagtatttggagcctggtcacttcactgcagaacccacactcttgcccactgcatcagattgcaacaatataaaaaggggggcttttcaaagagaggaaaaaagtctaacaacagtccaaggtttgagattaggtaggaatcagaatatttgagttctagtcttcatttcacttaaccatatatgtggccttagccaaaccacatcttccctctatgccttggattgagggacttgaattagatggccactcagttcttttttatttctgacattttgtgaattttaagttataaaaatgggaatgagtatgcctttcttaagggacactgagagaatgtgccctgctagggcacattgaggttggcagagggagtaaacagaagaaaacaa

SEQ ID NO: 100631 - DNA, 1011 bp, Homo sapiens
tgttggccaggctggtctcgaactcctgacctcaggtgatccacccacctcagcctcccaaagtgctgggattacaggcatgagccaccatgcccggccctatttttttttaattaaaatgttaaaggttagggcatagagactcagcaaacgtcatatagagaagtggtaaatggcacagctgagcattggaattggctccccagttgttccagacatctggatattgatcttagtaacttactagtttcaagtcattttgcttaattaatggcttgccatttcatgataggagatgactatttcgttgtggggcaatgcccagcaagagaacataattcagtatgaacagtcaaaggtgttgagtgtatttaactcattttaggaatgagctgtactgtattcaaatgggctacttgatggttcattacctccattctgctgctgttcatttcctccctttgcttgcttatatagtaaacctgctcgtaaccaggacttaaaactcttagactgaagccccttcactgctgtctctagcctcagcctcctaatgggtgggagtagttcattcatagcttttgattggtggataagacttgtcaggctgggtgtggtgggtcacacctgtaatcccagcactttgggaggccgaggtgggaggatcgcttgagcccaggaattgagactagcgtgagtaacatagcaagaccctgtctcaaaaaaaaaaaaaaaaagccttgtcacttagagtttgtgcttcatatcaaatgataacaaccacattgtgctacaccacaagtcacacagtgggaaggatttaagagggttaaatagtttttttgtttcttttttttttttttttttttttttttgagatggtcttgctctgctgcccaggctggagtgcagtggtacagtcagctcactgtaacctcgatgtcctgggctcaagcaatcctgcttcagcctcctaagtagctatttttttttttttttaatttttttgta

SEQ ID NO: 100632 - DNA, 2995 bp, Homo sapiens
aaggcaggaggaccacatgagttctggttggtaagtgtccttgtcatgaaaacacttgccttacaaggctctaattatgatttccctagtcagtgctctgaagatgtgtcacattatattataaacaatacggaaggggagataggtgagatgatatgaaaaacaaattttctcactgtcataaaaggctctaattatggttactttccttgtgatgaaaaacttggccttacagggctctagttatggttactttccctagtcaatgctctgaaaatgtgtcacattataaacaatacagaaggagagatagatgagagatcatgaaaaccaaattttatcttttacatggcccctttgtcttcgtttgaaacatccccaacatttcctacaaatcagcgtagttacaaaggggtcagtcttttaaaataagtatttcctattaaactatatatatatacagtgcctttttggtgttgtgagtcagtggaacactgaaatacagcggttgtgtaatttaagagtggcaacagtttcatttgataagatttgaaaaggctttttatcactacaatcttagaggattgacagtacaggatttttgtttaagagaaggattgtttagactcaagaggtgactatgttgtgggtcttttgataattcatgaatacagatttgctttgaccgatcactagatactgcctcctcaatttcaaaagcaatataacgtttgtatatgctgtttaatttaagttaatgttaagtaatcatttctcattccaaagacaatgcaaaaaacttcagcactgcttgagagttgtatttcagccacagatattttctccattggaaagctattttcattttagaaaaatgggttgtttgaagatgaaagtcttttatcttttttcacaatttattttggttatatgttcgtacattcttattaaatatttcatacactttattgcaactactttgttatttctacatcttagataaatgctgaaaaggaaaacgatttcattgttcatctaattaaataaattaaaagagcggtttgtgtagaaattggagagaactatgttttatatgaatcacaacagtgctcgttgtggactgtaattaaatgctttgccctctggaacttgatttttgtgtatctgagatttattaacagtgctaactgctaaggatactgtttatcttgttctgggcattggagtttcagtttttaaaaaattcttgaaaatgtattctgtgaaactactcatacctctcttcctgcgaattttctcctaagaactaggtttggggtagaaatgaattgacattattttctcatttgctttgtatggtatgaaggatttgtaaagctttgctcaaagttgtgtgcatttgtaaacactatcatgatattttcaattttatgtgtaaattttattgtctgtttttggtgactctgacattaatggaagagaatattttccattagatttaattttttttcctctcccttctgattttttttttattggtgttcatttttcttttgatttaaaggattagagaaatctacaaatgtatgtcataaataagcaaatttgtaaacttttctgaactttagtgaaacatttagttcacaagcataatttggaggtgtgttctgtgtttacacagtagtttggatgtacaattattattagtggctttttaaaaaatgaaacagtgttaagtgaaatgtagttcctagctttgtactccaagttgtcaaagcatcaacaatgaaaattcgattaggaaactttatttaaaatttcaggtagtaatattcagtgtagttaaggccagtcttaacccactggatgaaaatctaggactgtatggaagtaagcaaacattacatttttaggtggaaatagtcagccttgcataaaaacaaggatgcgtgaaagccttaaattccagctcccttttactggagtctgtggttgtgtacaggtatgggccaagtgtaaaatctcatcaattttaagaacactcgggaaatgagtaaagaaaatgtaaaattgctgctagtcaaatcttttggaaagaatttctggaagtggtcactttaaaaattattttccacccttgcaaaattgccacatttaaattgttttactggcagttctatagtagtccagactttagaaaccaaacacaacaaaatggcttgttgccaatatggccacaacattgccagcaaatactgccttggcatcactcagcagaggtttttgtttataaagatgaagtcttgaatactgttcaataaacttgtcaaaaaataaaacaggctgatgcttttaatgctttaactgcacaaaagtactttactgagctataatattatcttgtcagggtttttgttttgttttgtttttaaacctgaaaatattttgtgcctttggagaggtagatttggtaatcttggagaggtaaaaattgttgcttatccttgcctgctaatgctgaagtgtcaagagaagaggatacttggaacagcagggaggaaacttgattcaagtccatagtatccaccttttcagaattttatgtgtatgatgtgttggcaaacaaagcccttaaatgttgaaaactttttatcttgaaagagtttagcttgtattagaatttggatacccagtgtgttttagagggggctagacatataattccaggtagtagctgagccattattaaataatcgggatttgactaagcaatggacaaatcactgagtgaaatcagctgcctacagatatccaaaatggcttttaccatctgaaaggggtggactgtgtgataatatgtctccttttcttgttcaggagagatcagttatgtaattcattgttacctgctttccagtgttttacagcaagaaatagtttatcaactatgtgcatcatcactaatctcccaaaagtagagcttttacagggtatg

SEQ ID NO: 100633 - DNA, 2801 bp, Homo sapiens
ccaggtcaaaatcgcccagtgggcagaaaagatcaaggtcaagatcaccacatgaggctggtttttgtgtttacttgaaagggctaccatttgaagcagaaaacaaacatgtcattgatttttttaaaaagctggatattgtggaagatagtatttatatagcttatggacccaatgggaaagcaactggcgaaggctttgtagagttcagaaatgaggctgactataaggctgctctgtgtcgtcataaacagtacatgggcaatcgctttattcaagttcatccaattactaagaaaggtatgctagaaaagatagatatgattcgaaaaagactgcagaacttcagctatgaccagagggaaatgatactaaatccagagggggatgtcaactctgccaaagtctgtgcccacataacaaatattccattcagcattacaaagatggatgttcttcagttcctagaaggaatcccagtggatgaaaatgctgtacatgttcttgttgataacaatgggcaaggtctaggacaggcattggttcagtttaaaaatgaagatgatgcacgtaagtctgaacgcttacaccgtaaaaaacttaatgggagagaagcttttgttcatgtagttaccctagaagatatgagagagattgagaaaaatccccctgcccaaggaaaaaagggattaaagatgcctgtgccaggtaatcctgcagttccaggaatgcccaatgcgggactgcccggtgtgggactgcccagtgcaggacttcccggtgcaggcctgcccagcacaggactgcctggttcagcaataaccagtgcaggactgcctggtgcgggaatgcccagtgcaggaatacctagtgcaggaggtgaagagcatgccttcctgactgtaggatcaaaggaagccaataatgggcctccatttaactttcctggtaattttggtggatcaaatgcctttgggccaccaatccctcctccaggattaggaggcggggcctttggtgatgctaggcctggtatgccttcagttggaaacagtggtttgcctggtctaggactggatgttccgggttttggaggtggaccaaacaatttaagtgggccatcgggatttggagggggccctcagaattttggaaatggccctggtagcttaggcggtcccccggggtttggaagtggccctcctggtcttggaagtgcccctgggcatttgggtgggccaccagcttttgggcctggccccggccccggccccggccctggcccaatccatattggtggtccccctggctttgcatctagttctggaaaaccaggaccgacagtaattaaagtgcaaaacatgccctttactgtgtctattgatgagattttagatttcttttatggctatcaagtaatcccaggctcagtgtgtttaaaatacaatgaaaaaggtatgcccacaggtgaagccatggtggcctttgagtctcgggatgaagccacagctgctgtcattgacttaaatgacaggcctataggttcaagaaaagtaaaacttgtattagggtagccattcacatcattttttatagggtagatcttcatattgctgtgattaatgcatccagattgttttcctagtatttccaggttagaacctgtggattgtttcaattgcatatagcttggtttccataacatagagcattggttgactgtttacagaagactcactcaccaggataaacattgctgtatgttacagtaaagctatctggagagaacacataaatgattttggcataccattagagaaaccatttgtaaaactcaaatgaccacataaagcttatcaaggagtctagattggttttgttttataccatatgggatgaagaaaatagaaatgtcagtagaactcattgagggtgctcttgccagctgctgaaaatagaagttggctactctcagaatttggtttaaagctggacagatttgctttgttatagggtaaagctttgtctaaagtcctcattttcttttaaaattgaataaaatttctgtatacagattcattgtatgtacctttattgcttcttaagggtccttgctgtatagacagtcctgcttcagaagttgctgctttgtttgtctaattgactcatttgtaaatgagcagaactgttttgttggtttttttccctaaatataaaagtccacacttcgtttgtgctataacctcaaactttgatttctaatgtcacacttaaaactgtgtggaataagacttttgccataaaaataaactatggagtcctttatctaccagagcctttttggtttgaccgccacgatttaggttagtcagtttaaaaattgttcatgttgtttggatggtatcgaaaaccagaaaccacttttaataatgtgtttaagatacttgatttgaagtccttttcatatggactaattgtagtatcaatttcctcctgtcccgattatgtgaaattttggcctttaaacaaagaggggcccattcataagaaagtgttatatctaggtttttaaaactgaagttgaaattatctttgttagcagtagtagtatagaataaaagatccgtatgctggttcgtagattgatacgtgttagtcctgttatttggaggctttttggcatagttgttcgatcaggagcctgtttactaaaagtcttcatacagagtacaagtgcagccgccagaggagaaaattgagattcttgaccctttcatactcttttctttggtattcaggac

SEQ ID NO: 100634 - DNA, 1132 bp, Homo sapiens
acaaggcagattgaaaagttttaggatgaataaaataatggaaccagttctcatttaagacttgaatctacttttagtcttaagtattatttacaattcattagtattctagttttttgcttctgttggatggattttgagactgagctctataaaatcacactcttgataattctatgaaattatcaagtatatagggaagatgctaagccagttttaaatactaacttctatatattctttgcatgttttttccctatagattgttaaactttgtttcctgatttgacttagacatttcttttaaatcttactgaatgattagtggtctgaatgatgtatatgtattttactgtcctacagttgttttttcttgaactttttgagtcttgggactgaactgtttccaaaattaatgccttctggaagttgaaattgtctacgttttacattgtaaatggcacgtaatgttcagtttttagaatatctaaattaaagacattgcctgtgatagcttgagggaatatttgagggcctaatatggtagctggtcattcttgtagctaaaaacttggtgtgataaacaggagtctgacctggccgttgccttttctcatctgcaggtgtgtgtggtttcagcgcagcatggctgtggtcatccgtttgcaaggtctcccaattgtggcggggaccatggacattcgccacttcttctctggattgaccattcctgatgggggcgtgcatattgtagggggtgaactgggtgaggctttcatcgtttttgccactgatgaagatgcaaggcttggtatgatgcgcacaggtggtacaattaaagggtcaaaagtaacactattgttgagtagtaagacggaaatgcagaatatgattgaactgagtcgtaggcgttttgaaactgccaacttagatataccaccagcaaatgccagtagatcaggaccaccacctagctcaggaatgagtagcagggtaaacttgcccacaacagtatccaactttaataatccatcacccagtgtagttactgccaccacttctgttcatgaaagcaacaaaaacatacagacattttccacagccagcgtaggaacagctcctccaaatatgg

SEQ ID NO: 100635 - DNA, 3653 bp, Homo sapiens
ctgtacataaatattacagtacttcatgctcttgctcattgctttacttgaagcaggtttttttctgtttcacattttcctttgtgacctgttaaactactagatatggctttcaaatgaagaatttttaaactccttagacttagttaggctaggccaggcgtggtggctcacacctgtaatctcagcactttgggaggctgaggcgggtggatcacttgaggtgaggagttaagagaccagcctgggtaacataatgaaacccctgtctctactaaaaatacaaaaataagctgcgggtggtggcgcaagcctgtagtcagtcccagctactccagaggctgaggcatgagaatagcttgaacccagggaggcggaggttgcaatgagcctaatgagcctagatcgcgccactgcactctagcctgggcgacagagcgataccctgtctcaaaaaaagaaaaaaaaaagaggctagatttctacaacatgtaaaagattaatacaatgctctagacttttgattgtgttgattacatatttgcatagctttttgtggtaaaaccatctcactattctttagcaacttgagtagttgactagacgatgaatagtttgtcctttagaaaatcacacagatttttgaaatatgttttactttttggcgatgaatattaaggtcattagttgtattttggtcttggaagatactaatttaagatgagcatcatttggaaaagtagtcgtaggtaatcttaatactgaacagtggcaaatttcttctctctccgaattaaaacatgacctttgaaaaaaaataaaaagcaaaaaatgacctttgaatatagttgtctagacatttggtcatatatgcttgtgacttgttaataacctcaccagtttggaagaaatgacagtgaaagatgagtgacctgtttttattttgggatatactcttaatatgtcaggcatttttagggtgtttttaaattttattttattttatttatttaaattttacaagtttttgagaactgttgtgatgtcagaggaaaaaacactttcccttaatattttgttaatattttgagctccagtggaattagtccttatagcaagaactcatacttcatttgttttgtgatgttggatgctattttgtgcaaaataaaatatattgaaagaataattgcagtaatttccatgagtacccttgaattgctatcttaagttgtccaagaattgttattgtgcgaacttgtgccttttcatcacaaatttggtgagaacctggggaaatagacttgtgttacggagttttctggactggtttaattataaagtgatcaaagcaattagctgtgaagctgagctttatgactgttttaattttcagtggattcgttattgggctaagttaatgacactcttgtaaatatataattattttgagatactcaaatttgaaagcaataccaactaaaaagcatgtgtgggattttgttacggtgtctttctttttttttttttttttgatatgcattctaatgaagtactctggtggtttcagactcgccttcgtaatgtacagtgtggcctgtgcgtgttgttttgtgtttcctgcattgatttttgcctccgtttattctctattgcagtctaaaagttggttttaattggttgcccacaggattgacttggcctctacttcttgttaaggaaattcatctcttgttttatcaggtaagagattttgaatagagagttcgtttttatacaaaataaaatgagatagcttattaagaaatatgaaaatatatgtagcaactatattgtgtgtgtgtgtgtgtgtgtgtgtgtgtgtgtgtgtttttgtttgcttgttttttgttttgagacggagtcttgctcagttgcccaggctagactctgttgcccaggctggagtgcagtggtgccatctcggctcactgcaacctccgcctcccgggttcaagcacttctctgcctcagcctcccgaatagctgggattacaggcgcctgccaccatacccggctaatttttttgtatttttagtagagatggggttttatcctcttggccaggctggtcttgaactcctgaccttgtgatccacctgccttagcctcccaaagtgctgggattacaggcatgagccgccacccaggccggtgtggttttttacaagtttatctgagggataggggtggggtagatgggtgctttgaacagttgttcctttgggggtcaatttcatttatatggatctatttatcttgtgattttcctgataggcagtaagttttattccttagtagcattttagactaattacaaatacagatgcttgttattgatatgtttatttatatttcctaagagtttaagtatagataatgggtcacatgttttagagtacaaattttagactttaaatggaaccttagcaagtggaatctaaccctcttgtttaagtaactaagataggcccaagttaggttgaaatgacttagctgtcaaacagttacttagtaacagaaaagcagatacttttttaaatttttttttaaatttttatttgttttatttatttatttctttttgagacagagtttcgctcttgttgcccaggctggagtgcagtggcgtgatctctgcctcccgggttcaagtgattcttctgcctcagcctccctagtagctgggattacaggcacctgccaccatgcccagctaattttttgtgtttttagtagagacggggtttcaccttgttggccaggctggtcttgaactcctgacctcgggtgatccacccacctcatcctcccaaagtgctggggttacaggtgtgagccaccgcacctggctgcggatattatttcatattttttggaagctagaaacaatttttctcatcagatggctttatgaataaatcttgtattccactttggtttaatattcagccctttccagctggtaatctgaggcagattttcaatagcatattctcatgtgtaccttgtacaaactttcagtaaatccctgctcttaacagaaaatggcttgaagacttaactgtgtatgtcactttagccctgtgtttaatttttgtgttcttgggactatatcaagtttctgtttgattgtcccagtgcaaactagtctctctctctctctcaagttgttttgagtacctggattgcccatgatgtttcccctatacaaagtgattaaccgttttttgaagttgaacaggaaatgctatcacattttgcatacagccacatattctagattgagcaaggaatgtgaatttgatttaatgacttggaaactgcttgatgaacctccttataggctgctaaatagtaaatgagaaaagagactgttggtgtgatgttttttagcgttaatttttcttgttgactcttgaagtttgtaaatgaaaagcttccccacacttcccaaatttctagtgctttataatggcctcacaaaaagcattttctgtttgctagtccatttttctggattaaatttgaaggtggctttttatttttgtgtatgtgtctgtgagaaaactgtcaaagccaagcagtttgtttcttgtttgtatacggcagt

SEQ ID NO: 100636 - DNA, 2726 bp, Homo sapiens
gctaaacatttactcatctgcgtggtgtcatgctgagaattgcagactttaagagatttctgggccctaaaaccctccttggctccaggattctcagagataacctaatataaattgaagaagttggtagggaccgttttatattattcaataatagagtcagtataacccactggaaaaaagtgtgatggcaactgaaggtttgttgaagggagaggctaggcttgtgactgcagtattttagagcttcttgcttgaatggtttgaaatggtgtaatttttgcaaaatgcagtcttagcaacaagaattgtctgggaccttgttaactagtgtatattgttaatgcatctcagagcatttgcagtcgagaaaaatccctcaagtctggacacatagggaaatcttgttttttaaattatagaactacaatacaagactggttgtacttgtttttgaaatttggcagttttgataagaatggaggatttctggatttagtggaaagtgtgcagacattttcaaagagtataaaaagttgggaagaactgttacaggtggttcaaataacgttatggtaatttatgaagaaagtgaaatgtttggcgtgtttatacaaaacaatgaagatgtgcttagtatatattattggacagatttttaatgaaacagggaatacatttttatatatgctcgattaaatgtgattactttgcttatggattgtaatgtataattttcattttctttatgttcaaatctgttagatgaaaaatgtgaagctttagaaataattgtgtggttacttgcaacgtattgttacatgctaataccagtactctttgggcttctttcaccttctttgacacgtcaaatgttttgatgattgagtattgagagtttgggagttgttagtacagtctttaggtgtgaaacttgatgttgtgggccagtgtgttccaggtgctggaatccagtgacagtgttgatagtttttactccattttgcagagagccattctgtcattgtatgaatgtatgttttcttctgtagatgttgtaggaagaaccaagtgtcagtagttggttgcacaaaagatgcttttagatgtccctccctaaaatgcagagactgatgatgtccacttttatatcttttgtctggcccacaagtgcttaatagtaaatgttcatggagtaaaggaatattgttaaatgttttcaactaaacagaaaagataattttatctaaactacagttttatcagattttactaccacacccatataccttttggtttgcacaaaatttaattaagtttaaagccagcttttaagactcaaaaacagagtgaatgtggttgtttaggttagaagtataattttgctctgaagtgaaaatgaaggtagcaacatttttgttggcatttggggggattgaaacataacttaatatttttgacaggaggaatatcttatttagaaatgtcttctgatttgctgcctttgagtacggaatggaggttaatggaaaaattgagtaatgcgttataaaaagtacacatctccatcagtgtcagaataattttttcattaagagtgatcccagactttgatatatggtccatttgggaatggggaacaaaatcaagtggctgaaactgtggttgtttcataatgtttattataatgtgattatactgtttttagcattgtgcccgttgtgattggttctctgttgctaatctctgaggtgaacatttgagagtttgtttcttttggatctgaagaacctagctctgctgtaccctggttcttgttgattaaagagtgataactgaacaaagttaaagttcacttttggatgtttactaccagatgaagagtgaaaatagtcgttttagtttgtgccttgacttcttgatgaagagatttgttgtcagacatttttttctgaaattccaagtgattagaatggctagtaaatacgaaagtctgtcttgccataatatgttaaatttttgtagcagatacttgtgatttgtgcatgcatccggtattttgtcaagttgaagcaagcctttatgttaggactaattcctgataatatgaatggaaaacatactaaagccagcttcttgttttagatcttctgaagtatatcagtggctttaatgacaaatcaggcccattttctcctttcctatcattatgctgtatgtatagatagaatatgtattttagatgttttattgtttagttattattttagtcttatccttctaaagttcagcaaagctttaggtaaatggcgtggatttttgaaatcctgcattcagtcgctagctgacatttagaatacaggaatagtagtttcctggaaaacagtgacacttatgttaaattcttgtggtttttacaaagtgaggtgtcaacacagaagtatttcagttctatttccatttacctttcccttttgaagaggtataataccaagggttgtgaagttctgacttgtagcatcaactttctgcatggttttccttggtatggggtggggtgggtattcctctttgctgaaatagaagagaatcataaatttctatctggattgattttgtgctttaagttgtacacataaaacttgaactaggcatttgtcaaattcagctgggcctttcagccttgccttgtggaatgagaaatatcttccttttaaaggtaattt

SEQ ID NO: 100637 - DNA, 2726 bp, Homo sapiens; identical to SEQ ID NO: 100636

SEQ ID NO: 100638 - DNA, 2726 bp, Homo sapiens; identical to SEQ ID NO: 100636

SEQ ID NO: 100639 - DNA, 2726 bp, Homo sapiens; identical to SEQ ID NO: 100636

SEQ ID NO: 100640 - DNA, 1036 bp, Homo sapiens
ggggctgtgcggggctcgtggtgccccttggtggcccggggcggggccttcggaggccttcgagcccgcggcaactagcgccccacacaaagggtcgaggcagggctgcagggggagtgggatgccacttaggcctctgagatctgagaggatgcaaggaggacgcaagaggatgagcctgcgtaccgaagtggggacgaggccatagcgaggactcccccgtggtctgagagggggcaggccagagctggctggctcagcggcctgcgagctaacggggactgcagtaaaaacacgcctacatcccgagtacggaggatttcttgtctcccccagtgaagcagaggttataactacatctctgtgcctggaggtggggagataatcgtagtgaggacactccttcaacccgaaatggaaaggaggcctttgtggcctaccagcaaaaggggacccaggtcacacctgtggggaggaagctgtagtcggtacactcctgtgagttcagaaaggaagtgtcacaaccggccgccttcgtggcctgaaggtggaggggtttgcagtgaaatgcctccgaggtccattgctggggaggggctttactcgagggtgtagcagttttgagaagccggcgtctgaagctaggaggtgagggggtggggtgagtacgcctcctgaggctctgagaattgtagtaagatgccaggcctttggtcccccagtagggaaggggctgctgtgagcagcacatttacggctccctcgggagaggatcctgtggcatttcaggaggacgagatccagtgggctgcggagggtgggtgcttttgatggagagttaattgagtttctctgaagcttggctgcattagtttgcagccacgtgaattgggtggtgggagggactttgaggatctacaggttagtgacggggttggacgccagtgcagcaggcttagctgctaggttgtaaacgtacgggctttttgtgtgcctccaacgtgtgctttatagtgacaaatctgaggggctcttg

SEQ ID NO: 100641 - DNA, 1036 bp, Homo sapiens; identical to SEQ ID NO: 100640

SEQ ID NO: 100642 - DNA, 1036 bp, Homo sapiens; identical to SEQ ID NO: 100640

SEQ ID NO: 100643 - DNA, 1036 bp, Homo sapiens; identical to SEQ ID NO: 100640

SEQ ID NO: 100644 - DNA, 1025 bp, Homo sapiens
aagaaaactcttccttgtcctggtgctgctggcaccttgttctgagggagacattatgggcttcaaaacccatggccttttagtagttatcagctcatttatttctggataagtaaatgaaccctgtgtccagttatcaagcgccttttgcataccaggcactatgctcagtactggagatacagtggtccccatgagtacataggatgataggtggggctgatacatagtcacttccagttataggagaagggcttctcaaactgtctttctgagctggttaatggttactgcctaatccttccttgcctgctccttagtatgaccacaagcgaatctcaaagttgtcagagcggctgatacagaatataatgaagagccttccagatgtggtgatgaatggggaccctaagcaccattatcccggtatggacttgctctttctatcctcattctggtagaggctgagactctgagacctctctcacagtatttctttcctccaggctgtatcaacctctcctttgcatatgtggaaggggaaagtctgctgatggcactgaaggacgttgccttatcctcagggaggtgagctggacggcatagacagggcctgcggcagggccacttagaagagtcatacaggctattaaacttcccagtgtggagatgataggcacaagacctcttgattaagggtaaaggtcattttgtaagtgcctctctttttttggttggctgggtagctgggtacagactgaagtttaccaccctaggaagacttcctggggtagaattttgtgccttttatcgtcccaggggatgtatgtgtctgttgtgggttacactagcagttctgttacaggcctctagaattgaagatgctccaaaggccactaagtgtttggctgcccttcaggctggtgcagatggtgcattacgtcctggggaagtgagcacatggtcctctgctgcgtcttcttgtcaaacccatgtggtatcatgctctgtcacactttgccagc

SEQ ID NO: 100645 - DNA, 1037 bp, Homo sapiens
gaattcattcactgctgcgtgtgccagtagtttgttccttttgattgataagtagtagtccatgttatggatgtacgaaaatcgtctgttgaaggaatctgggtagtttctaggtttttggtattacgaataaagttattgtgaacatttgtgtaagatgttttgtgaatttaattttcatttctctgggataaatgcccaagtgtacagttactgggttctatggtaatttcatgtttagtttgatgagaaacagaaactgtcaaactgttttccaaagtggctgtgatatttacattcccactaacaatgtatgaaccattcagagtctgtgcatcctcaccaacattttgtgttgtcactgtttttagttaactattcagataggtatgtagtataagactccttttcatgactaagtttgcctatattctgatttaggaggactttgtttgtactatctagtcaccttactcctgcatatccctaggaactagaggctgctatccagccagatactagcctggtgtcagtcatgactgtgaacaatgagattggagtgaagcagcctattgcagaaataggtgagtatcatggcttatccctgatccctgcccaccatggggctctgtatgaggtagtatactgagagctgtaatactctatggagtgtagttaggaaatcaagggaaagcctaagtactttgttcaaggacattggaagtgtcataggcagtatttgaatccaggtctattaccattttttttttcattgagacagagtatcactctgtcacctaggctggagtgcagtggtgtgatctcagctccctgcaacctcctcactctgggttcaaatgatcctaccgcctcagcctcttgagtagctgggactacaggtgtgtaccactatgcctggctaatttttgtatttttagtagagatgaggttttgccatgttggccaggctggtcttgaactcctaacctcaggtgatccgtctgccttggcctcccaaagtgctgggattacaggcg

SEQ ID NO: 100646 - DNA, 1044 bp, Homo sapiens
ttacaggcatgcaccaccacgccttgctagtgtttttttgtattttagtagagacggggtttcaccatgttagccaggatggtctctatctcctgacctcgtgatccacccacttcggcctcccaaagtgctgggattacaggcgtgagccaccgtgcccggccacacttggctaattttttatatttttagtagagatggggtttcaccatattggccaggctggtctcgaactcctgacctcgtgatccacctgcctcggcctcccaaagtgctgggattacaggcatgagccgccatgcctggctctaatttttgtatttttagtagagacagagtttcaccatgttggtcaggctggtcttgaccttttgacctcaggtgatccacccatctcggactcccagagtgctgggattacaggcatgagccactgtacctggcctggaggacatgtttcttgcatttgttggtgttttctggtttgtatgggagccactggccacatgtgcaggatgccagggactcacattcaccatggcaaagctctggcctcctccttccctgcactgatgcttctcatcctgctaaagaagtagtgtcattttcttgaatcttatccaccagattttggatatcagcattcctagacaaatcctaacatgctgtttgtagatggacccctcaatccaaactccaaagtgttctcatcattcattatttcctctctttttcatcttatttacattcagtcatcaatcagtaacatttatatctatggccatttccttataatgtctctggaattatacttttccctccctcactcccaccttcccttcttccctccctgcctcccttccttcctttctccctcttttccctccctccctcttttcctccctccctctctctctctctccctctgtctttctttttttggagacagggtcttgctgagttgtccaggctggagtgcagtggtatggtcatagctcactgtggcctcagacttctgggctcatagctcactgcggcctcaga

SEQ ID NO: 100647 - DNA, 2561 bp, Homo sapiens
ctgtatcttttaacttttttttttttttgagacggagttacctaggctggcatgcagggatttgatactggctcactgcaacctcagcctcctaggctcaagcgattctcctgcttcagcctcttgaatagctgggatttcaggcatctgccaccactcgtggctaaattttggattttcagtagagaccggatttctccatcatggccaggctggtctcaaactcctgatctctggtgatctgcccacttcggcctcccaaagtgctgggattacaggcatgagtcaccgcgcccggcctcattgaaaatttatttttcaataccagactgcagtgttctttggggcagagacgttctgtcaatgtgctttttttccaaagtattttttttaattcatagaatatttaaattttttgatacatttgtaaatatatagtttgttagtttcaatagtatttaagagtccttaatactttcttacagagaagaagaagttggatgggataccgagattaaggatgatgtgattgaagaatgtaataaacatggaggagttattcatatttatgttgacaaaaattcagctcaggtattttcatctttttttataaatgatgttaggttgttcgtctctaccttaatcttcgcacattatgtggtgcatgttatggttaaccgtcttccattatagtttttgtgtgtgtgtgcctgaaagtagctttaatatagtggctaaataaaccctccaaaataaaagaaaatcagtaacaatttgatcagggtatgagaggatttctagtaatgctcaaagcttgccatgaaatcttggcatcttgattcattcttaggctgcatacaaatcgtagagaaaagataaaacggcaaatttgagagtagaagtcattttttaataaaattctagtatacctattagccagtggaaccattatggtaaaccagtttgtggttatagagcactaagtttctacaggcaacttgaataaacataacttgggtccattttgcatacagcaacatctttaccttttttttcattttttctgtagggcaatgtgtatgtgaagtgcccatcaattgctgcagctattgctgctgtcaatgcattgcatggcaggtggtttgctggtgagtttgaatttattttttgactgattgttattaaggctctataatgaagatgctaaacccaacatgtctgtttcttttaataggtaaaatgataacagcagcatatgtacctcttccaacttaccacaacctgtttcctgattctatgacagcaacacagctactggttccaagtagacgatgaaggaagatatagtcccttatgtatatagctttttttctttcttgagaattcatcttgagttatcttttatttagataaaaataaagaggcaaggatctactgtcatttgtatgcaatttcctgttaccttgaaaaaataaaaatgttaacaggaatgcagtgtgctcattctccctaaatagtaaatcccactgtatacaaaactgttctcttgttctgccttttaaaatgttcatgtagaaaattaatgaactataggaatagctctaggagaacaaatgtgctttctgtaaaaaggcagaccagggatgtaatgtttttaatgtttcagaagcctaactttttacacagtggttacatttcacatttcactaatgttgatatttggctgatggttgagcagtttctgaaatacacatttagtgtatggaaatacaagacagctaaagggctgtttggttagcatctcatcttgcattctgatcaattggcaagaaagggagatttcaaaattatatttcttgatggtatcttttcaattaatgtatctgtaaaagtttctttgtaaatactatgtgttctggtgtgtcttaaaattccaaacaaaatgatccctgcatttcctgaagatgtttaaacgtgagagtctggtaggcaaagcagtctgagaaagaaataggaaatgcagaaataggttttgtctggttgcatataatctttgctctttttaagctctgtgagctctgaaatatatttttgggttacttcagtgtgtttgacaagacagcttgatatttctatcaaacaaatgactttcatattgcaacaatctttgtaagaaccactcaaataaaagtctcttaaaaaggccacaggagatcttcatttttcaaatgttttaaagttacagaaatttgagaacagaattagcttcttttagtctcaattcagtacttgcctcttgggaaaatgttccgagtctgcggaaacttgccctcacgttgtcccccatgaattcctttattctattagagtctagccctgtgtattttagaagaatgtatcaaaactgaggggtttaccaaaaagaaaaggaaacagcctggccttaaaacctgggcattcttggtctcctgcattgtctgggcatatttatgaagaaattttcaccatttacaatacatacttaacaaaatggcttaacttcaaactggtttccaaaattg

SEQ ID NO: 100648 - DNA, 1065 bp, Homo sapiens
gacattgtctttaaacacttggatgattttatatgtcttaattctttaataatttgtagatttaaaaaacttcgtgggcagaaagcgaagaaataggaaaggatatagatttatttggcatttcaaaggattttgttttattatcccctcttatttgggtataaactcaaatctattttatccttcatctgtttggattgatgtgtattgagattttgtctaattgaactgattttgataacacataaagtttaatttccctgttaaaataggactcccaaatttctgaatgtctgtttcaagtattaggttacctcagttttctggcacctaaaagctactgataacatacattagtagcaatattaaataaggtaaaataactccagtgacatcctagttacatgcttggggtgggtttttggtttcgttttaaagtatttatgagggatactttcatgcattttccatgaaactaatttttctctttctttttttagcttcagctttagctgcagctgcctctgttcagccacttgcaacacaatgtttccaactctctaacatgtttaaccctcaaacgtaagtaatggactttattcttgatatttcctatcaaggcgtcaatagagttgttttatatatttctcttttttttttttttttttttttttaagatggagtttcgctcttgttgtctaggctggagtgcaatggcgcgatcttggcttactgcaacctccgcctcctgggttcaagcgattctcctgcctcagccttccgagtggctgggattacaggcatgcgccaccacacctggctaattttgtagttttagtagagatggggtttcaccatgttggtcaggctggtctcaaactcccgacctgaggtgatccgcccaccttagcctaccaaagtgctgggattacaggcatgagccaccgggcccggcctggtatttccgtatttcatttgaaactgcatagttttgatccttttaaaataatttttcggccaggtgcggaaactatgcctagctagtgattaggatgctaataacta

SEQ ID NO: 100649 - DNA, 1966 bp, Homo sapiens
ttaaaaaaataatatatgcatactgttggaatggtgtatttcccaatggtgatgttcttcctaaattgggaaatcatggaaactgttacagctttttgatgtgcagtatttacaattttataatatccttttaaagtgttaagtactatggccactaaaaatataaatacttgcatttcccaagtacttggaattgaattctcaagatcagggtttttcactcattttctgaccggtgtgcttccctttccccatttcccattattcccagctgtatagtagtgtagtgaaaatcacttgagatgtggaagagtagtctagtctaggaagagagagggaaaagtaagtttcccaggataagagggggaaaaaaggccccaaagccttctcaatgaggaatggggaaggaggttttgctgccaggttttactaagtgcatttgaatgaaccctgctattgtagtcctcttttattaatgctttcctgacatttaccctgttagttgaggctcttcattgttcctgcactgagctgtagaattctcttttgttatagatttgcaaacaagactttcccagcagactgaaggtgagttgaagtgttcatattttttatttttgtctttgaaatagaattaaatgtagtaagacagttttctatatttattgtcatatttttataccagtaatttggaccaaattttgacacagtgacacatagtggtatattcatagtaatctgtctgtatttcagaagacctaacccaaattaatggacttaaaaaaaatcaaaataacaatttttttttttgctttagtttgcttaaaattttcaaccttgtttttgttttatgcctacctgtgtgttctaagtgttgataagttgcatatagaagtcaggaaatgaagtattctcttattaacgagtaggcaagtattttagaacctggaatctggaagttgtcttagtataaagttgtgaatcatgctataaaactcacctttttttgcttaagacatagtactcagtgatttatttaagccagtaccaagcaataagaggtttatacatacttaaattacatgcacatttcagagaaaccattcattaagtaggctatgatttcttgtttttagttatcactaaatctctgttgcttgacatgagcattttgctgttaatgtaagttctatatcttttgtaggagtatgcttaatgtttagggaaatgattatgagaaagatatgtcatgttccatcacagtcaagaattaaattttttcacaaacaagatgcttctaatcagtgctgttttgttaagagatttttaaaagattttcctagatttactgtgttctgcattgatctagcttgaacgtgaatgtttgtatagtacgttttcttaatattttttagtattcatagtatataatcatactaaacttgagaaactggaagaatcaagtcttcctcagttctgtttagactttctagttttttttaaggatacttccatatcttctgtaagctacacagtgagcttcatttttgcacagttataatacactctcgaatctttaacttttttccagcagaatttgacatgttatattaaaattttgttttatttaaaataaaactttatgaaagaaaaaacttatatgttacagagaagctaaagcacctgtaatgctaccagaaagttatcatttatgatatatttcatgcacagccctaatttctcggtgtaatatttctgatactttaagtgatcgtttattttaattaccataatttctaatgcactgttttatccttagctttgtttgttattatgttttggaatgaaatttggtcagataatatgattacggtgagttctgtaacagctactggtaatatttttgtaaatcacgtgaaagcattggagcaactgtcttggaaaatgctctttaaacttcaaaccc

SEQ ID NO: 100650 - DNA, 1050 bp, Homo sapiens
ggctgaggcaggagaatcacttgaacttgggagggggaggttgcagtgagccgagattgcgccattgcactccagcctgtgcaacaagagcctgtgcaacaagagcgatactccatctcaaaaaaaaaagagagtttcacaattgttgcccaggttggtctcgatctctgggatttaagtgaaccacctcccttggcctcccagagtgctagctaagttacaggcgtcaaccaccacactcggccctccttgcaatttattttagtgaagtgatcatgatattaatgacccaggaaacttcgtttctctgctctcaacatagtaggaactttaagactattcttttacaggtacaggtttgcagattccgccagcagcacagcaagctctacagatgagtggctctttggcatttggtgctgtggcaggtaggaattgaatcttttctaattttaaatcgttttttcatctaattcgaaaattttccaaatttttacatttaaaaggacttactgagaattcaattcatcaagtacttatagcctgttagtttgtagtcttctatttaaggaagtggagacatagggtagaattaaccatgcatcaaaatgagttgtcaggacagttttaaaccctgcaccccagtttttagtcgaaattcattgacataagtttattttcaaatatatcagttttattgaatactacaaggtgtatattgtttgatcgaaaaaatatttataatattagaatttagaaaatatcagaggcacttaaaaaagctttacttaaaactattgtagtagtaagagtgttgagacagttatttttctttatagtacataaaaatttaagatcatgaattgggaggtggagcttttggaggcaacaggaaaagaagggtgaattgacgtttttacaattatgtataaagggatttagttcataaaacactcattcccctgtgccccccaaccccccgcccccttttttttttttttttttttttttggataacagtagacttgctctgttgcccaggctggagtg

SEQ ID NO: 100651 - DNA, 1105 bp, Homo sapiens
ttttatatatgaggattatattgactattttgtccctgggcacatttttgttagaaaagtactaaattctacctcaggtggtctgcctgcctcggcctctccaagtgttgagattacaggtgtgagccactgcacccagccagttttcacattttctaaccacaatccccatgttctcaaatataaagctgtcattacttgtaatatcttttatttaaactaccacatcaacaagcctaatttgcgttagctagcgtcgtcatcatgtatgttgtgtttgctacttacagcttgcagtttctaccttagtattcagaagtaattattgaatatgctaaaaatataaatatatttttaagtatagtttgtattttaaaaattaaagcactgtctcctgtccttgcctcccctatcatgtagttttctgactcagaatgtgccaaaaaggctttggaacaacttaatggatttgaactagcaggaagaccaatgaaagttggtcatgttactgaacgtactgatgcttcgagtgctagttcatttttggacagtgatgaactggaaaggactggaattgatttgggaacaactggtcgtcttcagttaatggcaagacttgcagagggtaagtgtttcttgctattacgaatgatttactgtgggtattgtagtggaaaagaaaggtagccatgtaaactaagaaagggaaaaagattttatcttattttgtagttggcgttatccttggtcacactgcatattattttatagatgatgtgccttgtattaatgtatggaaatctatattatgtgttttgaatgccacagtataagttgcaagatttcttttcctttatgtagtgtttatatgtcatacttaggaataaatttagttgcagctattataatgttacaagtttttctttttgtaatttcttattttttgatgcagggtctggctctgttgcccaatttggagtgcagttgtgcgatcctggctcaccgcaacctctgcctctttggctgaagccatcctcccaccctaatctctaaatagctgggactaacagttgcaaacaaccaccaccacgcctggctaatttct

SEQ ID NO: 100652 - DNA, 1057 bp, Homo sapiens
tttttttgtttttgttttgttttttgagaccaagtctcgctctgttgtccaggctggagtacagtggcgtgctctggggtcattgcaacctctgcctcccgggttcaagcaattcttctgcttcagcattccaagtagctgggcgtacaggcatgcgccaccaagcccagacaatttttgtatttttggtggagacctgatttcgtcatgttggccaggctggtcccaaactcctgacctcaggtgatccgcctccctcaacctcccaaaatgctgggattacaggcgccgaccaccacgcccagcctaatttttttcattttacatataaaattatagtttctagacttaaaaaagacttcttggtgatgaggttttgtgataagtcttctattttggaggatgaggagactggtagatttttaaaaccatgtctcagggaagaaagtagttttgtactctgcttttaagttatagtaattatgcttttcaattatagattgaaagtatccagctgatgatggacagtgaaactggtcgatccaagggatatggatttattacagtaagtaattaccataattatattacttagggtttttttttttttaaactacatttgctgtgttgctcagattagtctctagctcctggccttaaatgatgtcccaccttagccttccaaactgctgggattacaggactgagcctctgtgtccgatcaaaaaagtttttttcacaacaaagggtaatatgcccttgtaacaaaaggcaggcacagctcacacatgaatgtgaaaaccaaatcatcacacttaggtactcctaaaattttttgatccaagttgcatagtagaagtacaataatagttaataatggtggggaaggtggcatgtttaatattttcaagtgctttaaattagtttttgtggccgggcgcggtggcttatgcctgtaatcccagcactttgggaggccgaggcgggtggatcacctgagattaggagtttgagaccagcctggccaacatggcgaaaccccgtctctagtaaaaat

SEQ ID NO: 100653 - DNA, 1039 bp, Homo sapiens
cctcagcctcctgagtagctgggactacaggtgcccaccaccgcacccggctaattttttctatatttggtagagatggtgtttcactgtgttagccagtatggtcttgatctcttgatgtcgtgatctggctgctttagcctactaaagtgctgggattacaggtgtgagccatcgtgcccagccaaaaactgtactcttgaagctgtaactccctaatttcctgcaggcccttggtaaaatgttatctacctcctctttctgaattttgcatattctagatgcctcctattaagttgatatgtagtatctgacttacgtagggtagtatttttatcactctaaactttaacattagttgttatgcaaatggaaggtgtatgtctttaaactgctgtgtgttatctctgtgtgacgtgtattttgtcttctaggcagaaaaaaacagagctgcagcaatggcaaacaatttacaaaagggaagtgctggacctatgaggctttatgtgggctcattacacttcaacataactgaagatatgcttcgtgggatctttgagccttttggaagagtaagtccaggttcttcaatgaatcttcagtaggttgttgatctgagtataactacataatttctgtatgtcttgctttgttatctttctgtgagttaatattaagaggataagggctggttttataaaaatttctgtgacaacatagattaaaataggtcacttgatagattcttaaaagaatgttactgttattcataatgccatgtgaaatgcataatgggtattagagttaataaaaagtccacattggctgggcatggtggctcatgcctgtaatcccagctacttggggtgctgaggcaggaggatgacattagcccaggatttcaaggttgcagtgagccatgattatgccacttcactccaccttgggtaacagtgtgatcctgtgtcaaaagaaggaaaattgttaaatcatacgaagactattattttttagtaggattttttttaaaagattgttt

SEQ ID NO: 100654 - DNA, 1481 bp, Homo sapiens
cagcttactctgtttactgaacatgtttgagaattattttaggccaggcgtagtggctcacacctgttatcccaccactttgggaggccaaggcaggcggatcatctgaggtcaggagttcgagaccagcctagttaacatggtgaaatgccgtagctatgggggagtttagggcaaaaggattgcttgagatcagtagttcaagaccaacttgtgcagcatagcaagacctggtttctaaagatggaaatattgttgtggagttgggaaaggagtgagggtacagtatatactgctcaggtgacaggtacactaaaatctcagaattcaccattaaagaactcatctatgtaaccaaaacccacctgtacctgaaaacctgttgaactatatgaagaaataaaaaagataaaaattattttaaaatctgttatgaaattaattttatatgttttactcctattagagaacctattgataatttaactcctgaggaaagagatgcaaggacagtcttctgtatgcagctggcggcaagaattcgaccaagggatttggaagagtttttctctacagtaggaaaggtaatcttaacctgtttagggaggtcaagtaggtagaaattgcaagagaaaacatgtaaacatcaaatacttcatttgatttagtagcagtatttgtttgtggtaatgtttccattttgcctcttgtagtattggagttgataaatgttactacaaatttgttcaaagataaagataggatataggaattgtcctacagatttacttttttaattaaatttttaaaaataccttcatccttcaacagtgtctcttgaaataattctacatgtgttacaatggatgtttgcacaaacaactgtgttttctttctaggttcgagatgtgaggatgatttctgacagaaattcaagacgttccaaaggaattgcttatgtggagttcgtcgatgttagctcagtgcctctagcaataggattaactggccaacgagttttaggcgtgccaatcatagtacaggcatcacaggtaatttttttgttggttaagagtttgattattggtggtgttgaaagcctcctgttgcatggtatagtgctgttgtgttctgtgactgctgctcattacgttgagtcggatgttttcaggactttttttttttttttaactttgcgtttattaacattgatacagttttctcaagactgtcgtcctgtcgtttctccttgtgtttgaaatgtaatgattttgccttttttttgttttgtttttgagatggagtctctctcaccaggctggagtgcaatggcatgatcgctgctcactgcaacctccacctcctgggttcaagcgattctcctgcctcagcctcctgagtagctgggattacaggagcctgccaccacgttcggctactttttgtgtttttagtagagatggggtttcatcatgttggcc

SEQ ID NO: 100655 - DNA, 1322 bp, Homo sapiens
aacaactgaagtatgtagtgtgttaagtggtgtcatgctgtcttaagagttactggtgaatggggaaatacctaagttgcatgactaaagaattcactttagtttttaaaagaagtctttcaaaaagaagatgtatatgaaaattgtatatgtacatgtacacacatagattcccaagagaggatctgcaaagatacacaccaaattgttaaccatagttactgctggtgtgagggaagttcagagggatttattttttatatatgtgtgtgtgtgtttttttttttttaattctcaagactgtatatatatatgtagcttacaaagatatctaaagtctgaaaatgggtgtgtgcattttcagaatctaaaaattttgaggctgtaacctttggtcttggcacctctcagtggtccaggatggataaatacaagggcagcttgcctgggaataaagttaagagacaagtatttttgtttcctcttcataactgaggtggaaaagcagtagcctaaacaatgttagtcttgctggagagcgcatgaatgcgatcttagcaagaccctaaacctgtaactagtgtaattttgtgtttcctttttagctccggaccaaaatttaacagtgccatccgaggaaagattgggttgcctcatagcatcaaattaaggtttttaaacatacttctgaattgtttaaattgtttttcaaggaactaacatgctgtacttgtttggataacttctgaaactttttaactttgcagcagacgacgttcccgaagcaaaagtccattcagaaaagacaagagccctgtgaggtagtttacttctttaaagcctttagctcttaaaaagcttttgcagcttatggtactgttaaatttgatgatatttagtaatttggaccatattaaatcttgcttttgctttcttttgcacttccagtactttaaggtcaagtgaatttctactgagttttcagtagttttcactttaatttcatataattaaagcaacagttatatatttatttatttatttatttatttattttgagacggagtctcactcagtcacccaggatggagtgcagtagtgcagtcttggcttactgcaacctccgcctcctgggttcaagcagttcttctacctcagccctccaagtagctgggattacaggcatgcaccaccatgcctcgctatttttttattttagtagcgatgggatttcaccatgttggctagcctagtgttgagctccggacctcagatggtccacccaccttggcctctcaaagtggtaggattgcaggtgtgag

SEQ ID NO: 100656 - DNA, 6328 bp, Homo sapiens
accttatgttaatgaaaaacgagagaaaaatagccatttatttgatttctttttggctcttttcctcctaagatccctaaatgcttcatagtaagtatgtcagtctttctcactacaactgtgttaggtaggttgataaaatttcataaaacagatgagaaaatatataatgttattcagggcttgttaagccactattttttttttttgtagttcccctaaaataatgtggtaatggattaaaaatgatataatttgtagaaaatgtgctccttttttctggtataagcttggatgggagtcatttatagttcctcaccaatcacaagaaattgtggggatcaggttgggtttagtcttgatgtgggatctgatgcaaccaaccagaggtatggtttatgtcatctggttttagactttctgccacagtaatggtttcctaatgtttttgttttgcaattctctaatcaaaagaaaacccaggaaggtgtatccatataaattgacataaattatccaatttaggtgtcaggccgagtggctaaagatttcgcttcaagtgccagaaggataagaacgtacacttttgggtacagaccttcgttactgtaccattgtctcatgtcgctttttgccactaaggtcatctccggtgtctacttgtttttatcctgtgtataagctgattaaggctacaagcttttacaaggaagctgagcatcaagttctccatgtgtgatattcggtggcctttgtctaatgtagagaaccacaggactaaataggagaatggacaattttctttaaccatgagattgtctaagggaagatcctttcaaaacactttggtaatcttaaaatactttccagtcagacttctcgtcaattataggtgataaataaatgattcccttgttcaatcaggactcttgattttctgaaggaactttatgtttcaaattaattttaaagttacctggaagaaaatttttgtatttaggaatagatataaaacatacagaacactctgctttaaacctttagtactaaattaaatttcttaaccaaaggaaagtgccgtgttgcatttttcattctaaaacttcattgtcttaaaagccacattgagctatagtttgttaggtagtagaaaaatggcatgttctgagaaacagttgactgagtataaatttttttaattgtataattctgattcttaacatacacttcatagtatcctagaatagtaaaaggaacaaagttattgtgacacagactggttgtcaacctattttctgaagagctgtaaacctgagtttttgcatatgtcaaggtatgcatcctaagtgcttgagcttgccctcatgggaatattatttgttaaagtaaccagttttgcaaagtctaaatcagcgtccattccgttaagctctttagagaattactcaataaaagataacattaaaatgacacagttgaaatatattggctactgtggtgtggattatctataaattttggaataaatgacttttctattttttttcttattttccagaatactttgcattaaaaatttagatcttcttacatggaagaggtcaaatccagttatagcaaaacacctttactgcagaggccatataaccaaaaagtccaaaggcccagcccagtggaccatttacttcagtgatgttcagtacaaaatttcactgccattaaagactttggaaagtcccttttaagttgtaacaggatttgactattagtgtggatttcgataacccttctttagttaatgtaataaatgctctttgaagctggaaatatactggtttcttgcacccttgtagttttctctgggcttttatgcaaaagattgtattttctgaatgtcttagtatgttgctgtctttttacctgcctggggttgccttcagatgtgggtgaggacttgtttacaaaaagtcctagaagaccttaagttaaaattagctctccaattttcaagtgttttcttttggcagaataagttttgggtcctatgagaggtaaataggttggttgcctctcttgctatagcccatctagagcagaacaaaaactttgtttttgagggggatggagttactttttaccttgttccctaattgaatatatttaggacttttggttttagaaatctcagagttctatagttggaatagtgtcacagagatagtgttaggtttcttaggcaacaaaattggagtgttacctattgcccatctgggcatggctttgatgagttctatataaataatgagtgtagcctaattttctgtcatgtgctacctagcatatacatttctgacagtcaggtggattatcttgaaattttagacaaactttctgcctccttggaaagctctacatctccttgtgattggagtgtgggtttcaagattccagaaggtgggtgtcttcattttctattttcaatgcactctaaagatgacctgcttacaggttctctgaggcagacctcagttgctcttgtgatatgtaactttgctttgataaggaataaacaattacatatccagataatgatacagaattgtcaaaatgtttaatcattaagccactacaaatagacattttcgtggaataaactgattttgaaatgtctttcaatttatattgaaatatctgaaggcacctctaaaatttgggtgatgacacagaggtatagattataagatttaattatgaatgggtggtatactgtgaagactacggaagtgagcagaaagatatgtttggcttttttggtttttagttagagattttaaaaaggtctgtgaaggtcaagttgatcattggttttgattgcatcccacaggtttctataaactggcttaaaaatggcatactccattttctggtgtattcattgtaactttaggaagtatttgaaatggtcacattaaagtctaggaatgtcaaattgtattttaatgcgttagttctttttctttttctttttttttggagacagtcttgctctgttgctcaggctggagtacagtggcatgatttcggctcactccaacctctgcctcccaggttcaagcgattctcctgcctcagcctccacagtagctggaactacaggcctgtgccaccacgacccactacttcttgcattttttagtagagatgggttttcaccgtgtcgactaggctggtcttgaactcctgacctcaggtgacctgccttcctcagcctcccaaagtgctgagattacaggtgtgagccaccgcacttggagttgggtttttttttttttttttgagatggtgttttgctctttttgcccaggctggagtgcaatggcatggtctcagcttgctgcaacctccacctcccgggttcaagcaattctcttgcttcagcctcccaagtagctgtgattaccggcatgcaccatcaggcctggctaatttttgtatttttggtagagaggggatttcaccgtgttggccgggctggtctcaaactcctgacctcaagtgatctgcctgcctcggcctcccaaagggttgggattacaggcgtgagccactgcactggcctgcattagttcttattgtcctttgtcattacggttttgcccatgaaaaccaaaatgttgatgtctatgtgaccctttgaacgtgttaaatatttccatatgtaaatgggggcaaaattgacttaatggtaaattactatatttgatgaaaatttttataaatgaaccagtactagtacttgaatgtgaaaatattctattgtaagtttgttttattaatttattttgtggattacagtaatgcttttgttggcctgttgtatgacaaactatttaaaggttcacattttgatttgtatttgccaacaagcccttttgcttgttaaagctatagctaactctcaggagataattgcagttctactcttagaggatggtgtctttcaaataatgtcttgtctgctgattttcagtaatgttaatataaggcaaaagggatattgtttactatacgtagcaatttttttagacagagtcttactctgtcgcccaggctggagtaccagtggcgggatcttggctcactgcaacctccgcttcccgggtttgagcaattctcctgccttagcctcccgagtagctgggactacaggcgcacggtactatgcccggctaatttttgtatttttattagggacggggtttcactacattggccagactggtcttgaactcctgaccttgtgatctgcctgcctcggcctaccaaagtgctgagattacaggatttttttttttttttaagtatgattatgtaccattgtatcatagtaaaactagccaaagaaatttatgaaaggatgaaaaaatgattctggccataaaaggtagtatattttggtgggttcttaagccagcatgataatggcgagtttttttcttctcaggaggaaaaaaagcaagagcagaagtcgtagtcatgaacgaaagagaagcaaaagtaaggaacggaagcgaagtagagacagagaaaggaaaaagagcaaaagccgtgaaagaaagcgaagtagaagcaaagagaggcgacggagccgctcaagaagtcgagatcgaagatttagaggccgctacagaagtccttagtatgtaactatagttatgattttggtttgagggttattctctgggtattcagatggcagtttaacttgagtgatttgaattgtgaatttttatttttttaatgattggttaaaaagtattgaattaaggatattggcattgaatactagtaaagtgaaaatacagtgcatagacaaataagtaaaaatttgcttttactaggcatactgactattttctgttaaactatcagagtttctaaattgtatgccagtcaacgcaaactggatgaaagcactagagtgcttgaaaaagatgacattgtagtgcccaaatacctaagaaagcttaacaagtgtctgggctgttacagtatttgctaaatacatatttacttaaaattgtaaagttctgatgaatactaagttacacatgtataattagttaacagtaaataaaaagtctgtcaccgtggctgttttcagctgaaatgtcaggccagttgtgaatttgttgtgtatgctcattgataaagatccttttttgggctcatctgtatttaaggtttgttaataataataaaaggtattccaaactaaaagtgttttgaagattagatcactagaaatttggatgtggatatttaaagttggaaacaaatatattatggttattaaataactatattaaccacctacaattctaaggattgcatctagcaatctttaatgctttatgaggttaattcctcttaataaacacagtgctgtaaactctgggatatattaaaaataacccttctaacttctaagatttgaatggttaaggatggaattcaaagacaaacagacccgaatcacttgggcaagatacttaatcccctaagctaagcatttgttttctaaccttttaaggagataataagtttcagataagctattaatgagtaatgaatgagaagaaaatgtaaagtgctcagaggacttaatggattcatgaaatgttttggcattacatgaattccgattctggctcttttatctttaaaataaaaagaattaaactccgtgatgctggtttcctccaagctgcttatttcattaactttttaatagctgaaaatgggaccacaatgctattttaatttcgaatgctgtacaacattaggaacttctctgcttttgtcccatttatcaagattctgagcatttttaaaatgggattatgttaaatctttttaccaggatgaactaaataaggggaaaggaattagcttaattcctttgagtgatggatactttgtttgctgggatcatggcttaactttaataaaaaattacttagttcttaatgttgggtttgaggctgtaactcagaatattttataattaaaggggaaagaaaatagcttataactaattacttgagaactgtaatacatccagtaaatgattctcagtcatcagcattagtctgaattgcaaagggtcaagttaatataaagtgttttatttggaaatacttgcatgttgtaggtaggcatggtgttcatgaaaactaattcaaatgtgtggatcacaggccactatgtatttatttatttcgctgttcttctggaataagttagcaggatgagcactaatggacaa

SEQ ID NO: 100657 - DNA, 3539 bp, Homo sapiens
taagttttcgagtgtgtcggctgagaagaaaaattcagtcgatttgaaaaacgtttaccaggccgggcgcggtggctcacgcctgtaatcccagcagtttgggaggcagaggcaggcggatcacttgaggttaggagttcgagaccaacctcatcaacatggtgaaaccccgtctctaccaaaaatacaaaaattagccgggcgtggtggcaggcgcctgtgatcccagctattcgggaggtgaggtggtaggatcgctggaacctgggaggcggagcttgcagtgagccgagatcgcgctactgcacttcagcctgggcaactagagcgaaactccgtctcaaaaaaaaaaaaaaaaaaaaagaaaaatgtttactcacggaatcgtcttgttcttttcctaggcgtttagagaaaatgttagacgatataggcaacaagagtgaaacttgtttcacattgtaagagaaatgtttactcaagaaattgtcttgttctcttcctaggcgtttagagaaaatggcagacgatattgatattgaagcaatgcttgaggctccttacaagaaggtgagaaaaaacatgtcggtgaggtttatatatttcttaatttagcattattcacgaaactactgctgaaatgtaaactaacctccccggagccctcttgatttatcttatcagagatgcattacgtgtaacttacaaaagtaaatatatgctattgatgtaataatattgtgcagtagtttcacttcagcgtgatgaataaatgcccatctatctctctttgtagacttgcctaacgatatctcacctctactcccatgaattcacctttgattccagtgtgaactgtcaatcataaggtagtaattgagtgacttatcgctgtaccgtggtcccctaggtaaaatgactcaactaagaattaccacctccagtttggtatagcaaaaaggtgaatgtagtggtttgggaaaaagcaggggtccaagaataacaaagcatgaccagtctgtggcaagttaaatcttctaacagtcttataagaagaaatgggtgagattttaaaatttatgtatctatgtaagactggtgatagtaaatcttaaaacagtccagtggcaatctgctgctcagttaataattactaaaattcttggatccctgaatagaaattaaaaaaaaaaaatacaagaggcagtagagtcaatacaagcttaatacaagcttagagtaaatacaagcttagagtcacttgatgactgttttactgttctccatattgtttttatttttaattaggccctaccatagtatttcacactaaaaacaaaggaattatattggctaatatagtctttgactcatttcggtatctcagtaaaagtaaactgtcttttcattgtttcaccagttggtggtgaaaatagcagtatgcatgcattatcactggtgtcacaaactgtaagctttgtaagttagcactttactcctatagctgatgtaatcaaactttaaaataaacatttcactaaaccttttaaaaataatacatttgttttggattgtatagcacgaccatgtggtaccaatttggatgaattcttgatagatttaaatagtgtatgtaattttgtaatgcttagactcttgaagagctactttctgttttaatgttaagattcttgtgtcttagttttttttaacatggatgtaattccatgtaaacaggtatggaagtaggaaatgtttaggctggacttggtggattattaattgactttcttgggttcttgggagtcaacattactaaagcagtgtgaatccctgtttgcttcagggcgagatgtgtgacagaggtggcatcaagctcttacagtcccaaccctccaacggaaatgggcgaagatctcaggaatggcatcggtcacaggaaatcgatagtggctggctgctagcatggccacttggggcttaggcagaaatagagccatggtactgaccaaagggaccatagcacatggaataaaactcaaaacaggacttcatgttttatggaaattatatttaaccacttcaacattgtaaatctggataacttttaatatctaaactatataagaaagtaaaatttaacatgttaatatggaaaatttttttatttttgtatcttgatgacttaaatgtaagcaacaaagtggttaaacacatacccatctaaatttttttatagccttccatgttaaactataagtaaataattagttttaaaattgttttgtattttcttattcctgttccctttaccctttgacaacttgaaatgttaccacttcgtcctcatgatgttcttctatcaaccctgcttaggatgagaacaagttgagcagtgccaacggccatgaagaacgtagcaaaaagtgagttttaagaaggggcttgggggagggtggtgagcttttttgtggttttagaccttaagttgtgttcctgtggctaaagtatacaaaattctcttctgaagcttttctttgctgcttttagaaaattggttctttgccttttgagacaaactcttggaggaactgtggatttttttgcttagatttcagaatatagtttcagataccttcccctccaagtccatcatgacaatctggtgacaagttctgtattagaggttgtcttgttttaaatttgttaactttggtttgatatttggttatcttactgataaaactgttatatatccattgatcttaaaaggtagaaagagttaaattaggtgataactaggccatggaaagtattgtttgccctaaagtgccgaaggagtcaaagctgtgaattatttctgcaacttgctgctcagaggcccttttggaagtgatggaacaggtacttaagtacttctaaaggtggctttcattatcttaggccttttaaactctagacttaacagggtggggattttggaaattatgaatatatctgtacactttatttgggtaagatgagtgactcaatagaactctgctatagactagtacagaaaacagtgtacgaaaagtcttaggtaacagatatgatgagatccactttttttttttcttttcttgtgagtcggagtcttgctctgtagcccaggctggagcgcagtggcgcagtctgggctcactgcaacctccgcctcctgggttcaagtgattctttgatttttttttttttctttgacatggagtctggcagtgtcgcccaggctggggtgcagtggttctatcacggctcactgcaaccactgcctcccagattcaagtgattcccctgcctcagcctccgattagctgggactacaggcgcgcgccatcacgcctggctaattttttttttatttttagtagagagggagtttcaccgtgttagccagaatggtctccatctcctgacctctcatgatcctcctgctgtggcctcccaaagtgttgggattacaggtgtgagccaccgcgcctggccttttttttttttttttt

SEQ ID NO: 100658 - DNA, 1331 bp, Homo sapiens
ctggccttctgatacacttttccacttcctctccaccctcagcggataatctgaatatggccgttttatcctatcgccataaggactaggttgccttatggcgaccttgacagccatctgtgtgggaggccggagcgggggcgatcggctgtgccggaggaatcttcagatggccgtgaggaggcgccacgagggggaggtgaccgctgagctccactcagcgaagagctctctgaaagattgacaggcagcctaccaactgtctttgccctagagacccgctctgtctcgcgagatttgggtgcttacgcggagggggagtgaaaggcgcctcactgaatgggggatgggaatatctgtggcgcaatcattgcgcgagattgggctacggtcgccggagccatacttaggtctcgcgatacttcggccgctcaaatttggagcttggggcagcttctcgcgagagcccgtgctgagggctctgtgaggccccgtgtgtttgtgtgtgtgtatgtgtgctggtgaatgtgagtacagggaagcagcggccgccatttcagggagcttgtcgacgctgtcgcaggggtggatcctgagctgccgaagccgccgtcctgctctcccgcgtgggcttctctaattccattgttttttttagattctctcgggcctagccgtccttggaacccgatattcgggctgggcggttccgcggcctgggcctaggggcttaacagtagcaacagaagcggcggcggcggcagcagcagcagcagcagcagcaatctcttcccgaacacgagcaccacaggcgcccgaaggccggaacaggtacggggcgttgcggacccgcgtattatctcagctttctcgaggtttggctccattttgggctgaggggcgcttttggaggtctttagcgaccggggtggggggtggttttcgagaaatcggccctgtttcagtgaccgcgcccttattttccagtcgggtatagtctggattcttggggcggtagggacccccgagaggccgcggtagaatggtgacctgtctccttcgaggcctgggccggccgcgacctcccaacatggcgccagttgaacgctgccttggctcataacccctcccaatggagggagtttctctttgcccctaaaatggcagcgcgggtttttgcccggaaagaggcgctctcgttcgggtctcccagtttctgtttttggagttgacagcagagttttaaatattggatattgaagtcttcattttcgtgtgtttcgtgtaagaggcgttttggatttacttacgtaagccaaacctggttaaag

SEQ ID NO: 100659 - DNA, 1024 bp, Homo sapiens
aatctcttgaacccgggaggcagaggttgcagtgagccgacatagcaccactgcactccagcctgggtgacagagagagactccgtctcaaaaaaaaaaaaaagaaaccagattggtctttgccaggagctggagggaaggaggaatgtggggtgactacttaatggctataaggtttcctgttggggtaataagaatttaccagaactagatccacctagttaagagttccaggtagtggtagcgatagatgctctggatcgagttgtaaagcccaaaatgaaaagagtcaagagattccttgagaagagagaaccaaaactcaatgaaaatattaaaaatgcaatgctgattaaagggggaaatgcaaacgcaacagtgacacaagtacttaaagatgtgtgtgcactgaaaaaaccatacggtgtactgtataaaaagaaaaatgttacaagaccttttgaggatcagacatcactggaattactttcaaagaagtcagattgttctttattcatgtttggctcctataataagaagcggccaaataatctagtaataggtcatatgtatgactaccatgtgctggatatgattgaattaggtattgagaattttgtctctctaaaagacattaagaacagtaaatgtcctgagggaacaaaacccatgctaatatttgctggtgatgatttcaatgtaacagaagattacagaagactaaaaagtcttcttactgatttcttcagaggccccacagtatcaaatatctgcctggctggattagaatatgttctgcacttcactgcactgaatgggaagatttactttcgaagatataagttgctgttgaagaaatctggttgcagaacaccacggattgaattggaagagataggaccctcattgaatctggttctgaggaggacacacctggcatccgatgacctttatacattatctatgaaaatgccaaaagctctcaagccaaagaagaagaaaaatatctccaatgatacttttg

SEQ ID NO: 100660 - DNA, 1096 bp, Homo sapiens
tgcagagcacgcagagtccttctgtcggttggtcctggagcggcgcagccggagtggggccgtgaggtgagctcgcggccaggcgaagccggccggccgggccgggttgggccgggcccgcgctgcgcgcgcgccgtgcgggcggggacggcgacggacgccaccgctgcttcggtcccctgcccggccccgctccccgcctggccccgctcgcccagcctggagggaggccctgggactgctgctgagagcgtggcgggcgtgcgagcggtgcccaatccccggggctacccgcaagagtggcggcggctgccgccaatcagcgccgcccgagggggctgggccgtggggtgcgggcccggggcgcggagcgggccgtgttgggggtgcgggtaagccctagggcccgagcctgagctgtgtgggcacctagagcctcatcagcagcctctgctattgccttgcgctttgggaatatgttttttaaaattggctttttttatcctattctggggagcacattcctttctcaagaccccaaatatgggagtgtcccttttctctatagttttgaaaactgggcggcacaccccctttcttaagctctagctctggaattttatctaaatttctaaaagccctcccccccccaaatttagggcgtaccctcttccgtcagcccccaaagtgggagcacattccttttttcgggcctccaatttgattctgcatttccgttccaatttagaggttcaccctgttatcgggtcctcagatctggggtccattagctaaagttttgggatactttcttgtatcccctctactccaaggaagaattccccttttccaggtcccaaatctgacagcatgccttctggaatttcttacatttaggggccacttcctttcctcagcccttcaaacctgaggttgggccgaaaacaatgtccaaattttgaagtttatgggtacttatttccagtttcacaaataagggaattcactgccttctcccgagactgtattattggggttacacacttttcacgtgttccccaaatcaaactaccttatttcctgaaggagactcatt

SEQ ID NO: 100661 - DNA, 1014 bp, Homo sapiens
cttccacgtgatcctgttgccagccctaatcaggacaaacctgaatgactagactattttgtgtccctgtcctcctccaacccctattcctcacatgagtgtcagatcctattcagtaacggatttgatctggatttggctctagtcctagctcttccatttactgtgagacctcaggcaagtcacttaatgctatgggcctgcttctccccatttgtaaaatgaggggctgatgatctgcaatgtccaccctggctgaatcttggtcgctaccttgcttagaaaccccattgcctgtggtagcttgttgcagcagatctgatttctttcatgtgctcccttgggcagcctgccagttattcccttgtccaagtcacttctgccattatctttttttctagctgaggcagccagcttgttctcaacccaacttcagcgttcttcttgcttccatgtcttcttccagttccatgctgtatttcattcagaactacctgaaatcctcaaagaagtcttcctgagttctccattcaatgtttgtgacttctctgccttaccaagaaggagtctgtaccttatataccccgtatttacttgtcagttctcttatctaatgtatacttaaaaagggacttcatttcctccataccacagctttgttttttggtttgaattagcagggcaggtggcatgaaatttaaagaggaagcaagcaggttgtttgcctttggctgggatttggggaaagtatgagatgtaatgtttttagtccccttccccaagatctcctgtatctgtgggaatcagttgcctggtatgtcttcctggattgtaaaggtgcttaaacttcctttctgaagtttgaaagtgtatcctaagtgcaaataccatttgacaattactcgtggttgggtgggtgcagtggcttacgcctgtaatcccaacactttgggaggccagagtgggaggattgcttgaagccaggagttcaagaccagcctgggcaacaaagtg

SEQ ID NO: 100662 - DNA, 2050 bp, Homo sapiens
atctgcttagataggcagtttcagcatagagtgatgaatgctgtggcccagagggtaggttaggttgccatgggagaatgcaggtgtgaaggaagtccttcagggaggttccaatggctaatcctggtcatgaaggaccaggaagagaaagcagcttgtttggccaggtgcagtggcttatgcctttaaccccagcactttgggaggcttagtgagggagggggcagatcacctggtcaggagttcgagaccaccctggccaacatggtgaaactagagactagcccgtctctagtaaaaatacaaaaattagcctggcatggtggcttgctcctgtaattccagctacttgggaggctgaggcaggagagtcgcttgaatctgggagacagaggttgcagtgagccaagattgtgccattgcactccagcctgggtgacagtgcaagactccatcaaaaaaaaaaaaaaaacaaaagcagcttgtttatacaaaggccctggaggtcggaactgcagggtgtttggatgtggcaggagtatgggtggtaagaacagtaataacccttttttctttttctttttctttttttgtgacgcagtcttgctctgtcttccaggctggagtgcagtggcgggatctcggctcactgtaacctccacctgccgggttcaagcaattctcctgccttagcctcctgagtagctaggactacaggcgtgcaccaccatgcctggctaattttttatatttttagtggagacagggtttcaccatgtcggctaggctggtctcgaactcctgacctcatgatccgcctgcctgtgccccacaaagtggtgggattgcaggcgtgagccatggcgcccagcccccgcccccccccccccctttttttttatacacagttttactcttgttccccagtccggagtgcagtggctcgatctcagctcactgcaacctccgcctcccgggttcaggcaattctcctgcctcagcctcctgagtagctgggattacaggcgtctgccaccatccccagctgatttttttttgtgtttagtagagatgggttttcaccacattggccaggctggtcttgaatttctgatctcaggtgatccgcccgcctctgcctcctaaaatgctagaattacatgcatgagccaccatgcccagcaagaacagtagtaaccctgcaagcttattgtgtgccaggctctgctaaataacttttttttttttgacggagtctcgctctgtcatcccggctggagtgcaatggtgtgatcccggctcactgcaacctctgccttttgggttcaagcgattctccttcctcagcctcccctgtaggtgggattacaggcgcatgccaccacgcctggctaattcttgtgtttttagtagaggcgggatttcaccatgttgacaaggctggtctcaaactcctgacctcaggtgatccgcctgcctcagcctcccaaagtgctgggattacaggtgtgagccaccgggcctgacctgtgctaataacttttatcttcacaacacctatatgatggtttgaagtaggtgctggtgatatcctcattttacagatggggagcctgaagctcagagaggaaatgacttgtgcaagtttatctggaaagtggtggggctgaggtccaaactcaggcactcttattccagagttctggctcataaccgctgtgtcccacagcccctctgctaaagcttgcctgcttctctccttttaagctccaaaagagagtttcttttggcttggttataatggctaactcactaatggcccaaatgctgcgctgagtaccttgaatatggttctgtaggggagccgctgaactgttttttttgtttgtttgtttttgttttttgagacagagccttgctctgttgcccaggctggactgcagtggcgcgatcttggctcactgcaacctccacctcctgggttcgagcgattctcctgtctcagcctcctgagtagctggaattacaggcgtgtgccaccatgcccggc

SEQ ID NO: 100663 - DNA, 1442 bp, Homo sapiens
ttccaaaagtagcaccaagtattaatatctcaacttttgtttgcttcgtttttaattttttttgtttttaagagacgagcgtttgctatgtttctcaggctggtcttgaactcctgggctcaaagaaacaacttggctctgccttccaagtagctggggctataggcatacattactgtgcctggcatttgtttgcttcctttgtaactctttaaatttcattgcaattacagtttgcagttatttatcagtttgctggctaaatttttgtgtttccccggtagactgaagggttcttgagggcaggagctgtgtctcttttggtcttgattgtttccttaaatagtcgctgagcaaatatttgttgaataatgcatcagcagatgactgaatttaactgtgaaagcagttgtttttttgtagttctgaggggtggcccttggcccttgtaggtgagtggtaagcagtgttgagggagggtcttcttagttccagaaaccacaggaagctgcacgatggaggaataggaaccagtggaagacacacctgtgttagaatgaggacaccaacagggtttcatggagctttgtgttttgaataatgcctgtttttttatgtgtagtgaatgatgctacactctgggtggactttgcctaagtttcataaatatttaattggctttttcaggagaataaaggcagccccgttgatgactgaaaatgacaaagcatccacctaacagacgaggaatcagctttgaagtgggagcccagttggaagcccgggaccgtttaaaaaactggtacttttacatttttctgttaattaaagcccttcagtaaaggatttttgccagcactgatagagtggtagcttaggctttttttgtggtgtttttctacttcctgactcttggaagatgtgaggaaatgtcagtcttttctctttgatgcagggatcccagtgtcagggtgactgtcctgtaaccccctgtatatatttgtttcccccttttgcctgttcatctgaaagagttctgggaaaaagaagcaggaatggctacagggaagggaagagttaatagtggcagctctcttgctcctggctgcctgtctgaaaaaagaggaaagatcagggatggaatagtgaagaaaaaggggttcgattggagcagctcatgtgttgtgaacaccccatcctattttctgggcatgatcttgtatgttgaaatacagtcatcatgtaagggcacactgtcagggtgattaggttcagaagctgaggggttatagtcccagctgtgtcattgacttgtgacctctggctggtaattagctgctttgtgcattggcttatctataaatgtgggtattggtaatattgacctcatagggttattctgagaatcaaatgatagaatatgtaaggaaagaccttataga

SEQ ID NO: 100664 - DNA, 1036 bp, Homo sapiens
gaatcacttgaacctgggaggtggaggctgcattgagccaagatcgcgccactgcactccagcctgggtgactgagcgagactccgtcccggaaaaaaaaaaaaaagaaaaaagaaaaaataattaggtaattaggtacattttcaacacagttgtttttgggctattttttttttttggagacaagagtcttgctctttcattcaggctggagtgtagtggcgtgatctcggctcactgcagtctttgcctcctaggttcaagcaattcctctgcctcagccttctgagttgctgagattacaggcatgcaccacgatgcccggccaattttttgtatttttagtagagacagggtttcaccatgttggccaggctggtctccaactcctgacctcagatgatctgcctgcctcggcctcccaaagtgctgggattacaggcgtgagccaccaagcctgcctgtttttgggctatttgtattatctataattagttccttttttggtttcagtatatatatatgtgtgtgtgtgtgtgtgtgtatatatataatatactgcgtgtgtgtatatatattatatattgtatgtatatatattatataagtagtatcatacaacttgttttttttctgtgtctttgttttttatattcaatatgtttttgtgatttacccatacttaactccgcaccctcctcgcccacccctgatatagggtcttactctattgctcaggctggagtgtaatggcacaatcatagttcactgtggcctccaactcctgggctcaagtgatcctcctgccttagccctccatgtatctgggactacatcttaacttctgtatagagttttattgtatgaatataccacattttgtttatctagtcccctactaatggacgtttgtttgtttgtttatttatttatgatggagtctagctctgtcacccaggctggagtgtggtggcacaatcttggctcattgcaacatccgcctcctgggttcaagcagttcagcctcagctgggat

SEQ ID NO: 100665 - DNA, 1042 bp, Homo sapiens
gacacccatgtggatgtggtgactgcaggaatgtttacatgtggagtccagttaagagcagaaggctcatagccgggtgcggtggctcacgcctgtaatcccagcactttgggaggctgaggtgggtggatcatgaggtcaggagatcgagaccatcctggctaacacggtgaaaccctgtcactattaaaaatacaaaaaattggctgggcgtggtggcgggtgcctgtagtccagctactcgggaggctgaggcaggagaatggtgtgaacccgggaggcggagcttgcagtgagccaagatgacgccactgcgctccagcctgggcaacagagcgagactccatctcagaaaaaaaaaaaaaaaaaagcagaaggctcttcaccgggtttagagttagatgtagatatcgatcttgattgtgcctcttcctagtcattctctttgaggctccatttccatgaatgtaaaaagggggcagtaataataatgactccttaagtcttcatggcatgatcaagtgagataccttagataaagatagtttacaaaccctagagtaagctgcactcattagttttatttatttatttatttatttatttctgagacagagtttcgctcttgttgcccaggctggagtgcaatggcatgatctcggcccaccacaacctccgcctcctgggttcaagcaattctcctgcctcagcctcccgagtagctgggattacaggcatgtgccaccatgcccaggctaattttgtatttttagtagagacggagtttctccattttagtcaggctggtctcgaactccaggcttcaggtgatccgcccgccttggcttctcaaagtgctgggattataggtgtgagccaccgcgcccagcctcattaattactaatagccatgtgggtgaacactgatgagttgtagtgggaattcggaaggaaattgtcatcctttctgtttttttctccccggccccatgatgtttctttagttagtatttctggtatataggggggaacaaaacagatt

SEQ ID NO: 100666 - DNA, 1066 bp, Homo sapiens
cctaaggtcgggagttcgagaccagcctggccaacatggcgaaaccccatctctactaaaaatacaaaaattagctgggcatggtggcgggcgctgtaatccccgctactcgggaggctgaggcagggagaattgcttgaacccaggaggttgcggtgagccaagatcacaccactgcactccagcctgggtgacagagcgagactctgtctcaaaaataaaataaaataaaatagttcataaactaaggaatatgcaggttaggatttggacctcaagtctgttaccctccataatttgtgatttgacccaactacacagagtctctaaacggtaggcctggtaaccttctcctttgggaagaggtttggaaatgtaccattatggatatttggatatttggggtgggtattaaaggaatgccaatttttttttttctgactcaggtatccagctcacatagaagacattgactacgaggaaggaaaagtactcatccatttcaagcgttggaaccatcgttatgatgagtggttctgctgggacagtccttatttacgccctttagagaaaatacagctgaggaaagagggcttgcatgaagaggatggatcttctgtgagtaacaaatctgggaagttctgtagtatgcaaggtcagccattgggctgtttgtgtttcaatctttgatgttagtagcagctggagaccagttcttatttaggcctatagttgtaaccctgagatctctatgacacctggggctcttgaagaatcccaattttgtttgtttgttttttgagacggagtctcgctgtgttgcccaggctggagtgcagtggtgcagtctctgctcactgcagtctccacctctcgggttcaagcgattctcgtgcctcagcctccctagtagctgggattacaggtgcccaccctggctaatttttgtatttttagtagagatggggttttgccatcttggccaggctggtctcaaactcctgaccaattttacggcattgtatccctaacttctagaacactgcctggcacattgtagatcttc

SEQ ID NO: 100667 - DNA, 1079 bp, Homo sapiens
tttttttatgttttttaggaatttcaaataaatgagcaggtccttgcttgctggtctgattgtcgtttttacccggccaaagtcactgctgttaacaaggatggtaaggcatttgagttgtagttgtttttactcatgacttaggtggtggggggggatgtttgtaatatcagagcttgatagtatattttcagtatttatttactgcctaggtatccgctttattcaagttaatcactatgtcaggagttgggtagaaattataagtgtaaagaaaactggacaaaaaagatagtttgactttttaccccctgaatttcagtcattgttttctaaaacagtcacagttcatctgtcactctgcctggaagtatgcaggtacttgctgtctaggagttcctaatataattgatgacatagtcctgaatatttgtgaatagcttagaaattaaatgaacactaacaaactttaaaaaatgtgctttctagatgcaaggtgactgagggtggtctgtaacattggagttgctagtggaaactgggatgccggaatttagagcactgagttgggtttcatttgccagagttgaacatgtgaagagacaggatggggaacttgactaatagaggctcaattttgctagtaaaagggcagacaaagagttatgaggataatatgtacggtcaggatcctggcacctggagaatagagtctgggtcccagtgataccattgtaagcacattccactagggtgtgtgtggtctccatgatctctgaagtgagtgtttagggaagtcaggcctcttgatgccactgtagggttgactattaggccagcctgacttttcatttgatgaagttattcagatatttattaatactctgctaactgctgggcctcaggctgaccaagttttgtctgagaatgattttttttttcttgttcttttttgggacagagtcttgctctgttgcccaggctggagtgcagtggtgccagctcagctcactgcaacctccatctcctgagttcaagcgattctcctgcctcagcctcccgagtagctgggattacca

SEQ ID NO: 100668 - DNA, 1285 bp, Homo sapiens
ggaggcagggcaggatggtgcaggttaatcatggtaggcacctgtctctataaggttttgtgtttgtgtgtgggatggatcagaaactctttgaaataatgatttcaaaaatgattaggtttggattagagctgatggtcagtttgtgcttcatcacgattcactgtgggattacttgtgggattgggagcgacaatgctagtctctcttttcactctttccttggtattttctgctgtgcctcaggttcattcgtagcagtggccaccagcttaatggccctgcgaggagaagctctgccggcaaggcggcccctttatttcctgtaaatgtcacttatgtcttgttggtgctgccaggaggaggcaggggatatagtgaagtcatgccttgtagatttatctttagaaggcttggtctgattttcttgccactcttaatctccttggatgttttgctaaagctgagtgttgagcaggctggtgggtggggactgtagccagagtgtggaagtggcagctgctggcactgaggagtctggcatgattgaatcagaactaaataacaactttagtttcttaaggaagtctgttagcactcggaaaatagggcatataatgccatattatttagcttttttcacctggagtggttcttcagcagtggagattaagcattatttagtacgaaggcagcggcagttggtagccttgttagaccctcagtctgtgttgttacaaaagacagtaaaagatgggtttctactttcagggaatctttgtttggaagccatctctggtgagctgacctcacctctttgctggggctgcttagcttccccctccgtttttttttttttttttttttttttttttggtgacagaatcttgctctgttgtccaggctggagtgcagtggcacaatctctgctcactgcaacctccacctcctgggttcaagcaattctcctgcctcagcctcctgagcagctgggactacaggcacatgccacaccacacctggctaatttatatatatatatatatttttaaggtttcaaatgtactttatttcttcattaatgccatatcttaatgggtacacagtgctttaacttggcatcaattatgagctgtttttttttttttttttttttttttttttgagacggagtctctatgagctgttttttaaacaattcattattacatcagctggtatgattactgttctctccattttggggggtgactctgccaacaggggatgggttccattctattcc

SEQ ID NO: 100669 - DNA, 1018 bp, Homo sapiens
attgtctgcaatgctgagtccttaaccctcagaggggcaagaccaggaatctttgtttcatcttaaagtctaaggacaaaaactccttgagggagtctgaggcaggtagcccttctgtcacgttagaggagatggaacaggatacacttattttgagttccttcatttacatgttgtttgttaggtagtgtttgtggccacaggagaactctattattagctacctacgggaggattccatgtgaagacaatcttttagtaatatacatgaaaccatctgagtaaaatgtgggcctctctgttgtccattattctgtctgatttattgaagcccaagttaggctgtgtttagcatgaaagtttcaagatgatcctttgtagtcctttggaagttaaaaggatcaaagaccgagatatatctaaggacggtcatcccttagcacctttggccatagtttgggtcatttcagcactctgaaatgggtctgtggtttggaattagactgaggagcttgagcaataggcagtgcggggtggtgggaaaaaattggttggaggtcagtagacaggcttggattccaaagatagctgtctcagacttaatcatggaactcaggttccttttatgtaagtcctccttctggaatctgccatcaggagtaagcttcaaaattaactccaagtagctgaaaatgttggactgttaggtaacattactcaatattgacttttggatgttggaaatgcctgtaaaaatggcagttttcattttgatgtaactgatcctgaactaactttgttgataaaatagttgaaagtagagtcttgggtggtttgttggcacacataatatttaagatttcaagataactggagtcttaaaactcccatccccccatctccgtccccagacttgccagagttgcaccatggttgcttgagagggttctgtttagaattccatagcattgtttatcataactgctttgcttgccaacaccctgacaatataggcagg

SEQ ID NO: 100670 - DNA, 1005 bp, Homo sapiens
aggtcttgaactcctgacctcaagtgattcacccgcctcggtctcccaaagtgctgggattacaggcgtgagccatcacacctggccaagttattttaaaatgtacaattatttttgactatagtcaccctgttgtgctagcaaatactagatcttactcattctttctaacttttttgtaccccttaaccatcgacacgttcccccacccctgcctactacccttcctagcctctggtaaccctccctctactctctatctccgtaagttcaattgttttaatttttagctcctacaaataggtgagaacatcaaagtttgtctatgtcttgctagctagtttcgtcatgtattggtgacacctgtgacaaataatcacctttattttgtaattaccaggaataaaggtcagtaggtaattactaattgtctatggcagtggttcttggactttggtgtacatcagaatcacctggaggagttgttaaaaatgcacattcctgtgccctgttcccagttgctgtttcagtgtatctgaggtgggactggtaacttgcatttctaatgagttcccaggagttgctcatgctgctgctgtgggaccacactttgagaagcactggtttactctgaggcaggtactgtgtgtggaagaaagtggtataagttatggtctctggccttgaagagcctgcttttgagttgtgatctgtacttatatgaaggtagacctaagtttgaagctctgtaggctggtgccaaatgagcctaagaagttcagatcgggggtaatcattagtagctgaaaagcccggaagcttttacagaactgttgtgggtatttgagccaggcacttaaagatcagtgagtggcacattcccagaaggaaaacacttttaatacagatgtggagttagaagtgtcgctggcagtttcagtgggtagcttgtcactttgagttggtgggtattggatggtggtaatgggaaataaggtttggaaa

SEQ ID NO: 100671 - DNA, 1009 bp, Homo sapiens
tccatcaaacagatatcattgttcttaacgttttggtgtgtaacttgacttaacaatttgatgtatacatctttctgtgttttttattaaacgtacgtgtgtgtatttatttattttcaaaattggagttgtggtacattaatatagtactgctcttttaactaacatttccccatgttccttaatattctgagaatataatttttaacagctatgtagtattctgtaatatgtatgtaactactttgtgtaaccaattcccaaatggtcattaaggatatttgtaaatccaggtacacaagtctgattattattttagctaattttatttctaggaatttattctagttcaaaggtataacctttttagttttgactcaaattgccatctcctccctgaactcccaacaagaagggcaatttcagtttatatttctgctggctgttaccgagaatgcctgttctcaaacctggctgctttcagaatagtttgggggacttgaaaaaatatttccttgtttattatttttccctgtagaacaaattaaacttttatttgttgagtatttaggtactccttcctgcttccagtgaaaacctatgtgcctagtgtgtgctaggtgctgggcatcccatatgaacatagtatggtggtctctgctcttttgaggtcctagaagagagatatgtacacaaataaacttaattatagttttggaatctctagagctttcagacctggccttattatgaaacagtcacaatagaggaccctcgatttttagtgtgaattttaaagaatgtaatttagggagaacataactaagaagcggtatttcctaccaatagacaaaaactccaagtagctcaggaacatagtaggtggcttgttgaactgagcacagcctttacctgatagagaaagcagagaccctggttctgggttggataatctttatagttttcctgttaagcttccagttatcagtttttgtttttctatagacaa

SEQ ID NO: 100672 - DNA, 1253 bp, Homo sapiens
tttgctcattttagaatattgtgggtaatgctaggcctaaagaaacagatcacaaaagtctttcatcatctcctgataaacgagagaagtttaaagaacagagaaaagcaacagtgaatgtgaagaaagacaaagaagataaacccttaaagacagaaaagcgacccaagcagcctgataaagaaggaaagttaatctgttctgaaaaggggaaagtgtcagagaaaagtcttcccaagaacgagaaggaagacaaggaaaacatttccgaaaatgacagagagtattctggagatgcccaagtggataagaaacctgaaaatgacattgtgaagagtccacaagaaaacttgagggaacccaaaagaaaacgaggcagacccccttccatagctcctactggtgagttttttaagtgggctctgcaatgggcaatgccagagtattcttctgtggccctttgtggttctttgtaacttgtgtacgtcaatcgtttatttttgtgactgattttgaattgtcttatgatctggaaacaagttgtgttcatgaagctgaatttaagtgaggtacatatccaagtgaatctaagttgggaagcatgttcataactgagtttgctaaagtagtggttaactgttgactagatacttcagcttatatgataaaacctgataaaccgaggccttttgcttatgctttttcaaatgatctcagtttaagtcagcttaatagaatctagaatcaggaaatagagttttaatgagacagacatgaaagaaaagtaatagtaaaaaggtatgggcttctgaaggagatggggacaaaggaacattgaaactagaaaagcatgggtgcattttgaaattgagctccttggagagtgattattgattagaaattttcacagtctaaataaaaagccgagatggctaattggtaagagtcaaggttagagggtatagatttagggaagaatgcagttattaaaaaacttaaaatttggaattcttctagaataaccaagaatgaaacaagccctgatttcttcctaagccaaacactcgttctccaaatcaattcaatggcatgaagaggcccccccggttctctggactgagcctgccattgattaatatgtgcagtgaccttcagacattcttgattgtgcattctttatgtgttcagttgaaaaactgtgaatcccctagcacgttttaaagcagtatttatctttttctcacaagtttaaa

SEQ ID NO: 100673 - DNA, 1108 bp, Homo sapiens
tacaaaaattagccgggtgtggtgtcgggtgcctgtaatcccacctactccggaggctgaggcaggagaatcgtttgcacctgggaggcggaggttgcagtgagcagagatcgcggcactgcactccagcttgggtgacagagcgagactccatctcaaaaaaaaaaaatccacaaattctcttggacatttttcttgtaccctcaaaactaggcccagtgctaagataattaatgtagcaagtagaggttgaaaactggagctggatcatagaaaagattcaggaggtcaattggcaaggtatcaccatctcctgtaaggaagtaatttctcactcattttactttttttcttttatcttaagtaagaatgcccttttgatggcccatttataatgcagtgatttctgcatatatatatgtatatatgttttatttatatataaaaatgacagacactaagaaattatgtatctttttttgtgtggttttataaacatggtagctgtggattcaaactctcaaactttgcaaccaataacattggaactgagaagaaggaaaatatcaaaaggatgtgaagtcccattaaaacgtcctcggcttgacaaaaattcatgtgagtctacagtttgtttatgtgtggctagaatttgacgttgtttgggtcaacttcctctatattcatcctgtcccccattccctataggctctaatgtttgtctctggtcacatgaggtaatgtgagttggatgcagttggatcagaaggagtttttgctagaagaaaaataaatcccaaagcacaaactgtactaatgttgggttctgtggtatcatctccatatccataaatcacatttgatttggatgccactggaaatttaatggcttaggaagggatgggtttcatatgcagagtgaaactttaaaaatactacttattggcctggcgcagtggctcatgcctgtaatcccagcagtttgggaggctgaggtgggtggatcatctgaggtcaggagtttgagaacagcctggccaacatggtgaaaccctatctttactaaaaatataaaaattagccgggtgtggccaggcgcggtagctca

SEQ ID NO: 100674 - DNA, 1029 bp, Homo sapiens
atagagtgagactctgtcctataaaaaataaaaatacaaaataaaatactatttattgatttaaaaaaataccctctggagtgagttggctcaaatgtttaaataaatttaaaataaaatagtatcctgttggctccaaaaaggatttgtgatagctctaagtaaggctcttataaacctttttaagtcgactttgcaagttagtacatttgggaagccccaaaatagaacatagttgtcaagattcggacatgacctagcacatgttttcagaccatgaatccttaaagaagtgaaattctatcctggcagggacacttttcccttacttaaaactgtaaactagtaaagggtatttccttttatcactactctaacattccagtagtctctctgtaaagtccttttagagacatccagccctgaaatctgtagtagcacagttatttcttcttgttggtctcttgactacaactctcttaatggtttaatagcccaggaaaagtcaaaaaactactcggaaaacactgacaaagacttatcgaggagacgttcctccaggctgtccactaatgggacccatgagatcctagatcctgacttggttgtatcagatttggttgatacggatcctttgcaagacacgttgtctagtaccaaggaatctgaagaaggtgagtcagtctgttcaggaattgtcttgccaacctggttcctatttagtgagaatcaatgtaaatcattatgttctgccttccacaagtattaaattgtcttgaaatcaaactattgaatgtgctgcagtgtttttataatgtattgctcttcactgatgatttattcaatagacatactttctggatgcatttgtggttggttttgcttatctaccgttcagtgttggcctggaggtacactgttcgaagagccctgcttctctctctctgctgccatctcattcgtgcctttgtgtttatacttccagctatttttcctttcactttaacctctttctttgagaagctcaca

SEQ ID NO: 100675 - DNA, 1048 bp, Homo sapiens
ggcttttttctttttttgttttcagacagagtttggctcttgttgcccaggctgcagtgcaatggtgtgatcgcagctcatttcaacctccacctagcaggttcaagtgattctcctgcctcagccccccgagtagctgggattacaggcacctgccaccacgcccagctaattttttgtatttttagtagagatggggtttcaccatgttggccaggctggtcttgaactcctgacctcaggtgatctgcctgccttggcttcccaaaatgctgggattacaggcatgagccactgtgccccgccaacatgtactgttatttatgttttaaaaagataaaacaatgttcagtattttggtggaacaagcttggtactatcctgcattgtatagagtattacaaaagaaaatctttaggtgtcatagtaaaagatgtcccaaaaggtggagataataatcacactgaaatgtgaatagtcatactaggaaccttgtggttggttttgaatttcacactttcaggaggacgtagacgaaatgaagtgctttcagggtgatatgcgtcccagccagggcatatgaagactggttgaagaaatgtttcacacttggttgataattataatagctgtctccagccatgttccagaaataacataagcctgcttatgatgtattttatatttgaaatgataatggcttccatgtgttgatcacctactttgtgccaagtacatacattatccataaccttttctccaaatctttgaaataggtggtattcttcccttaagaatctggataattagactagcttgcacagctaatttatgctgctaatgaaaggtagacctgggattaaatgttgtgctttttgtactataccatactgcctctggcatgagcatgcagtgaggctgtgggtggtggacacttcccctcttctgcttatgatcaggttaattcctgaaatttaaaatgacattgaatagtcatagtagataatattgagcacttatgtgccgtacacctttctaagctctttgc

SEQ ID NO: 100676 - DNA, 1107 bp, Homo sapiens
gtgctgggattacaggtgtgaaccaccatgcccagcccatttcttttgtatttttaataaagatggggttttaccatgttggtcaggctggtcatgaactcctgatctcgagtgatccacctgccttggcctcccaaagtactaggattacaagtgtgagctgctctgcttgacctgagatcctttatttttatttttatttttatctttttaaggatttttccttaaagtatatgaaaccctgaaaacttgtacgactgtttaaaataaacatgttgatttcttcttcctaaagatgaatcacaattgagtcttatttgacctgaagttgttttcattctctctaaacagtaatttgaggaggtaatggcagtctgatgtctcaggctacatttgcacgctagtctttcaccctcagttgtcatgtgttaatgcatgttttgtaataactgggataaatacaaggaacctttgcttttgtttttatttttttcagtaacaaatacttttaagaaaacagatgattttgggtcatctaatgcaccagctgtcgacctagaccataagtttagatgcaaagttgtggactgtttaaaatttttccgcaaagccaaactgttgcactatcacatgaagtatttccatggaatggagaagtcactggagccagaagagagcccgggaaagaggcatgtccaaaccaggggcccttcagcttcagacaagcccagccaggagaccctgaccaggaagcgggtctctgccagttccccaagtaagtatcttcattcttcattgtgtcatggatggctcagttgcttggccacagtgcttgtgttttctgacacacaaagcaggcattaggtttgtctgttccagttgaatcccacaggactgaacatattaagtgatcctctgggctgtgccacggagctgtggccttcctacaggaagcaggaacacctaactgagaattaccttgaaaaatcgcttagcctctgaaggccttgctgcttccagtatgagtggggacagtcaagcaaagggaccttattcagaagccagcaggagaactcgtgctcagagcagcatgggtgccatcgtccc

SEQ ID NO: 100677 - DNA, 1071 bp, Homo sapiens
agtctcttaccagggcttgtgggctcaacctagtatgggccctggaaggggaggcatccactcacccaggtgttacaaagtcctgctggcattgaaaagccttctcacttgctgccttggccagtgtgccctgctgcaggatggtacagatgaaggcatcgaagtgtaagcagatgtgcaggtgaatgatggtatttgttcacacacacgactcttaaaacacatctttgagccctcttgagaaaggattcccttcttaaaaactgtgtctagccctcacaaaaatgtttagaaaaatctatatattctgacttgggacttaaaggatgccacgttttattcttggtgtatcttctagcttagaaaaacaatcttatcagaaaaagaggagagggtcaatacttaagaggaggtgtttgggccccttcatctgctctccacacctctttttggttgaattgtccctgagcctttgtgctgcttgaaaaggaggcttgttggttggatgagattgattctagaatgcaccagtgttaactagggttattcattccttcctgatcctgttcttccagaatgcccctgcagtgaggagatcagtgacacctcccaggaaccttctccacccaaggcatttgctgttaccaggtgtgggtcctcacacaagccaggggtccatatgagcccgcagcttcatggcccagaatctggacaccacaaagggaaagtgaaagcattgggtaaggaggctcttctgtcctgatcatttgctgatcatttattggaaaatacaagcatacctgggagatattatgggtttggttctaggccactacaataaaacaaataaagctagtcagacataatttttattttcccagtgtttacaaaacttatgtttatactatattgtagtctcttaagtgttcagtagcatatgtctaaaacaatgcatataccttaattggaaaatattgttgtgttgagaaatgtcaagttttttggagtaagtcctcaaaagcatagacaataaataaagaaatggacaagtgggattgcatcaagctgaaa

SEQ ID NO: 100678 - DNA, 1023 bp, Homo sapiens
caggcagcatgcttcgtttgggctgttactaaatgacagatccaaggacagattggcatcctcgtttccttgccctatgaatgttcttgtttggaggtatgggactataatgtcatttttcattcttgacaatcaaaggttttttaattttataacctaaaatagtaactgttgttttccctttcctcgtagaggaggataatttgagtgagtcctcttctgagagctttctctggagtgatgatgagtatggccaagatgtggatgtgaccaccaacccagatgaggaacttgatggggatgaccgctatgacttcgaggtggtccgctgcatctgtgaggtccaggaggaaaatgacttcatgattcaggtaggcagagcttccaggaaacaggtctagagaagcacaaactggtccttggagggaattttgaggccagcaacaatggcaagtcatagcagagccccagaaacacagcacgaacggcagcagactgagcttctctttttcgtttggcttcctcagagttccaggctgccatacatagtccattgatggagtaagagaggactttagggatcactgagtctaaacctctcatgctctgcttgaggcagctgggacccgcaaatgggaagggccttgcctgtggtcacaaagtgaggagttgaacagcagggactgaaatctttggagtggcagtttaatcttcccatggactcttatcttctctttgaggtaaattttctttaagatccaaagtcatgcaggctggctttataacttctatgtttctttttctttattttcctgacatttgagtctgtcatcttcatctctgagatgtgcctgtggtgggtgggacctccttacctgcttggggaaaccatgcctggccagcacctgcctgccctgtcccttgtctgtaaattgcagttctgggagaggtggcgctggctggctggctcctaagggtgtcacaagttccctgggtgtcttgacagctgcccaactggcttgg

SEQ ID NO: 100679 - DNA, 1002 bp, Homo sapiens
attgtcaactccctcctttccctctctgccttctggccctctccccctgtcccctcaatactcagggaaggaagtggagccttgggttgaaagaactggtttagcaacgagtcaggttatgttcttatccacctttgcctttcaatagctatgtgatctttggtaaggtttagagagaataaatgcaaagtactaacccatgattactccagcaggggtcttagtgaattggtttgctcattagtggttaatagtattaatagtagcttattacataaagctatgtgctgggctctgtaataggagcttttacatatgacccattgaatcttcacaaacagccccaggaggagggtaggaattgtgtatcccattttgcagatggggaaaataaagcccaggagaactaacctgtgcaaagtcacacagctaatgagtgtctgagccataattcaaactcagctttaagatgtcactcgtgggactgaggaactgaatttttagcttaccttgttaatttcaatgtagagccacatgtggctagtggctaccatactggacagtgcagttccagatgtgtggcagcagctcagttccacgttagtcaggagggagtgctccttcctcccctctccttctatcctcccatgcccctcccctcagcaggtgggtcttacttttggatggagaacaccttctgagtttaatttttgttgcttctttaattctaacagtgtgaagagtgccagtgctggcagcatggggtctgcatgggattactggaagaaaatgtgcccgagaaatacacctgttatgtttgccaagaccctccaggtagagatttctggagtcagggatataacagtatgtagccttttccttggcacagctggctgtgacacattctaaatgtctgcggtcttgagactcatttcttcagcatcggctagactccagctcctcctcgcctctgttgctatcctgccttgtggccagctatcc

SEQ ID NO: 100680 - DNA, 1024 bp, Homo sapiens
aggaagtaggaatgatgctggttgagtgagttgtcccagagttgaaatccagtcaggtcttctgactgagagtccagtcccactcactgtgtgtgaccacagtgggagctcactaaggagtggtctcctaggagaccacggattcacattcgctcttgtttagcaaatggtagtgtgtggtcagatggcccaggtggagctgctgtccctactgggagagtatttaggaattgagaacccctgcaatggtgccagttactccaaagcccatgtcctctttgtcctctcaacagaagccgggagcatcctgatctgccgctgtggtgccagccttggaaacagcactcaggggaggggagatctcatttcagaaacatccctgtcactgacaccaggagcaaggaggaagctccaagctatagaactttgaacggggcagtggagaagcccaggcccctggccctgcccctgccgcgttctgtggaggaatcctatatcaccagtgagcattgctaccagaagccccgcgcctattaccctgccgtggagcagaagctggtggtggagacgaggggctctgccctcgacgatgcggtcaaccccctccatgagaacggcgatgattccctttccccgcgcctgggctggcctctagaccaagacaggagcaagggggacagtgaccccaaacccggctccccaaaggtatgtggctgccttgtacttgttcttcattcattgcgtgaatgcttgcaagttatcctcctagtttgaatgctctatggaagatatttattaataaaactgtatttaaatttgcttaccatagatatgttttggtttgccaaaatgggtgcaaagtcaggagagcccacttaagccaaagatccttggttccaggaagcacccacaaaatggcatagtcaagtgtggcacgtggggtggggggcgcgggtgcagagggagggagaggtgggaagtagcaaggagatatggattagcaaaactcatcttttctttaagg

SEQ ID NO: 100681 - DNA, 1625 bp, Homo sapiens
gaattccaaaccgaagcaggcagggtctggaacccaaaggacagcattttctacccacttcttaatattgacagcttccccgttctatttaatgtccaaaaatgtttcccaaaatttcaaactctttcactgtaaagatttgttacaaagaatgtggtttggggaattaccttattttatattgttgtaaacaaacttcaaattctacatgtgcgacttttctccttcctgaagggtgtttagtagtcagcgttttcagaattgttttgttactatactttaacattttacatttcctgtttgtattattttgtgagagcaaggtgatcatgctgcttaaggtccaggtacaacctatttgtaccttttgagacaatatttgtgttacttttgcaggttacggttccacatgtaattgctatattttgttttgtttttccttactaggcaaagttaaaatgttccatgctttgaggagtgacccatttcactactttgttttcttatcactaaaggcaaaaatcaaagcacagttgtccattaacacttataagttaattatgggtttatgagtctgtaatgttatatgctgcaaacatttactatgtaaacgtgaagtagccaataatatctcaatagtagtaacagtatctttagcgacctttggaatagttaagcacaggtcattgtggacatgaattcaggcctctgtactaaaatctatttcagggaatgttctgtctagtgatttgctcaccatttgatatataatgaattataggacaagtataagctgatctgctatagctgtccatcagagagaatacacgtggctataacatctataacaaaacgacgattcctctacaagaggctgtttctcactgctaacgttggtgtttctggcgtgggaagaaatgcacaggcgtgcatggcatgcacgttcagacagctgcattgtaagagttctgtcatgcagtctgaaaagggaagaaacaggatggctttctgtagccacacctgtgaggcgtgatgattgttgtattattagattactgatttttcttttctgaaaatacatttgagttttaatcacatctgtggaagctgtaacttttaaggtagtcaatttcatgtcttgttcaacgatgtaagcagaaactgaattgccctaattttgccaactggccattattgggattattgtttaaatttttggtaaaggaagtaatctcctttcattcattgtgacttttgttcttagggaagcagagaagactccccaagttcttataacctcattgtgcttccctaatttaaagccatgttgaggggctccattcccaattcctgggtcaaggtgaattaaccctatgttggagcactggaaaccgttatttgcaaacattgctgttaccatttagaaatatgtgcactatcagctgggtgcagtggctcacgtctgtaatcccagcactttgggaggccgaggcaggtggatcacctgaggtcaggagttcgagaccagcctggccaacagggtgaaaccccgtctctactaaaagtacaaaaattagctgggcgtggtggcggacgcctgtaatctcagctacttgggaggctga

SEQ ID NO: 100682 - DNA, 1011 bp, Homo sapiens
ctgtagctctgatggcccctccttcgggaatgattagggtgacggctggccggggctcgttcgagtggcgcccggccggtggtgacccgaacaggagagcgggacggcgaccattctctcgggaggggcccatctggagaaagtcctctcgcttggtcaaactaggagggcgatagcaccggccttactgcgacgatgacaaagtacaacacaccgtctggcgcgaaggagatgctcgagaaccctttgctgttgttatttttcgcgtgtcctccgaaaccaagggaaatgcggctctgtgggttctgttaacgtcagcatttaataagtgaactctaaatgcattgccccttatggtggccgctggcctcctgagttgactcagctcttgcaacgtagctagttgataaccctcgaaatatagcgaattgagatgtgctatattgtaaaatacgggacttagtacgaaaaaactgatgtaaaaattatctcaatactttttaatactgattacatgttggaatataatgttttgcatatattgggtcaaataaaaatgttattaatttcacctgtgtttttactttttaaatgcagcttctaaaaacatttaaattgcatgtgcagtttacattatatttctgttgagcagccttgggttagagtgttggagtgaggctaccttggtggaatcccctttgacgatacccagctcagagttgttaggaggattaaataaattaagccgttggagagaaagggcttttaagaagtttgctcttgtttttattaggtaaactgcttgctatctctgagctactgttttcttatcagtaaaatgtggatgtaatagaacttacctctcagaggtaattgagaattcagtgagatgatgtaggtaaaagcacgtggccctgacagccctcggccaggtggttttctgtttggtagctgactcacaaatagttttgtttttgtttttgtttttgttttgagactgagtcctccgcc

SEQ ID NO: 100683 - DNA, 2030 bp, Homo sapiens
cggccgcctctttaggccacggagccgcgcagatccggttcccgggtgaccactctgtcgccattgggcgagacctacctagtcctgacgacaacggacaaaggccttaaggggcctggaaggtgagcgaagtcccgaacgacgacgggtggaacggttagcggccatcgggcggttggtcttcattctaccagactttgctgtcggaagagagaaatggtagaatgacaggccacgtttggcccgttggaaatgcccaccaccctctgggaagatttactggccgtttatggaaggcctgtgtatataatatgaaaaagctgctctcaactccaccccaaccttttaatagaaaacatttgtcacatctagcccttctagatggaaagaggttgccgacgtatgataaaatagagttagaaagttacacatcttgtaaattctcatttgtttaaaagaaatcatagaaaatacatgtcttctggagatgacttttggaaatggagttgttaagacggcctctggaagcgatacgtccacgtttgttaagtgggttagatgacatggagctggaagacctgagaaggaagagaagaaggttctatgctagactggtcatatttagaagacattttcatattctatccattgttttgtgtgcattttattcctcactactgtgtatatagttgacaatgctaagcttttttgaaatgtctcttctttttagatgttctgaagtgcctgatatgttaaaattagaggtagcaaaatcacattttgtaaatacctttttgttacaattcataggaaatatttttgggggggaatggccaaatcacctgttgagtaatactcattgtgtttgtgcagtggttcaggggaggagagaggagggggaggtgcagagagctctatgccatcctgtttacagcgaggcaagatgaatcattatgtctgtgcattttgttttacttatctgtgtatatagtgtacataaaggacagacgagtcctaattgacaacatctagtctttctggatgttaaagaggttgccagtgtatgacaaaagtagagttagtaaactaatatattttgtacattttgttttacaagtcctaggaaagattgtcttctgaaaatttgatgtcttctgggttgatggagatgggaagggttctaggccagaatgttcacatttggaagactctttcaaattataactgttgttacatgtttgcagtttattcaagactgctgtatacatagtagacaaattaactccttacttgaaacatctagtctatctagatgtttagaagtgcccgatgtatgttaaatgtataggtagtaaaataccactttgtaaatatctttttgctaaaattcataggaaatgcttttggaaattgaattgtgaagccacctttgtgaacagtatagtaatgtctatacttgttcaatagtttagaggaggtaggagggaagaaattgcaaaaggtaatattactagtgtgttcatacttggacattttcagacaccatttttctatatgttttgtgcattttgttttgctctgtatatagtatatataatggacaaatagtcctaatttttcaacatctagtctctagatgttaaagaggttgccagtgtatgacaaaggagtaaaattagcatattttgtacactttgtgttgaaattcgtaggaaaacttgtcttctgtaaagacttttgcataggaatttgtttgaccatctctaagcattacacgtgcctgtacttgtccactggattgaaggcagagaaggaagggaggagggaatgattcaaggccaaaatggccacatttagaagatacctcagatgataaccattgttatgtgtgtgcaattttatttaacagtgctgtgtatgtggtggacaagttatatgaaatatctagtctttctagatatttggaagtgcttgatgtatttaaaagtggtagtagaataacactttgtaaatagcttttaaaaactgat

SEQ ID NO: 100684 - DNA, 1075 bp, Homo sapiens
ttagtagagacagggtttcaccatgttggccatgctgatctcaaactcctgacctcaggtgatctgcccgcctgcctcggcctcccaaagtgcttggattacaggcatgagacactgcgcctggcctcaactctggtttccgttgatagaatattcatattcactttctcctccttcctttcttcgctttctccttcctccttctctttgttccctcctccctccctccctccctctctctcttctttactccttttctcccttcctttctttctttttggcagcacgttgcattgttgagcttgaggtcaactaaaacctttaagtcactttcactgtaattactgttgattgagattctttctacactgtatttggggcacttgctcatttggaagggcactgtccaatatggcagccattgtggccattcaaatttaaagtacttaaaattaaatacaattattattttgcatttcctcagttggactagccacgcttcaagtgctcaatagccacagagggctagtagccactgtatcagacagcaaagattcaggacatttccatcatcatggaaagttctgtgggactgctctggtttggacctaagagcaggagtttatacttacaatctgaggcacgtcatcttgagagttccagctcagcctccaaaactgctgagagctttaagaaactgattctggtttccggagtcttcattttccctcccaacctcatgacaacagtagatttgatcaacgtttcataccttcctctgcttcatctaaaaccaactgataaaaatacccagcagaacagagaggcttgcaatcgagccctctatgtgacaccctgctctccagtcccatgcggcagttgtgcagtcatttaacaaattaggcctatatcctaggtgctgtgctgggtaccaggtacctacaaggaagtcagaagacatcaattaaaaaaaaaaaagagtcctgctgagttgggtgctctagtagttcaaatgtctttgcttcccattcaaggctgcctcttctgtctgttttgtggttgttaaaagtggaag

SEQ ID NO: 100685 - DNA, 1051 bp, Homo sapiens
gtgggggccccgggtggggtctgctcctcttcttcgcccggcctctgagcccgccgcagctcaggttgacgccgggcccacgtggggaagccggcggcgggtccccagcgccgggagggttcgcggggctcagccccttcctctgctcccctccccgggaccggcgcgcggccccagctccggcggctccggcggctccggcgctcccctggtgttggctgctcgccgccgctgcttgctcgttcgcccgcccgctgctgcttggggggccgggatcgccgccgcctcctccgggggagccggccggggcggggcggagcggcgagagggggtgtggggggcgggcgaggagggggctgagcgccgtgggagggagagcaggagcgagcgcgcgagagagcggggcatttctgcgcagctctagcgcgcctcggagcccgccggggcagccgccggacaccaggaccgcgagccagacagctcccggaagccgcgccgccgccgccaggttagccgcacccgccgtccccctccgcgtcccggggaccccgccgcgtcgggtcccgcgtgtgcgtgtggggtggccgccgagggcggcgggctcgattcccgatctttgggcactgacaggccggcgggccggctccaggagccgcgggcttcggttcgtgtgtgtggggactgtcgcgggtttgtgtgtcggggctccagtctctgggtgtgtgttaggtgtgagcgcgcgtgtgcccgtggatccgtgcgagcggctgctcggtgtgcgcgcgcgtgcgtgtgtgcgccgggtgtgcatctgtgtgtgcgtgtgtgagggtgtgtgccttgcgtgtcttcgcgagtggtgcgtgcgtatctgggtgagggtgcgtgtgtctgcgtgtgtctgtcggtgaatgtatctgtgagagggtgtgtccgaatgtgtagcagtgtgtacacctctgggtgagggcgtgtgccagtggcttcgcttgtggctgcagcctgtggcgggtgtgggtgtgtgtgtgcgcgcgcgtcgctgtgtgcgcgc

SEQ ID NO: 100686 - DNA, 1085 bp, Homo sapiens
gcagaagtgatctctgaatccacctccctcatgccacgctatgcaggtgggaagcagaggcctgggaggaggagatggcacccaagaacaccgagtgaactggcctcgcgcgctctggatgggctgtgcgcactctggatggacctaggcctgtgttagggtgaggagggggccagggaacccatgaaggatgtacatgacaagcaaacgttaagctgggagcagtctgttgctagggtgtgtgcgtgatcccaggtgagtgggatgtgagtgggccggagccgtcatcattccaggctttccttccggaaaaggagaaagggccacataggtgggaaccaggggaatattgggatgtgggggaaatcagggggtggcttgagaagaggaggctgttgccaagcagcaagagacatgactgtatgagaacagaacaggcaccctagcgtctgtgggcctggcactgtacagccctggactgtagtggtatcacctccattgcaggggaagaaaccagggcttccaaggtcagagctaggaagaatggagtcaggagtggcatccagggctggaggacttcagagccatgtctctggcatgccctgggtggcagccattccagttcttgtgaggtcctggggtcaaaggggtcaaggaggtactcagcccagggcaagtcatcttttgcttcctttcacttcttctccatcaatctgcccattgagcgggcctgttttcttctactttacccaccccccttaatttgttgatgaaaaatatttattgagcacctattatgtgccaggcactgcccttgatttcatggaacttatgccatcgcttcttggcacagagggctatcccacattgccagggagtgatgggaagaaggaggggagggggccactggccacttctctctccctttacatgagcccctccctcttctcagcctctatccccttgcaaatgcccctagccccagatggttcttgttggaactacctcctgctgaaatgaaaaccagtcagagttaattgttaaacctaatagctggtgagagtttcactctcctgggctggtgg

SEQ ID NO: 100687 - DNA, 1076 bp, Homo sapiens
gacagagtgagactccgtctcaaaaaaacaaaacaaaacaaaacaaaaaacccaaaaaacacaaatctgactatgtcactcagtgactttcctctgcccttagaataaaatctaaattccttaccatggcgttcagagccctgagtgagccggttcctgcctcccccttccagccatctatctctattggtctccatagatcattggaaattattctattggtcatttccgtcagccacaggagtcttctctgttcatttagcaaatttattccagtctcaagacctttacacatgcttaggttccctctgcttagaattcttttcctggctctttgccgccttggctccttcttatcctctacgtcgcagtttaatttagtcctcccaccccctgcactgcttttttcaccacctcttgattccttcataatgcttatcacaatttgtagctatttgtctttttcttttaatgtcatgttcactcttgattccatgtggcatggcgcacagtaggtattcaataagtatctattggatgaatgaatgaatgaattgtaaggaaatgagagagtgctggttgagtgcctggcatagggtatggctcttaggaggtgctcaataaatggcagcttttagtgagaactgacatggcagagaaaataaatacccactgatagattgcatacatggtgggtaggggaggcagcgggtaattaagattggaaagtgatgcactcgtgccagatcttgggggtccctgatgctcagccaaagagtttagacttcctgaaagagtagctggaagtcattgctgggccattaatgtaactataaagccctacttctaagatgtgggctcagccactttgcgtactcaaggggctgtgctgtatggtggtggggttgcagggttggggacaaacccagagagagacaggctgggaacctttctggtgtcattctctgagacaggctattcctacaggcccagaaggaggggacacagttaggagcatcctgtgttttctgattccacatggccattacattgtttctggggagtggaggataggg

SEQ ID NO: 100688 - DNA, 1060 bp, Homo sapiens
ggtggcctgatggggctgggttggactgtgttgaaggggcttacctgcccgggctgtgctgtgctgtgctgtgttggcccgactgtattggttatgggaggctgtgctgggcagttgggctgggttggctgcactggctcaggcctggcagtcttgtccctggtgtgatcctgggctcagcctggtgtgatcagcgtagtcaccaatccaagacattcattctagaagctggcatggcctccgtggccatgctgacagacttgtccattcacgtagtggagagtgattcatcagagctggtggtggcagcagtaactctgacagagtggaactgctctcaccatcctgtcacttggcctctaaaaataactcctgccggttccgagtgaccgcaccgccaggtgtctggaggtgcagtcctgtggttgtggctatgtgagggagggtgtgtttgtgtgtgtgtgtgtgtgtgtgtgtgtgtgtgtgtgtgtgtgtgttggggatagaggtgccatctgggggcctcttgattggttgacctctgagccagggctttggggtgggagtatgagaggcagaccaggctcgctcttttctaccctctcatagctggggacagagacagctagtgggggtagcagtatttttcaggactgtgtgctcactccctgctgaaaaagggcagagagagtggaatggagagggtgacttcagaggcaatatgacaagggtgaggcaggctctggggaagcacagcatttagccaatcaacatctatgtcccacaaaagcccacataaaagctcatcgtcttagtgaagtctttaatgtagggttcctttaaattagatacaaaatacaaaatacacacatatacagctaatttcttatcgtggctgattagagatcatctagcccaagtcttaaccaaggggattatctatctatcactcagggggtgatctatgcatgggcttcatgagctctcttgatacctgaaagatgataaaggtaggtatgtgtgtgtgtgagtgtgactttgtgtgtgtgtatgtgtgtgc

SEQ ID NO: 100689 - DNA, 1021 bp, Homo sapiens
aaatgtctgtagtgatgaaatgttctacatctgcaccgtccagtatggtaaccactaaccacatgtggctatgagttttacattttgttccattaaatttaaatttaaataatcacatttggccagttgctagacagtgcagtgcacttggtttgtcattcaaggctctgcttggcaccagctcctttctatctcctcagggatagcctcaaccctcagtatcccaggctccaggtcatatgcagcgtttcctgattctaccttgtaattcccagcactatggcttgtgttatgctctctcctcagtctacattgtccttctgccctgcctttaatgcccaacccacatatgacctcttcctcgaaacctcctttgacacctgctgctctctaatctttttctcctctgaactccccaacactctgtcctcttcttacaacctttagtgctttctgttttacattgcagttggctggtgtgggtactttctcttactaaactgtgagcttttggaggatgtgactgttttctgtagagagctcttgcttcctactgtaggtccctccaggtacacagaggagttcgacaaatcccacaaacctttgtactggcacactggggatacagagatcggtaccataacttccctgtcctcaagctgctcacaggcttctacgagagtctgattcatgcccagagaaccactgaagccaatggttattttaggcagggagataaaagccacagagggcccagttggcgaggggagtccggcaggagctgcctaagcagaaggctgtgtttacatacacagacgacttctctgcccagcctggcctagtgtggggagatgggaacattcaggcgtcactgcctggctgccttgtgaagttgcggattaaccagtgatgcagcggctggtctagccgtctggtccctgcagatggatggatgaagagaggactgaaaagacagcagagcagtgccagcttctggaagtgaagtgctggctgggtggag

SEQ ID NO: 100690 - DNA, 1120 bp, Homo sapiens
agagtattttacatcctgaaaatctctagcatatattcatctctgggacaaaaacattaaaaaaaggaaactttattgatgttataacataaacacagaaaagtgcacagatcataagtttacacatacttgtgtaactaccccccagacatgaacagaatatgtcagtatctccagaataaacctgtgtgaagcccaatgtgtgtaggattaatgatagaacaaacacaggccttggagtcaggcatgcctggggttgaatcctgggcccctgcacctactagcagtgtgaccttggatgagtgatttaacttcagtttcctcccctgtaaaatcaaggtggatctataatgtctgccttacagggaagtaggagatttaaaattgaaaatataggcaagttgctaggcacagtgccagcacataagtggggactcagatgctctctgcaatggcgatgttaattgatggtgatgctgcagcaccttctggcacctgggaccagggacacacacacagcttttctcctgttgcctctcactgctcccagcctctgtatgatactctccagctctcttctgactgcaaggaattagagatgctgtgatgatgcaaacctcagctgacacttcaggcacccgacgggaggctgggtggacatctgtatctagtgggtacatggccagatttttcatgttctggcctcaggaatgtggctcccagacctcctagaggggctgatttcccaagaagcagctggaagcatggggacctattaagaaacatagccgaggtggagataaggcagaactcagcctcaggagtgtcctggcatcctgggtggactcctgactcctacttgctccctggcctctggctttcggtgtgaagatggccaacacatactatgcacatattgtgaactgggcactgatgtgggccttcaggggtgtgtgtgggcggagggaagggagtatgatgaaaagtggccattatcctaaagctcatagtgcaatggaagtttaaaacccttggacaggtcacatgaccctgaacttgagggtggcaggacggagacagagaggccaagaggttatttctagccagaggagttggtgca

SEQ ID NO: 100691 - DNA, 1253 bp, Homo sapiens
gctccatagcaactagccatggctagtagctaccatattggttagcacagacctaaaaacagggagtttataagggttgaagctcagagtttggcaccagacatacctgtcagtcatattccgaccctgccatttattagctggatgaactttggggtcgctaacccttctgagcctcagttacttcagctgtgaaagggattaataatttcagtgccagagaattgctttgaggattaaacaaatgaatgtgtgtccagtgccaggcacagaggaagtgctcagaaaatggtggtgcttcaccttctagtatcctctgatgtgctggggtacgtgcctccactagattgattgtgaattcaagggcagaggctgtattcaattcctccagccttccccagtgtccagggcctggcttggtgtgagcattactgcttgctgaatgaaagattaagtccttgggctgggagtgctccccaccccaccctgcttgcccagtagtcaagggccctggtggctgggagtcaggagaccactgactacttgtgggtgaccttggcaagtcactgctttgcttagaaccttggtttcctcctttgaaagataaaagggagataggaggggccctgcctgaagtgtttggttgaatctctgccccgcagtgaccttgggggtctgtggctgactctgtgtcccttgctttcccagccagtggagcgaatcacttccgttctcctcctggctttcctgtatcctggacttttgcaccattaagttccatccagttaaaatttaagaggaaagaatttctcctgcctcctagacagagcagagagggaatgaagggtcctgtcccttctcttctgccagcatctgctgacctcccatcacagcagcccagtgacagacatggggcagggattctcccattttataggtgagaaaattgaggctcagagatgtcaaataacctgcctaagtaatacaaaaagaaatggtagcgctagggctggaagcagaatttgcagctaaggaactgaggaaccccttttttggatgggctcctctttccttctttctccatgagacttggtcctaggttgagtcctatccctgtgcctcagtttccctgcctggggaatgaaaacagtcaagtaactcaagtagtaattgcaactgatgcctatgggggccatacattcttaagtgtctctcctgcttcctccagcctgatttttctggaaagggttatt

SEQ ID NO: 100692 - DNA, 1036 bp, Homo sapiens
ttggcggggggttggtcctgctgtaggatgagcggtgggtgggcgctgggctcccaccggctggcccagtctcttttcggagagcactcctgctgccgcctccagaggccaagggctctttggatttctgctgcttctgacgctgcaggaggagttcttggctggagcctgggatgctggcgagcccttgccctcatctctcctcactctggttacggacccttccccgctctgggcttgcctccccttccgtctcccttccaagtacctcagagctgctaggagggatcttagccctaggacttctgcagttctggcctggcattgtcctggccagtgaccgtcccctgatcagagggagagggcttgtgtgtcccacttgtgtctggcaccttcacacttggggaggtccaagggcccgagaggctggggtctcagggatgggcatggggggccaatgtctacagccattggggtacttactgggtgcagaggccactgactggcagacgtatatggctcaaagtggtccatggagaccttgaagtctggacaaggaccaaaagggagttctggggatgctggtctctccctcagctgccagccatcgtcgttgcttttccctcggagctctgaggatgcattggtgggggagagagcaccacgtgttcccacattcacttctggatccgcatagcacctcctctgcacccaaaggtgggaatgtgagacggccagatttaggacctctccagggctgtgcggggtccagcggcttggcttcattcccaccccatccccccaccctcagcattaggagccttccagaatcagtggcacttgagccaggtcaagatctggggcctggatggtgccctccgcagctcttggaagacagtgcctcctgtcccgggcaagggtgtggagaatagaggcagctgtgtgcctctctgcccacccattcctccagatggagcctgcggcagaggcagcctgtgccagcctcccctatgagccaccgtggcccaggaaggct

SEQ ID NO: 100693 - DNA, 1025 bp, Homo sapiens
agcatgtgggcaactatgtcagcgagctccgcttcgcccctaaccagacccgggagctggaggagaggatcatggagctgcataagacatataggtaagagggtgccagccagggccttctgtggctccttggccagtgggagccttccttgcaggcctgaatgtcctaggccgccacatactgtgctgtttgtaccccgcctggctctgcccctagcttgaggtatatctaagagcaaatcatctctgtaaataggaacgatagtgactggctgtgtggccttgatgaccttttgggacccaagtttcttaagctcctctataggtgtgataattccctgtccttggcctctgagaataagtttatctgccaactggagaaaataatcgctactgtgtctctgagtaagtgtcctcatgtctagatcttggtgtagagttcaaaagtttggacccgaaagccagcctgctagggttcctatactggctctgccactttctaactagaggatctcaggaaggtcatttcacttcctatgctttggtttcctcatctgttcaaggtggatgctgttaaacccaccctgtaggattgttgggaagcctaaatagcacatattaaaggcacactgcatgttggctgttagtgttgctgtctgtggatcgaggggttgaacagttgatcatgcaggggaaagtacctcgttccagcagttggacgataattaactagtgtgattgtaggctggttatttaacctatctaagccccatttttcacctgtatatgcacaaagttagattatcagtgtctctcaactattggcatttggggcaggagaattcattgtgcagaatgttcagcatccctgggacccagtaaatgcccataacaccttctcagtccttgtaacaacccagatactcccctttgccattgcttctgtacaggttcccctggagaggagcccttggaactaaatgatttgtagggtccttttaagctggaagtatttggggctgtaa

SEQ ID NO: 100694 - DNA, 1005 bp, Homo sapiens
ctgccattgatggaagcctcactctgtgccagccactcttccataaatatttatatacattagcttgttcattcctcacctccgctttctaaagcaggcactgcttctagatgaggaaaccaagacccagcaatattatgtaacttacccaaggtcacacagtcaagaacagatggatttgagatttgaacccaggctctagtgctgtagaaaccaggaaggagtcctgggctgggaggcagctctgccactcactggccatgtgatcagaagtctacttcacccctctgggcaatgggtgaggggtgtggaagagttggctccactccaggcgtggttgggcagggctgggctggttctctgtctgttctctgggaggggtctcacatggttgcctggctatctccacccacttcagcagagttctcccgcccagcctcggtcagcgagaaccatgatgcagggcctgacggtgacaagcgggatgaggatggcgagtctggggggcaacggtcagaggctgaggagggagaggtcaggactccaaccaagatcaaggagctaaaggtaggagcctggctttctcatactctctgccctggggatcaggaggctgacctgaggtctagcctcggccttgaccttcacatgcctccagctgtggccaagcacccttactatggagtgcaccatggcagggccttgcctttgggtcatctctcaatacctggcccttgccgggatggggtgggcatgggagtgggcatgctgcctgtcctgtactctccccagctttgccctgcttttccagaggggcactctgtcccctagaggactcaggcctccttttgcacactcttaatttgcccctctgactgggatctggatctgcaccactctcttcctcctcagagcatgaccaggtgtcaccaacagctctaggagtgtgaggttcaagtgtgtccccttcctatttccccatgccccactcaggtgcacacacac

SEQ ID NO: 100695 - DNA, 1025 bp, Homo sapiens
ctcaattcttgtgcccagctgtgggacttactgctcttcttcctggtctctaattctcctaatcttcctgaacactccacagcattctagtttctctatctggctgtatctcaccctgtctgctattggtgagtcagtacctgaaaggtatctggaaggtccagggtggttggggaaggtagtgtcccatcacagaggagactagatgcaattttttcctgcccctggtccctagtgtgggagcttggccattcttctggatgtccctggcttgaggaggatctgtactgtgggcctccccagggcctgagcagttgtgcatgttgggctaggaggggcccagactggacatcctgttaagtacagtggcccaagtctcagccagaaagtggacactgggatccaggagggatctaggaggcacctgaatgagtcagagcagcccagtgaataggattagtgagttattatagctctctggcagttgctgcctgctatgccttagttgtaacagagggaagtcacctctgtgactaagaccgggcttatagcaccacagggaactcacccagacctgtgggctttgggtagaggttggctgttcagaggctgtagagccaggcaagggagaagcgaaggtggcttgactagacatctcctctttttcatcttcagtgctctgtgccttgggatgtgcacctgttggggtggttctccttgccctggtttgtctctggggctgccatgagagtgacacaggtcagagtgggaataacgttgctggtggagggtggtgatggtgactgctgccatcatccctgcaccctgcatccccgcttggagctgttcccctaacaccaccaccctctccatctatccctagttcttagacaagccagaagatgtcttgctgaagcaccaggccagcatcaatgagctcaaaaggaccctgaaggagcccaacagcaaactcatccaccgggatcgagactgggaacgggagcgcaggctgccctcctcccccg

SEQ ID NO: 100696 - DNA, 1047 bp, Homo sapiens
ctgaggttactgtcttcaccttcctgtgccccttcctcctgcccacccagaaccaccctctgtggtcttaagaaaaccctttctctggggtgaggggaatgtaccagattctgccaagcagttggaagcaatgggtaacccatgctgtctccatgctgtgataaggaaatgtccccatcccagagatccataaagggccagcccctccctcatccattgtttctcaggagggacaggactgcaaccattctgggaagacagaacagcctgcattgcctttggcctcgaaggagaggcaggaatgatctccctctttcaggtcctggtgaggcaggtgactctagaggcaggccctgacttctatgcttagggtcaggggtcatgctagaggcaggctctgacttccatgcttagggtcaggggtcatgctagaagcaggctctgacttctatgcttagggtcaggggtcatggcacccaaatgccttctgccttaaggtcttttctctgttcagaagcctgaatggtctagcagtggttagttagggcacgacattccaggcatctccggcctgcgtcttctctgaactcccctggagcttgggcccatcaaggaggcaggcaaaagtggacatctttctctaaggagtatccttagggttgtagagagattggtcaggcaagtgtttgaaatgaggaggccattgcttctatgcccagggcggcagcaagtggagggctctttgaacttcctgtggcccttcatggatgctgggcatagaatccaggcccaggcaggaggctgtgctccctcctctgatgggattttatggactatcagggttggaagctactgagcgatcatctgggcagaactttcttccccaatatctgccgctcccctgttgatgtatgctctcctctgagggcctgtacctttctccattctcagagaaaacttctttagctgctgcaaacgtgctggaactttaagaaagacataaatgagctacataagtgataaaacataagtcatacttctactcta

SEQ ID NO: 100697 - DNA, 1058 bp, Homo sapiens
tcagcctcccaaagtgctgggattacaggcgtgagccaccgcgcttggcctctggtgcctttgatgcacgatgatgcttagatctttacctctctcccttccttgatgcattctattgagttcttttctgctctttctatgggttttgttagaattagaatgggccctggtatttgtttcttttagattgaacaccacagtgttcaagctgtttaagccattgtggtgcctggcactaacgtggtcatgtggtatctccatgactactatgctttcttcccagaagcccttgtagaaaggttcgatttcaggctgtggcctgtggaacttaatgcatcccttcaatttgccattaggtcacagttggcacccatattccatggttgtgaaataagttagcaaagatctccggcctcaaaaatcaggctttcttttcctgactctgtcttctactaacagtgaccttgggcaagtcactgtccatctctagacctgtttcctcatttacacaatatggaaatgagactggataacattgtaagagtacttttgactctaacattcaaagactccatgtgatggaaatgactttcccctctgacggtggcagttatgttattaaaagaggaagaggaagggtcctggcccatctgtggatctccatttccccatggctgacatgggaagggcataagaccccatcccattttatcaagttgggggcagtggttgaggaaaattggtcaataatttatcaagtgcctgatgggaagagggaccttgatgagaatggctggcacgtcatgccttcctctccccagccagttctggggatgtgctgtcccaaagtcaaacatttcagtggtagattggtcccctcttacaaagggaaaaactcacccattcttcaggtacctgatatttcatgttaactcttcttgctccaattgaaacacagggttcagagcattgggtatttatagaaagagagtacactaggccagaagagctcggtctcctaaaagtgaccaccatgcagcaggaagaaaggcaggcag

SEQ ID NO: 100698 - DNA, 1037 bp, Homo sapiens
gaagcacacacggaactagagcccgtgtcccccaattcaggctgtgaaaccacgctggcagaagctactggaactggggtaactggccgcgtgagcccccgcccccaccgctgctccccgcccatgggggctggccgcatgctctgtagtttttagaagcatgtttcagtggcccctcgtcatttctgcaatcagaggctgcttatccatccctgtgagttttttccctaaacgggcctgggtgtagctcaggctgaatgatgggcttctctgcttggcccatgttagcttggccacaaagaccctcagcttttggtgtgacctggtgcccagagggtcacacaacccccatggagaaggtggcgccaccaccagcaaatgacacacctgctttgccttgccgctcatacccgctgggttcctgcctaccttgcttggcttgtccagcgatctttcttcatcctttcccatccctggttctcccgccttgggaaagttgacagtccagaggtttccatccttcacttctggttccctctcagtcccagtgccaagtttctttctgcctccttaagactaactgtcttctctaatccagaacaaatccggagatgcggtcagggaagagaagcgctccaccaacttagcagccaacacccctgggaagggggggcgcctgagatttgccagcccctcgggccctcaggtctctgcagcccctctgtgccctgatgacccagtcaccttcacccggccaggatgcatcgccgccttaggttcccacctgctgtggcagcacctctcgtgctgctcaactctggcttgtctggaatgtctccctcacacctctcaaccttccagaaactggctaaatggaggctcgcttagcaagtgaatgtctaagcccactgaatccctagaaccagaagccaagttctttacaaatctttcatgggtattaggttggtctttaaaaagaatgttatgaaccagccaaaaatgtgtgtgtggtgtttaatccctgacaggccagttga

SEQ ID NO: 100699 - DNA, 1020 bp, Homo sapiens
ccctccttagtttctgtttctcaacgcccacctgcacggatgggcctggggtccgggcttccatccctgcctttcgtgcaatgctgcttccaataagctcccagatccaatacccttggatggagcctcctgtccaggagtcactggcaggacgtttgctttgtacttgcttttgccatcagtgtgagaccctcagaaaggggcatctccactcttgagtcgtttttgttttttttatgcttgttatgatttcaaggaacctttcctggggtgtttttcatttcctggcctgctcttccattcaggatgtcgacacagccccgagatttctcctgacattcaccatcttgatttctctttctctctctctccccaccccacatccccattcttttgattttatctggccatagagagcagggctgagggagggctccgaggagaaagtcaaaccaccacgtccccgggccccagagagtgacacaggcgatgaggaccaggaccaggagagggacacggtgttcctgaaggacaaccacctggccattgagcgcaagtgctccagcatcacggtcagctctacgtctagcctggaggctgaggtggacttcacggtcattggtgactaccatggcagcgccttcgaagacttctcccgcagcctgcctgagctcgaccgggacaaaagcgactcggacactgagggcctgctgttctcccgggatctcaacaagggggcccccagccaggatgatgagtctgggggcattgaggacagcccggatcgaggggcctgctccaccccggatatgccccagtttgaggtacagtggagcttcctcaagagccaggcccgctgggcaccgcatgctcagagggccctgggccacccgtgagaagaccgagcacccagcctgcagcctgaagctctgtctcgtgttgcatgactgcccctccgcagaacagcatggttctgtgctcgcatgtttgccatctcggtttacccctaacacgcgctcc

SEQ ID NO: 100700 - DNA, 2843 bp, Homo sapiens
gaacacccatgatgtgtatagttctgtaccagccactgtgaatccagcttgaagaagggaacatcccggggctctagggcccacatgccactgggagagacagagagagaaggcagggaaccagcttagatgctggtgcccaggctggggtggggctggagtgcaaggaggtggatgcagagaaggggtcagggttaagggatgcctggaggggggaaagcacaggatttggtcgttggtaggatgttcaggggacaagaggaaagatgagctcgtgacaccgttcactagccaatggttctcaaaatgtggttccaggaacctgttagcaaggcaggtcctttgggctcctccttagacctattgactcggaaactctagggtggggcccagcagtgtgtgtttttccaagccctccagctgatgcctctgaagttggagaactgctgatgtaaacagagtgatgggggaaagtgctctttagtgacaagcgtgtgttggaagtggaagaagcagtgaattcctttcgagatcggatgagtctgaggtgcctgtggaacatttccagggcaaaatgtctaggacacaactggttttaaaggcctagggtccaataaatatctgggctataggtgaagggataggggactttgacctccatgaggcagcagaagctgttgagtagccgaggtggcccagagagcgggtggcaagtgaggagagcctgaatgtggaggaagagagggctgagtttgccttggtcagggagaggaaccactcctcctggaggcaggtgacgggactggccaaggatacaggagaggaagggaggagcagagggtgcctcgttttgaatgactgatgtccctagtggtggcctctgtttttagtgtgaaggtggaggtgaggctttgccctgggaaagacagaacaatgagagaataagaggctttaagggagaacttcccagaatgatgctaggattcataggggttagtggctgttaaggggaaaggaagcattgagcccggaagctgcccttgggaagcctgctgctgggccacattctggaactgcaggtgcatctgggaacgtgccttgtggtgcagtaccaaggaaccaggctgctggcagcctcagcaggatgcaggtgtgggagcggcaggggaaagtcagcgagtttcttttctcacctgtcccttggtaggcagaagtccagatctagtgccatgcctggaccagaatcagaggtcaggccactgaggacctgcagaatggacacagttctgggcccctggacagacaaggctgagccctgagatggtgcagaaagtaggaggtagaagcaggcagctgggccctggcgccagatcgggggcagtaagtcaggggacaattccaggaagatctagcaattagaatttaaggtagggccaagagagctgtctgaagggaaagattcccaagggcagagtggcgtgcacagtgtgttggacttggagtcagacaacatggagttaagttccagctctaccactaacttgctgggagactgaactcttaagtttctcttgccctccagtttctcatctgtaaatcaggaatattaaaaataatgcccaactggtgttatgagaattaaacgagatgaggcatgtaacatccttaaaatgatgcctcgcacatagcaagcactcagaaagtcattattattattatattctaaatagccagcttatgcccctatatttatcctatgtattttggtttgcaaaaccttttctactccattagcttcataggttctgtgtgggattggggcaagggtccttttttacagatgaatctgtgaggcccatagagaggaagtggctctgccccaagtcacatggcttgaaggtggcagggcaggacacgagcctgaatctggcaactcctctgctagtgcttccggagaacaatgccatgtcttgatcactacagtgttcctaacgccagacagtctgtaaatgtttgttgaatgagcgagtgtgcaagtgtgcgagtgaacaaatgtgtgcctgagtgagcaagggatgaatgaggcggaactgaacgatgccttcagtcctttgcttctattatttctactcaaccttgtggtcgtgatagctacatggccacatgctccgcccatcctgggggcccacccggctgagagctggccatctgagcactattgtttccccaggagaacagtctcaagtccgggaagggggcagctgccatgatcccaggcccacagacggtggccacggaaatccgttctctttctccggtaagtgggcaaggccagctcaggctaggggactccacactgagaatatgggcatggacccatgtatggctggcaggaagtgcagcgttgagcccagaaggcacccttctaggtgcaaagccaggaaactggacccttttcagatgcccacagggctccctggtgcctgctagaatctcatgagtggccctccccaccgcccacacatgtaagtggggcattggtgacatgtgagggtaaagcggcccctcaccttggtggtgctgctgagggttcttttgcatctgccctccctactaaccaggaagagcaatggactaggaggccagaggcttggattctggacctgcctctgttggtgcctgcccagtgaccctgagtctgtcactgtagggtctctttcagctcttgcattctccaagtctgtggttctcattgtttagctccgcagagagcgtgcacctggctatgacaggatggggcatcaggagggctgtgtttccaccttggatccttttggtcattc

SEQ ID NO: 100701 - DNA, 1026 bp, Homo sapiens
cttaaagaagttaagaaacttgccaggcactgtggcgtgcacctgtaatcccagctacttgggaggctgaggcagaaggatcacttgcagccaggaattcaaggctgtaatgtgcattgattgtgcctgtgaatagctattgcactccagcctgagcaacatagtaagactcgtctgttaaaaactgtttaaagtaaaggaagttaagaaactcacccaagattacagagctagcaggcccatagagtgggatttgaactcagggagtctgatttcagagcctgctcctttaaacactgagttttggagccaaacctggaatccagacttcatttctttatttaaacactgctgtctgtggtttaatctccaggacacagcaagcccacggacaacagaaaggaaaaccaaatgaaaaaagaacatctgcaatcgtgactaaacatttcttagagctgacaagataggaagaaaaagtaaaatgatgatgatcttagcttctcggtgttaaaggacattttaacacattgtcaggccaaagtaaaagattaccacctccctggaaacaagcgagcaaacacacatgggctctggaatccaacagatgtgggttcggttctctgctgccacacacaagctgcgtggccttggagtgcaatagctactcacaggcatgatgattacacattacagccttgagtttctcacctcaagagatccttccacctcagcctcccaagtagctgggattacaggtgcaagtcactctaccttgctgagtcacaataaagggcatatggtaaagggtagcaaaaacaacctcttgccatgtattttaaaacaagtgacagaagttactaatttttcttgtcctcttccttcctttccccccactccccaccccccattctaccccatgcctctggcttccaggaatcctgacctctgtgaagagatcctggcatttctggtccaacccaagccagagaaccattaagaaggggccttcattctggattctccgac

SEQ ID NO: 100702 - DNA, 1569 bp, Homo sapiens
gatgcccccaggcggcccaggttagatgcgtccctttggcttgtcagtgatgacatacaccttagctgcttagctggtgctggcctgaggcagggcaggaaatcagaatagcatttgcttctctgggcaaatgggaagttcagcggggcagcagaatcagtggcattccccctggtgcaggccggtgggtccactccaactccccctgagtgtagcagcacactttccatacaccaggttctttctacaatcctggtggaaaagccacagaaccttcttcctgcccttcttgagagttccccctctttctgggtcaagagctggagtggtggctccatcctctctgggccacttcggtctaggaactcatctttgcaggaaccaggagtcctgagcacactgaacacacctcagagggaggatccttgttgtggattttgcacctggctttggggcaggggtgaagtgaccaggcttagcttgtggagtttatgggccaccagggtttggggaaatcaccatcccgcggatgctgtgacctcccttctacggagatgcaggcagtgccacgagggaggaggggacctgcaaagctagaatctagggcactgtttcctccccatccttctctttgtagagaatagagacgtttgtcttgtctgtcttcaacctacttttccttttctcttttttgtttctcatcctctctgtgccacctctccacccaggaggccatgtagcatagtggaaaaagtccctgagggcggttaggagttctgggtgaccatcctggctcagctcctaactcaccatgtgacatcaggctatccccattccccctcttgggcctcagtttcccgacttgcaaaataagcagaaagaaccagatgctctccagggtctttttctactttgctatctcatgggtcttcattttctcttattttgttttctctggatcttttccatctgagggtacaggaagtaccaggacctgtttcagtttttgaatcctgcaagcacattccaagactggcctgaaactgcatgagcaacatcactcgaaataattttttttttcaaaagcaccttaacaaccaattgcgatgctgtcctgttcctttttactcacacccttctctcctttctcgtccccatgctcccccacctcagtgctccgtgctgtatgcgtgtgctctctgttcttgtatactcaatataagtgaaataaatgtgtttgatgctgaaccatacttccttggcacctctcctctctctctctctctctctctctctctctctctctctcactgtctctctctgactttggccactggtacaagttggcactgtgggaggggctaaaactgaagtggagacatcccaacttagaacatgtttatgcaacaaatatttggaactcaaggtggtccaggccttgggtgactctccaggcacaacacaaacaagacaaaagtccctgcccttcatgaacccacaggctagtggaggaaacagatgccaacacaggcaaacagtccgttacagagcactcagcactaggaagga

SEQ ID NO: 100703 - DNA, 1711 bp, Homo sapiens
cagtattctgtggtaaccagagacccagttacttgcccagggacagtggtgtctggatcatcaggtctctgtttgagatgggcatctgatagaaattgggaacataatattttttgagtgctactttgtgccaggtcttattctaaatgctatacatgtactatatccattcatgtaatctttgctacaaccctcaaataaggaaattgaggccttaatagattgagtaacttgcccaaggtcacacagctgctaagtggcagagctaagatttgaagctaggcagtttggctccagagcccatgctcttagccaccaagctgctcatagagattaaatcacagagccctgtggttaagcaaacaaaaataatctgcctggcaggctgaccctggaataagtactcatgaatttttcttttgtgggaggttccagaactgttcccacccaatggagaatctgttttatctttccgttgcccacattgtgaagcattagatgtgtggccttgggcaagcccttgaccttatctatgaaatgaggcaaataccatcttcctgatcgccttgtggagttgggctgagggttacatggtatagtgcagtatttcctgaccctggagcagaccatccacattagaatcacctggggagcttgttagagctacagatacgaaggccccatcatctctcctccaccagaacctctgagggtgaagcttgggtagctttacttttaacagactctcagtgattctgatgggcagccaggtttgaaatccacttggcataatatccatgaacacattttgtaaacttaaaatgccaggcaaatactgggaatacctcttctctagcagtctgattttatagaaatccaaagccacaggttggtttcccatggcttgaattcatagcggttcagcagacatctattgagtacctgttaggtgcaaaatctcctgccaggctctgcaggagtgacaaggataaaagctcatctgttgctgaggtccagtggaattcatggccttgtgaatagtgatggagagtgtcagctggtcctcctctccctcagaatcacttctcctctctgcacctttcaggtgaactccagtttgcttttgtgtgcttcctgctggggaatgtgtacgaggcatttgagcattggaagcggctcctgaacctcctgtgccggtcagaagcagccatgatgaagcaccacaccctctacatcaacctcatctccatcctgtaccaccagcttggtgagatccccgctgacttcttcgtagacattgtctcccaagacaacttcctcaccagcaccttacaggtgagcagtctttctgactgagctgatgcacatgtgggtcagaattgaggcaacagtatgtgttttgtttctcgctattcttccatgaccccaaaatttttaaatttcagtttcctagtcttgggatatttcctgcttttctctctcttactcaattgtaagtgcctctatgccagaaattttctctctgtaccaccctctccctacacctcgtccccagagtgcctaacactggggtacttggatttgaattcctcccactgctttggtttactcagcttaaaacagcgtttctttctccctgtagccatgaattgctacaacccagtaaagcagaattttgaagtttgttattcccagtgaaacatctgcagct

SEQ ID NO: 100704 - DNA, 3238 bp, Homo sapiens
atttttattcagtcatttaactcctctcagcttccatttccttaaaataggcattctgttgtatctttccagggtattgggaggatccagttggatgctctgtgaaacttctttgaaaacagtaaaatagtataagaaggaatcatgggtttgctattactcttagggagggactgggatccaggacaatctggaatggggtttcagatgtggaaaaaattaccattctgctcccctgcccatgtttgtattaaatgaaactgttcatgagagcatcagaataaggggttgatatccagaatatataaagaactcctacaactcaacaatgcaaaaacaacccaatttacaaatgggcaaggaagttgaatggacatttcaccaaagaagatatacaaatggccaatgtgcacatgaaaacatactcaatatccactgatcattagggaaatgcaaatccaaactgcagtaagatactacctcctacctattagaatggcatgatttaaacacacagagaaaataacaggcgttggccaggatgtggagaaatgagaacctttgtgcattgctggtgggaatataaaatggtacggcccctgtgaaaaactgtggcagttcatcagaatttaaacagggagttcccgtatgatccaacagctccactcctgggtttctgtgcaaaagaactgaaagcagagaccctaagagatatgtgtacacccatgttcatagcagcattattcacgatagccagaaggtaaaaacaacacaaataggcattgacagatgactagacaaacaaaatgtggtatctgcatacaacagaatattattcagccttcaaaagaaaggaaattctgacacatgctgcatcattaatgaaccttgaaggatattatgctaagtgaaataagccagttgcaaaaggacaaatgctgtatgattccacttagatgaggtgcctagagtagtcagattcatagagacagaaagtagaatgtgggttgccagggcctggtgggaggagggaagggggatagggtagtcgaattcacagagttggaaagtagaatgtgggttgccagggcctggagggaagagggaagggggagttgctgtttaatggctgcagagttttggccggggatgatggggtcattctgaagatggatggtggtgatggttgtacaacagtgtcagtgtacttaatgctactcaactgtacacttaaaatggctaaaataatatgtatattttgccacagtttaaaaaataaaaatatttttaaatggttgaaatggtagatcttatgtacagatgctcctcagcttcacatggggttatgtcttaataaactgtaaatcagatataccgtaagtaaaaaatgcattgattacacctaacgtccctaacattgtagctcagcctcacccacctcaaacgtgctcagaacactaacactagcctacagttgtgcaaaatcatttaacacaaagcctattttataaggaagtgttgaatatctcatgtaatttcttgaatactgtactgaaagaaacaattcaaagtgcagcttcttctgaatgtgtatcactttgcatcatcataaagtcgaagtgtcataaattgaatgtaagtcagggtccatctgtatattttaccacaattaaaaaaaaaatcaaagacagcttttaagggggatagaagcctcaaactggcagcctgtggcccatttagaagattagagcagcaattcagtcgtgttggcttggggcctgggactttatgggatccaggggcttataagcacccccaagcctttcttaggaccttagtaccgactggtgtagctactacctgttcctctgggttactgcccgggtgtccagtagaaccccccagggggtggagccagggtaatggcccccagcctctgcccagatagtaattttccattctagtcctgccctagcatctcagctgggtttggaccttctttcttggtttggggggagcatagcaggtgtcctgggcctatgccagcagcagctgatctacccgccccagaagagccgaacaccatgaggaaatttccacagctttctcgccccctgccctccgtcttctcaggagtgacttatcctctgttctctgtaggttttcttttcctctgcctgcagcattgccgtggatgccaccctgagaaagaaagctgaaaagttccaagctcacctgaccaagaagttccggtgggactttgctgcggaacctgaggactgtgccccggtggtggtggagctccctgagggcatcgagatgggctaactcggggagcgctctcagctgcgaggggccccttcccacagggctgcagtcctggcctctccatttacttcttcccatcctgggacctgccagggcagcaatctctccaggtcctgcaaagatggagccagaattccctttttcactgataaatatatttcttcattgccaaagaggctgtacccatcctgaaggcacatttgtgggttccccatcagccaggccttggtgctaacctggctgaatttcacacaggctcttacacacacacgctcctaggagacatctgcctacacggcaaccatatttcctctgaatgagaaggaattgaaccaaaagtccaagaaagaactgattgcttgttccataggagcttaggaaacaagaaaccctggattgcccagggggtctgagaagttggttggtgactttttttgcggttaaatgaagggtgatggggagatcagcccgaattgccgcctgcctcttgctaaataggagcagaggacttggcctgcagctccttgggagcccttgattgggaagagagtttcaagggaggcagctggattcaatctagcaggtggtcagcttcagctttctccatcgaaatcccattctcctgtccagaggcccagtgggtcatctcccaaggtgggtgtggaccctggcctcagaggccttgctggtgctgtcacctcccacctgttccattccgaggcctcacccagaagtgggaccctccccttcctcaccagagccaccgtgactgtttctgatgacctggagagtcaacaacaaccagaaaggtttctgcccagagcaggcttcttaaggcctttacgaagttttgtgccttccaagtgctgaagaagacctggtcagcctaaatcttcccagtcccgctgtg

SEQ ID NO: 100705 - DNA, 1443 bp, Homo sapiens
caagagattgagacaatcctgaccaacatggtgaaaccccgtctctactaaaaatacaaaaattagctgggtgtggtggcgcatgcctgtagtcccagctaatcaggaggctgaggcatgaacccgggaggtggaggttgcagtgagccgagattgcgccactgcactccagcctggccacagagtgagactccatctcaaaaaaaaaaaaaaaaaaaaaaaaaaaaaaaaacaaaaaggcttggatttaggtttctgatatagaatctgcgggctcccacaggtatttaaaagttgacccttgtgttattttaaatgttttgaaaacggaaactacatttatacaggataatatggctgggctgccaaaaaaaaaataggtctcttttgtttggggctgcagtgacatccactttaggtcttctcctgctcgtcccaacgggcagtcctctgtatgtctttgatgaataagaaatgtgaaaacagattaattattacttaatacttacagtatttttggaaggcagacgctttcggaacagaaccagtggtgttgctgatctcacgctcccttccagctctaacacatctacgtgtgaagctattggcaggacctggcctgatttaaaaaccctctcaaatgcaggcctcatggggtctatctcttatttgcaaggctggctcatcctattagcagaatcagcagaggtagcgactttctaaccccttccgctgtccccatgacaaaccctccctgctgtgagcctccctcgttcccatcgaatttctcaccacttgagcagtggaagagttccccactgttgactgcctcttaccattatctccccaccatcatccccttgtaaatattccttaatattcccagggcactgggacatgctggtctctccaactaatcagactttggcttgactgagatgctgtcccctgctgacatgggggctgaaaatgcagagtgaatgccacggtcaaggccagcactgagtcacgtccgccagattgaaatcaggaccatactcctttcaggggaaggctcacctgagctacccagtaatccgggagcccgtgtggtcctgcagctctgcagacgctgcttctcttttcagtcccccgctgactgtagatggcacttccccacctcagattcactggatctggcctggacaggctttgtttctgttagagctttctagacccttccatcttcagagcatccaaggtctccggtactggctagttatcccccaaccctgggctcctggacgggcctccctgctgagagatgggctgagtggtgggatgagagtgggaaataatgtcagctgctcactactggggggcagggtgcgcaggcattcatctggcactcagctccccctgtcccctgccccaccaccaccccacccacccccagcctgccag

SEQ ID NO: 100706 - DNA, 1037 bp, Homo sapiens
tgcaatttaaagggggtggcatttggacaaagatttaaaggtgagcaagtgagccatgtaggggtctagagagtgttcctgcagaacaaacggcgaaggcaaaggccctggggcaggagcctgtcttttgtattggaggagcatcagggggtcagggtcagtaggcaggagtggggtgaccaaagacgagaatactaggagaggaaaccagggaccaggttgtccagggcctataggctgttgtaagacctgtccattttatcagcgaaatgggcacacggttgagggtttcaagcagaagcgtgtcatgacctgacttccatgtttttgctttttttttttcgagatggggtctcactatgtggcccaggctggggtgcagtggctattcacaggcgctgtcactgcggcctacagccttaaactcccagagtcaagtgacccacctcagcctcctcagtagctgggactacaggcatgagctacacccagcagctgacttctgtttgtaacaggatcccaagctgctgtgtcggacacagactgcagggggtaagtaagggtggaagcagaaggaccgctaaggagctagtgtgacaatccaggtgagaggcagcagtgactcaggccacagtcgtgtcgggtgcaggctgtgctgtaccatgattcagaagatggatccaaagggatgtctttgatggtcccttctagcctgataggccccacttccccagggtcgcagatctgggcagaatgccaacttgttgggcccgcacccgcacaggagttacctcttgactgtcccatcatggggtgtgttgaaccttcctattctcagatgtccatggtacatttggggaggtggggcaatgaggaaggattgggagggctgtcacgggttttctgggtgatggggtggcagtggaggacttgaagtggctctgttgagaagcagtgggtgagtcagggccccctgatagactgtggttgcaccatcagcacctgtgcggatgttcttactgctgatgggcagtgag

SEQ ID NO: 100707 - DNA, 1015 bp, Homo sapiens
acctgcagtggtgaccacattttgatgccgaccttccagaggtttctccaagtctgtctgctgtggcagatagattcattcattcattcaacaaatatttgttgagtgcccacttgatgccagaccctgtggtgggcagaggggacatggctctgagtgaaagggactctcctggcccttagggaactcaaaaagcaggtaaaacagtgatgaggcccacggaggagggtcacaggaacatgggccctgactggagtcacaaaggcttcctggaggaggtgacacttgaactgagacctaagggatgaggagaagttgccccagcaaagaggagcagaagaaaacattccagcagagggaactgcaaatgtgcaaaccccggggtgtgaggaaggtggggttttcagggaagaggaaggaagatggtgaggctggagtgttgggatgtggagggaggacaggtgaagcactagaggatggcgggggccagacggtatggggccttctgcactgtggtcagggtttggggatttacataagagcgtgggttgtggcgccagaaggtctagatgcaaatccagctctgctgcttattaggggcttgacttcagcaagttacctaacttctctgtgcctcagtcccctcatctgtaaagtaggggcagtgatggtccctgcctcataagactgttgtgaggatgaagtgaggtaataaagtgcgtaggacagcacgtggcacacagcaagtgcttataaatggtagctcatataatgtcacagtcatctgtagatggagggcatctgtgcagatgactttgcaatagggtcacattagtcctgctcatctgcagctacttcttcccttgatgctggccatcctcctgagtcagtgactaccgagtattattctatttgaaatttctgagttgtagtatagcacgtgttgtagagtgtactaatcttaagcagatagtatagcttgatatatgtgtatatctcacccttgtaactacca

SEQ ID NO: 100708 - DNA, 1043 bp, Homo sapiens
actgtactccagcctggggaacagagtgagactctgtcaaaagaaaaacaaaaagagctctatagttctagctcttacatttaggtctttgatccattttgagttatttttttgtgcctggtgtgaggtaggggtcaaatttaattattttgcatgtgaacaataagttgtgctggcaccatttgttgaaaggactgttctttctccattgaatggtcttggcacccctttcgaaaatcaattaaccataaatgtgagatttgttgttgtagttgtttgtagatcctcagttctgttccattgatctatccttatgacagttccacattgacttgattattgtagctttgtaataagtttcgaaacttattatcttttaatatctgtagactctgtagtgatgtgacctgtttcattcctgatatttgtaatatgtgtctgatctttctttctcatttttaatttttgatcagactgggtacatatttttcaatggtattgatctttttgaaggacagcttttggtgtcactgattttttcttattgtttgttttctcttttattgatttgctgttctgatgctattttctttctcccacttagttcagggttaatttgtttttctttttctagttttgttttttttaaggtaaaagcagaggtcattaatcttaaagcttttgtcttcatgaatataggcatttagtgctataaagtttcctctaagtactgctttagcagcaccccacacattttgatatattatattttcatttttattcagttcatagtactttctagtttcccttttgcttccctctttgacccatgggttttttagaaatgtgttatctaatttccaaatatttgaggatttttcagggatctttctgttaattgtttttagtttaattccactgagattatataacatattttgcataactttaatcttctaaaatgtattgagacttgtttaatggcccagaatctggtccatcttggtaaatgttccatgaaaagagtatgtattctgttgtta

SEQ ID NO: 100709 - DNA, 1037 bp, Homo sapiens
aattttttttttttttcttaagacggagtctctctctattatccagatggaatacagtggcgcgatcttggctcactgcaacctccacctcctgggttcaagcaattcttctgcctcagcctcctgagtagctgcgactacaggcatgcgccaccatacccagctaatttatatatttttagtagagatggggtgtcaccatattggccaggctggtcttgaactcctgaccttgtgatctgcctgacttggtctcccaaagtgctgggattacaggtgtgagccatcgcgcccggcctaatttttgtatttttagcagagacggggcttcaccatgttgggcaggccggtcttgaacgcctgacctcaggtgacccacccacctcagtctcccaaattcctgggattacatgcgtgagtcaccatacctggccaaggttggaattttatctatgtttggcctggcaatttcagctccaggaaattttaagaaaacagttcagattgttggagccaaacagtcatgagtttgaacctggatgtaccacaggtcaccagttatgtgacctgggactagttactctacctttctgaagtttcatttgcttatctgtaaaattgggattttaatacttatatcatctggttgtagtgaggttaactgaagtaatgtgtgcaagatattcagcttagggccagacacagcgcaaaccttgtgcccctgggggatgtcttgatgacgtggatggaaaaaactgagtcagaagtggcctccaccaagcttttggtcctgacacttcctctctatccctgattatgtataggaaataaaaaggctgagccggacacagtggctcatgcctgtaatcccagcactttgggaggccgaggtgtggggatcacttgaggtcaggagttcgagaccagcctggccaacatggtgaaaccccatctctactaaaaatacaaaaattaggccaggtgcgatggctcacgcctgtaatcccagcactttggtaggccaagtcaggcggatc

SEQ ID NO: 100710 - DNA, 1008 bp, Homo sapiens
cagagctgcccaagcatcccctcttaggggcctggtctccctgcctgtaatgacttgttgactcccaggggttgcaaactcaggggcctgcaggacctggcagatcagatcagagaggaatattgtcgagtgaaggatgacaggttcctgtttctaagcgctgctcccaccctgtggccagggccctcctcccctgcctccagagggacagttccctttagagagtttgccaatccagtccatgcccatggaacacctatagtgtgttgccctgagctgcggggcacctccaccacgaacttcctccatttccatcctcgtaaccacctacgacatctttccatgcccatttggctgacgacgagacaaaggccacagagctgaagtttctggcctccagggtcacctaggagacaactgttgatgccccatcctgatttcctcccctgaccaatattggcagctccatcagaatcatgttcttccctaggacccttgcgcttgctgtttcctctgcctgagactctgcccccagacacctgcagggcttcccgcctgtgttaaatgtcgcctcctcaaagagccctcctctcacccttctccctgctctgttatgcctatggctgtgatcacaccctgacatgttgtacatttgtttgtttaatctgcatctttcccaccggacttcaagtcagcagccctgtgtgtttggcttacatcttatctccattccctaggatgatggctggcatgagtaccagcaggtgtttgtggatgagtgactctcctaactgtgggtgtgtgtgggactaaggggacaatgggggtccagcagtcccaggggcagggaaactgggaaactggagggcccagagggcagcccccatcagctgctccccactcctctggtttccttggctgccttgatgtgcccacccttgactgtggccttgcatccaaccagagtgggcgtcagtccagctttgctcccgcctgctgtggagacag

SEQ ID NO: 100711 - DNA, 1016 bp, Homo sapiens
aaaggggagtctgtttggggctggaggcctcagcccagtaggttcccagccttgaaggccaggcccagctcccaccaaggccccatgacagcctcggtactaccaatgctgatgaatgcctgggcgccagcagccaccccgctcagtggaatcagctgtgatttatgggattggggcccgcagggagcaactgtctgagctcagagaagcctcagaaaaatgggtcaatgcagggcagggctgggatggaggtaacctctgccaactggaaaggctcagagactggctcctctgccgcatagtcctggtggggaaactgaggcccatggaggggcctttgctggcagagaggccctctagtgggcagcagaaatcaaaagccagaactagtgtccagtactgggaggtaccttatagacttcagggtagccagggaaggcctctcagcagaggcgacatttgtgctaggccctgaggcatgagaaggagccatgctggtaggaggtgagctggtggtgggagcagcaagggcctgagcttggaggtgggacagaggctggcacgttcaggaaagaacaaggagggcagggcacctgagggactgagtgagggggaggggagagggagaggatgctagagaggagcggggactgctcagccctgaggggccttctggccctcagccccagtttgggccttttcctaagtgccctggaaagcctctgaagtgccggcagctcaccggctcacattttacaaagacccctctggcctctgtgaaagtgaattggagcagcatgtggaaggcagggagtctgaggagacggctgcagacatcgtggcaacgaacagctgtggcttggacccagggtggccaagaaagacccaagcctgggagctagaatttgtccctgggattctagtttaagccactcatctcctctgggtagtgaccaattttaatgtctcaaaactgtgatcccttgatgccccacaccagggcccaggaaccgtgt

SEQ ID NO: 100712 - DNA, 1063 bp, Homo sapiens
aaagaggagctggcctgagatcacattgctggggtgtgtagagcccagccgaccatggctccctacctgtccccaggtactcatcttcctttcttaatccccaacctccagctgctcttagaagtgttttccaggggaacctggtcttgggagcctggttgggatttcagaaccttggacagctcccagtggacctgggcctcggctgggcctagggccctgggtgtgaggtcctattcagtgggatgagaccctccacctcatcttggccgtgtggaggcagcaggactctggatgagccagcaaagctaagggtcccccctccttccctaggcacatcgagtccactggacccagaggctctttgggaggggaggagccagggccctacttccatgtctcagcacctccacacccctcctgggccttgccatcaccatggaaacaggtggaggatgcactcccaaagaccccacttcaggaacttgggcttgggaagctcaggactaaatttgaagggacctaaagtcactactgcctctgttttccctccagcccattatacaagatggggaaactgaggcctagagaaaggaaggctggattcttgacatgtcccagctggaaggttcccaggtatcagctggccccactgttccattatatagacgagagaactgaggcaaagggaccatcttcagagaggtgccccctgcaattggcttctggaggaatcgctttttttccttcctcacaggtgccataatttgaagcatgtgttgtttttgtgtttggtatctcttctcctgctggtggacaaaccaaggtcagggccatttgtttgtggtcatatcccagggtctggtacacactgtggcagatagagcgttggctctggggccagctggcctaagttcaaattccagcttctgccaaggctgtgagactttgggcaggtcacttctcttctctctcaggctcttcatctgtgaaatgggagaatgatggcatctgcatcccaggcttgttttgaagattgactcagatggtataagcctcaagc

SEQ ID NO: 100713 - DNA, 1039 bp, Homo sapiens
tccagtctgggattgagaatgctaaaagctacctggccctgagctatccagtagggtaaccatgagccacatgtggctattgaacttcaaattaaatttaaaaatcagttttgtattttatttaatttttattattattattttttgagacagagtctctgtcacccaggctggagtgcagtggcacgatctcggctcactgtaacctccgtctcccagattcaaggaattctcgtgcctcagcctcccaagtagctggaatttcaggcacatgccaccaccatgcctggctaatttttgtataaaaatcagtcttttaattgcactagtcacatttccaatgtgcagtagccacacgtggctcacggccaccctatgggagagtgcagattagagcatttccatcatggcacaaattcttttggacagcattcctccatgccttgaaaatccgtgcccatgtgttattttaagccctgatccttccgcaggggcttctgagacttagggagagatctggggctctggaatctgacccagagttcgaatccctgctcagccatttgcttgctgtgtagcctgaggcaaaggaacttccttctcctttctgaggctcggtgtcctcatttgtggcctacacaaagctgtgggttcaaggagaaagctaggtaaagggcttcccagttggtactgcgtgcaaggacctgctatgaggcacatagcggtgttcctagagctgtgagagactgcacaggctgttcctatcagaacattgccggaggggacgcctcccaggcccttgcagcttggagccactgcccaagcttctcaaaatgaggcaaggcatgctgggagttcatcgggcactgggggctgatctggagcagtggccagtgggtgtgactggcttggagcagttggtaggtgaggtcaaggctagaactggtaaggctgggaggaagggccagcccgctgaatcctgggtaggggcatgcgtcctctctgcataaaactccattgtctactagctgattagggg

SEQ ID NO: 100714 - DNA, 1047 bp, Homo sapiens
aataatccggcaactgcaaacatatgcattttgcaagtaagttcactgcacctttcttgattacagtgataaattagaaacgacccaattctctgtttgtgagagttggttaaataacttacatccggccaggcaatgccattttccgcagctatagaaacagtgctgtaaatctctatttgttgacatggaaacttgtccatggcgcattgttggggaaaaacaggaggttaaaaattgatgtatgttgtgtgacatccggatttggaatctttcctgagtgttaggatttgcagggaggaacaggatatctacttaggtatctactgatttttttttcacttttgttatgaaaaatatatataaacatatgcgtgctcctgcctagggagatgctcagaagagtagtcattaaactgttgatagtggcttcctctggatggtgagatataggtgagctctattttgatttttgtttctatcattcagagttttttcaagtaaggtgatggaaaacccaccccaaactagtttaaacaaaaaatagattcgattgacttgtaactgtaaagttcagaggtctgatggcttcaggctcagctggatccaggacctcagggccaccaggacttgatttctgtttctcaactctgggttgtttccatgttctcattaagctctcatgtacaggtaataagatttctgtccaaagaaataagcaagaattcttccctgattgctcaaacacaagtcccagaactaagtcttggccttgatttgtcaaatttgtgggatgtgcccacccctcaatcaattgctgttgctaaggagaatttggtgctctgattggcagcctgggcctgtgtaccatccaccaccagctgggggtggggtcaataccactggaacctcaagagtggagagtggggaaaagtggcttccccagaagtagatgtaggctatgacctaaagtagaccaaatggtagccaaacccagcaacccccacctcctgtaattatctgaattgcccaagatgcatggttttc

SEQ ID NO: 100715 - DNA, 1014 bp, Homo sapiens
gtggagcctcagttttctcctatgtaaagcagaggtgatgatagtgctgccccaggtgttgtggggaaggtgggaggagagcgtgtcaagggcaggttctccacggtgcctggcacataggaagtgcttggtgacgggaagtaattctggttaccacggtccaggggcagaggtgggtgagagagctggctggcactggagctccagatcgccacctgggcaactgtgtaaggacctggagtgtgttgcctggagaagggaaaccagagaggggcttggcttcctgcctttccatctctgttggaggaggcagggtctgggtctggcactcacaggaaaagctccagggaaggagatcccagcttaggctaggaaaaccttttggatacaaagaattctctgcagatgggctagcttgggtgataggtagcgatctcctcatcactgagagtattcaagcagcagctgcaccatagcttggcagagagtctgtagaggatttgtgattcagctgatgatctggaaggtcctttccagcccagagagtgtgtgatttcaggtccttccttctctgaaccttggtttcctcatctgtaatacaaggataacagcagcccccatcttagagttggttgcaaagtttaagtgaaatcatccaaataaagtgcttaacccagatttggcgcatagcaagcgctcggtgaatggtggctattattactgtggatgttgcgctagattcctgggcgtgtcacttccatctgagagcctcaggcgcctctgctcatcagggtgctcctgcctgcctgcccttcgggacccactttctgcccttctcattgccaccgtctctgtctccagctcccccttcaacctccctgggaggtggtaggatttccagacccttctgggccccttttagctcccacttgagcaagagttggcaggttggggcggcggatgccatccgcctcccatatgcttcctgctatttagaggaaaactctccccgcg

SEQ ID NO: 100716 - DNA, 1058 bp, Homo sapiens
ctggttaaaagccttagggtggatggtgcctggcacatgctaaatgcacaacaaatactagccactagtattatcatcatccttgttatcattattatttgggctagaacagcgcctagcacttaatatgggctcagtaaatgttaatgttttttcccttgtcctttcctacagctgtggctactcaaggaataccagggcatttcagacttagctcagattggtgtaaccagtggcagaaatgcaagagtaaggacaggcagaggctgccacatccagggtagaatgtagacaccagtccctccatacacacagacacacgcacatgcatgcacgcacgcacctgtgtcccaaaatctcatgcatcccatctgagtctggagttgccctctgcttggttttgatgggcgaaagggaagaggaaggcccggcaaggcctgggctctctgcaggcctggctggaggcagagtgcaggagacgcttgagtgtcagccacagtaggagggttcggggaagctggagtaattctatttggctggagtagaaagtgggtggtgggaaggcgtgggaagcaagtttgagcttcattcagcacctcctgagtgagcccaagtaccgggcctcgtgccagggactggggaagtggttggaaaagatgggcacgcttcctgccctcaacaagctctggttctgggacagggaggcagtggcaaacatgctagcagtaagctagcgacactctgggtgatgctcaaatagccccaggtgccaagagagagggggccacaggacagtggtagtgagtaccttccagagacagggtggtcagagaggccctctttgtcctctcaagcacacactggagctggccctgcaaatgctggatgggtaaagtggcgggaggcagaggaggcagcgagaacaaaggttgggaaggtggccgaagccagaccctggaggcctcgagggccaggcccatgggagatgctcttgagaaagactattctggtggtgggtgcgggatcctgtcagggggaagagatggaaccaggagacc

SEQ ID NO: 100717 - DNA, 1051 bp, Homo sapiens
gctgcagtgagctgagatcacaccactgcatccagcctgggtgacagtgagaccctgtctcaaaaaaagtaaaaataatttaaaaaataataattagccaggcatggtggcacattcctgtagtcccagctacttgggaggctgaggcagaaggatcacttgagcccaagaattcgaggttacagtaagttatgatcatgccactacactccagcctggatgagagagcaagaccctgtctgcattaaagagagagagagagagagagagagagagagagagagagagagagagagagagagagagagagagagagagaatctcagaggcaggcaggcaagccagggccagtgcagtgattcagatgaaacatcaagggcccaggcctctgacacccttagcatgcatctttcattctcatggctacaaaatggctgctcctctgccatgtgctgcatctgaattctagacaggaaaaggagagtaaagcctgcatgcttcgcgagtttccttttcctaccagggaaacaaagacttcctggaagccccactttgtggatttttgcctacttctcttttgccagatttggacacatggacaccctagctgcaagggaagctgatgaagtgaatatttctaactgagcccttctgttaggaaaaagggaagaatagctagcaggatagctagcatgatccaccttaaagtacccacctcacagggaaagattctaagagatatttaatgtacataaaataatcggcaacctttcaataaatggtggctgcctttattctactactctacctacatgtattcattcattcattcagcaagcaagcaagcatatattgtgttttgggcactgaacacagtactgcacatgacagtgacagtccctgcccctttggcactcacaacagatagggaagatgggcaaggaaacaaattcactctacttcaatcagtgtcaaaacagaggatttatttttgtctgtgttttcttaccactgtggtttctccacctaaagcaatggctgggacacacta

SEQ ID NO: 100718 - DNA, 1024 bp, Homo sapiens
tgatttcatttttctatagctagcctattgtcccagcagcattaattgaacaccctgtccttttctcactgatttgaaataccatctctgttttatgtttaagcgcccatgtatttatggatctgtttctgggaactctgttctgtttcattgatctctttgtctatctctttgtctatttcggttctacactaatcactgtatctcatcatttttcaacagggacatcttggcatttggggtacaacaatccttccttgggtgggactgtcctgctcattataagttcttgagcacccgtcatccagtccttggcactcagtagaaccctcccctgagtgagtgttatgaagaaaaataccctgagcgagtgttatgaagaaaaacacgtttgcaaagtcgccctaggagggcagtcccttggctattgagaactgccacagatagctgtattatgtggcttgatatctggtaggacaagcctccccgtccccacttcttgattcttcctttgtatgttctcttcgcactctgctttgctgccatcagtggaatccatagcatgacactgtcaggcatctctggagatgggactcccatcaggcaaggcagcccactcctttgtgtgtgtctgtctggggcctgattgttagaaagtgctgtcttacactgagctgaagttggcctccctgtgtcccacttcctccccagctcctggagcccccagaacacacgtccctcccccgtggcccacccttcattgacctcagagagcagacatttcccctccacctcaactcttttctctagactcccaaactcaataaccccggttccctctgatgtgcgtcaaagacttggcttagtggcaggcagcgtggtatgtttgaacttgagtcagacacattgagttagaattcctgctcacttacctattagctgtgtgactctgggaaaggcagttaacctctctgtgcctcatttgttaaattggggtaatagaccctctacctcagagggttga

SEQ ID NO: 100719 - DNA, 1087 bp, Homo sapiens
tggctgggcgtggtgacgtgtgcctttaatcccagctgtttgggaggctgaggcaggagaatcgcttgaacctgggaagcagaggttgcagtgagccgagatcgcacaactgtactatggtctgggtgacagagtgagactgtctcaaaaaaaaaaaaaaagagagaataggttttagtccaagggccatgggagtctttgaaaggatctgaacagcagtcatctgagtgagagatagtggggactcggcctggggcagggctgtggaggtggtaggtggaggaactctggggatatgtggaagggagacttgtttttacagtttgtgctgctgaatgggatgctggggtagtgaaagaggagtcaagggtacttcccggtttctgacctgaacaagcaggaggatgatgttgtcatgagtagaatcggggcagactgtgggcggagcaggtcggggcgggtgagagatcccgtgttctatcttggacctgtcagacatccagggcaagatgtcaaggaggcagttagagatctgagtctggcgtctgagagacagattgggcggaagatgtaaattcaggagttgtcagataggtggtgtttaaggccatgcgtcaggatgagatcagcagaggagagggtgtgttagagcaaggcggagagcacccgggtcctctagcatttagacgtcagaggagagaagccagcaagagccggagcaggtatgagagatgtgggttgagcacgggaagggtgcccaaagacacagccatggcgcaacacagccagccactctctaccttcaccccaccccaggcagcagcaaggccctggaggcccccacagaatccatccttccccttccacacatcgtcccttcagaggtctaaggcagagaatgtgtcctccatggactgctatgtacacccccagaatgttcggccattccacctcacttcatttctaagccttcatcatctaactcagcattgagcaggaccacccctcccttcacttagactctctacctctgttaatgcaaccttagacagaagtaggctttctggtagtaacaaatatacaagat

SEQ ID NO: 100720 - DNA, 1108 bp, Homo sapiens
gctgcccatccaccgtgatggcttcagcaccctccaatttccccgtggcgaggccaaggcccgtggtgagagccctggccgcatccgccacctggtccactcagtccagcggcttttcttcaccaaggcaccctcactggagggcacagcgggcaaggtcggtggcaatggcagcaagaagggtggcatggaggacggcaagggccggagggccaaaagcaaggagcgggccaaggctggggagcccaaacggcgcagccgctccaacatctcaggctggtggagctccgatgacaacttggacggcgaggccggcgccttccgcagcagtggcccagcctctgggctgatgacactaggccgccaggcagaacgcagccagccacgctacttcatgcacgcctacaacaccatcagtgggcacatgctcaaaaccaccaagaacaacactactgagctgactgccccaccacccccgcccgcacccccagccacctgccccagccttggggtgggcactgacaccaactacgtcaaacggggctcctggtccactctgaccctcagccacgcccacgaggtctgccagaagacctcagccaccttggataagagcctgctcaagtccaaatcctgccaccagggtctagcctaccattacctgcaggtgggtctctggcagggtcaggggtgggatgagggctctggggacggcaccagttttgaggcctagacgtaccacagattcacttggaaagtcacttcattctgggcctctgtggctcagctataaaatgggtggcctagtggtacctgctaatcagggagtccttccactggtcatgctctcaacagagattaattagggcctttctgagcccagccctgagcagggactaaaatatgttcctgccctttagaagacaaatctggaagctgtgccatcccaaccccctcacagaaccaattgcatgacattctaattgccagcctctccctgccacccccatcagactgacagttttttgaggacagggatcacatctgatgcagccatgtgtccccaaggcccaggacaggatctggcatgcaggaagtgctcaggaaa

SEQ ID NO: 100721 - DNA, 1039 bp, Homo sapiens
ggagtgcaatggcaggatcctggctcactgcaacctccgcctcctgggttccagtgattctcctgcctcagcctcctgagtagctgggattataggtgcgagccaccaagactgaccaatttttgtgtttttagtagagatggggttttatcatgttggccaggctggtctcgaattcctgacctcaggtgagcacctgcctcagcctcccaaagtgctgggattactgacgtgagccactgcacccagccatgagatgcattttgaacgagatgatcttcggggtctaacaaagcgctgacttcttatcatcttatatgaaattccagaaacagtgagactattttctttttcaataggaggaaactgaaatccaggcagtatgtgatatatttagggctcttgtggttctgaaactgcttccttggtttagaagcattagggagggtgatgtgtgaccgggcttcctctcaaaatggtatagttgggtctgatcatgtaacaatgccgcagaaacaccatgagagggtagccctgtgggccctggagtctgtgctgcctgcttgggtgacaggaggtgagtgggtggcttagcaacagtttctgagcagtgatgtacaaggccatgttcccaagggacagtggggatagtggggctggactagcaagtggcttgtaggcagaatgcactggccctaggctgggcagtctgctgagggtttatgggaaggctgggtggggctggagtgggagtcctggacattaccttccctttgtggaaagtgggcctctgacacagagggcatggagaatggtgcagtacctgtgtagacatggcccttgggcagtgtgcatgtgtatgctatagagagtgggaatgctgtgtacactgaatgagtgggcttggacatctgtggtgacatgtgcagtctggtgaggggtatgctgtgtgcatgtggaggcggggacagtgcaaggtagatacacgttgagatgtgtgtccacagtgcagtagttgctggcgcgaatgtccagaggg

SEQ ID NO: 100722 - DNA, 1097 bp, Homo sapiens
tcaagtttccttgcaattgaccctgaatcccccaccccagccccagccctggtccttccataaccctcaccctctctttcctgcagatttttggacaggcctccctgatcccccagttgtttggccatgagcagcaggtcagtatgtttgcccttctcttccaccccaatcccagagtgtaggcctgggccttaggcctgccctctgagtggtcccagcacccggcccaggctggtacaagcagagccatcaccaggaaagccacttccagtggatggagttgagggtcacattggtgtcctgactctccactccctacccttattgcttcacctctatgtgcttcagtttcctccttttgaaaatggggaagaatgagctaggtgctctggatggggcaagaaacaactccaggactcctgccctcctctctcctcccagaaagcctgggtcaggcctggggagactgagttggacaggtcaggggctgggggctgatgatattagcttccaggtcccagcccccagatcccttggcttttctcctttctggagcgccaggaggacatttaaagatgttggggtgttggagtgtgtgtggagactttccaacttcacacaggttggtgaggttgtgctgctcatggcactgtggctgccctgagggcaccacctcctagacattcctatcctgcccctggaagtggccctctcctccctcccaggccaaagaccaaaaaccaggggcaggaaaggtactctgagatcaaccccactttgtagccaggagtgggtaagggacttgtgcaaggtcacacatcccacaggggcaaaactaggaccagacctccagctcctgattccagccgtggatgccccatgtgtccctctcccccatgtcacagaagctgtgtgttcctcctgaacacatgattcaagaagttatttaaagagcccacagtgggccaagcgacctcttcctcatccacctttaataggcgagtggtaaggatgtgatgcgttaacatacaaagcccccaggacagtgccccctacacagtaaatcctcagtgatacacataccagcagcgctgacc

SEQ ID NO: 100723 - DNA, 2382 bp, Homo sapiens
gccgggccacatgccaagcgggctgcgcgcgcccctgcccggcccgggagtccctgacgacgcgcgcgcggctgacgcggggggcggggaggggcggggcaggtgcgggactttaacccggagccccgcccctcgggcgtacaaaaccggagcctcgggccgggctgcgtgagggaggagggtgagtgcccgccgctggccgccgccgccgccgccagtccgtccgtctgtccggtccacgtcgtcgctgccgcctcctcagcccggacgcccggggcccgcccagcgccgcccggagcagccgcggccccgcgaggagacgggggccgccccgcccggcccggcccggccctgccccgcccccgccctcgccctcctcctcctcctcctcctccccgtctgtccgtccgtccgtccgtccgcccgcccgcccgcccgcccgcgcttccgtcctgtccagccgccagtcctccagcccgtgtccccgctccgcccgctttgtctctccccggctcgctgtctctttgtctctgccctcgcgctcctccgcagcccctccctcgctccccatctcgggtccccttctcagagcgctcttcagccctcagagccgccctttctgggcgaccccactcttcgggactccccctcagagcgcccccagatcttttggggttccccttgagaacaccttccactctccccaagggctccccgtgagtttcttgcacatcctttgggggttctgcaccccaagtcgctggggtctcgcctcctctgaacccccattgcccctgggctttccctcttctgggtgttccccatatccactgggagctcctaggtcccaagttggggtctttctccttgggaccccccaatatgtcctcagctccctgacttcaggagctcctctctgctttcccctggtttgtcccctgtcgctgtctctccttgttctctctcaggtctccgagcacccccacttctcgggatcggggtcccctgctttgctctccctgcccctctgtgcccccacatctgtctcggtggtctcgccactctgtgcctcttgcgctgaaggcccccctttgagcctgcttctttgcctggggcccttggcccccccttgctttttcagccctagccccctgtctccccttctctctgctccttgtctccctctccctttttctgtctttgccgggtctctgggtctctgacccccatccggccctcatggctttgtgtctggagctcttgaagcaatgtgagtggtggggtgtccgggtcgggccggagttggcccgcaggctggccgcggccgaggctccatggggttggcgctggggcaagggctggcgctagggcaagggggctctgaggcctcccacaaagggggaaaggagggaggggccaggctgtctggcggaggagggagtggggggccttcctgctctgaggcttctgctttagttgcttgagtgtgtggagggcaccacgggctgggcatccctgcccacttggccccgcatggcctggcactttgtgatcgcttgtgggcaggccgggctattttggagccggcaggatgtgatatcatttggacgtttatttagccccggctgggtgtgggggctgcgttcttgccagcttgagtaatgaaattttgcaggggggtgggggtggggtcagcctcctaggcagctaggctgtggggttcatggccagaactttgcagaacaccagagtgggcaagtgaacaaaggtctgtgctgcctggatcttgctgagattcgattcaggatgagcagggagaggacttcttaatctgaccaccctgaggattgactttggtagtctaacctctggggccttggttctgccagcttcaaggtgttgtaaccttgagcgagacccttgtcctctctgtcagtttccctatctgtaaaaagtggataattgtgctggcctcacactgttgtcatgatgatcaaatgaaacatctgtagacacgctttgtgaactgtcagcctgtctttaaacagccccatcgagggagaggagcttgcccaagggtaaacagctggctggctcctgccagagctgggacagggatccaggactaggacattacagtccagggctctttaacctcctccccactacctggttattcgagaatgcacctgcccttccaatagagcagggagacggctgtttcttaattcaggccccaatcctgcttgttctttgttagtccgtttgtaaagatagatgggcgtgcccatcgggatgtctgtgcagggggacagttggattttccatgttccatcccattgttgtttaagggtgggccctgcttggacagtggcacttgga

SEQ ID NO: 100724 - DNA, 1384 bp, Homo sapiens
gtctctctctctctctctctgtctctctcctctctctctctctctgtctctgtctctctctctctctctctcctctctctctctctctctctctctctctctctctctctctctctctcccccccccttctctcggccctgccttcctagccctgggccaggctctgagaggatggggattaatagacagacaaggcgtctctgccctgaggaacttatggtctgacaagaagacaagcctacaattatgagagactgtgtgacactctgtaattaagcgtctgctgaggaaaagcattgtctgagaaggaagaagtgagcatgagccagaggaaacaagagccctttgaggggagctggatttgcagaggcagagggtggtgccgacattccagggaggtgggtgcagagggcatggctggatgataagtgtgcatttagggaaacagcagtatgctagttttgctgaggcatcagggctctggctggaaaatctgggtggagccaggaggttgtaggcagtgttaaacagctgaaaagcagaggcactggggaggcatggaaggttttagagcagaggtagcacaactggaagactttccagaggatgaatcaggctgggtaaattggaatgaataaaaatcacaacagggaggaggctttgcaggcatccagatgacacaagagggtgaggtttgggtggggcccatgggagtgggaagagccaattggggtagcagaggatgctgtgctcccttaggaaagcttggccagcgctctgatgggccagaagggaaaatgttgggtgttgctggtttggggcaggaagtagcagtctgagcacatttcttgtacacctgctgtttgcctggctctgcgccaggggctccacaagggcgctcatgaaatctgtacaataagccagaggcagatggacttcccatccctgttttgcagataaggaaaaggtagctcaggcccaaggccaactgtctccaaaccgtgtctcttcccacagctcagctctgcttcttggaaagggaactcctgcttttagggtcccaaggggctgagccttctttccctttaattaggagcaagcacatttatcctaaaagcccacaaatcttgctttctaaggatcctgaaggtcagggtgccagtttagaattccttaaaggtggaagagtcagaggagctagggaccctcacacaagcagttttacacactggactgtgagaaggttccggagttgtgctgtgtatatgtccagtctgatagtaggcatgtccaccactgggtctgttggaattctcagccagcccccaccagagaggggcccagccaacgcaatcagtcacccacaaaggcgggaagggactt

SEQ ID NO: 100725 - DNA, 1081 bp, Homo sapiens
ctttttcattctgaaaatgtatatattttaaaaggcaccccgccttcacccccagattcaaatttgtttcctccatgagctcctctcgtgctgcacctgcttagcaacggtgaagccagtgagctcattcaaatatttactgaccttgccgggcgcgatggctcatgcctgtaatcccagcattttgggagtccaaggcaggcagatcacaaagtcaggagttcgagacctctactcgacctggccaatatggtgaaaccccgtctctactaaaaatacaaaaattagccgggcgtggtggtgggtgtctgtagtcccagctactcaggaggctgaggcagaagaatcacttgaacctgggaggcggaggttgcagtgagccgagattgcacctctgcactccagcctgggtgacagagcaagactccatctcaaaaataaataaataaataaataaataaactgacctcctgaatcccagtgctggcttggctgctatactcttgcccttcactgaacctcagttttcctcatctgaatagttgggagactcattcctgcctttctcatgtccctggctatttggtaaaccagccagtaggaagacatcgtgaaatgtattaaagtggtcttagctagacagagtgggcatgccagggtcagcagagattctgaagtctagaccagttccctgggtgggccgttgtcagtcctagcagatggccaggtcagccctcaggctggaaattttagggcagctattggtaggtgtctcctcttgctgtgctgagatacggtcaagatcatacttaggcttttgttggaagaacatacaagacgagagaaaaaaaaagatcatacttaggggctcccggaatttgctctgccctaggttgctgagacctctagaacctgtgcaggctaaaggaactcagtcggtagatccgagagaggtggtcagggagaccaggagcatgtctacactgccagcagacttttgcctcctcccccaagccagcaggatggcccaaaaaggctcccccagcagatcatctttgcagctccttttttagctccagtg

SEQ ID NO: 100726 - DNA, 1050 bp, Homo sapiens
agcctggctggggtagggactgggtggggccccgcagggagaggcgccaggctacagacaggcagtggcgtcctggcctggcccactgctgtctgggagacagccagtaggatgggttctctggtgaagtcagccccatgtgggtgtggtcccagccgggctccaggtaggccttttaaactcccatccttccggggcagagctgagctggagctgggcttctgtcagcttgggaaagaaatcctggcttcccaaacccagctttcacagagcatttcactttccctgaaggtaagagccagtgccctgtctttaccatgaaaactcttaaacttttggtcactgtgggcacttacttacctcctatagtttctttttgggacccagatgtcctgaaagccaaaggatggaggagctggaactgctggcttctcaccattttatgtcgctgagttgttgggtggcctcaggcaagacccttcccttctctggcctgcagattcctcatttgtttgtcagcaggagggagctccttctatctctgctattaagttgaatttggttcctggaagctggtgagagagtatcgtaacacccagtttggttggcctgtgtctttcagatattaactgttacctgattagctggggtctcaagttcctatttcctgtgcttttactaaggaaattctcagacttatcaatgcaaatatggtatcaattttgttgctagaccaaatatgattttttaaaatagagatttcccactatgctacccacgttggtctcaaactcctgggcccaagcagtctgcccgccttggcctcccaaagtgctgggattacaggtgtgagctaccatgcctggccagcaaatacgatttttatgtacctctcttctcctttgcacagtcacagggtccctaagtacagagctggagtccagtccctaagggcacctactgagcatacagtaggtgatcaggaagcccacaccccagaggtcatatgtacctatagttaagagcatctctgtagagttggactgctgg

SEQ ID NO: 100727 - DNA, 2287 bp, Homo sapiens
cctgcaaaatagagatgctaataatacctgactgtagtccagcatgaggacaacagaaacttgtgcaaagcactaagcacagtgcctggtacagaggaagcatttgagaagtattagctgctgctgttactgacatccagggggaaagagaagacttgaaatagccaaaaactgtccatgtcccatgcctggaaagatgtagatggattgggtgggctgtttggagtggagtcagttatttgatggctgtttgccaagtgcagggctcttatggggaaaggtggcctgggttaggggagaggcgaatgctctgcgtgagggaaggggaagaagggcagactgtccagggttcaggaaacccaagatcaggctggagaatctatccagggctgtcagaatctgccaggtatgtggagctagagttctctctgcagggtcatcactccatctgggcagtttcctactgggggctgtgacgaggacctattattgactgcggagaataggttggatagttctagcctctcctggaactttcttgccttccccctggcgtggctgttgccctgcacagggatgcagtaataggagttgtctgcctgcctgtggagtgcagaccaaggtggggtggggaagaggggcctgtctgacatcacccagtaaaggtagggctgccaccgttgctgctgtcccagcagtttctttaaaagaggcacatgcagcagtgtgtgggaagggtggggggtggagggcagggattgggctcctccctccttcctaccccacctccacttctctttccaaacaatcagccattcatttacttgagtgccaagtgctgtgccaggagccagggagagactagggaacaagattgacttccctccagcttggagtccccacccaagcaggtaacaaataaacaggatactgtctaatctgttagtgatgagaaccctaaaggaaacaagtagatgctgagaaattggggaaggcatctcagggaaagtgactgctggatgggaaggaggcagtcaagggccgactgggaggtgtcacgaccctgaggtgggggtatcttgagggaacaggagaggtaggggttacatctggagtagtctcaaggtcaggcaggaccctgggggtctcggtgaacctaaagaggtgtgataatgaatgtactgcaagtgaatatgtttatatgtttcttcctttttttttgagatggagtcccgctctgtcacccaggctggaatgtagtgacatgatcttgactcactgtagcctcgcctgccgggttcaagtgattcccctgcctcagcctcctgagtagctgggattacaggcgcctgccaccatgcctggctaatttttgtatttttagtagagatgggattttgccatgttgaccaggctggtctcgaactcctgaccttgtgatccgcccgcctcggcctcccaaagtgctgggattacaggcgtgagccaccaagcccggctctccatacaatctcttacccaattcctgtccaagattctatgatactaacacatccattactgcctttgtacacctctgatctttattttctgtttggattatttttcttttatttatatttgctgaatttcagtaaagagattgtaggcagattattaaccagcccttgctcacaaatacagttaactcaaatcagaaaatttttaaaaatgcttagttttaaatattttatttgtgacttttaggtttggaatgagtaaaatcaaagcagtttgataactgctggggctcattcttcagtgggccgctcactagtccatttttaacactgtcttaatgaccatcttaaccttttttttgtttgttttgagacagagtctcactctgtcgcccaggctggagtgcagtggcgcagtttcggctcactgcaaccttcgcctcccgggttcaagcaattctcgtgcctcagcctcccgagtagctggattgcaggcacgcgccaccacacctggttaatttttgtatttttagtagagacagggtttcaccatgttggccaggctggtctcaaactcctgagctcaggtgatccacctgccttggcctcccaaagtgctgggattacacacgcgcccggcccttcttaaccatttttaagtgtgcagttcattggcactaagtacattcccattgttgtatagccatcatcactatccgtctctttaactcttcatcttcccaaactgaaactccgtgcctattaaacactaactccccattaccccc

SEQ ID NO: 100728 - DNA, 1001 bp, Homo sapiens
tacgctaagcacaacttttggtgcatatgtgtcacacgccccgtttgtgacaagtccgtcccagacacactaatcacttgttgaatcagtcctgggctttctcatgcaactccatatggctgccacagtgcccagtcagtggaggaggcttttcattgtcatctccacatttctatgggtttcttgaggacaaggactactcattctgggtccctagtggctggcactgtgcatggctttccctctgtaaataagcatttgctggaatggggtggagttgagacttctccctgtgtggatcaccttctgtcttcaggttccagtttgacgatatcccttgcctggaattacctatgataccctcagtattatccagagttcagtggggactgcgccctctctggtcctgtgactttcctgtaacagtgcatcctcagtgtctgtggtcagctgacgtcactaagccatttttccacatatgccgcttttcttgtgtaattgtcttacttgggttcccaaactcagggtcttaatataagctctgagggaaaaaaaatccctctgtttttctgtgtctctgtcccccgggtgtgcctggcacagagacaggcagcattacctctgctgacctgaagtgaactcacggttttccccattcagtcctgcactattcgtctcatcccaactctaggctgccgagggatcttggctcctactcctgtcacctgatatgccacctgccactccaggcccagtgaatgagcttgttaacactgcctttctattctgggattcgcttggtcattcagaatggtgaaagaggccagcaatcgaggtgcacagggcctggcagcgtctggctttgcacactggacacacagcctatgacagttggtgaaagccgggcttttgtgacctatcgccagggtttgaagtcagccctccattgacatcagccctccagaagtgagggtagtttttttgaggctctttccaagtaa

SEQ ID NO: 100729 - DNA, 1044 bp, Homo sapiens
tgcaccctctgcctcccaggttcaagtgattctcccacctcagcctcccaaatagctgggactacaggcatccaccaccacacccagctaatttttgtattttcagtagagacggggttttgctatgttggccaggctggtctcctgacctcaagtgatctgcccgcctcagcctcccaaagtgctgggattacaggcgtgagccactgtgcccagctgaaagattctttacttaatatactattgattcattaacattgaactcatggccagcagcactatgactcatgcatggatgaagcgtacctaacacttttctccataagggacatcacagccttcttgcactgagaacactgggcagtgcttcagcattatgtaggtgccattttaaacagtgaagtcaccaacagaaagcccacaaatgggaaaagtatagcactaaatagacctgcgaaaggacacttgtttacagtatgagagctgcagtgagaaggtggagtgtcaccttgttccacctcagctggggttgtgtgtagcgggcacatgtctgcgagccccttaagtgttggttttgcaagtaaattcaagtgagtaggtgattttgcacatatagaattagtaagtaggatcagctgtatatgaagtacctgctcaggcctggccatggttagcactcagtaaggtcagctgttagcatcagaatcattaccgaagggagtgcatcatagcttctgtaccaggctccaaggacagagctagctccctgagctttatggctttgtcttcatcagcctgacacctttttaacttcttggcttctgtggatgtttgggtccgaggtagatgcagatccttgaggccctgaatgcccccactgaagggtttgtttgttccaagtctacaaaccattgaatggtttcaggttgtggtgccactgaatagtttcaaacagtgacatgattggattcctcaaatggctggggtggaagagggacaagaggtcggaaggccagggggcatctgtggtagtctcagggaggc

SEQ ID NO: 100730 - DNA, 1474 bp, Homo sapiens
gctggagtgcagtggcgcaatcctggctcactgcaacctttgcctcccgggttcaagcaattctcttgcctcagcctccctagtagctggaattacaggtctacaccaccacacccggctattttttgtatttttagtagagatgggttaccctgtgttggccaggctggtctcgaactcctgacctcagatgatccacccacctcggcctctcaaaacgttggaattacaggtgtgagcctccgcgcccggccagtgttgctatttcttaaggcacagtgagggaggtggctctccgactgaaacagtgggaaaggagagggtcacatggactgtcaacagagaagtggctttgagaaggcaatgtgtccctgatcctgacctagctgcttggaattctcttcccagctgcttctgccttgggagaaagaagcagaggaaaggagggaaggatttgaggctgggtgggtgggagtctttgagctgtttttatcatagcatacagatgagttgcccaatttagctgtgtggtttgacaagttacttgctggctgggagagggagtgggatcttaaccagccctcagcccttccactaatgagccttttccctagcttggcagtaccagcaaagggagttaagggagtctgcctttctctggggtcagcttcatccattcatgggggccttgagcccggccccactgtctttgctgtaaagcctgagccatggcttccaggttgtctgtggccccagggcacctgttcctcttgaggagtgtagaccgcctctcctttgccccctcaggcacctgggagccagcaggcatgaggcccgtgttaggcctcaggaccaagttcagcctggcctccaagacacatgcagggggctagcttcttgaggttgctgtgtcctccgcatccctcgggaaatggagtcacagccactcctgagtatttgaagctctgtttggccagcttataacctttacaataaaaaacaaaatgcaggccgggcacggtggctcacgcctgtaatcccagcactttgggaggccaaggtgggcggatcacgaggtcaagagttcaagaccagcctgaccaacatggtgaaaccccatctctactaaaaaaaaaaaaaaaaaaaaatacaaaaattagccaggcatggtggtgcatgcctgtaatcccagctactcaggaggctgaggcctgggaagtggaggatgcagtgagccaagatcgcaccactgcactccagcctgggcgacagaacaagactctgtctcaaaaaaaaaaaaaatgcagaaacaaattcattctgacctgataaatacagtttggaggataaaatcttggggtagaagacagaaataatgagataaaggaagcttctctagaagaagcaaggacttaggtgctgcgaggtagggaggctgggctagatacctggggctgggagcaggctgcacgga

SEQ ID NO: 100731 - DNA, 1018 bp, Homo sapiens
ctcacacctataatcccagcattttgggagactgaggcaggaggatcccttgagtccaggagttcgagactaacctggcaacatagtgagacctcatctctaccaaaagtaaaaaagtggttttttttttttgttcggtttttttttttttttttttttttttgagacggaatttcgctcttattgcctaggctggagtgcagtggcgtaatcttggctcactgcaacctccgcctcccaagtttaagcaattctcctgcctcagcctcctgatagctaggattacaggcgtgtaccaccatgcccagctgcatgttttatttttataagaaaatgccaatgtattttccatgacagtagtatcactttttctccacattctcaatagcatttgatgttgtcactttttagccattctgataggttatgtgatggtatctcatagtggcagatggatggtttctacagtcctttgtccacagctcctgtgatactgggccttgttttgtgagttgcctctgggctatcaccatcaccatgattgtagccccttgaaggcacagtttatctggctcatgggcccagaccagggtaggggcttgtttcagtcctcacagggcaacaggcagttggagttaaggtgctgagaaaggcactagatccaacgtcaccctcccagcaaacagctactgttggaaaagcactttctattgccaacagagttctcatcgtctgagaagcaagcagtgggcctttggtgttctgggctcctgctgtgggtcagcccctggctggggtcagggtgagattcagagatggttcaggttcctacccatggcaggtcctggctctgggaatctcagtggagaaagtggagaacagggagttggaccagtggagaacagggaggcagaccactgtacgggtttcacataacgagaaagtgttggggtgggaatggcaagatagggaaaggggttagctggaccctgaaggatgtgtgtttttttgtttgttc

SEQ ID NO: 100732 - DNA, 1115 bp, Homo sapiens
ctcaagactttgtctcgaatgagggtgggtagggcctgtgtgtgtctgtcttggtcattgcagtcttgaccctcgttctccctgctccagaaatccttgcggacggaatggctaagcccagagctagggccaagtcaggcagggcttctgcattggaaggggcttgagagggttgggggcttcaccatctcacctctcccctgcccttctctcatccatctgcaggttcatcatgcctagtggcgtataagaagaccccgccaccggtccctccacgcaccacttcaaagccgttcatctcagtcacagtccagagcagtactgagtctgcccaggacacctacctggacagccaggaccacaagagcgaggtgactagccagtcgggcctgagcaactcgtcggacagcctggacagcagtacccgaccgcccagcgtgacacggggtggagtcgccccagcccctgaggccccagagccacccccaaaacatgcagctctgaaaagtgaacaagggacgctgaccagctctgagtcccaccccgaggccgcccccaaaaggaaactgtcatcgataggaatacaagtaggggctccttttgcactctgtgtcctcagcccactccgtgcacctgcctgtgtgtaattacatctggtagaggcccactaggtctcctgggaaaaggtggtttgtctctctattttgggggatcagccccaagtggccaaaccgaattccacccatagccacgcctcgctggtatctgtccacacgtgctgctggtcagcagctgtgggcatgtgtttctgctcctccagtgggttgtcccagtgaatgtagttacactcagccagccatctcctgtccactgtttgcctgtccactgtctgtctgtccactccaccctttgccctgccagctgacccgtgggaggcgggactggcctaacagttctctaatccaaggtcagctcgggtgcggaggccatagccccgcttggcggcaggagcagcatggagcatagacgctgttgggccaggggcccaggacccagggcccttgagccatgggggttgctcgaggggaactttgcccagagccctctcgggcctt

SEQ ID NO: 100733 - DNA, 2376 bp, Homo sapiens
aggtaacctcagccaagtgtgaataacgtccagggacttcggtggctcctgtgggtggcagtttctgaatctagaactgccgtccagggtttgcccttagtgcaggcgcctctggcctgccctccaggtttctgccacagggttcagggagtgatctttgcctcaagacagccgccagcttcaactacaccagataacggctgtggctttgtgtgtgtgtgtgtgttttctttctctttcgtcgtccttttttttttttctctctgatgcgtgtgaaggagaggactagaaggaacggttcccacctctcggaggacaacggacccaaagcgatcgatgtgatggcaccctcctcagagtagggaaagccagtcatctccaccccatcccacctcccgcccacctgcccgcccgcccgcctgcccgcctccacgcgaatgagcagtgcccggcttaacctggtccggcctcgggcccacgtgcagtgtccgcatgcctcgtgtctgtctgtccacacgtccgtttgcgtcgtcccactaatgtgaatttcagcagcaagtgtggtgtttgttttttatttttgtctttgtctccgtgccgttgctgtcgttgtccttcaataaggttgactgcattcagccagtgccaaaagaggagcccagtcccgctaccaaattccagtccatcggggttcaggtagaggacgactggcggtaagtcggacagaggtggcggctgcttctcccctctcctctccctccctccgctctcacctctcctgctctccctaacccacttctccttgctggatttctaataaccaagctgggtttgggttgcgggtggtggcccaggcatgggaggctgggcaggggcgggcgggtggacagatgagcatttgctctgtgagaccagtcacccacgggggccatggctgggccaggacatggcgtcagctgccctgatgctggtggtcttcctggccccactgcagtaaacaggcaaccttatgaccttgtcctcgtgtgtgtgtgcgtgtgggcttgggcgggatggggcaagggctgagccaagaatgagatgggggctgtgggacccgcttcaggcgcatggtgagcagatgatgcatccgtttctctgtctcccgtgtgtccgggtcaaggcggcctctggtctctggccctcttggtgactcactccttcctgtccccaccccatccaccccctacccacagaagcagcgtcccctctcacagtatgtcctcccgacgggacacagactcggatacccaggatgccaatgactcaagctgtaagtcatctgagaggagcctcccggactgtacccctcaccccaactccatcagcatcgatgccggtccccggcaggcccccaagattgcccagatcaagcgcaacctctcctatggagacaacagcgaccctgccctagaggcgtcctcgctgcccccacccgacccctggctcgagacctcctccagctccccagcagagccggcacagccaggggcctgccgccgagacggctactggttcctaaagctactgcaggcagaaacagagcggctggaaggctggtgctgccagatggacaaggagaccaaagagaacaacctctctgaagaaggtgggtgccacatggatggtccttgggcaagggtagaaggtgttggcagctggtttcagctggtggccagcagcttccgaacttctgagtgggggtctcttaggttctcttcttgggctagtttttgagctcccttcttactttcttcgcattcttccatccatccacctatttaaccaaacctctttccagaaagggttgctggtgatagctgtttgttgtgcaggctgtgaggccacccacacctgggtttgaatcccagctcctcccttactagtgaagtaaccttggtcaggttactccgagcccccatttcctcatctgtaaaatggagctaatcctctgctcactatatgagcatgttgtaaggattgaatgtggtcgtgcatgtgaagggcctgatgacctgtcagacacagagaaaagtgggagcctaattatgccttcaacaacttttttttttttttttttgagacggagtcttgctccatcacccaggctggagtgcagtggctcgatatcagctcactgtaaacctctgcctcccaagttcaagcaattctcctgcctcagcctcctgagtagctgggactacaggcacgtgccaccacacctggctgatttttgtatttttagtagagacggggtttcaccatgttggccaggctggtctcgaactcctgacctcaggtgatccacctgcctctgcctcccagagtgctgggatt

SEQ ID NO: 100734 - DNA, 1036 bp, Homo sapiens
cctgtgggtcaaggtagcccccaggccagttctgaagccagtgaggctggactggtcctgacctcttcccgcctgtgtgcgaagctcttccgtcttccgtctcggggtgaaggtggggtgaactgtgacagaatcgcacgctggggcttgacatctagatgacgcgtccttgcctccttccagaaatgcctttggtgctgcagtggctctgctgagaggaccttatgaccctggtgtcgggcatgtgtggccagtaccctgggacactctgagacccccctcccacacccttggggctggcagcatcgaatgggtggccagactgagagttgcccagggccgtgtgtgtagctggaggcctgcagcctgctgccgggggtgagaatgtgtttgggactgagtttgggatactatttgggcctggtttggaacttgttcgggtctcgccccttctggagttgataccagggacttttgggcctctgtttggagccaggatgaggagtttcagccgagctctgagcagggcctggcgttgaggcctgcaggaggttagggcctcctggtcaggcacagggtcccctggtgctcagctcccccttggccctgatctgggacctttgctgagtgctgcggctgcctgcgctgggtgacctctggagaaggcctcaggaccaagctgggtccactcgctggggtcaggtggggtgggtccggccctcactcttccctaggcctattgggtgacccaggcagtccatgcccctctggactctctgctcagtcattcagcgctctttctgcccctcttaggccccaggcactgccatcagtgtccccatcatccaccagtagcaggggtcccggccctgcctgccctgcgtacacagggacatggaaagctgtggcccccatgctgttggtcctggggctgaactcgccctccacctgcctggggctgggaaacccctcattcccacctccaaccctgagctgctgggacgcctgcctcatcactgttggagcctccctgttc

SEQ ID NO: 100735 - DNA, 1034 bp, Homo sapiens
aaaagccacgtctgggttgccttaggtaagaaatgtaaaaccaatgggccttggcctctaggaaatgtatgggacagggaccttcagaagaggggagccccagggggaaatgggtgcgaccaggtgagcctggagagggggctctggtagtggctgctgagcttgaactccgcactaggcgtttttctcctgtatgcgtaagagccacattctgccctttctggggaagccactgggggcctgggctagaggaagagaccgcaccgtaaattgtgcctgcagcagccccttagacgagtgtttcccaagtctggtgctagatgtggttgggaaaatggaagcgggggagtgctgcctcctcctccacctgagagctgcataacaaagacctggagcccctcctctctcctggaggacggggtagtggtggagggaggctggtagccggtcagattttgcacgtaagcaagcttcacagataaagcctaagtgcaattagagtttgagaattaccgtgtcaagtttctgaactagtaagtatcagaatttaaaatgtgtagattctctaagacagtaattccacttctaggaatctgtcttttgaagtagctgtacaacaaagataaatgcttatagaagattgttctttgcagaactgttcattcgggaaaattgcaaacaactaaatacccctcaccaggagctggcccattatagcaactctgagacctctctaccgcaggctcttaaaatggggtaagttggtgcgcgctaatgtaggggcatgaccaaggtatatttattgacagcttacagtgtcccaacaaggagggactttggacatagttggtgagaactttagtgggaaaactttttccaagtgataagttattgtcatttttctctcccctactttcttttttctttttttttttttttttgagacagagtctcgttctgtcgcccaggctggagtgcagtgatgcgatctcagctcactgcaacctccacctcccagctgcaagcgattctcc

SEQ ID NO: 100736 - DNA, 1120 bp, Homo sapiens
taaagaaaacatttttcggccgggaatggtggctcatgcctgtaatcccaatactttgcgaggccgatgcgggcggatcacctgaggtcaggagttcaagaccagcctgaccaacatggtgaaaccccatctctcctaaaaatacaaagttagccagacgtggtggctcatgcctgtactctcagctactcaggaggctgaggcaggagaatcacttttgaacccgggaggcggaggttgcggtgagccaagatcatgccattacactccacctgggccacaagagcgaaactcggtctcaaaaaataaaaaaataaagaaaacatttttcatggacccatctccccgcaagatgttaacctgaatcatttttatcatatcacttaggtaaaacataaaactgggtatatatataaaaaaaaaaccacttctttttgcttttgttcttatacctaaccttaaaatcaaactgtttccaaagtagataaatgtaaaaaccgtgacattccacctgactgtgttaactgaaaatggtgggtggtgctttgctgactgcactgcaggatgtggtgtggcaaaggcacagactcagcagagtagatctggatggtcttaggccccgatgctcctactggtgatgaaaatggaaacccaaagccaaacatccttctagagaactggcgaacccctcaaggtgacacatccacaggtcccacctggagaaatgtaaatgtaaggaaaggaaactgggcatcccctggagggaggggacccgtggtggccacctgctctagagtcatgccgagagttaagagcagtggggaccacccagccctccttgatggaaactgaccatgaatcccatgtcagccccagctgcacacctgtctggtaactcctcccagttagttcattgccctcagctcatttggtcaattaccagctcctgtacaaataccccttaaatatttcagggttttggcttctttcctaccctcatctaaaccatcattatctgatcacaatcatttatcactccccaacttaaaacccttcaggccaggcatggtggttcgtgcctgtaattccagcactttgggaggctgaggcaggcagttcg

SEQ ID NO: 100737 - DNA, 1120 bp, Homo sapiens; identical to SEQ ID NO: 100736

SEQ ID NO: 100738 - DNA, 1120 bp, Homo sapiens; identical to SEQ ID NO: 100736

SEQ ID NO: 100739 - DNA, 1120 bp, Homo sapiens; identical to SEQ ID NO: 100736

SEQ ID NO: 100740 - DNA, 1030 bp, Homo sapiens
agaaggacctagagtgtgaaatttcagtcaagccaccgtttagaccacttaatggttttccatggtgctctggcctggttgtcagccctgtccacctctgagctcatcagctaccattcaccggttccttaagccaaccctttcctgcctcagttcagttgcattggaggaccatagaggtgaaggagggcagatgagaaccccacggccagggcctttccttggaattgtctagaacattcttagctttctgtatggctagctcttctaatccttatgtctcagccttccagaacccttagctatgggagtttctcttatctttataatgccccctttattcttgtttctgttgggggcttgttggtggttattcacctaatggttaatagtcagtctccatgactaggtgcactataagctccacagggtggagtgcatgtctgtttaattcacaaaggcatcccagcactgagaactgggcccaatataccaggcactcaaataatatttgaatgagcaagaagccttgaagagcagcaggaaggtgagaagctctaacttgacttttttttttttttttaagacggagtctcactctgttacccacgctggagtgcaatggcgtggtcatggctcactgcaacctctgcctcccgggttcaagcagttctcctgcctcagccccccaagtagctgggactacaggcgcgtgccaccacacccggctaatttttgtatttttagtagagacggggtttcactatgttggccaggctggtctcaaactcctgacctcgtgatctgcccacctcggcctcccaaaatgctgggattacaggcgtgagccaccacgctcgaccgactttttttttctttgagacaaggtctcacgctgtcacccaggctggagtacagtggcacagtcacagctcactgcagcctcaaactcctgggctcaattgatcctatcacctcagcctcgcaagtagccgagactacagacacgcaccaccatacccagctaatt

SEQ ID NO: 100741 - DNA, 1006 bp, Homo sapiens
tacagagcaggcgccgcgaagggaggggcggtgcagtgtcgcgcgccctcccgccgacgtgctcacgcagccaatcggcgaccgcgaagccatccgagtgaaacagcgaccggcgccttggcgcaagcgcgctactcgtggcggaaatgacgtcagcatccgccgggctcgcggtaaggtgtgaggggagggacaatcttggtagaacggtgacatgggcgccaggaggcgctgtggagaccgaggaggtaggggaaaaccgaggctggacgtcagcgtcgcccagtcggccacagctgcccctcgagcagcgagtggggcaggagcggctctacctttccttgcgacctactcgcctgctgagcccagaccttgctccagggtagctccaagctgccccacaggatttagcccgcttattttctcccctaaccctgcaagttctgtagggccttgttgaagatgttaactcttctgtaataactaaccatttcatcttgcccagcaccctcttttggcacacgagagccctgagaccccaaaagaggaaatgagattctgaggccgtatagcaaggtggacccaaccggggactcctgggcggcaaatacaaggattgggttaggtatcaggatatctgagtgttcacatacagcgtcctcaccatgtgctgcgtcagtggttcacaaagtgagcttccggatcagcagcggccgtatcgcctgggaactgggtagaggcgcaggttctcggcccccattccacgcctactgactcagaacccctggggatggggctccttccggtggccctccaggtggtgccaggctcactgtgctggtaagtccagagaccaaggcacatcccttctggacagtggatttttttttttttttttttttgagacggcacggtctctgctcactgcaacctccacctcccgggttcaagcgattctcgtgcctcagcctcccacgtagctgggatcacaggcgcccactaccac

SEQ ID NO: 100742 - DNA, 1037 bp, Homo sapiens
ggcactgggcggacagctgggcttggagctccccgaagggtggcctaaggatgaagccccctagttatgcggaattggcgaggagcggggagaggcgttgtcattcgcgggcagggtttgtgcctgaactgggaaagggagctgaattcgattcggcctccgccttttatgtgcagtagggttttgagtaggttacttgtttctttcgaattaagtagcacaaacattaacagtaacagacttctgctgagaatgctttctacgtgccaggtgctctgcaagcggaatctcgtttaactcagaataactctgaagtggggtactgtggtacattaaagccttttgcacatagtgaggctcgctaatcttgagctgctgttgcttgttgaatgtaaaggaccgaatactttgataagcatgagtcaagaggggagactgagaccacccgctgggtgagtgtgaggtgtgggggtggagaaacgccaccagatatgtgcgagaattggttgggacttcagaacgttcttactcgtcccattcggaggatgcttcgtaactctgctccatgatctggaaggggccatcacaaacagcttgattccaggtagcttgaaaagcgtattatatttgcagtcatttcttggttttctgggctgccgaagtggattttccttcctgaagttcctgtaaagggggatgggaggcacttcctgaaggtgcccttgttctgcccccagccctgcccagctcttgcaaaacctgcagtctctaatctgctgtgtcatttctttcttttcttgtataaggactggtttctggaatctagggcagatcagaaacctgagtcgtctgtgttcttccattaaacttaaatatagtggcacctgcctccagcatttatggttctaatccgtatgtgcggccagtagcacaattattatcacagtcatttcattacaggccatattatatatgcacctctagaattttgatttagagcacagattctggaagtgatcgcttaatgatgtctaaat

SEQ ID NO: 100743 - DNA, 1084 bp, Homo sapiens
ttatcagccattctgttacttcaaggggctttggagaactatattacacacacacacacacacacacacacacacacacacacgcacacacgcacacacgcacacacgcacacacacacacacacacacacacacacacacacactatatatagagtttcgctgttgcccaggctgtagtgcagtggaacaatttcggctcactgcaacctctccgcctctgggttcaagcagttctcctgcctccacctcctgagcagctgggattacaggcgcccaccacaatgccctgctagtttttgtatttttagtggagatggggtttcaccatgttggctaggctggtcttgaactcctgaccgcaagtgatccgcccacctcagcctcccaaagtgctgggattacaggtgtgagccaccacacccggccccgagttctgagtcttctaagctttcaatttatgtttggtacttgttctctgttgctccagattctgcctgatcaatgcaggagtcctgtacctctacttcagcaattacctacagattgatgaggaagaatatggtggcacgtgggagctcacgaaggaagggtttatgacctcttttgccttgttcatggtatgtgtagctgatagttttacaacaggtactgttcatttcatgaggtgtcactcacaggaggggaccccactgattgagttacactgtgtgagcagggtgctatttttctaaaggcttctgaggctcagggccatggcctgtgttgagccacatcccagaagatgtggtctgatatactgtacagtcccctgtaatgtgtaaatccagggcccatcgtcagcttctacatctgattctcaagcctggctagatattagaaactaggagggctgagcatggtggctcacgcctgtaatcccagcattttgggagggcaaggcaggaggatcacctgaggtcaggagttcaagaccagcctggccagcgtggtgaaatcccatctctactaaaaatacaaaaaattagttgggtgtagtggcgggcgcctgtaatcccagctactccggaggccgaggcatgaga

SEQ ID NO: 100744 - DNA, 1121 bp, Homo sapiens
tcatctggcatttttgttttgtggaatcggcctgtgttaagccaggtgacctatgaacagtgcttgtctcctcactaggtcatttggatcatcttttacactgccatccattatgactgatggtgtacagctcccaagtgctccctatccagtccaaaggaccctcttgattacagcacaggaacttgatcgttggggaaccccagccccttggaacttggaagacccgtgtttcctggaccgcgaatcagtgtgttgggcatcagtgttttctgcaagggttgtgacctgaaactttttaaaaaccacccacctttggggaagcatttctgaatttatccatcaccaaccatttcttcttggataccatcaagtaacagctattatttgccaagtggagctgtcatttaatttgatgcacctctggattcagatgaaacattaaattgtcttcctcgattctccatcgggtgtagagtttttaaactatcaatggcatttcaagtcttctgaaacagcatggctgtatgtgcgtggtccatagcacagtacatgcagcatctaataagagtttccattgtagaatgttttcacatacttgaataaatcaaatctttaattgagaacctgttgatgatacctgataaagcctttcccaccccacctgtagcttgggaaccagtaggagcactggagggggtgcctcccaccccatccctctttcttcctctccctgatcccttagcggatccagcagacctctttctgtttatggaggcagcagggaaatcaagggctggatttggtgtaggctgtggtctccgtcttggcattgtggagagagggcttagcaccttctgatgcccctgcccagcactgaggtgcctggcctcactgcagtgtgctagacttaagaggtgttattttttattcggccacaagatggcaaggccagtgtgctagggaatggtaagccacaaaatgaaatagagatctgagagctaggctgggtgccgtggctcacacctgtaatcccagcactttgggaggccaaggtgggtggatcacctgaggtcaggagttcgacaccagcctggccaatgtggtgaaaccccatgtct

SEQ ID NO: 100745 - DNA, 1372 bp, Homo sapiens
cgttgtatcgggcttgcactgtgtttgtgaaacaccttcatacttgtgtgtgtgtctttcttttcttttggtttagtcttgcatgcactgtaggttttggttacctgtttgggttcccaaagcctccattctgtcactgtctgaatggtgtgggcatagttaagaggctatactctggatttagggtttccccttgttctgcggtgactacaatcagctgagattccaaccagatctaaaggattaaagtggcctcacatatcgccactcacctagagcaaatgatacaaaatggggatggctatatcttgtcctgggtgtcatggtaaatgagtcggaaaagctaaacataaagactttgatgagactcctaggttagctgggcttaaccggggcttcatcttctagtccccttggttctctgttacagtaccatctgccagcatgactcggctcgcccgatcacgaacccactcaacctcgagtagcctcggctctggagaaagtcccttcagccggtctgtcaccagcaatcagtcagatggaactcaagaatcctgtgagtcccctgatgtcctggacagacaccagaccatggaggtgtcctgctaagcagatgctcctcccctggaccattgcaagtccatccttcaaatgaccactccataatataacatttcatccagtaaactggcctctactatctttaactcatgcatggccactgaacctctctctagtagcctggatttatcattctctctgcctgcccacccccttttttgtatagcccaagaaccacttccatgccatactgtaacattccaacatctttagctgatcagatctctccatatcctctcttgccagctttttcccgtgctcccccaactatgtatcagataagattctttgatcccgactctgtgtgtgcgagcacgcgtgtctgtgtttgtgtgtgcatagttctgtggttttagacacgctttcttgtagtgcttctgcaaaaaacaaaaaagggacttattttgcattctcaatggtgtttttaagggaattaggcagaacagatttctaggttgggtaggccactgcattctcttttgtttgcaaattggtcaacaaaatttgcaaagtgatttcaggagagagcagctttgaggaatgtggaaaatcataattgccgtctggaccattgattgattgtgaccagtagcagaagggtgcctgttacatagagaggctccttctgtccaaatgaatttctgtatactcttctataaataaaagggaggaatatattctgctggaagcccatgaaccatcgctgaggttctgatacaacatagagttttttccaaggagtgaatgt

SEQ ID NO: 100746 - DNA, 1038 bp, Homo sapiens
tacctgccaggcagaccatgtatgtcttgtctcaagtggctgtgtcatccttgcctgtgagccgctaccaaccgagcccacacccacagccctgtggctcactgggaggagcaggaggccctctcctagtccattcttatccttttcctatgaaatagctgatcttccagcccacttctgatccaaagcaagatgactgtttatagcagaggggaaaacaattgcctttgtctagttgaggaaagtaacatttgagatgttattgaagtatctgtcagcctcacctcctctctgggaccttaaaataaaattttatccctggcttagagtattctgtcagtgtctaccaggcagctgaggttgccacttggcactctggggtcactaacctgccttttcctgtgtccatcctgcttccagtcccgtatgtgcagctcagtcacctgagcaccgagtcaggtaccttcctctgtgctggccctgccccgccttccagtctctcctggctgcactggctgcctgcagcatgtccgcggtcttcctatgcagtgagagcccgatagaacgtggctcagtacgccccaagagatttagcctacaggtccagccctggtcccccaggaggaggaaaggatctggttgtaaggggcaggcctcctcttgtcatcctaaatccagggtcacagcagcagctgaaacttgataggcagggcccatcttccaccaccacctactgatccttgaattaacctccagacacaggaatccaagggcagccttggctctaaataggagggtcagagcctgtgcccagagaactctgcagatgatagcaccttttgaccccagcattgaaatgacagctaggggagtggctgctgcccaggacgataggcagggaggctatgccaggtaaggcccagtcccagccaagctggaaggaccttagagtcaagcagtggcagaacaggagtctgagttaaacacctgcttctctgtccctggcaacctgtacctcatccctgtgttgaggtcagc

SEQ ID NO: 100747 - DNA, 1001 bp, Homo sapiens
caaaaaaatacattaattaaacacttaggacttgagagtttcagtggtgttgctgttgggtgttgaggctgtctccttgtagcatcccaaagagtccttcagggttgagccaagagcttccttcctgctccataccacccaggatgccactgaaatggcgactcaagaaccaagtcatagggcctcttcccttctcaggtgtgaaggaaagatagtttcgcattccttgataaattttggtgtttatgaccagaaaataacctgagttgctatgactttacccaaaaagggcattgcttctgctttgtttttctagacgcagagacctggagatcgaaagacccatactgggccaaaatgataacaaatcaaaaacattaaagtaagttcctcagtttcctcagctgacttgccaaatatagactaatttggtgttcatagactttcatagactaatttggtgttcagtggaatttatgtgcctatttgctgagtgacacctcttactttgcctacctaggtgttctactttactggtggtaggggacaattcgcctgcagttgaggctgtggtaagtatgtcctcatgctgtgaagatgaatgagatcaaaatgtaataaaatgtgtaggccaggtgcagtggctcacgcctgtattcccaacactttgagaggctgaggcaggaggatcgcttgagcccaggagtttgagaccagcctgggcaacacagtgggaccctaactctacaatatatatttttttaattagctggcatggtgacagcctgtagtcccagctactctggaggctgaggtaggaggattgcttgagctcaggaggtcaaggctgcagtgagccatgattgtgccactgcactccagcctaggtgacagagtgagaccgtgcctcaaaaaaaaagtatgtaacacactgctgacacactagaaacagtcggtaaatactagtttttgttctttctgattgcacatatcagggtttg

SEQ ID NO: 100748 - DNA, 1033 bp, Homo sapiens
aagctccctcccctacccagcaattatgaacacgataactgccactttctgtgaagacttgtttcctcaccagttgaaaaacatggggcttgaacaagataatctctaagcttcttttagcactattatttcaaggtttttccccctgaaatttctatttctgtgaagcctttcccagacctcctaatggctctaaagatgtttggggaggcacgtgatgtcaaacattaacagatggcattctacttacaggaacaggtagcaggagatgctgtcttctctcatagctccacatgtcaacagctatgtggcaatgagttaaagattcacctttgcagggccacatgcctttcagactacattggaactgttacttgctaggatcaggtaaattctaaggcagcccttctttcctaaggtaaaataagaatttgcatgcaagccaataaacacagctcttctgggtggaacaggtacttacctgcccaaagtgatgagccaaaataatgtccacaacattggttgtcaggccagagagctgaaaagataaaaactctgtgttaagaatgtaagcatatgcaaaaatttatcaagctgcccaattaaaatgagtgcactttattatatatgttatctctttaaaaacaaatgaaaaacccttggccaggtgcgatggctcacgcctataatcccaggactttgggaggctgaggcgggcagatcatgaggtcaggagattgagaccatcctggctaacacggtgaaaccctgtctctactaaaaatacaaaaaattagccaggtgtggtggcaggtacctgtagtccctgctactcgggaggttgaggcaggagaatggcatgaacctgggagacagagcttgcagtgagccgagattgcgccactgcactccagcctgggcgacacagtgagactccgtctcaaaaaaaaaaaaaaaaaaccccacaattcagtgttatacatttcatgagatggtggtttcaaagaaacatagagatgagaaacaagtcaga

SEQ ID NO: 100749 - DNA, 1033 bp, Homo sapiens; identical to SEQ ID NO: 100748

SEQ ID NO: 100750 - DNA, 1033 bp, Homo sapiens; identical to SEQ ID NO: 100748

SEQ ID NO: 100751 - DNA, 1010 bp, Homo sapiens
caggcgcacaccaccacgcctggctaatttgtatatttttagtagagacagggtttcaccatgttggtcagcctggtctcaaactcctgacctcaggtgatccgctggcctcggcctcccacagtgctgggattacaggcatgagccaccacgcccagcctacttttctatagttcataacctgtgcatcactgataacctatgtgaagatttcaggacttctttcttcctcagtctttctggaactatatgatcctactccaggcatagccatgtctgtctccctcagtgcctcttctccattcttacccccaattcagtacttcatccctgatcagcagtacaggttcagcataaaaccaaggaagaaggccgaacaggaatcagcaacataatttgagttggaaatttttctgaaaatagactacagtatgcagatttacacagattgctgcatttattagactgtgagatgcatcattttgaaaagggaaaaattaggagaaaaatgtttaaaactcaagaacattctgtaaacaactcatttcctcccactccctgaaatgaagatagcaaaaactggaagaaagaggaaaaaaattgtttttgtctcttggaagtcatgggagtgattgttaagttagtccttatcagccataaatccagtgtaaatacagaaatacagacaggaataaagtagcaaacagccgtgaggtctaggtctcaggctttcaaagaaggaattgacattgtccttccagtcccctatttcatagcaggctttattattaccctgcaaaggagacttagtttttctgacttgtttctcatctctatgtttctttgaaaccaccatctcatgaaatgtataacactgaattgtggggttttttttttttttttttgagacggagtctcactgtgtcgcccaggctggagtgcagtggcgcaatctcggctcactgcaagctctgtctcccaggttcatgccattctcctgcctcaacctc

SEQ ID NO: 100752 - DNA, 1054 bp, Homo sapiens
ctgttttttttttttaaatatgtttcaggttagaaaattcagagttggaacttaactttgttgtgagctcttcaatgaattagtaagaattcttgctagagcctgtcaccagtgactttaagtggacttttctagatggtagtgtaagattctggccccagccatagacacacagagtctgcatacatgtgttttctttcatgctgctctggctttcatagatgccctgcatttgaggccacagttgagtgttaaagcttttgtagctgccttggcatgagaagtgatttaagcaggtatacaaagagggtagaagtggaagcagcagcccctcccttcactctggcaattttgccaagagacaaactcccgtgtggtgaatgtgaacagctcaggacattcacgccacctgtgctcttggggtataatcagtgtctgtttgtgagatagaggaataatgtccatgagaaatgacagcattatgggtgtaagattattttgtgcaataatcggaaaccaccaaatattaacaaagtaatttctactttgcagacattatttagaattaagaattgttttcaatatgtatctcaatatgagatgtcttatattcagcctttagggcagcttgaatcagacagattgttcagacacctcactttggtggaatggtggttaaaaagcagggaaagaaggtgataataggcattgactgagtagaggaaaattggggcgatatggagagcctgtgacttatgggtatttttattcttatagataaatcctgtttcaatgcattctttaactttgaggatatgcaagagatcacccagcactttgctgtctgtcatgtggatgccccaggccagcaggaaggtgcaccctctttcccaacagggtaaggccacgaaaagatcatctgggagacgtgcactcagtagagcaactggctgagctccagtgggagaagtggtgtgtgcttccctttgattttattaccgtctataggttatgcttattgaccaaccatcctcatattttctctccttgggct

SEQ ID NO: 100753 - DNA, 1039 bp, Homo sapiens
gaggcggaggtgggtggatcatgaggtcaggagatcgagaccatcctggctaacacagtgaaaccccgtctctactaaaaatacaaaaaattagctgggcgtggtggcaggtgcctgtagtcccagctacttgggaggctgagccaggagaatggcgtgaacccaggaggcggagcttgcagtgagccgagatcgcgccactgcactccagcctgggtgacggagcgagactctgtctcaaaaaaaaaaaaaaaaaaaaatctcttagttccaagggaaaggtgctgacccagcctgggccagatgcctccctgactccagtaagctatggccgtaagtttatgttccacaaacatggtagccaagatccacccctgtaacgtgtggatgacacagaaggacagctcccaggaaagaagggatcctaggcagatacacccataggtgtctggtgaaattatctactgaaattaattataaattatctgaacatgtgttcagaagctccaaaacctctgattttttacccagcaacttcttcatatcttccatttccttttttccccacaagtcttacctggctccttacccaatttgctgatttcctttccatagccaattgcaaatgtattctcaacagatccctgggctcgtaagtgagctttggagataacaaggtgtgttttgctccctatttatttttctggaagaattggaaagtaggaatattatgtatactctagcatctctctggtatgcatttattttattttattttattttttgagacgaagtcttgctctgtcaccaggctagaatgcagtagcacgatctcagctcactgtaatctctgcctcccaggttcaagtgattctccagccttagcctcctgagtagctgggattatgtgcgtgtgccaccatgcctggctgattttttatttttagtaaagacagggtttcatcatgttggccaggctgatcctcaaagtcctgacctcaagtgatccgaccacctaggcctcccaaagtgctgggat

SEQ ID NO: 100754 - DNA, 1049 bp, Homo sapiens
cactttcctgcaatattgagtatttgcagcctatccccatggcttcttgcatggtgagatagaagaagaatttgtagttcattaccctgcctacctctctccaacttgtctcctctctctgagctccccattctgctctccctatgtattagttctctattgctatagatcactctaaaacaaaattattatctctcatggtttctgtgggtcagaaacttgggagcaggcttggtagggtggttctgacttagagtctctcatgtggttgcagtcaggtgtccctggggctgtagctatccgaactcttgactggggctggaggattcatttgcaaggtaactcacacacatggctagcaggttggtgctggcaagttggttcctctccacatgggcctcgccagagggctgtttgagtgtcctgatgatttggcagctagcttcccctagaactagtagtttatagtgtcttgaagcacaaagtgtaatgcgttttatgatgcagcttcagaagtcacatattgttgcttcctccatattctattagttacacgagccatccctgatttatttgggtgggcgattatacatatgtgtgaatgaatatcaggagtcagggatcactgggctcgttgaaggccatcttggagctgactaccatacctttcacccactgctgtgattccccaaatgaggattagtaagcttagccttggttccctcctctttcattcccactgccattcctaattcaagtcctcatcctgcagtaataatcttcaatttttgtccccgcttaatccgtcttccagtctgttccaagcatagttttgagtatgttgtttctttatccgtcttcagtaactaaaacgtgtgctccatgagagcaaagactattgtattaattgtattaatctgttgctgcataaaaatattaccgcaaatgtagtagcctaaaacaacacatattcattgtctctcagtttctgtggttcaggagtctggtgtgggctgtgtaggtcctctgcaacatggcgatcaaggtgt

SEQ ID NO: 100755 - DNA, 1311 bp, Homo sapiens
tgatttttaaaaattcatttaccaaagaaagccctgaaacctggtaaatatccataatcaagctagctaagtttttgtgtgctattttcaagcactattaagaaagaaaggtggcggggggcaccttgagaattgaacttgtccaaggtcgcagaactggctacaacttgaaattccagactttttagccactaaaggtttatcagtatttcttctcagtgaattcatccttaaagacattaactagcaactctattatgattctatttatgtgcttagaacaggggtgggagaagacatacaaaaacatgattcatgtcttcaaggaggttatggtctgttggggaagagtaaagcactgttctctaatgttgaagtcagcgtatatataattgttaaattatatggtagggggactagctgtatcatgggagctggggaaagggggcaagaaggatcagtatgagatgtggtggtgagaccactttgggttttgactttctgggctttgacaggtggatagggtcagaattaatcaaaaggacaggaaaacattttgaatcggggctgataaaacagacaagatagcagtgcctgccatgtttaacggacagtaaaaaaattggcttggctggcttagagcagtggttctcaatctttagtgtgcaccagcattaccttgagagcttattaaaacccatattcctgggctcgaccttcagagtttctgattcattagttctggagtggaatccgagaatttgcagttctaacaagttcccagatgatgctgatgctgctggtctaaggatcacactttgagaaccacttgattagaaggttgagcagctagagtcagaaactgtcaaataacttgtttcaaaaaagtgcgtgtgagtcaggtgtgggggtatactgacataggagagttctggaaagatatataccaagctctaatggtcctcacttctgggagtaagatttagaggcttggggaatttacttttttacctttctatattatttttgcattgtgcacataatgcttttgtgttttaaaaatgaaagaaaaataagaatcttttttgaagatatatagtaaaatatttatggattaaaaaaagagcttgctaaagtaatctagtgtcatccaacaaacatttttagagtgtctgctatatgccagatgctgctagcttctggaaatacaaagcctttgctaaagcttgcaggctggtgatggtgattgagatgggcagatagcagctttacttggtatcacgtaagcttcctaagagcagggaccagggt

SEQ ID NO: 100756 - DNA, 1068 bp, Homo sapiens
tcaggttttgaaacaatccaaaaatcatttaggaccaagtctaaggaaacattttagtggccaagttggattccgattgtaaaggaatgatactaattttctagcatggctctgaaggtgattttaggtagaagagttttgaggctgggcgcaatggctcacgcctgtaatcctagcattttgggtgactgaggcgggtggattgcttgagcccagaagttgaagaccagcctgagaaataaggtgaaaccctgtctacaaaaaatacaaaaagttagctgggtgtggtggcgtgtgcctgtagtgctagctactcagaaggctgaggtgggaggattgtttgagcccaggaggttgaggctgcagtgagttctaattgcgccactgcactccagcctgagcgacagagtgagacactgtcttaaaaaaaattaaaaattgtaaaaaaatgaaaaaaaaagttttgagcattatttgcatcattgggatacatatgtcacttcacaagatgttcaatttgaaggaaataccactcattctctatgtcctgttgtctgtagtgtgcttcagtttttcatattgagttgacctaaatcctggattcatgacaagaaaggagtaagtactactattcattgttctatttgtttataatctgtattataaaattgcacataattaaaagctttcccttgtcttcatctatgttttgagtgtataaacaaaaagggagtgccgggtgcggtggctcacacctataatcccagcactttgggaggccaaggcgggcagattgcctgagctcaggagttcacgaccagcttgggaaacatggtgaaaccctgtctctactaaaaatacaaaaaattagccgggcgtggcggtgtgcacttgtagttccagataggagggtgaggcaggagaattgcttgaacccgggaggcggaggttgcagtgagccgagatcgtgcccttgtactccagcctgggcgacagagtgagactgtctcaaaaaaaaaaaagagggagggctgggcatggtggctcacacctgtaatcccagcactt

SEQ ID NO: 100757 - DNA, 1051 bp, Homo sapiens
caatcccaggactttgggaagctgaggcaggcgaatcgctggagccaaggaactggagaccagcctagacaacatggtaaaaccccatttccacagaaaatacaaaatttagctgggcatggtggtgctgcctatattcccagcaaatagggaggctgaggcgggggttatattgcttgagcccaggaggtggaggttgcagtgagctgagatcacaccactgcactccagcctaggtgacggagcgagagtctgtctaaataaatagataaaaatgagttgtctttcattttatctatacctaccagaaaaaaaagataaaatctttctacatacttaactccacacttttgggtgggcttgaggaccaacatgtaacagtacctagagctgagactaccttaatatacctttgtcagcatctcactatgaaaacgtatatttcctttattttatgacacgtaaatttgtgctgtctagcatcttctctttctgaagaattgaaacattttgcagacggactggaaactgatggaactctacaaaaatgttttgaagattcaaatgggtaagagcagttccccttctgtcctaaattatgattgaattaggactttaggccgggcgttggtggctcaggcctgtaatcccagcactttgggaggccgaggtgggcggattacgaggtcaggagatcaaggccatcctggctaacacggtgaaaccccatctctactaaaaataaaaataaaaaattagccaggcgtggtggcaggcgcctgtagtcccaactactcgggaggctgaggcaggagaatggcatgaacccggtatgcggagcttgcaatgagccaagatcgcgcccctgcactccagcctgggtgacagagagagactctgtctcacaaaaaaaaaaaaaaaaaaaaaagaattaggacttttgttgtaattagatagttgttcattcaccaacaaacatttattcagcatcttctctttttatttatttatttattttttgattcggagtcttgctctgtaccccaggctg

SEQ ID NO: 100758 - DNA, 1070 bp, Homo sapiens
ccctgatcagggagtatcggctgcgggtgcgcaaggcgtccaggagtgacctggggctgtggagagcgacccgtggccttgtgtttcaggtacggaggttccggactggacgggcgtcaggaagtcacagacttgtcctctgatgtggccccgcccgccgccgcactaatctcttcggcgtcgtacccgtcggcccagctcgacccgccgcagccccggccccgaccgtggacactgggggtccccgagggcgctgcgacctcctcccgggtgaaatgaaacccgagggcagtcccccttaccgaccccattagagacgtatctgccgtgccaggggtctaggctccagaaacaggggtgaggactgggtagagggctggggttcgaattgcccctgtgcccccaggctggctgtgtcacaagcttgggccaggctttttgcccctctgaacctcagttcccctgtctgcaaagtggagttaatggtgcttacggagttgtggaagggattaagtggaataacgatgcaagtaaagcgcttacatagcacaggtcctagcacagaataagcgtttaacagttgacagttgttgcttttctaagcctggatctgtgtgatacagtcgttattatccaagcctggatttgtgtgatattgtcataaggaccgtgggggattcagatccttgaccgagccctccttgttatcttttcctttttgtccctctgcatatattcatatctttttacttagcaccccccacagacagatttctgctgggagggaggggacgatgaagagatgcctaggtgacatccctgccttccaggcagttgttcctgacagtcactaggaatacaaatacagcctggctggggagacagacatgtaaacagattttatagccaatgctacgaaggccaaggggcataaccaccaactctgccaaagataagtgatgtgaaagcttcatatttgagccaggttgggaaggatgaataagtttaacaggtagaaggacagatatgtgcaaagattcagaagtagtacagggaataggactgggagg

SEQ ID NO: 100759 - DNA, 1051 bp, Homo sapiens
ttaaggagccctccaaatgattctgacgcataagaatatgccaactgctgatctgggctagccattagtagagcctggggagggactgggactggctaggccaagaacaggtggaaaacaccagccttatctggactcctgagattgggaaccaccaccaacaaaaaccaaccctatagtcgctcctcttggaagaggaagagaagttgaagggcctggagaaagcacacattgtttgtttccctgctcctgctcacctctctcacttgtcttggttttacaaaaggctgtgtggatggtgccagccagggagggggtgggagtcctggggaggcaggaggcagaagaccctgactgtttctcccttgggaacctcaccataggccagatagcgcctcttcaaactgaaagaaatcttaactccacaaagaaagcatcctaaatccccagttcctcctcctcccaaccccagggataccttgtagacagtgccaaaaaacagctccaacccccagcagctgggaagagagccagaagctgcccttcctcctcatcctggcccctccccagcccccgccaatactgtgaacccccttcccactcagcctggtttcctggtgagggtcctgcagtcatgggccctgggggacccccagggcaaggcccatgggagggaagggaccaagggcatccttgggccaactgtccacctctcttgtccactattctctcctttccacttctgtcttcaaaaggctccttcctaggatggatcgggtgctaggacaactgcagtccaatccaccagctctccctgcccctgtgtcttatttcagacatgagaataactgtacagtgtaaacttataaagcgtttttaatggttgtagattggaaataaagtatgtcatatgaacagctgctgtggacttggcctcctctctgatttttctaatgaggtgggtgggggccccagcggatctgaaacctaacttttccccactcccagctgcctgggaagtggggagcccagggaggccacagccagctgg

SEQ ID NO: 100760 - DNA, 1024 bp, Homo sapiens
gtgtaattcccataatcatgcaattaagttttactcttgagtttcctgacagccattggtaaaaagagaaacacatcaggatttataatttttatcatccaattatgggaagcaagcatgttggccccaggagacgaactcttctactaatttatagcatgtatcctttcatcaagggccactgagccagttggtgagtcaacgggtgaacctaagatgcaaggatgttttccaggtgactatttaaaaaaataaataatccaccaacgtgattgaccttggcgagatcatgtttctagtctatacctcagtttccccatctgtaaagtgaggataatgtcccaccccatgtaactgtggtgaggaccaactgcaacactgtgcctgcgagtctccttggaaaagtgtaaggttctacacaaatggaaagtgatctgatcacactcagtgtccccagcccagcctttcagtgccctggccctggggtgggggacaatactctcctcacccccttcactagtcttcatgaatagcaaggaggccataacataatttggtctaaaccccttcctttttaaaagaatgatggcaaaatgtgcataacattaaatttaccattttaaagatttctaagtgtctcgaagtacatttgcaatgtgtaactgccacctccagaactttttcatcatcctaaactgaaactctgtacccactaaacagtaactccccactccccctgtccccagtccctggtaacctctattctactttttttttttctctgtggattggcctattctaggtatctcttttaagtagaatcatatagtatttgtccttttgtgtccagccccctcattttttgagatgaggaatcaggcccagagaaggcagtggctcacccaaggtcacatcgcaaaccagaggcagagccaagaccagaacccaggtttcctgactcctaacaggtcttgcatccccagtagtgaatgagacactgctttgactttctgtaatcttggtt

SEQ ID NO: 100761 - DNA, 1055 bp, Homo sapiens
tgaggtcaggagttcaacgccagcctggccaacgtggtgaatccctgtctgtactaaaagtacaaaaaattagctgagcatggtggtgcgtgcctgtaatcccagctactcgggaggctgaggtgggagaatcgcttgagcccaggaggcggaggttgcaggagcagagattgcgccactgcactccagcctggatgacagagtgagacccaatctcaaaaaagaaatcgtttcccaccccacatctccttcagacctctcagggacaactctgggaggcagccttggcaggacatgggttagtgcgcccattttgctgtgaggaaactgaggtacaggtctcatcccagagcatgagaagtcactgagtttagatgagaacttgggtccaactctgtcctgtttgctgtgcaaatccgctgccctgctgggggcttttggtgggtccagaatacccagaatatgctgctggccaacccaggcataaaacaagtccattctagatcactgagccttgtgtattccagagggtgatctgaggtccccattcagcagaattctctgagggcatgttcagaatgtagattcctgggccccaccttgaatttgcatgtttaacaaactctcctggggttgaggggtgggtgcagtggtcacacctgtaatcccagcactttgggaggctgaggcgggtggatcacttgagctcaggagttcgagcctggccaatatggtgaaaccctgtctctactaaaaatgcaaaaattagccaggtgtggtggcacatgcctgtaatcccagctacttgggaggctgaggcaggagaatcacttgaacctggtggggagcagcggttgcagtgagccgagattgtgccattgcgctctagcctgggcaacggaatgagacttgtctcaaaaaaaataaaaaataaaaccagccctccccgggggatcttaggcactattggccacaccattggtgttcgtggccctgattattaggctatctttctttttttaagtttttttagatttattttttattttatttat

SEQ ID NO: 100762 - DNA, 1125 bp, Homo sapiens
aggctacctgggagacagagcgggcagagctcaagggccatacctcccaggtgagccccccacctgtcagacgcctctccccttactctcagccaagcctttagctgtcagatctgggagtagaataccaaggccatgctcctagaggaataagaatgccgttgcttcacctgtggcccagagagggcaagagacttgcctaaagtcacacagcaagggtatcagaaacggtggggaatgggagtcacagaggaagggaaggaaggtgggggattgcgccctgggctcacaggtgaggctggtgcacatccccactgcctgctgtcctcatttgctccttcatttcctcataagcactccctcagccccaactgcctggctctattttgctccctccacgcaaaatgggggcctcccctcccaactccccagcgtgcccccaaaggagccttaaccaggagccctgggggtttggtgtctgctgtgtgcctgagggtgacttgctgcctcctttggcctgaaaagtgagagggtgggcttcttcccactcagagagaatgctctgaccctgcagcttgggctccagcttcttccatccagcctgcccctgctgcaagctgccttcccaggcgtcagcagcctctgggaggcaggcactccgatggtctctgctggacagatgacaaaactggcacagaggagttaaatttatctcccaaggtcacccggctaataagtgtcagactggcccttgctcccccaaacctctaacccctggctccctgtgaccccaattccacctccttttttttttttttttttttttttgagacggcatctcactgtgtcactcaggctggagtgcagtggtgcaatcttggatcactgcaacctccgcctcccgggttcaagagattctcctgcctcagcctgcaaagcaactggaattatagatggcacaccaccatgcccagctaatttttgtatttttagtagagatggggctgcaccatgttggccaggctagtcttgaacttctgatctcaagtgatctgccggcctcagcctcccaaagcgctgggagtactggcgtgagccaccactcccggccccaattccaccttc

SEQ ID NO: 100763 - DNA, 1031 bp, Homo sapiens
tctaggcctgagcaagcatgggattgggtaggaggagagtgactgagccctgtcaaaagcagagtggtccatatatcacttagctggtgaggatatgggtttggggcattccatttggttccaggcttcttggcagccaaggccagaagggaaataaggaagtttgggacattctcatggcctgatccaaggaaacttataaactcatctgcataaattattttttcttctgtactaaattccactgggaatttaacaatttatgtaatttaatggaactactcatgtatgtagcaggaaggcagcagtctctatagccaggcagtttgggtttcaattgtggatccactctattctggctgtgagatcttggataagtcattttacctctctgattctcagttttctcacatgtaaaatgaaggtgcctcacagggttgttgaaaggattaaatacatgaaaagccatagcttaaggcatggtccacattgggtgaggatgaggaggaggaggaggatgattatgatgataatgacacatctctgggactcaggggacctgagttcaagtctcagttctaccagtgttcctgtgtgaccttggacagatttctaccttctggccacagcttccccatctgtaacgggagggttagagtgaatggtagttattgaattgctaggattctttgatcctcagggaattctgggtagttctgagccccttctaagcctgctgagcttctccttgctcttcataatgagcctgaagcaggaaaaggctcctacggactgggtggagtatccctgaaaccctgaaccttgcagagtcctatgtattttccagcctgagcacctttctgagcatctcttggaagacaactctgtagtcccaggaaggtcagcccatgactatgtgggaaggagaagctcacttgaagctgatggatcagactctctaagtgagcttcctggaagccatggcaaaaagagaaaaaactgagataacttagttgtcattttctaagaaa

SEQ ID NO: 100764 - DNA, 1058 bp, Homo sapiens
aaaaatttaaaaaattagctggacctgatgacacaagcctgtggttccagctacccaagaggttgaggtgggagaattgcttgagcctgggaaacggaggttgcagtgagccaagatcacgccagtgtactccagcctgggtgacagagcgagaccctgtctgaaaaaaaaaattaaaataaaaacaacaaaaaataaaagtgtataatttagtgatttttagtatattcatgatgttttgtagcgtcaccattatctaattccagaacatttccatggccccaaaaagtaacctcatgcctatgaacagtcactccccactccccctttccctcttgcccccagcaaccactcatccgctttctgtctctggatttgcctgttctggatgcttcatccaaatggagtctttggtgactggcctcttttacttagcatcaggttttcaaggtttatccatccatgttgaagaatgtagcaggacctcattcctctttatggctgagtaatcatccattgtgtgggtatatgaccacattagatttgtccatttatctgggttgttttggctactatgaataatgctgctgggaacattcatgtgcacgtttctgagattctgtgttagttctcttgtgtagatcccagggagtagaactgcaggatgtagacgtgactggggaaagacaaagatgggattcaaacccaggactccacatctctcaaacccgcactgactcttctggtgttgcccctatgctccttgccccacccttgctctcctaggaccctgttgtgtcttcagaaacctggaagaggctgcccactcctgtgactgcttccttccctggcacagccttctcatccggaattcctacctggtgggctaggaaggggctgatagttcaaagcccggttctgccttttttccagacttggcacttacttgcaagtgactgtaaccttgcggaaatgatataactgctctagcgcttagtttatttattttattattatttttgggggagacaagagtcttgctgtgtcactcaggctag

SEQ ID NO: 100765 - DNA, 1058 bp, Homo sapiens
gtggtgtgatctcagcaacctctgcctcctgggttccagcaattctcctacctcagcctcccaagtagctgggattacaggcatgcgccaccatgtccagctaattttcgtatttttagtagagatggggtttctctgtgttggccaggctggtctctaactcctgacctcaggtgatctacccacgtcggcctcccaaagtgctgggattacaggtgtgagccaccatgcctggtctggttgtggttttcttattgctgagaagaactcacacagcaagtataagttcttctgagcaatacatcagtaggactactagtagtagtaggctagtaggactggttggtagtagtagtagactagtagtctgggggcgagggtaggccaggatctcagcctcccagggtggataaaaatcaccaggagggcttgttcacaacatacattcccaggacccgtgaggagctgagaccggatacaaggaggtcaggtccagggaatctgggatctaaactctggtctaaagtgactcctgtgggaagccaaggacacaccaggagcacgcccccttcctcagatacagatgttgctggagaaaatgttctggctttgggtttcattcctaggtgacctgtgcaggttacctcccttctttgagcctcactttcctcatctgtagagtgggggtgacattcctaccctcctggggtttgtaggaggattcagccacacggagtccagaatgctgcctggccaggggatgctcttccttttttctttttttttttttttttgagatgaagtcttgctctgtcacccaggctggagtacagtagcgtgatcgctgctcactgcaacttccacctcccgggttcaagcaattctcctgcctcagccttccgagtagctgggattacaggcatgccaccatacccagctaatttttgtatttttttagtagagacggggtttcaccgtgttgaccggtctggtctcgaactcctgacctcaagtgatctgccggcctcggcctcccaaagggccagaattacaggcat

SEQ ID NO: 100766 - DNA, 1085 bp, Homo sapiens
gtggagctctgcttctcccgcctgtatttcatttcaacatttaaagttatatcttattttggctgggtgcggtggctcacacctgtaatcccagcactttgggaggccgaggcgggtggattacctgtcaggagttcaagaccagactgtctaacgaggcgaaaccccgtctctactaaaaatacaaaaattagccaagcgtggtgctgcatgcctgtaatcccagctactcgggaggctgaggtgggagaatcgtttgaaccccagaggcagaggttgcagtgagctgagattgcaccattgcactccagcctgggtaacaagagtgaaactccgtcacaaaaaaaaaaaaaaaaaaggaaaccaactatattgaaacacagttattaaagtatttttaaattacaacatagtaatatgtgtgcttattaactcataaattctggtgacagatctaactagcataatttcaaactactgatgagtgtaaataatattttgacatttttgcagcaactgttatatgatatgaaaatacctgtgatttttttttggtggcaaagtcacagatattactcatataatgatgatttgttcataggcccagaatagaaggaaatgctacattttacttagaggtcagtgaaaaggaagatgtgattttccaagttcatggactccctgagttctggttccaaggaaagatcttgaagttggtggttggactttgagtcctgcttggaggtctcaccccctccccctgcctgtttgcgtgtgcttgggcaccacccaccttccctgtgcttctctgaagttcttcatctgtagaacatggatgatggttcctgtctttccttactgggagtggggggttcagtgaggatctgtgagatgattcagatggaatgtctttgtaaactgtgaagccctctgctgctgtgcaagatcttgctattattagcagtagtgtgagctcatgtttggctgtccggcccagccgggaccaagaggctcttcctggacaattctcccaggattcttgggaatcagtccatcgaggggagcaggtttgcctttgagaggct

SEQ ID NO: 100767 - DNA, 1165 bp, Homo sapiens
ccttttttggggtccaagtgtgatgatctcatctggagccttgacagactcctgggggaccggcagaagggacggcagatggctgccctggcctcttgggtggggctggcatgccgcccctgtggccactgccggcccactccacagagcagcccttccggggctggggtgagtggcccgggcccgggcaggagacgagtggcccagagccagggtggcagatgggaggcagcccaggcctcggcctgagggagggaccatggtggccagggcagtatgggagcaggcgggccaggcggaggctcccgttcctctgtagtgtggttgctgcctcgcagagtgaaggttctgggcctctcagctcagctctgtcattcttctgggttggtctgcccgtcggagggcttgttgggcccctggaacctggggaggaggtggtacatttgggtaaggtttggaatctggcagggctgtggcctgggtgttgctgggctgggacttgagccccaccactggggtctgaagcacccatgggcattagcttcacagaatcaaggaattagattcaaacacaggagcgctgactagaagtagttttctgtaggggagtagaacagggggattctcctcccctctgagggcctgtgtattcattcagcacctctttattgagctgttctgtgtgtcccaggcactgtgctgggctctgtcctcctgacatcacatcctggtggtagagactgacattctgcaggcaaacagacaaataaaacgctgagtatcacaaataagcctatgatatatgccaagaaagaaacaagggattaagatggacgtaatgggcctggaggagcatggaaggcttctcagaggaggtggcatttcagtggagacttgaggcagaaggcaagccagcagggcagagatggggggcagggaaatccaggcagaggaaactgcaaggccaaaggctttgaggtgggacaggtgaggtggctgctggttgcctacgacccaagtggctgctgtgttgccagtgagaggaggcgtcgagggagatgaagatggagaagtggacggggcttaggccaggcagggcctgtatgctgtacgatgggatttgggttttcttttgtatgtgatgaaaagtcactggaggttttgt

SEQ ID NO: 100768 - DNA, 1046 bp, Homo sapiens
aaccgtcccagcccatgccagcccccacgggggccaaaaccgccttccaaagcatccgctaggctgacatctcgtaataggtcccctccattttatttttgtttttatttatttgtttatttttttgagatggagtctagctctgccacccagactggagtgcagtggcgcgacctcggctcactgcaacctccgcctcccgggttcaagcgattctcctgcctcagcctcccgagtagctgggattacaggcacgcgctaccacgcccggctaatttgtgtatttttagtagagacggggtttcatcatgttggtcaggctggtctcgaactcctgacctcgtgatccacccgcctcggcctcccaaagtgctgggattacaggcatgagccaccgcgcctagctacgggtcgcttccattttagccgtacagagcctgaaacccgggtcgggggcgcatggggagaaatatccgccggtcaaggtgcgcgagccaggcatgcacacagggcttcacggtccctatgccaggagagggaagccgaggcagggggagcccgagcgcgcccgggaggtgtgagctttgggtcccatcggcgccgcctagaccgtgagcttggcgcgtgcaccccaggcttcagtttacgcatctgtgcgatgggatcgcggctccggcgatgccggctaagggggcggagttcgcgcacgctcggcacggggcgaggggcgaggcgctgggcgtgcatggatgcgggttcctgcgaactgaggtccgcccggcctcggcccgggagtcccggctcccgccgctctcgcaggccctgcccggacgccgggcgcaggggcgcctccgccgggtgccttccccgagcgggcaggggaggaggcggcggagcggaggaggagggagcccgggccgcggctgcccgcgccagcctgaccctcgaaggggtcgctgttgcctcgcagatccctccctcgctccctgcctgcgtccctccctgccgctcccgccgcgtccgccttttgttcgcggaaccgcgcg

SEQ ID NO: 100769 - DNA, 1070 bp, Homo sapiens
ctgtgatgaccgcgataccggatccttcaccttcctccagcaatgacctcaccccatatttctttttttttttttttgagacagggtcttcctctgttgcccaggctggaatgcagtggtgcgatcatggctcaccacagcctcaacctcccgggcttaaacgatcctcccgtatcagcctctcaagtagctgggactacaggtgtactctaccatgtctggctaattttcgtattttttgtagagatgggggtctcactatgttgcctaggtaggtcttgaaatcctggactcaagcaatccaccttcgttggcctcccaaagtaggattacaggcatgagccacggtgcctggcccccatacttcctgagaagccattggctgtgtcctcctttgtcgtcctgccaccacgccctcaggtctactttggaccatcttgtcttcccagcatgtgcctggcaagcatggtcctccctcctctcagccagtcagcggttgccagagacccaccaaatacgttttaaatgcaggacaggcaggtcaagggggatgctctgcccaccactgccctgctcattcccctgtgggaagatggtggcacaccaggcagcccatcgtggaggatggagctgggagccactgggaccccgggagctttgtctcgccacacgccccactccccccatggaaggttgggaacatcaccttcagctgtggggagaaggagaagaggaatgtctcgccagtaccatagaagcctttgctgagtcggatagccgaggaggagaaggctccaaatatctggaaagtggaagttgtagtctgcagctggaagggagctaggggtcctctggcaaccctcattcttcaggtttagtaatacaggctcatcctagaggacacctgggaagctggggcagagctggggcatgggggctccacacccaagagcaggaatccttatgcatcctttcccttaatgctccccaaggaagaactcctgctgccttcctcctctgggccgtcagggccctcctttttcttaaatatacttattctgggccgagcg

SEQ ID NO: 100770 - DNA, 1046 bp, Homo sapiens
ttgctctgttgcccagcttggactcgaactttcctgggctcaagcgaccctcctgcctcagccccccaagtagctgggactaaagtcatgtgccaccacacccagcttactctgaacttttatgacagatgattgttttttgtttttaatgtagaaatgagacaagggtacaaattggaactagaaattgacattgtcattgacaaacatggctaaaaacaaaacatcaaatcctgcccccgtgaagagttccctgtcacctcaagtttgaggatagtcctctaagagtgacctaagcataagtgaaagacacctcccctcacccttctagccccctacaaggtgccaggttggggtaaagagttggagatgatggccaggagtggcctccaacacgctggtgagaggcctgattaggttttggggaagatctgagagctctggcctcttcgtgagtggaacataaagccgcctcttgttgggagatcctaccccagtgacagaggaatcccccaaactaggctgtgccctggctccgtggcggctccagacccgggtagtgcctttgtcccctgaatactcactcccccggtccagagggccttcccactgcccagcctggagaaggcctcccctgacctgctctctcagtatcctggagagctggccagaggccatcacaggcatcatcctcagagctcctcagacctgggactttgtttttgctggttcagtgcattttgtgtatttaagagcaaacactagccaggcgtggcggcgtgtgcctgtagtcccagctacttgggaggctgaggcaggaggattgctcgaacctgggaggcggaggttgcagtgagcctagatcacgccattgcactccagcctgggtgacagagtgagactccatctccaaaaaaaaaagcacaaacactgcactgcctgtgctgaaattagtgaccacccagtgggctccaggctccgctaggtaacttcgttttcccagcagtggagtgggcaccaccttggtggggcagtgcccctgtgcc

SEQ ID NO: 100771 - DNA, 1044 bp, Homo sapiens
tctcaaaaaaaaaaaaaaaggaagaaagaaaagaaaaagaatgaaagttcttgcaatgaaggacttgtactccagcctgggcaacagatcgagactccatctcaaaaaaaaaaaaaaaaaaaaaaaaaacaaagaatgaaagttagctgggtacagtggctgatgcatgttatcccagcaaggctgaggtaggaagatcacttaagaccagcctgagcaacatagcaagacctcatcttttaaaaaaaaaaaaaaaaaaaaaaaaaatgaaagttgcaagccaataaatggctttactaatctgcctcctcattttttagtggggtcaaaggtgttaatgaagaagccccggtgcatagccctcttgtctgccactatcccttttccttccttgtcctatatacttgtctctaataacgttaacataatctgatcctattaatatttacttcatgttttcctgcaggaagttggaaatctgtatgacatgttccacactcgcaactctttacaccgtagagcttatcaacacaaagttggcaacattattgatacaatgtaagaaacttgattgtcatttccctataaaattttccttgatacttggctagagtatcatactaggctcaactagacatttctagatgagttcaagtgaatattaagtgattaaattgaaaatggtttccttaaagaaaaaaaatctagcataaagttaatttagttggaggaaaaggagggaagtggataaaggggcagatggagggaagtggataaaggggcagatgaagggaagaagagctggcttaggccagacgtgaagcggcagtgctgagatcactcaggacctcggcacaggtagtcacttacacaccattctcatcaggagaatgggaggtaggacatgaatatttaaattctgagattaatgacaaaagttaactttaaggattaagattaatgtctatttgtatcctttcaaatatttatcaaaattagtaccaaatggtaaaaccaacaggaattttacctcttcctgaccca

SEQ ID NO: 100772 - DNA, 1035 bp, Homo sapiens
gggagatctttgtttttactggcaagtttgcagttaccccttttcaccactagatggtagtgcctaacagagcttataactgcacgtgttcaaaggctgatgaaaaaataaaattcaattttatgatgatatttattaaaatgtaattctgtctacatgatcttataatattcatttaggaactgtaaatgattatatcattaaatgcattaaatatgtttatgaaataagttttgtaaaaggtttgtagactactagtaaaatgaaaaatctgacaggtttttaaaaatgttcctaagattgtggttagaaactagagaattaatatgcaatagacctttatctcagaattacttggaattgaggataattttgttagtcagggctcccaatgggctagaatctttaacacatcatattgtgcttacttttcctagcatgaacaaggctcagttatgatgtttgagcaccttattaattctaatggaattaagcctgtcatggaacaatatggtctcatccctgaagaagatatttgctttataaaggaacaaattgtaggaccacttgaatcacctgtcgaagattcattggtaagtttatgtacagcttaattttaactgactggtgcttttcatctagccttttcatgattccttctgagttatacatttggctattttagaggctaaatgataaaatatgagttctatgtttctactgtttaatgcaaaaaataaaaggcttatatttttttctacctctcaactgaattagttagaagttacttcccaaaaatatatatacagaaattctttttagagacagggtcttactctgtcacacaggctggagtgcagtggcacaatctcagctcactgcaacttccacctcccaggctcaagcgatcctcctacctcagcctcctgagtagctgggaccacaaacgtgcactaccatgcccagctaatttttgtattttttgtagagatggggttttgtcacgttgcccaggttagtcttgaaatcctgagc

SEQ ID NO: 100773 - DNA, 1089 bp, Homo sapiens
attatgtattttcttgaaactggagcattgtgagggagtactgacaatggaaaatgaatataaataaagttaaagccttcatatgtatttcattcatgcttgagtcatacctggtgctcataaatcaatccaggattatgagggtagatgttgacttcagtttggttaaaaggaagtacagtttgagcattgagtagacatggagatgtggagtttttcaagtcttaaatttaccaagagagaggagggtcaaggacagaaggctgtgggaggcctatattgattcagcaggagagttccctatcttaacagcaaaggaaggagagagtttctaggaggggtatgtttgaattattgattgttccttccaatctaacttctgttagtgtagataatataaagtttattatgtctactatatactgcagggattattattaagcaaataatgatagacttgcttatcctattgtaattttagttccttgggggagaggaagaagctgcttagttatatccagcgattggttcaaatccacgttgatacaatgaaggtaagaggatctgagtttgttatgttttttgaatataaagtgatataactcaattatgtaaaattcattttgaagagaataggaggaaatctgcttctcagtgatagaattgtgagtagtggatcttttctaaactttctgcactttctaaaatgagcacagagtatttaaatcagaagaagaactaaaatatgtttaagcatacagaaaagcataagtagaccactacccaacttgtcaaatattaatattttgcctaatttgcttcaagtctgttatttttagagcaaaatattagaaactattgaagacctcctttgtacattcttttttttttaatgaaatgtggtcttgctctgtcatctaggctggagtacagtggtgcaatctcagctcactccaacctccgtctccctggctcaagtgatccttccatctcagccaccccagtagcttggactatgggtgcatgccaccacacctggctaatttttgtattttttataaagacggggtcttcctgtgttgctcaggc

SEQ ID NO: 100774 - DNA, 1027 bp, Homo sapiens
aacaaaacagacaaaggaacactatattgcagtgttccagaaggaacactatattgcacgtctctgtgccccacctcataactcaaattctgtaggactccttagagctgtattgttctgtataataacaactagcttcacgtttaaattaattagaagtaaattaagtaaaaaattcctcagttacactagccatatttcaagtacttagtagtcactatggctaacggctactgtgttggacagagcagatatagaacatttccatcatcgcagaaagttctactagacagtgctgccttacaggttgccagtgggattagccctacccaccactccatccagttgctcacagtagtaccaatgcaatcaacttgttaatggacctttgtactgtttttacctaatttcctattttaccctccctagaccccccaatccctgtgcccagagttcaccccaagattaattacttgcaagctcttatcctggaccctgctttctagggagaatccagcttagacaagcactcctagtaggccctcaattttatgaacaaccattgatttataaaggtttttttaacaagtaagaaacaggccaggcgtggtggctcaggcctttaatcccagcactttgggaggccgaggcgggcggatcacgaggtcaggagatcgagaccatcctggctaacatggtgaaaccctgtctctactaaaaatacaaaaacaaaaaagaaattagctgggcatggtggcgggcggctgtagtcccagctactcgggaggctgaggcgggagaatggcgtgaacccgggaggtggagcttgcagtgagccgagatcacgtcactgcactccagcctgggcaacagagtaagactccatttcaaaaaaaaaaagaagttagatagaaacattgtcacgttaaatatacatgtcaattgtaagaagcattaaatttcagaaatgttggaacacaggaataaaattctttcataatctagatatcctggcccatgacttctt

SEQ ID NO: 100775 - DNA, 1034 bp, Homo sapiens
atatatatataaatagggaattttttttaatgtttgctccttgagttttcaagatgaaataaggagaaaccccataactttttagctctcttttaaaaataaatgtctccttctgtgttctgtaatatgaggataaataatctacttttgatagcatgctttgagatatttgtattcttaatttaatattgaaggaaggggttggttcccatagtacctggccagagggttatataccatcctgtctctggcccactgtggtaattccacatccaggtaccaccgccattcagagttgtctcaccccttctcgtgccttttctctccttgagctttataaacagatttgtacctgagccccagtgctacactcatccttgctttccagccctaagccatctcagcctgatgtcacaacccaataaatggggcactttcttcttttgtaaactattatcattttggtttctgtgacattaacttaattatatatgatcgtattaactcatgtagttctcaaaataggcagctgcttctgaagccagtaaaataaaattcagttagttattaaaaactaaattcctattagtaaggtaacaccatgattatgtgtgatatactgtttttgagatcatagttatcagtcattctcaatatctaattgagtccctaagaatattttaaaccttttaaaaatcacataaatatcatctcatgcctcataattctaatatatttaatacatcagtaaaatagctgcttattacttcccacactttgttctcagtattgttagtgcatcatgagtttcctgctagtgtttgaccactgggtactcctgaagatgttttttagtactagggatgcttttcagtattagggatgcttttttcagtactagggatgtactagggagtactgagtactcctgaagatgtttttcagtactagggatgcttttttcagtgttagggatgcttttcagtactagggatgcttttttcagtgctagggatgcttttcagtactaggga

SEQ ID NO: 100776 - DNA, 1037 bp, Homo sapiens
cgtgagccaccgcgcctggcccattttttttttttttttttttttttttgagacagagtcttgttctgttgccaggctggagtgcagtggtgtaatcttggctcactgcaacctccacctgccatatttcaaagccactagtgtttccttagtgatcagaaaccattttcataattagattcaactagttttcagattaagtatatgtagtctctcacttttgaaagtaatttattggttgtatatatgaatttgaagaatgtccataatcaggtaggaccctctgatattgttagatggtcagagttaataaaaattagaaagttgtcaagttttctaagctgtaaacactaaatctatcttcaagtcaaaataaatccattgtgtaacttagtattacagcttataataattctctttgcagcaaagcagtgaataaggagtatgaagagtatgttctaactgttggtgattttgatgagaggatctttttgggagcagacgcagaagaggaaattggaacacctcgaaagttcactcgtgacaccccattagggaaactgacagcacaggctaatgtggagtataaccttcaacagcactttgaaaaagtaatataacctagcctggcctcaatcttgaatgatctttttctctctgtgtgtgattctactaacagcagaagcatctttcaagttaaatcttgagcttcttctactaattcatatttctcatgaaagccttaaaaggtaatttttaaaactggcatttagtatttttacctcatttcttactattcatattttatatccattttcccagcatgactgggtttattagtagagtatatgtcttttgacatgaagaggaagttttgctttcttacagttctttctttgcttcaacttaggctccgttacgttgctttaaattttagtttgctttcctacccgtgacacaaactatgtgtttttctgtaacttcagccataaaactctggacttgattgttaatggccaaggcttaactctgtattt

SEQ ID NO: 100777 - DNA, 1038 bp, Homo sapiens
aaggaagtagataggtgctctcgctccctccatagcagtaaactctatgtgatgaccactaattaataacctgtattcccctggtgatcctgggaacgaaagtgatttcatagtgaggactttttttttttaattaaatttaggcttgagggatggtgtttgttctttgttcatgtaagacagtgtcttgctttgtcacccgggctggagtacatgattgaggctaactgcagtctcgacatcctgggctcaagcaattctcccacctcagcctcccaagtacctggggctacaggcacatgccaccacacccagctaattttttaaatttttgtagagatggggtcttaactatgttgcctgggaaatctggctttttaataaagagtcttagtcatgaatagaatatttcctttcaatccattatttaaatgaattttaaaggtgccttttttctcctcctttttttttttagtttaatacaattttttagtaaaatgaagaaatggatggacatgtcaaatctaccacaagaatttcgtgaacgtatagaaaggctagagagaaattttgaggtgtctactgtaatattcaaaaaatatgagccaatttttttagatatatttcaaaatccatatgaagaaccaccaaagttaccacgaagccggaagcagaggtgagcccttaatccttatataattgacataaagattatgatacaaactaagagaatatacttttttgaaagtctgttttttatgaaaagtattcctgcaaagaacttaattattttctttttaaatccatgtacaattatccatatttggaaattcaggataatacttttacttatttttctttctgttgttgtttttttttttttttttttttttttgaggagtctcattctgttgcccaggctggagtgcagtgtcctgatctcggctcactgcaacctctgtctcccaggttcaagcaattctcctaccttagcctcctgagtagctgggatcacaggtgtgcaccaccccgtctggc

SEQ ID NO: 100778 - DNA, 1171 bp, Homo sapiens
gcgcctggcaagtattataatcttaagtgaccaccattgtatatgtggtccagtgttgaccaagatgttatgtggcatatgcctgtattagatttggagtgtaggtgaaagagtttttttcttttttttttttttaagagacaggatttaagagacaggatctcgctcagctgcctatgttggaatgtagtggcacaaacatagctcactgcagtcttgaactcctgagcttaagcgatactcttgcctcagccacccaagtagctgggactgcaggcaagcaccaccatgcctggctaatttttttattttcatttttagagtctacgttgccctggctagtcttaaactcctggcatcaagtgatactcgcacctcagcctcccgagttactgggattacaaacatgagccaccaagccaggcttttatctttagattaatattaatttagcatgttatagttgtaaaaacacagaactaagagtaaggagttttatacccattactgcaactaacagctttgtgaccttgggcaaatatcttcacttctctggccctttatctacataaggaaaattgagaccagataattctacatctcttgtttctagaattaaagcattttaacataatattatacctgttttgctgtttgtcttttgcttgccagggagaagttacacactggttggcatgttcattatatgttgcatgccgcaaaagcattattcccacggttggaaagggtatcatggaaggcaactgtgtttcacttaccagaatactacgttcagctaaattaaggtaaacctctttgatgtttttaaatgttatataagctctaaattttggaatcagttttctcttgttttgagatcatttgacttcatttaatttttattttatttatttatttatttatttatttttgagacgcagtctcactgtgccagccaggctggagtgcagtggcacagtcttggcttactgcaatctctgcctcctgggttcaagtgattctcatgcctcagcctcctgagtatctgggattacagacacacaccaccaagcccggctaattttttgtattttttttttttagtagagatggggtttcatcatgttggtcaggctgttctcgaactcctgacctcaaatgatctacccac

SEQ ID NO: 100779 - DNA, 1028 bp, Homo sapiens
tgcgcagccaagcgccgaggggcgggaaaggtgggtgtagctcagccaatccacccatcattttgaggcgggaaactgaagctcaggaaaggagcggcctaggtcccgcgccgctcagaccccaggcttcctgaccacacttccctctaccccgccaagcgccacaaaagtcatggtgctgcccttaaatcagtaagaacaaatataatggtaaagtgaaaatgaactgcatgccaagacatcactgcccagagctttaaatggaccctcagttccgtctgaaccccttctgtgatccccatttcacgcaagaggaagcggagccctagacgggttaagctacaggcccaaggtcacacggttagagatggagccagacccagggtctgagccgtttaacctccaccctctgcttcaccagggtggagctgccggtcgctgtgcagcagtttgatcaaagccaatgtgcacacgaagctgatctcagccctacgtttcctcctccgtcagagcatcgtcctgatgctttgcatcagtgtctggctctgaataaaacaaatgtcagttataattacttgatttttttccccatcattcttgcattttatcctcgcaacagccctgtgaacatggcatggcaatgagtattagactgctttccaggtgataatggcaaggctcagaaggttgtcttgcctaggattattctaatatagaaacccaggctgggcgtggcggctcacgcctataatcccagcactttgggaggccaaggcgggcggatcacttgaggccaggagttcgagactaacctgggcaacacggcgaaaccccatctctactaaaaaaatacaaaaactagctgggtgtggtggcgcctgcctgtaatctagctactcgggaggctgaggcaggagaattgcttaaacccaggaggcataggccgcagtgagtggagatcacaccactgcactccagcctgggtgacagcaagactctatctaaaaacagagaaagaaacccagacg

SEQ ID NO: 100780 - DNA, 1074 bp, Homo sapiens
cacctcaggtaatccgcccgcctcggcctcccaaagttctgggattacaggcgtgagccactgcgcccggccagaaactgccacaattttctaaagaggaaaaaaaaatcccttctaagctatcccctcccgacgagacccttcctgttcctttaaaatgggccgggcagcagaaagacgagtgagtgacagcagacaggccaatcagaagcggccccgtctcgggcccaccccgaggcctggcccaaccgcgtcccggtagctcccggaataggagcgttgcgagacggtcggttccaagtgggcctgggcgcgggggagaggcgggtctgtcctcgggaactgcaaggccctgtgagcgggaggactgggatcccggccgcggctgctggaagcgtcgaagctcagcggggccgcggacactgacctgtgcttagaactcatcctggcccgcagagcctgccgcgagtccctggcgtcccctgtggcgggctcttggagccactttcccgagcggaagtcagcccgcggctcggactccggcgggacctgctcggaggaatggcgccgccgggtgaggagttgcgcgtggctttggggagagggctgtcgcccgcgggaggttactagtcgccgctcgagagccggccaggcgggatccccttcccctgcgggacaggggcatgggcacaagctctggctggggcgctctcggatcgagggtccgaaggagggctgcgagctggtgggagtgcccgcgacctggcggggttggtgcctgggggaggggtgcagcgcggagctacgggtcgccccgaggctcagccgtggggaccgcggacgcgcttagcctaggtctggcctcattcatttcactcgcgcgggcttctgggccaggcggcctaaggttctggtcccggcgctgccccttactccgtgtgaggttttgggcagattgtccttctttgtgctgtagtttcccattcagtgaaaggggcaaagaaaaccctcacttctctctgggagcctggagcataagttctcaagtgacactctaggtgcaaacttgcagtc

SEQ ID NO: 100781 - DNA, 1176 bp, Homo sapiens
ttattgtactggggaactaatcctagggagagctgcttaaggaagaggtgcttgagctgaattctgaaagtaaaaattaagccaagttgaggtaaaaacatggaaaaatgctgagcaggaaagaacctggcttcttagaggacagagaagaagccagagagcaacagatagcgggaagcgcgagggaggagatctggttgagaggctggcaaggtgtgaggattcaggattgggtttgtccttagaggcagaggacttacagacatctttcagatgggaatagtaggataaggcctgtgctttagatgcttggaggctgctgggaggactgtccttccaccagttgaagagcaggctccctgccttcccaaggcttctcctcaggttaaacccctggattccctcgcccttccccatgtgatttggttcccagatcttggtgtgcatcatcattgggactgtgtatagcaccttggaagagtgtagagtgtactgaatggttgtttccccccaaggttcaagcactgtcttcctgttggccctgacaatcatagccagcacctgggctctgacgcccactcactacctcaccaagcatgacgtggagagactaaaagcctcgctggatcgccctttcacaaatttggaatctgccttctactccatcgtgggactcagcagccttggtgctcaggtgccagatgcaaaggtaaggctgcttttgtcctggtggtcagggtggttcaggagaaccttcatcccctcactatattcctttggggtagttcaaaactaactcttgctcatttgaggataaccaaggttaatccaatataagaaatatttggccaggcgtggtgactcacgcctgtaatgccagcactttgggaggtctaggcaggtggatcacgaggtcaggagttcgagaccagcctggccagtgcagtgaaaccctgactctgctaaaaatagaaaaaattagctgggtgtggtggtgcatgcctgtaatcccagctactcaggaggctgaggcaggagaatcgtgtgaacccaggaggcagaggttgcagtgagctgagatcccgccattgcactccagcccaggcaacagtgtgagactcagtctcaaaaaaagaagtttatttcagtttgacagatctgtttttgtttttgttt

SEQ ID NO: 100782 - DNA, 1094 bp, Homo sapiens
ggatgcttcacaggcacgttggttgcctagtcatgttgcctaggagagcagtatgtctctctttgtcttttggagcattaagaaattctgggaaacgctgtgctttgtaggttgtattcaaatggatggccatggactccatctgtgtcatgatgcttcctgggtgcacagcagcctggcccactggctttccacccaaagcagctggcgtgttctgtgccatgactcctgggcttgggcctgcatacaaggggccaaggaaggagccctcccaaaactgcagaagatagtgctctcctcaaatgtctgtttgatatactttactctgcctaagcaccatttttgagaaagtatgaagtgactgagatggtcttcagatttagagtgagagatgtcacgaagctgtctgcagtggggttgacagtggttcgtgcatctcatttctgctgttacttgacatccagcatatttctgttttgttatggcaggaccttgttgctcgcctggatgaactcgggggcgtgtatctccagtttgaagaaggactggaaacaacagcgttatttgtggctgccacctacaagctcatggatcatgtggggactgagccatccattaaggaggtacctatctaacaattttcaggcatgaaacccaaaggggtcatcagctgtatctgctaaggatggcttttatcagagaggaatgttcagacagtaccttgggatgctgtcactcagtgtcctgggttagggattaagaatgagaaatagaaagatgtaatgcctgtcttcaggaaatgggttgctagtgaggtagacgtgtaaacaaaccatgcttgctttaaatggggtatgtacatgtcacgaggtagtatcaaggaagccacgtgtattactcctgtttcatctccctttcttcccagtacccttttctgcttgtcgcctgaatgctttccactctggtggctcattcagatccttctctgggctcacaattgcttctcctcccttcccccttatgctcagcaacggctaaatcttagctaatctttgctgatggacatagttcactgagaggcatgtgtgtctatc

SEQ ID NO: 100783 - DNA, 1526 bp, Homo sapiens
tgggttttaagtgagaattttcatttctttatgcattatgagttttgtgccaagtttctttaagtaaatagttatctgtcttggataattggaattaatttcatattttctccatgtggtcaaataagttattcatgtgtttgcattctttttgtgtctcttcctttgtcctaagtgtaggaggtctagaaatatactcccttttaatttctgttatgggtgaaattgcaagagtgtggggtcttagggtacagattgtttgctgattgtcctatacacagtaaagtagatgaattaatgatattgtacttatacaacttaaacattttcttcctttatttccaagctgctgctaaccaggtacttggctggagtaatttcgctgtcactgcttttgacaaaacaattctggtgaacagtcacccattttaacgtgtcaacagagtagtgatggaaaattgtaattggtccaattaaagaaaattctttcatgttgactgtgaataacactgtcaggaacaagagagcccttttgttggatggtagattttaaaaaacaaaactgattgaaggggaaaatgtttcctcctaagcaaataacctccagaattttaataatgccttttaggttccacttttttaaaaaattgcttttagttttctcctctaagcagcccattagttcttaatggagagttattttagtttctttttaatgtacattttagctataaagtttggtcttataaataaaaactttgcctcaatgtactacttacaagtaggttgggaggaaaggtagcttagctgggaggataatgagaatcaggaaagaacagattttcttgtagaaggactttggagacaaacagtcctacatttgaatgttggtcttgctaatgttgtggtaacttgcagaagttatttagcctcctttagcctcagtttcattttttgggaaacattgataatagcaatcttttatagtttttgtcaaaatttgagttaatgcatgtaaagcacctatcatgatgcctggcatatatagacattaacaaataattactattatatatatttcataatatagtttcatatctcagtagttatctggaagtaccctgcatttgtgtagtaagcattattatgatttttttttcagacagagtctttctctgtcgcccaggttggagtgcagtggcgcgatcttggctcactgcaacctccacctcctgggttcaagcaattctcgtgcctcagcctcttgagtagatgggattacaggcgcatgccaccatgcctgactaatttttgtatttttagtagagttggggtttttctctatgttagtcaggctggtctcgaactcctgacctcaagggatctacctgccttggtctccaaaagtgctgggattacaggcgtgagccactgcacctggcctgtataataagcacttattaaataactgacaaatcatgaatttcagtttataaaggaagatggaaaaaaaaacaaccacatcc

SEQ ID NO: 100784 - DNA, 1231 bp, Homo sapiens
ttttcctctacatttttgttgtcattgtgaaacatatgtgggatcacattgtaaacttctcaattttacattacactgtggaaagctaccaggagtttgaattttaggagtggtgggagtaacaaaggaaaagaaaacgttggaaacctaggggtgttcatcttagatacttttctccacatgccaatctgtgattaagcacgagggtcaggcatggtgactcatgccccagcctgcactttgggaggctgaggcaggtggatcacttgatctcaggaccctgtctctacaaaaaactgcaaaattatctggacgtgatggtgcatgcctgctgtcccaactaccagggaggctgaggtgggaggatcagttgagcctacgagttttgagactgtggtgagctgtgatcgtgccactatactccagcctgggtgacagtgagaacctgtctcaaaataaaaaaaaaataagaagcacgagattgcccaagtggggtgggaagtcaaaaaggtaaggagttggctagccttggacagtctccaggagacattttgtagctcctgtttgttatatccatgactttcctacctgagttcttgctaagcccattgtcattcttaacagggatgtttttgaactaaatttcatgaacgtcaaattttccagtggttattatgacttccttgtcgaagttgaaggtgacaaccggtatattgcaaataccgtagaggtaggtgtttttctttccttcccattgccatgttagtatatccaaggatatggccaaattgacacagtattaattgtctggtgcattgacttttctctacaaccaagctaatgtgtttatgtggagggagggctgcattcagtctttgctgtttgacagacttagtagctaaggcagtaaatcaagaacttggtcatagtgaattttcttttatttgtaagtttttcattttccattataatttagcattactgtcttacatgaaatttagttagtagaaaaaataaaaatcacccataattccactgagccttaaactcttaaagtgttttgtgtgataggctttggtgggtttagaaaagtgcttgatgccaaataggtgacaaaaagcaccaagtgacacatacgtaacactataatgaagctatttgggtaaaggataaaagaaaatcagtaatctttcataatgaactttgttgatgtttagctaactctagctgg

SEQ ID NO: 100785 - DNA, 1065 bp, Homo sapiens
gggttttgccatgttgcccaggctgctctcgaactcctgggctcaagcgatctgcccacctttgcctcccaaagtagtgggattataggcgtgaaccaccacctgcattgctttttcactgggctgagaactcctatgggtgaaaactaaatattattattattattattattattattcttttttttttgaaacagagtctcgctctgtcaccaggctggaatgcagtggcgcaatcccggctcactggaacctccgcctcctgggttcaagtgattttcctgcctcagcctcccgagtagctggggctacaggcacgcgccaccatgcccagctaatttttgtatatttagtagagacggggtttcactatgttggccaggatggtcttgatctcttgaccttgtgatccgcctgcctcggcctcccaaaatgctgggattacaggcgtgagccaccatgcccggcctaaatcttattttttcagtgcttggtttccatttaacattacttagaggaagaaaaggatagagtggtctaaagatgtttttccacattgcaggcccttcagaactctggcaattcatcttccagacttagcttttttttttcttttttctttttttgagatggaatcttgctgtcacccaggctggagtgcagtggcacgatcttggcttactgcaacctccgcctccacctcccgggttcaagtgattctcctgcctcagccttctgagtagctgagattacaggtacacgccaccatgcctggctaatttttttgtatttttagtagagacggggttttgccttgttggccaggctggtctcaaactcctgaccctcaggtgatctgcctcgcctcggcctcccaaagtgctgggattacagatgtgaaccactaggcccggccaagagttagcttttatttattgatttaataacagctttattgaggtataattctcataccataaagtttaccaattaaaagtatgtaattcaggctgggcatgagccaccacgcttgtaatcccagaactttgggaggctgaggtggga

SEQ ID NO: 100786 - DNA, 1037 bp, Homo sapiens
cttgtaggaatcacttgacaataaatgtaagggttgatttctggactcataattctatttcattaatctgtattgtccttatgccagtgccacgctgtcttgattactgtaacagcttggcattttgtaacatcaaatctggtgtttgtccaagtgtttctgtgattgttggaaaaattatctaagtacaaaatagcagaaatggctaatagctcttgttcatgcaatgataataagcccccattgaggccatttactctccttttcctccctagtgatggagtaagcattacaaaatcttctctcttcctccttattacattagaggtgtgtgtgtttgtgtgtgtgtgtgtgtgtgtgagtgtgagagagagagagagtcggctttgacctttgccgtatatgcaacttttctttgtaatttcagtaataatcacacttagagcctcagagcaggtcattgggtcctgtttgtcctcccaagaaatgctcgacattggtcagagtgcattaacggtggtttggtgtggaagtcctgtaatagccctcattgacattggactggctgtcaggggaagcatcggttttggacgctctcattagcattaattgcccctaatgcaccatcatttttgacagtaataagctaaacaggggtgttattactcccagcagaaagactgcatttcctggcgttaaaacattttttgagatgtatatggcatgtggtgcaggcaaagaaaggaatagcatgatccagtgtaaagcaggcttagctgcatttaaagtggagaaataagtccctttcctattataaaaacgaatcctgcattgttagttggaaggaagaagcagctaatcaacagggatcctacactgaactctttaaaagagggctttggaaaaagttacgatttttatttctaaatttgctttaaaagagtagcataaaaatgctttgcttttgagtgtttccagagacccatttatagtgagattttaggagcagaaggatttgttttaaactgttccctatt

SEQ ID NO: 100787 - DNA, 1014 bp, Homo sapiens
attaaatgaatgagttcttaagagaatgagttagagaaatagggaattacctagttaatcttgatgaagattgcagagtagttaactctgaagacagattatttttatagcatggagtattattgctaatcctcctacctctcccaaaattggagggctgctaagcccatcaagcctcctcctcagtcttcttgctatggaatgtttcctactccccatttggggccacccatgggcagacttgggtcacagttccttctgtgctttcataacactttgtacatccattaaagcagcaacctggtttattataattatggtttgtgtacgggacaggaaggatttcttgccatctctgtatattccctgaatggggaaagtgctctcagcaggtgtcaaatcaaagctctgtggctacttctttgcctgagccttccattccagtttgttttccagtggaaatgatgtcagtacttgtcgggttgtgttttttgcaagaaagcttgctctggttctgagccttgcgtgagttgtaacgctgttaactcagcagagagcccaaagagccaaagtgaggctcctagctcccttcttgggggtgtctattcaacctgatgggccatcgtccctcctcctccactgccataatttcacccagttgcctagactcaatgacaggcaatgatcctaaatatagttctgctatgaattcataggtggctgtgaattcaaaagtagatggtaatatccttacagcttctggtaataaacctttacagtttttttttttaaagcaaaacaacacccctattcaacatgataattgaggctgttgtcataaaatagttattacagaggcaggaaagaaggccgttagaaggaattacttgataggtatctttatttttaatttttcttctttgcccttgatttgaggttgtcacacctcgatatggtatttcagaaaactgccagagctatccttcaattatttgcccagcccgttatctctat

SEQ ID NO: 100788 - DNA, 1027 bp, Homo sapiens
ttttgagcaaagcagcttcatctctctcatcttttatttccttatctgaaaagcagtaccttacagaattgtgaggattaaatgagatagtctttacaaagccagtgcctttcacatggtaagcactcaataaatcctagctatcattagaacccaattcttgctgatttgaatgaaaggtactgcttaaggatttttccccttatttattttaaaggacacatgaaaagatttactttttttcttttcctttttcttcttctttttttttttttgatgtttaccatccatccaaagccagaaaaagacattttaggcctcggaatgggagaggttggaaatattactgggctgggtcagtgttattatcatccttgaagactcttgttctaggattttttcatgcctttactcaccttaaagaatagaaaactttatatctgcatgtgaattcctgaacacccaccaattgacctggcaactgtcttctctattttcctctagctcagagtcaagatctccactgaagttggcatcacaaatgttgatctttccaccgtggataaggatcagagcattgcacccaaaactacccggtaggtgagatgccacctgatcactcagggagctgaggctcaagagctgagaggagtatgcctaggcactgagccctgcaggcatcagttctgtgtcagcagccatccagcttacatcctaaattaaagagtctgtagttccactggtcctgcaccggggattctgcgaattatctaagtggatttggagattgtatataccagtgtttagtccatgcacaaactatttattaaccagtcctcaacgaggtaaagcgcttacctcaggatgttagtctgagtcagtcagctatgtcactaagcatattatttagttcagatgataatttttaaaataataagaccttctcaatgaaggaagcaaggtattaatttacattctggtgcgatctccttatcatcacagtcctgaatttgcttttagtgaccta

SEQ ID NO: 100789 - DNA, 1054 bp, Homo sapiens
ctgaaagtacccttctttcttttgtgtctcctacctgccttgtctcgattttgctcacgtgtgctgctggcatcaatcctgtaattatttctccttgcggttctgccagcccggctctcctgtgtgcctgcagaggccacacgtgagctcctctggtgcctgactttgttggagttgagagccttaggtccttgaagtgaaagcccagaggtacaagcatctgtacacagcatttccccagatcctgctggaagtttattctgcacttttctcagtccaggctttatcagtccaatttgcccccaggttgcagacagttctccacatctgtctgtccacaacagaagtgttactatgggagagggtggttgaggcaatgaagtgaagtatatattttctgcctgttctcagagatatactgatcctctctgaagactaactctatatgcctctttcagggtgacatacccagccaaagccaagggcacattcatcgcagacagccaccagaacttcgccttgttcttccagctggtagatgtgaacactggtgctgaactcactcctcaccaggtcaggaagacacctagacagttctcttaacctgaaatgtgaatggatactagagtttacaatgtggtctataacatggactagagagaattccacgttcctgctttcaggttttgaccgaaccctgacagtccatcaggttctcccacatgacactctcacccttctactggttgtagtcctttacctgggatacacccttctttctaaaaagttagctggtattgaggagaggtacttaaggcagatttgcacttaattaaggtcattccttcctccctccctccctcagatggactcttgctctgtcacccaggatggagtgcagtggtgtgatctcagctcactgcaacctctgcctcctaggttcaagcgattctcctacctcagcctcccaagtagctgggatacaggcatgcattaccatgcccagctaatttttgtatttttagcagagacagggtttcaccatgttggccag

SEQ ID NO: 100790 - DNA, 1330 bp, Homo sapiens
cacacagatatgccacatctggaagttaatttttctgccttaaagttgaagaaatcaaagcacaaggaagttaagtaacttgctcagctaataagtagtggaagcaaatctgtcttccaagccgaggctctctccatgacactgggctgctctgcttgattagaactctgccttaccatcaatacccaagcctcctctactaaatctttagctggaggcacaaggaaattgaaaatgggcctcttacagttccacctcatttcctttcttttcaccctctggtgaagcagttaattgggcagcaaagtgaccaaaaggctggcgggaaaaagaaattgcagcaatagcaaagggcttaaatcatctgcaaactgggcagtcagcctccaactagtcgagaattggctggacccgtaagttaaatttccttccttgtaccagcaaaaagttatctctgagctgggaactagggtggcatggccactccttctactctctggggcaggtctggcagatcccagagctctcactgtgacaaagcgctaataaccgtctgctgcccggtggattcaatgttaggcccagggagaatcttgaaattatcagatgaaagattgtattattcttccatctagacatttgtccgactccataaccagaagactggccaggaagtggtgtttgttgccgagccagacaacaagaacgtgtacaagtttgaactggatacctctgaaagaaagattgaatttgactctgcctctggcacctacactctctacttaatcattggagatgccactttgaagaacccaatcctctggaatgtggtatgtgcctgaatgtaccccgacccaggtgagagtggctgtgccccaggcactggtggctctttttcaggggcatggggctcttcaccttcgccttgcctgtgcctcctataaataagcttgggaggtgaggcactgtgtgcagtctccataaatagtcctggggtcatgcacggggcttggcaacatggtacgtgcttaataaatattaagtgagtgaaggaagtataaactttgtgagtgctagtatctgtgaatttctataaacattatacaggaaggccgttttcatattatagcaggcactattggggttacgtagatgtgaaagttaaggccctggcctttgagatatggcatagctcatgggagggatgagatctgaattctgataacaattcaggatgatgtagaaaagtgaattgtacaatgtgcaaaatgctaattaactaataaccaacatttgtgtagcatgttgttgtttacatagtgccttcctg

SEQ ID NO: 100791 - DNA, 1063 bp, Homo sapiens
agcagaggccaaattgcaggctttgaatggtggttgactcactttgcaagacaaaggggcagctgcgttttctcgtgtggtattcaagacttcttttcttctcctggacttcaggctgtttttgtacaagagcgcatactcatttctttctctctttttcaaatgtgactaaatcacacttcccagggacaccaagctgtttctgattgcaactgtaacagcctgtgtaccagctgggatttttgtattaagcagctctatggggctactataccagcagaaaattagaagtcttgctctaaaaagcattttcagcaaatacttgttttgttcttaaagtttttactgcctcaatttgtcagctaatggatcagaagtgattgggactgcctggagcttttttcagttatggtcttagatgtgagtcagagaatattatctattgagtttcacccacttctctgcccctgtgcttttacagactgtccttatttttctaggctgatgtggtcatcaagttccctgaggaagaagctccctcgactgtcttgtcccagaaccttttcactccaaaacaggaaattcaggtatatcccaaagggcctatccactaaacgtgggagaagagagggcaacaaagccctggacagtggctctgctccctttaacttgttttgtgatgttttatagtttgatcctcacaccctgtggattaggcagggtaaatggcagccccatccttgaactgagaaaacaggtttaaagagtccggtgactaacccccagaaagcagagagttgaagatgaaatcagaacctgagtctggttttcctgacatccggcaggttcaaccctcagaccacagcttattagctatgagcgcagatggttctagcgtttatcctccctgctcctgtgtaaatcagggctgatggggcgacaggtgggaaaactcacctgggagaacagggctctacttccttaggcaagtccttggataagcaagcctggtcctgtcctgcacgcaggactgttgtgagaatcaaagttgataacagatgag

SEQ ID NO: 100792 - DNA, 1172 bp, Homo sapiens
aattataaacaaacatgaatgcatatcctcaaagctcagagaattttgagaaaacactcattagatcttacttttggaaagttgcctgtgttcctaattgttgcttttaacaaaagaattactgtttaaatctagataaatctagaagccttgctacaggttttcagaaaccagacctagggtatgggcacctgtccttacatttcagtgatgagaatttcaaatgacatggaacccacggcaagagcgtgaatgccaccagctgccggtgggtttatcttaccaattcttagagaacttagtgggggtgtcagttaccttataaatgcagtttctgacctttcagcttcatggtctcacctgttttaaaatagtagggtttgtcatcattaaaaatgatgttcaggtttgagttacacgagcccatttgagagcaggtgctgaatgcctttctaaagaaaaagggaacaagtttccccgagggcttataatagggtggttgtcacttggaagaattgcctgtccttctaggatgcatgaactttgaagccttggggctgttgatgggattagcattggcatggcttgtgttgcttcccttttaagttctaatgcctttttaatttatttctccccatcattcagtggatccggattggtgccaatgtctccaacttcacttttgctcctagcacgattatatttcacctgggacatgctggtaagtgccccaggctgctaattacctgtaacgtcctctgacatttagcctgcccacgcaaaagccctgttaagtagacccacaacctattacctataatgacttaatagcattacatttccctcttcctcctggccttttaggacagttaatacgaagataaacctgtttggtccatcacttagaacagctgtcattatattgggctttgttgtactgtgccactgttggcagaccatttaccctcagttaataaccctgtttatttccagagattactcacttatcgtatctttacattgagcaatcttcctggatgaagagcattaatgcagtttccaaaggttatctttccccacgctatcgatcttcacatttgctgccggctctgtctgtgtagtaatagaaaacagtcctttccacagtcagacatgctatcctgcatcgttct

SEQ ID NO: 100793 - DNA, 1036 bp, Homo sapiens
ccaggctgaagtacagtggtgtgatcaagctcactgcatccttgacctcccaggctcaagcgatcttcctacctcagcctcctaagtagctaggactacagacatggaccattacgcctgactaattttttgaattttaatagacacgaggtctcactgtgttgcccagggtggtctcgaactcctgagcaatcctcctgcctcagcctcccaaaatgttgggattacaggtgtgagccactgtgcctggccacacacttggccacagctgagaggcgaatatattgagttagctactttttggcatcagagcaaaggaataaaacaagctggtataggagtacagaccttttcatgatccaacagttgctatgtctaactttcctcaaccgcagggcatcattatgtttcatttaattggatgtcatgacacctcttcttgcagctatgctgggactcatgtatgtctactggactcagctcaacatgttccagaccttgaagtacctggccatcctgggcagtgtgacgtttctggctggcaatcggatgctggcccagcaggcagtcaagaggtaaggccagacatgagccagggatctagagtagggttagaaatactcagctctgccggcctagctctttgaagggtaggtggcaaaatgatttgtgttcttaggggcaagtctgacaccctaatctagcccagtacagaagccagaagcactttgaagtcagaaaagagccttagtggtcagctttgaatgtattacaaccattgtaattgatgccccaatacaatagaatgagagaggaaaattattagctttatgaagatgaaaatgcattcatagatgtggcagaagattaatttgttagctgtgtaaaaattctctgctgctacagagaatcctgccctgccctccccaccctcaacatgtccccgagagctgctcctctgtaaccctcacagctccaggagcttgtcccggaagcacgaggtctgtgttatttcccacagaagctgcagcaggtt

SEQ ID NO: 100794 - DNA, 1020 bp, Homo sapiens
gctgcttttcaacttgctagatgaggttgtgactggaccagggcaaaagcttcctgagttagcccagctgatgggataactttgcagtgagcagctttggcctggctttgactgtataagacttcattctcccttatatcccgtggggtacttacttatttatagacaagcctctctctctgtttccaggacagctgagatgaggataagacaaatccaaaattcattaaatgacggtcccatggcaaatcctggcacaccttgtcactgtttctagacttttctgtaacaccgatctctagttgggctaaacattgtggtctggggagactgtaatttatgaaggactgatggccacagatcaaagccagcatcagaatccaggttcctagcactcagggtatgttaaaagggctgctccccatgtgactaaaatgtgaagtgagattccactcattctccttctgcatatcagtcctaggatgggagggaagtggagggaaggagaaggagagtctgatgcttcactgatctgctccgctagaccagggtctggcaaaagttttctgtaaagagccagacagtattttaggcttaactggccatatggtctcttggcaccaactactcaactctgtcactgtcatgtgaaagcagccatagactgtataaacaaatgggtgtggctgtgttccaacaaaactttattcaccaagacaggtggtgggctggatttggcctgagtggcacagtttgctgacccctgccctagaccaacaaagggaggggaggtatttgaattttcaagtcatgttctcctttatcctttgccttggaaatggctttccctgccaaagccacaaaaccatctaatttctaatcctctgaaaataggagagatcaacaaaagcatagtatttggagcctttccatggatgtgtgagcataagctgggtcacctagtcctcaacacagaagggaactgcatttgtttgtttgtttgtttgtttgtttgtttgt

SEQ ID NO: 100795 - DNA, 1910 bp, Homo sapiens
cattgatttgagcagacataatgtgggacgtaagttctagccgcagtcaagagttgtgggccactacccttcggctgttcttatttcatactcatgccatcctttctgcatgaacatttctgaatgcccacatattagtgtacctaagaacctctgaatactggcaaggaattaggggtgcacaccccagccctcaagattaattccatgcctgtgcatgtcttttggaactgctttattaatgggtttggagtctgccattctgcaagactggatcattatcaccttagtcctcacccctgggaagagctgccactgaaggatggtgtgtgtgtgtcagcaaccctgcctctgcttgctggagcctgctgggatcagttactcactgcagtcacctcctcagcttcacagtctgtctagattgtcattttcattcattgtgcttccccatccctccttagagtctagggaaaggcagcggaggggaaacaaagagtacaggagataggttcttatcccctttaacactttctgtgagctgagtcccatttttgagaatctttctgtgttaggttagatgctgagtgtgacttggcaagaacacggccacacggcaggaatgtgcaggtttctgtaatgaatggtcaggatgtcatgttctaagctacagaagggccaagtgttggttggcagagctggagtctgggagattgatgatgagcattatttaaactttgctctttgttcatctaattgaaatttacactgtgtttttggccttgcactgtgagaggtgtgcctggaattacctcatctccttatgttgtcacataccactttcttagttattattgagtttgttttgttatttgtatttaagttgtcatcagcttaattatgaactagctgtctcacattcttttgtaaaatgagatggggcatacataaatagacttgggagataaatgattattcccttataaatgggatcttagagcgggagagtaccttagtctctctgttgtcaccagttaggaactgtaactgtgaactgaaaccttcagtaattctgtgtttgtctccattttctttcagaacagcacattagttccagaagaaagatggaaattctgaaaactgaatgtcaagaaaaggagtcaagaacaattcacagtatgagaagaaaaatggaaaaaaaaaactttatttaaaaaagaaaaaagtccagattgtagttatacttttgcttgtttttcagtttccccaacacacagcagatacctggtgagctcagatagtctctttctctgacactgtgtaagaagctgtgaatattcctaacttacccagatgttgcttttgaaaagttgaaatgtgtaattgttttggaataaagagggtaacaataggaacaaaggcctgattgagagcttattctcatacttttgggtggtggggtccttgggtatatgacatgaggacttagttggaaatgctgttgatgccagcatatttctccaggcctttcttggtccttcttgccccttgctcctaacagaactgagaactgcctggaaaggccagcttccttttttcttctccagcagtgagcaccagctgtctgcataggagccctgttggtatctgaaggccccatttggacctctaggggtccaaggggataggtttttatcccctttaacattttctgtgagctgagtcccatttttgagaatctttctgtgttaggttagatactgagtgtgacttggcaagaacacagctaaacaacaggaatgtgcaggtggactgcagctaggacctctgctcaaggctcttgtcttggggccaggcatggaggctcacgtccgtaatcccagcactttggaaggccgaggcagggggatcac

SEQ ID NO: 100796 - DNA, 1780 bp, Homo sapiens
tcaaaacccttcagtggctttacattttactcaatcaaattggaggtatcagggtccgcccccactcctctctgatcatacctccttccaccctccctcctgatcacttctctgcctgtactggcctcatttccccaccctggggcctccacacttgcttttttccctgcctggaacgtgtttccctcagatacacaaatggctccctctctcacttcttatctcttccactccattcccgtctctgttcttcagagagagccttctcatcacaaaataaaatgatgcccttaagttttttccaaaatgcttatcactacctggcatatcacatctcgacgtgttcattgtctgcttccatcctgagcatgtagaggctccaagaaagcaggggtttgtctgttttgctcattcttcagtgcttggtattcaagaaatatttgttgaatggatgactacatgaataaataaacaacaaaacctgaaacgtagcagcctttagtaaatgtatgttgatttgagatttttgttgaagtgcttccctttgcatttatttatttttctcaactttatgtttggaaaacatcagatacacagaaaagttgaaagaatggttcattgactgaccatatgttcccaacttagattcaagagttgttaacatttcacaattcctgtatatattcttgggtgtgtgtgtgtgtgttcaagttaaaagtcagttacaggctgggtgaggtggctcacacctgcaatcccagcactttgggaggctgaggcgggcagatcacctgaggtcaggagttcaagaccagcgtggccaacgtggtgaaaccctgtctctactaaaaatacaaaaatcatccaggtgtgttggcccacacctgtaatcccagctactcgggaggccaaggcaagagaatcacttgaacccaggaggccgaagttgcagtgatcatgccattgcactccagcctgggcgacagagtgagactccatctcataaataaataaataaataaataaataaatgtcagttacagaaatatgacactgaccctttgcatttacaagttggttctaaagagtggtgagtcagaagagacgtcaggcagcaagcgacttgggccatggcctctgacctagacttctcacctccggaggtgcccgagcccactttcctggagaacctgctacggtacggactcttcctgggagccatcttccagctcatctgtgtgctggccatcatcgtacccattcccaagtcccacgaggcggtgagtttttccctgggagcctcagctcctctgagtgccaggctgggttctgagtactaacagtaggtgccaccacaactgagatcagcagggtctacattgggcctttttgatttagtgtgcctctgaatttccacctggtgggttgaaccacatagctaatactttatttgttcatgtacccattaaggagatttttatttagtgcctactacatttcagactctgctgaagatgtagtgtctgcacctgaggagcatctagtccttgggaggaaggcagataacaaaaacatacctccatgtgctcccatgagaagtacagagtccagtgaggctatataacaagggggagagagacctgatcttaccctgggctgtgggccctgccgaggaggcagtgtttgagctgagactgaaggaatgagcaggcttctgccaggtgaaagtgggcaaggggcgaggacaacattccagggagagggcactgcacgtgcaagg

SEQ ID NO: 100797 - DNA, 1088 bp, Homo sapiens
ttaagtttgaaataatagcaaaatgttccgtgtgggaaaggaaaggcgagcaagaagttgggaatagagacctgacaattattttattaacagagcattatgatgcctgtaaacccagcacgtgggaggctgaggtgggcggatcacttgaggtcaggagttcaagaccagcctggccaacatggtgaaaccctgtctctactaaaaatgcaaaaactagccaggcgtggtagtgtgtacttataatcccagttgctagagaggctgaggcaggagaatcccttgaacccgggagatggaggttgcagtgagctgagattgtgccactgcactccagcctgggcgacagagcgagactccatctcaaaaaaaaaaaaaaggaaaccaaacaaatacagcattattacttgaaacccaagaatgagttgctgagttttgcaagggaaatgaagatccaggaaagacgtgaacttggagcatacccaacctgttgaagtagtttccgtgcaatgtagatagactgagaaggtgcgggtgctgtcctagaacccaagagcaggagcgccgcagggcctccggaagtggtgggaactgggacttactgctcctcactggcatgccctctgcctcccttcctgtctccctcctgtcttttgcttttctaactaggaccctgcttctctgcttgctggccctgtggtgagatgcagcacagccactaaacacaaccatgccttcctgctggtctcagttccagcatccccagggaaggaactgtggctgacccagcttgggacagctgtggccagtggaggggaggggagggttctgtggagtgacctctgagtgaggatgggaaggtccattcccacagggggactgctaggcagacaaagctggggtctccctttctctccctctctcaagtgacaggcagagcagtgggcaggagaccaggagagtgtggcctccctgaagtccaccgagtggttcatggagagcacatgtgacaccagttccctggagaggattggggaaagccagcctagtctgacaccaccactgtgttccagctgccgtccttcaga

SEQ ID NO: 100798 - DNA, 1027 bp, Homo sapiens
aggagggcaagccacagtgggtctgccccatagccagctcctcgcccacattttgtccagtccctggcacgaggtgatcggccagtcactgggtgcagctggcacttcctgggtgctttccacgtagttttgcctcctcacatcagccctgtaaggcgggtgtggctatttccatttcacaggtgagtaaaccaagacacagaaaggggaagtgagtttcacacaaggtcagttggctggaaagggaaggatcccaggttctacctgggcgtctgagaccccacaagctgctccctccccgtggggcttcctttattcttcactgagagccacgatgctccggggcagtcccacatccgtgtgggtggtaggtcccgggaatgacagtttccatctcttgtgtttctgtggcatgcttctttgctttcagatgtgatctccttttgctggcgtcaggcttgatccatctaagcaggactctcctttttatcacctcacaggaggctgaaccgtctgagcccagaagtgctgaggtgacgaggaagcccaaggctgctgttccttctgtgaacaagaggcccaagaaagagactaagaagaagcggtagaagaggaggcctgaggagctgggcgggcagggagagggtcttggggacagccctcctgggaatctacattgtgttcccccgcattccaggctcagggtctgaggaggctgtgacgccctatgaccgcagagatctagacagtcgtaacagtccccaggctccagctgggcaatccaccacttcctcttccttctgcttctgtgacggtttagagtcaagggggctgaaacacactgtgagcatagactgtattaggtttgttcagaagccgggtcagctcacagagtcacattttcttgcttagtcatgtgtccctccttgagttgccccctccttgtgggtttacactacatttgggagtcattgtctaatgctgacaagcacaccctctcccattatttgtgcactacagatctcct

SEQ ID NO: 100799 - DNA, 1051 bp, Homo sapiens
tggcggtgcatgcctgtaatcccagctacccaggaggctaaggcaggaaaatagctggaacccaggaggtggaggttgcagtgagccgagatcatgccactgcactccagcctaggtgacagatcgagacactgtctcaaaaaaaaaaaaaaaaaaaaaaggggacattaggcattagggaaaaactaaggaactccatagcaaatatggactttagttaataataatgtatcaatattggttcgttaattgtaacatactatactatcatggatattaataatcagggattccctagcaagcccacttgagaaaaaaaaaacttaatataacaataataataagggaaattgagtgtggggtatgtgccatgttctagagcaaaggactgaattttcggacagggaggaagttaagacacttgtctgtaaacatttccttctaaacccagggaaacttaggaccagagaatagaagtgacttgcccaaactcaaactgcaagtttatgacagagcctggactaagatcaagctttctcaatgtcacaagaattcagtaacagcctactgtatacaaggcaccagcctaggtcctcatcatggtgaaggctggtggggaggttcaaagatttgtccatgggtcaacacctccccaaggccaggtctccagggacacagactctgccctttgaaggctccaagccagaagaggaaacagaccctgaaacactatgagcaggagggccagagagcgacacactttggtatccaggagacccagccccactgcctgcaaccctgcaacctccctgtgccccactgagctgctcagtaaaatggaactaaggatggtgccaactgtcagtgatgctgagaggtacaacaaggaggtgaaatgtgagaccctgtgcattgtggacacccaataaacagtgattctttttatttttaagtgtgttctgagtgctacaggagttcgggggtggggagcatttgtcagtttgccttgataggggattctcggagagtttaccaaacgagggacatttag

SEQ ID NO: 100800 - DNA, 1042 bp, Homo sapiens
aatgtgtggggctgtgctcagtggttaatgccgtttgaaggtcaccactcaggcgccacctgctcaggtgctgctgtcaccatctcttccctgacgggggcacatttgttatgattaatgaatcaatacaatattgatacattattattatttaaaaaaatttcagaggcagcgtctcactctgttagccaggctggagtgcagtggtaccatcacggctcactgcagccttgacctcctgggctcaagcgatcctcctgcctcagcctcccaagtagctgggatacaggtgcacaccacgcctagctaattttttgttgttgttttttgtggagacaggggtctcactgtatacccaggctaatcttgaactcctagactcaagtgatcctcccacttcagcctcgatgctgggattacaaggcatgagccattgcacctggtctgatacattattataattgaagtccatgctttagtcagacttcctaagtctttccctaatgtcttttttctgccccaggatcatgtctcctctttgctctgatagtttttcagatttttcttttctgcctttgacacccatgttttggacgcccctcccggtgctggccgctgggggagaacaagctcatctgctcctggctcctgactcccatggggttggggatgcttctctagtgtcttgggtttcccaccttcggccagtttggcctcacttcctggaacacggatatatgcccatgcacacactcctgtgtgagccaggccttctgcatcagctgggtccccgctgctcctcagcacagaggcctcctgactgccccctccctgtcccctaatgtgaccgccactccatgtctccccaggccctgctctgctcaccaccctccgtggctcccaccacctccaggacagaagccacgcctggcactcagggatcctcaggttcccctaccacccttcccacctcacttccccgactccagcccaaccgccatgctgtgcttcgcaaacaccacctgcttctgcatggagttgc

SEQ ID NO: 100801 - DNA, 1009 bp, Homo sapiens
gacaagtaaaggttctgcaagcacagatgcagcttcccacctgaagccactgccgacttcaagggcctggctcagcggctgaggttctcaggaggatgtggccagcacaatggttccattattgagcgtttgaagcactctttatttttaactacccctctgggcttttgctaggctgtaacccctgccaggaaggctcagcccctgtccctggctacctcgccttgttcttcaaagtccagagtaaacgccaccttctccacaacatgcttcctgacacgccctgatggaggcacgtgctaagtccgttctgagtgtgtctgtccccaccctgagggcagtgaccaaggcctggcccatgcccagcacggagcaggcactgcccagttggccaggcagcacacactgacttgggacctacagacaagagttcaagttccagctcttcccttcagtgactatgtgaacctgccttctctgggcctcagtttactcatcagtaaaacgagggtaacaaccctggcaagttccaggattgtgcagttgggagttgctggtctggcctggtagataagtgactctttgtgcaaattattttgcttaaaacattctttgttggtaaagcagcaactcattgcttaattcctgcaaatcatcgttaatggacagcaagcatttattgactaccaactgtatatatggccccaggccagtcttagaacaccaacaggaaccacttcccaacccaaaagcacccagcagatgatagatgctattgacgtcaacattgctgagatggtgagtgctggttgtatagtcctctgtctccagaaacctcctcttccctccttccctcaacctgggtgggccaaagccacaactgagggcagggtggagggggtagggtgaggcctggccctccacgactggcagtgaacccacgagccagagttgtcccatgacatgggatcagaggtgctgcccacagcacacctagtgccctggtgac

SEQ ID NO: 100802 - DNA, 1029 bp, Homo sapiens
ccattgtgctggccacatcctcctgagaacctcagccgctgagccaggcccttgaagtcggcagtggcttcaggtgggaagctgcatctgtgcttgcagaacctttacttgtctaagttgcctcctctctgataagagcatgtagggtatgaatgagaaagagatttcacatgtgctgagcgggcatcacctcatttcatccttacatgcgtcttctgggggctgtgatatctttagcccactctgcaggttggcatactgaggcttcttacattatctgcaaagtggcagagttgagacttgaacctgggtctggtccaaaatctgtgcttttaagctctctgtcatcccagttctcgaaaagcccagaattttctgttgaactcctggggatgagtttagtgatgtgctcgtacatattgaataaccagctctctggaagaaaaaagaggcttgattggtagcgtattccgatgtccaaggggtaaatactcccactgtggctgacatggagctatcagtgtgacattcttgaatatggagttgggaagagatgagcacagttggttcttgcaagtaggtaagggccagctccagcgtgtcactgggtaaatgtccctgcctcccccccgagcccagtatggccagtaaaggcctttagacatgtctaaggaatggaagagggctgagaaacctgctcctccagctgggggcccgccctgagccctgggaagctgcggttaatctttaagccagccttgcaaacaagtgcggccatttcaccagcccaggctggcttctgctgttgactggctgtggcacctcaagcagcccctttcccctctagcctcagtttatcaccgcaagagctaccattcatctagcacaacctgaccatcctcacactggtcagttccaaccttcccaggaatcttctgtggccatgttcactccggttttacaggtgagggggctgggctgggaagctgatcgacttgtccaccccacagcagaggggcagctagccta

SEQ ID NO: 100803 - DNA, 1486 bp, Homo sapiens
aggggaagtgacttgaccaaggccctatagttggaagctggaatgaaagcccagacctcagagaccacagtctggctgtccctgcatccctccagtgatggggcagtggaggttcgcaagacaggactgcacacacagcagtgtcggaaaagactgctctgctgagggattgaatgaaagccacgaggcctttttggtgatgtggtgatgtggtctttccacccaaggaaatgatttacagtgtgtcacctctctcagctgactgcctgcctaggccctcccgcgtgcccctgggcctttgctcctaaactgtgtccctcccagagtgccctctcctccaggtgctgcttatctgcccttgccccgccaggcttagcttaggcccctctcttctaggaggaaggcccgtggctctctctccctgtcccctagctcttgttggagcatgacttatccacagctcagcctggttcctgcttttgcttctctgattgtgaccaggggggtggggtggagggatgtctggctcccccaagccccaggaaccagagaggagatggctcagtgacctgttgagggaccttctgcccatctccgtggtcctcagctgaccccattttctcaaacctccccatgtataagcatttgtgacccctgtattgagcacctgctgcgtaccaggaacttggaactcgggctgagcagtattgtgctggggttagcagggagtgggagctgtgggagtcatggaggcttctagaaggtggcagggcctgagctgaggacgagcaagagttcacttggcaaagaaggggagagggagctcttttttcccttcccaggggccctgaggtggtggggtgtggtcagcctggttggatacttgctggggagctgggaacaggtccttggcctcccagaagtttgaatctggagggtgagcaaagttgcaaacaagttgccagttgagttactatataatcacagatatgataaggactcagggagagaggcctagggtacacaggaatcttgaagagggcatgtaggggttgaccaggcatggagttagggaaagggcttgccaggcagcaggaagtgcatgtgcaaaggccctgaggtatgtgccaagacgtgctgtcatggagaatcagtgggggaagctgtgaggctggagcgtgcacaatgaaggggagtgggtaagaggtagaatgagggggtgtatcagcagggctggaccatgctggggccttgtgggccctggggaggagtttggccttcattgtcacacagggggctgatcggtgtcccctgtgtgaacagccccaagctggaggccagaggtacagagctgaccaatagaaatagatctgatgatagacctagatctgtaggctggactccaaaattttatggaggcctagatcaggtctcaagaggagcgggtatttgaggctgggctttggaagtggagtaggagttcact

SEQ ID NO: 100804 - DNA, 1020 bp, Homo sapiens
agctggactctctgttatccaccggtgatatctgggccttgtgatgggtgctgggaaccctgaggatgtacttgggacatagcttatattctgggggagccagagagactccagtcatttccctatggcacgatggggtaggggccatatgaactatggcaacccagcacaatgccaggagagcttcccggaggaggtgatacctggcctggatcttaaaggatgagcaggagctcatgagaaaaaaaagaagggtgagggtgggccgggaagaagggaccgtgtgcaaaaatgtctgggggtaggaagtagccaggcggtgtggatagccatggaggtggggagcagcaggccaggtacaagggggttagaaggtggcttggctgatcaggcagagcctcaaaccctcacagggcactcaggcttgggcctgggggtgatgagagcagagcaggttgaggccagactcttgctgcaggtgtggaggacagagaaggatcagaccggcctcagaggctcaattacttttgccaagtaaaggcagcccacagggttcaagacagggatctaaaacctctccctggggcaaaaggtaggggctgacctggggccttggagggagtgggtcagggaagacttcctgggggaggaggtaccctgacttaccggaaggatgggagggacctctgaggggagatagagcttgacaaagggcctgaaggtgccctgtgagcagctcctcttggaggtctgaggagccatggagtcttgacttgggtcagttggctggtgccaatgggtagagggcctgggggcctgctcctcgggcagtgaggaagggctactggatgagagtaatgtatcccacattctgggtagtgtctgggtcagggtcagtgtggcttcagtgaggtggccctggtggccgcactgagaacagatgggcctggagagaagcaggcactggcaggggaaatggccaggtctgggatggacaggggagtggtggggggcagggtg

SEQ ID NO: 100805 - DNA, 1106 bp, Homo sapiens
ttggggtctcttatcaggccactctcagctctcattctttgtaatggctgcactgctgtccacttgaggactggagcccctttatttaaccagcccctctctgaggaacacgtaggttgttaatggctttctgtggagagttttaagcggaggaggcccagttgtctgtgaggtttacagagccgcctctggctgcggggggagggtggactggaggggcccacactgctgtgtccaggcctaggatcacagggccctggcctgaaggactggagatagacagggtggaggggaggaatgcgcttgaggaagattcaggaactaccccggggctccccaagggcagagccccacacagggcttggcacgtggcaggtgctctgcgaatacctggagaatgactggggtgggatgtgcaggggttgtcgctgagtcagtgatggggatgggggtgggggggagatgcaggcttagcgggaggtactaggccacttggggacctgctgagctcaaggcactgggaacgccgagggaaaagttcttatagcagcaactcggcacctctcgagggagcgagccatagtgcaggccccctgtctgctgaggagtccagagcccacggtgaggagtggcttcccgaaggaaaggggccacctttccctgggaacctcaggcagccccattgtggggcccccactgcttccccttgacccccgcaagggtctatctctaccttggaggctgcaagtggcggaagagatgaggggggttggcccctctccaaggagcaactcatggtgactcggcagttgggccccagaaccaggaagtgcaaggatagagctctgtgccagggaggagggtggtctctcatgaggtcccacggcatggaagcagccctccgagactaactcccaccctcactgagtcatcgagtgaagagccgtgtagctttcgagaccagcccagccgacatggtggaaccccgtgtctactaaaaataccagaattagccgggagtggtggcactcacctgtaatcccagctactcaggaggctgaggcagtagaattgcttgaacctgggaggcgaagggtgcagtgagc

SEQ ID NO: 100806 - DNA, 1031 bp, Homo sapiens
gtagctgggactacaggcgcgtgccaccatgcccggctaatttttttttttttttcaagtagagcccgggtttccgcgtgttggcccggcaggtctcaaactcctgatctcaagtgatccgcccgcttcggcctcccaaagtgctgggattacaggcgtgagccaccgcgcccggccctgctgcctctccttgggcctcgttttccctatctgtggaatgggtgggagggaggccggccaaggggccccggcagccctgcctgttccagtgtcttctctctctcctgccaggaccatgggtagcaacaagagcaagcccaaggatgccagccagcggcgccgcagcctggagcccgccgagaacgtgcacggcgctggcgggggcgctttccccgcctcgcagacccccagcaagccagcctcggccgacggccaccgcggccccagcgcggccttcgcccccgcggccgccgagcccaagctgttcggaggcttcaactcctcggacaccgtcacctccccgcagagggcgggcccgctggccggtcagtgcgcgggcggcgcggggtcctcgcccacctggggccacggcggggaggcggcggggctgtgtgcccggggtcgccccctctgcgcaggcccttcctctcgccaggggtagcgcccctgggtgacttgggtgtccggggggtgggggggcggccgtacacactgtgaagcgtccgcgccgccgccgctggctttggggtggagcaagcgcaaaagacacggggtgtggttaatgggttctaattggacgcttaagcccaagaagaagaagggcggcgcgggaccgggcctgttgctgccttggcgcccagtcctttttcgttgcctgggtccgcccagagatgagtcgggacgcgcggcccacgtgcggcggaggggcagctgggtcgctcggggaacggggcaccggatggccccggttgggcccgcgccaggatgcgcccctgcgccctctgctggcgctctgcggtcaccgcagcccc

SEQ ID NO: 100807 - DNA, 1052 bp, Homo sapiens
cctctcctcactccctgtggaccccgtccctgtccccttggttgctttggatgtgaggcctctgtggctgccccctcgtcccctgtccccagcaccgcctggctctcccgctctctcccctgctctttctgccactctccgcctctcaccacccccatctctgcctcttctctcctgttgggctctcgctctctcctccctcctctgtgtctctggacccccgctccagccagacctggttcacattcagatggctgcaaaggtacttccgcccctccccgctcccgcccaggcccaggggacccgaccacgccgggagctcttcctgccccatccccatcacaccccccactccttctcctcactttcgcatagaagtgccctgggcattggggctctgccacctcaccccctctgacagggctcactgtgtgactttgggcaagtcccagccccctctggcctcagtttccccctgcagatgggtaggctggaggaggaggcctgtagttttcagccgaggagccctttaggtgtgacccgtgatttgggacagaggcaagccttgctctagtttgcagggttggggcctggatggtcactgggtcccagcagggcccctgcttgcctccacccaggtctcaccagctcccaggagcgggcttccaaatctcagagcatggggacactttgtaggtctcacttgactttctctcagccaggaatctcttctattacaaccttacttgcccgcagagacagggggttccctccctccctcccaaggcagctctcggcatcttgagatgtcttggtacatctgaaaggaagtgaatttcttcctgtcccgggactcctcccctatggatttgagcctcagatgaccaaggccagtcctgccctggtccaagacaaagtccatctgatccagctttggcaaaaaggcgtctgcgccagggaggggaggagttccaggccagctggacctggcatgctgtggggactcacgctggccccaccacctccctgggcctccctcagccactagagcc

SEQ ID NO: 100808 - DNA, 1056 bp, Homo sapiens
ggtggcctactactccagtgagccagcctcggagggcggagggcgggcgggcaaagcctcagctgcagactctggggaggggccttggagcctagaagggtggggacttctgttatcctgcttctctccccacttccccctcccccctcccttcctctctcctcccttttccctcctttccttgtctccttcttcttcctcttctttcccccagcccccctcctccctgtccccctctctccctgctccacgcagtgtcccactgcccgcctttctctgcagctggctggtatggagggggctgccctgaggagccccagagtaagctggaagggaggggacagaggctggtgtcatttgtctctgtagccctaggaccggtctgaaccggttgctgggagaggaggagggggcggccagatcgattgcagcaaagagggaagagagcggcagagggagctcgcggggcttgcgtgctgggtgagggctcgggcgtgggcgcagtgctgtagcccacccacctgggcatccgaagctgactgcagtgtcgggcctgtgggtgcctgtgtgcccgtgtgtctgtggcacacatggcctctgtgcacaggtgttggtccactccccaccccgagcctcctcctcctctcagcttggcctcctgacttcctctgggatcacccgccactctctgtctcttcggccaccgctgtgtagctcattctgaacccctttccctcagatcagaactctccaggggctgtcttggaatcttgggataaagacccccaccggcccctgagtggtctaatcctaactgcctccccacctccgcctggtgccacccttccccacctgctccctgcgcccctttgtcctccgcttctccagccctgcagctgttctttcctcagagcctttgctctggctgtgcccctgcctggagggctcttccctacttaacccctcaccgtcctgcacatccaagctcagttgctgcttcctccaggaagccttccaggccactcctgctgttgcgcgaacagctctccagtcaca

SEQ ID NO: 100809 - DNA, 1035 bp, Homo sapiens
ctgcctcccaggctcaaaccattctcctgcctcagcctcccgagtatccagtattacaggcacgcaccactaccacctagctaatttttgtatttttagtggagacagggtttcaccatgttggccaggctggtcttgaactcctgacctcaaatgatccacccgcctcggccccctaaagtgctgggattacaggcgtgagccaccacgcccagcctggacattcttaataatcacagtcccgacaacagctactggttcttgagcatttaatcctagtaacagtgccatgaggagcaccctgtcattgtacccattgtacagatggggagactgaggctcagaaagggcccaggctttgactgggtttgtcacatggctgtggaggccacagctgacactggcgcccaggtgggcagatcctggatccctgtgtggtaggagttggggggctccactgagtcagcctgcatccctcctcaacagggacctggaacggtaccaccagggtggccatcaaaaccctgaagcctggcacgatgtctccagaggccttcctgcaggaggcccaggtcatgaagaagctgaggcatgagaagctggtgcagttgtatgctgtggtttcagaggagcccatttacatcgtcacggagtacatgagcaagggtgagtcctgggcggccggggcagggggcaggggcactccggacagggcagggagcatgagcctcatttcctctcatgtctagaatgggcatcttcaaaggtggaatgcagtagagccaaattctctgttgcctgggccggagtgtggtggtgcaatcatagctcacttcagcctcaaccttccaggctcaagcagttctcccacctcagccacccaagtagctgggaccacaggtgtgtgtcaccaggcccagctaattttttattttttgtagagatgggaccctatgttgcccaggctggtctcgaactcttgggctcaaggagtcctcccacttccacctcccaaagtgctgggattacaggtgt

SEQ ID NO: 100810 - DNA, 1050 bp, Homo sapiens
ggatcctgctgactgagctcaccacaaagggacgggtgccctaccctggtaagaaggtcctcatggcctgtctgtggtccctgaatccctctgccctggtggccttgggcaagtcatgactcctgctgggcctgtttccccacccgtaaaacaaagaagttgagcgtctgatgttaggctctctcgatggtccatgctctcagcttcggggacaggacttatctatggtcactcccaacctgtcctaggcaggaagccctcgctgccctccccatcagcttcccccaccccactttcctcaccggagccgggctccccatgcctcgctctgcccacagggatggtgaaccgcgaggtgctggaccaggtggagcggggctaccggatgccctgcccgccggagtgtcccgagtccctgcacgacctcatgtgccagtgctggcggaaggagcctgaggagcggcccaccttcgagtacctgcaggccttcctggaggactacttcacgtccaccgagccccagtaccagcccggggagaacctctaggcacaggcgggcccagaccggcttctcggcttggatcctgggctgggtggcccctgtctcggggcttgccccactctgcctgcctgctgttggtcctctctctgtggggctgaattgccaggggcgaggcccttcctctttggtggcatggaaggggcttctggacctagggtggcctgagagggcggtgggtatgcgagaccagcacggtgactctgtccagctcccgctgtggccgcacgcctctccctgcactccctcctggagctctgtgggtctctggaagaggaaccaggagaagggctggggccggggctgagggtgcccttttccagcctcagcctactccgctcactgaactccttccccacttctgtgccacccccggtctatgtcgagagctggccaaagagcctttccaaagaggagcgatgggcccctggccccgcctgcctgccaccctgccccttgccatccattctggaaacacctgtaggcagagg

SEQ ID NO: 100811 - DNA, 1913 bp, Homo sapiens
cttggaacccggtgctccctctgtcatcctcaggaaccaacaattcgtcggaggcatcatggaaagactgggacagcccaggaaacaaggggtctgaggatgcattcgagatggcagattcccactgccgctgcccgctcagcccagctgttgggaacagcatggaggcagatgtggggctgagctggggaatcagggtaaaaggtgcaggtgtggagagagaggcttcaatcggcttgtgggtgatgtttgaccttcagagccagccggctatgaaagggagcgagcccctcggctctggaggcaatcaagcagacatagaagagccaagagtccaggaggccctggtcctggcctccttccccgtactttgtcccgtggcatttcaattcctggccctgttctcctccccaagtcggcaccctttaactcatgaggagggaaaagagtgcctaagcgggggtgaaagaggacgtgttacccactgccatgcaccaggactggctgtgtaaccttgggtggcccctgctgtctctctgggctgcagagtctgccccacatgtggccatggcctctgcaactgctcagctctggtccaggccctgtggcaggacacacatggtgagcctagccctgggacatcaggagactgggctctggctctgttcggcctttgggtgtgtggtggattctccctgggcctcagtgtgcccatctgtaaaggggcagctgacagtttgtggcatcttgccaagggtccctgtgtgtgtgtatgtgtgtgcatgtgtgcgtgtctccatgtgcgtccatatttaacatgtaaaaatgtcccccccgctccgtcccccaaacatgttgtacatttcaccatggccccctcatcatagcaataacattcccactgccaggggttcttgagccagccaggccctgccagtggggaaggaggccaagcagtgcctgcctatgaaatttcaacttttcctttcatacgtctttattacccaagtcttctcccgtccattccagtcaaatctgggctcactcaccccagcgagctctcaaatccctctccaactgcctaaggccctttgtgtaaggtgtcttaatactgtcctttttttttttttaacagtgttttgtagatttcagatgactatgcagaggcctgggggacccctggctctgggccgggcctggggctccgaaattccaaggcccagacttgcggggggtgggggggtatccagaattggttgtaaatactttgcatattgtctgattaaacacaaacagacctcagaatctgatcaacagtttattgaacatctactgtgtgctggaaagcgagatggggcggaatgcgagaacaaactaccccttgaggggtctttgggcagcactagtagctggagggcttcaggccaaggcaggggtgacatcagattggagacagctacggcagaatgtggctgtttgtgaacatctgcacctgtgttagggggtgagcacctgggagaaggacaaggcacatcacaggacttccctgagcatgacaagttcaggactcaaatgtccgtggtggatggtagcagtgacattggggagtgggtggggctgtcaagcctgcctagaggagatcacaaatacacgacgagaataccgttgtgtgtgctcttcgtgtgtttcctaggagtgcagggcaggggtgctgggtcgatccacaaaagtcctgaaaacgctgaagaaaaatccaaagacccttcccctcctccctccttccccaccaccgaagcacacagtcttgaaggttgatttgcaaccgtctatacaaacacatttattttacacaaatatacatcagatcacacacctgtgcaccggagtcaactctggccacgacattgcttaat

SEQ ID NO: 100812 - DNA, 1115 bp, Homo sapiens
ctcttcccaaaacactcgtctcggagcagctgctcccgcctgtgtgtgtgtgtgtgtgtgtgtgagagagagagagagagagaatgtgcatgtgtgtgtgtgtgtgtgtgtgtgtgtgtgtgtgtggagggtcacagcagcccctccctggccccctttctgcagggcttggcttttgtgttcattctgagtcccttgcacttgtccctcagttcaatcaacacctctacatctctcctgtgtactgggctgtgtgtgtgtgtgtgtgtgtctccacttctccctccttcccacctgttctcgccagtctctaaggcactctgaaatctgccctggctgtatgtgtgtgggttcacagggcgaggtctgtgcacgtgaaccagtatgtgacaagctgtcagggcatcatctctgccactgtacctaatccttcactctcaccctggggtaatttcctttgtactttcctttggtccacacatgcagaacagctcttgtgagttgtgcacacaggtgtgtgtgtgtgtgtgcgcgcgcgcgcgtgtgtgtgtggtgtagggggagagacagagagacagatctcctcttccctttgctctctctggctgcatcttgacctttgcacacctgcccggatccatctctctctccacttctcctaaacctctccttgtctctttctgcatcatctctgaggctttgctttccctctgcagatgagagagggtgctctgtccatccatccatctatccatctgtctgtctgtccaagagttatttgtgggcccttttctacctccccacccctttcctgggcctgcactcttgtcacccgcccccctgcaccctcctgcggggccatttcagcgcccaccctcttcacctctccatctccatccctccccgcttgtgggttctggaccgggacctgagaacaaagctgcctcctgggccccacacccatcacccggccccaaacccttcaaggcccgttgggcttggcatcctgtttggctccttccctcatcagggggcctcatgcagcctcactccacttccagcaggtcacccctgccgggccattcccctgccactctcttatgcccccctctagc

SEQ ID NO: 100813 - DNA, 1077 bp, Homo sapiens
aggctggctctcaccctgggcatgtgccggcctgtccgtctccatgccagctctggccgcctcctcctgcccctggcatccccccattcccttctgccaactccctttgctccacacataagctgccaacatcggggtctctagccaggatctccgagccgagcccagacctgtccactcatcacggtccatctcttccgctgcagagcaacccccagcccccttcaagcccctaccccatccctcccctccacatcctgagctgtcttgctgtccgtacctccttctaactcactccagctgcgatttgtgcctgacctcccgcatggctctcaccagcacctcgcctacctccctgcagacatgaccttgtcctcatcttcctcaacttttctggcatctgactgtagacacattggtcccctaagcctgccctgcttccagaggactccttctccgagccttggccttctaacatactgttgttccttgtcctcttctcccttcccaccacgcctggtgactgtccccactctggggctcagctccccctttgtagggaccaccccacctccatcccctgagttccagccctccctgcatacaaccttccggacattccatgggcacctcacgatggactcacacacccctctttgccaaagcctggggtgtcccgcctcatatgcccactacctggcagcacccagctcagaccctgggctggtccgcttcccctccccgcccacgtccggtccatgtggtcccccaatgggtctcgccccgtcccttccccagcaccttgccttgggattcatgtcccctcctgggctgtgctctagtcccctccttggagtctctgtcacctgtcacctcctgcagtgcagcagcccgtgcagtgctctggcctgcacttggctcacagcaggcaaatttggtcgtgcctttggtagatgctccctgacccagcacccacagggggcggacttagggatacggaggcagatccgcggccctggtccctggtctggtggggagactccagtggagtgtgctgggccgcgggccgtaggctca

SEQ ID NO: 100814 - DNA, 1032 bp, Homo sapiens
ttcctcactgtttcaataaccacacaaatactgatgattccagggtctctatctcttgcctaacttttatcctgagcctctgattagccatttcctggaggtttctaccccgaggtccctcaggcacctactgctccacctggaccaagtggactcagcgtcatcccctacacatgctccttctctgtctggggtccttgtgctggtaaagaagactgccatgtgccctaccatggagggcaccccacatcactcttaattctgtgttgtttacttccactagtacttctcattggggtggtcatttgccaagcccttcttgtgtcccctcaatcactgtttgtttcttggttctctgtcttctctattctgaattctgtggccattcttgataacttcaatgccaacatggatggcgtagccaacactgtgatctggacctcccaggtgcccaaaatattgtcctttgttcaactgcagctatgtcacatctttggtcttgccatacaatgacagtgccaactctgaaatctcaattttgagccatcccactccccagcattcatctgctgccattccacctcatttgcttgagcacgtctttgatcaaaacaagactttggaagtcaatccccaactattctttctttagcccctctaattagccttccatccccactttgctgctggcattgctcttggcaggatcaacagtgacctccatcttgtcctatccagcggtcactcctcaggcctcgtcttctttgtcccatcagcagtgcctgatgaggttgatcacttcttcagtctcaaaacattcactcgtcttggccttcacgatacgacactcttgtacttttccttctcagtctctgttgctggatcctgttgcttccccaacctctaaatggcccccttctcttttgtacccacaccctctcctgatctctatcagctcactgggttgaaacaccatctatttgctgacgacttcctaactccagctctccctgaactcgactccactgccca

SEQ ID NO: 100815 - DNA, 1088 bp, Homo sapiens
ttttttcactcagtgttacatttttacaatatactcctattgctacacatagcttgcttttgcctttaatagctatgttgtattcattcccatgaatgtaccacattttatcttctgtaagctccatggacatttaattgcttctttttctttcctccatcatgagcagtgctgcagaaaccacattgcatgttcctttgtggtgggatatctctgggagtgattgggaaatggaatgttgggtcttaatatgtccacagttttagttttagcagatactaccactgtcctccatgatttctgtaccatttaagcttccagccagagggtatgagagggctgtaatccccacacccataggcggttgttttaaatatttgccaatctcatgggtgaaaaattgaatcctttttaaaatttgtattttcctgtttgcttgtgagattttcatatgtatattgagcatttgtattttctcttttctgaattgcctgttattttttctcattttaagcattaggttgtctttatcccactggcttgtggagttttgtaatataatctggatattgatcttttgtagatatgtgacaaatattttcttccagcttgtcattgcctttaactctttgtagaatcttttgttagaagttattagttttgacataatccaatttatcaatcttttcctttgatccttttttatacagataccatgtttagtccttccctactcctaagatttaaatatattatttcttcttttctaataattttataattttgtttttatttggttctttatgcatctggaatatattttgattatcatattgatatatgatctaacctttctccaaacgggcagccaattattgcagtatgaggggttgactagttcttcctttcccctctgacctgaagtaaaactccctgatattctgagtcaggtgtgtctgaagcccctgtttttcccaacaatccatttattcctttcagtacaagactgttttctttgctgtcccaccttttggtatctgtgaagtcaaatgccatgtttcgttgtgcttccttctcagctctcttag

SEQ ID NO: 100816 - DNA, 1021 bp, Homo sapiens
atttctgagctggctctggactgagatgacctaaggatagatgtgatagaagcagtccagaaggctatcacctagagtcctcccacctgtctgagtcagaggcaggagcaaagggcgagggtgggcaaggaaggaaaatgtgcatagctggcatcaagtaggaaagtgtatgtacctgtaccggttgggagctcaccaaagaagggtgagcatctcaacagggatagatgaagaaccagagatgcactcaaagaaggacaaggccagaaacgagttcgtgacattttaggaatgggtacaggaagagagtcctgctgaggagactgagaaggaggggccagaggagaagaccaaaaacatggggttcctagaagccagaggacagtttccaaaaggacagagtggccactggtgggccacatgcacagaggtcagtggaggctcaggcatctcctagacctggcctttggggacttttgtcacagcaactttggggcacggggcagaagctcctcttggtgtggggggaatgaactgggtctggctgagaaaggagggagggggagttggagcaggcagtgggtccaggaaggagctaattcttccaggagacatgggagggaggaagcagtacaagcccagttggaagggcagggcggggcagtgagaggggccctggagctctgggattaagtgtagaggtgaagggattagcagtgttggtgaaaagggacaaaagtaaattatgtacattttagcaagtaacctgatctccatgttctttgggaggccttttctctgccctctgggtactgactccagctctaattagcacgggtttgtctgcctcgtggctagggccatgtctttctcattttcttgtacctttcagcacctagcaacaggcagccagctaggtaggggcagaataattattttctgcttgaaatccagtgtctgaaatagagattcagaaatttttctttgtatcaaaaagactttgtgacaatatccagggagc

SEQ ID NO: 100817 - DNA, 2978 bp, Homo sapiens
gttgaaagaaagtatattaagacaatcaagtgtttaatcaaaggatcttttgcattaaaaaataaacttgaagtctcttgggtgcagaactgtcaaggatcttagcttagagccaaagaagacatggaagtgtctatgaggcaggaaagacagacaaagcccttcagtaattccatattgtttatgggcccaatcccttggcttggtcatcaaggccctgcacaacccttgaagataaggggcttagtctttgttccttgaccaagcacagaatttacctgaccaggcctggcatagtacctgctggttggctgacctggtggctagatgaataggtggttcaatcaattgctaagagtccctaagtaattgggtggcccagtctttcctagaaggaaaggaactctgtttgcctcccaaatctcttggcaactctgaagtgacagagattattttccagcctccagactagtattgtgaacaaagatatgcgagaagaaccttataaaagactgcccagcctggcatcctcgctgtggcagcagctcacatgtggtttaggagtagccccaccaggtggtagacaccctgtaaggtctggatgtaggtggactcctgggtcacttgtaagccaaggggattccctcttcttccctccctctacctttcccaccccctaaccctgcatatgggacttccccagctttcccgcttttatgaattcctccccataggctggcaggcaggtgagcttgcaggagtgcagatcgtgaactactgtttcacagagagttgaccgaagctctgctgagaggtttcttgacttgcccaagagttcacagctaggccaggctggcccttgattcctgaactctgatcacatcttagatggtcctctgccttgctcattttcccatttccatctcctcttcccctcctagatcatgagtgtcctctttagacagtctgagaactccctgcagccgggccccactgccacacacacccatatgagcccatcaccgggatttaagtcctttcatcctattccctcagaccattccagggaaaaactgtcctcagtccaacccccagactccagctacaatactgtgggggttagactactattcacagatggggtgggccatttggggggctgctttttggtggttggcttttggttttgtttgtttttacttactggccaaataggatccagttcttctttccaccctcagagccatttttatgaacgccatatggttccattttgtactgacaggaactggggaccacaggcacatagcacacaccacagctactgtgactaatagccctggcagctgtgccctcctaacagtctgggtgtgcagtatgagtgatgtccaaaaccagcaagattggattgggcctcccgatccctggtcgtgatgacaccactgcacctctagtcctgtctctccggtcccttgatctttcctatatccatctccttcttttaattcagatcatctcttgctgaacagttgcaccagatgtctctctgctttcaatcttgtctctttcaacccatcaaccaaatggccaccattggccatctttaccagcttaggtcatgttctgtggctcttggcttaacttcgtccttccctattgcctagaggatggcattctctctgttaatggagcagagcatttcacagcctggttccctacccctaggtgttcctgctctgcttctgcaggtgcccagccagaggagcccacctgtcctcccggaagagatggcccctttcacttgagattccaggagattgcccagggagaaggtgtggagggaggggttttgagaaggaatatgaagcctccagtggtgagcagtaccagcaagacaaccaagaagaggcagttgggttggtcagttaggaggtcttgtcatccatcttggggttggcagagcaatagagacagacatcacatcaccatgggaagagaagagaataagaggaagaagtggagatgagaggaacaggtcacctcttccaactatgaagggaaagaggtggatgagtggaagtgacccgtttggactggtctttttttatgtagctaatatttggcctgtgcttttctggatcaggccctgatgagcattttgtcaacaatatctccctgaaaccttaagagaacatcctagggttgacgtggttttgcccactatacagaagagcttcaaaagatgaaggcactttcccaagatggggggcagagctgggatttgtgtcccattctgttgcccttcagagcctcactttcaccactgtccttgtcttccctgtagtcatgaggggaagaaggaggtggagggctgcctgcagttagggagctggggcaaaggcaccagggaggctcccggtgctcagataggactggaagtctgggacacatcatttttcagagggggaagaggccagggaagagagaggctatttttaatagccaaatagatatgagcccattaaaaaccaggaggaaaggaataaaatgtttaataaaatctttaagtatctgagtggaggacctctctaagctgaaaagcaaggaaatgacaccaagaagagaaaggccaacagcgaacagggataagtgatggcctgtgtcccaagtggcctggagtggacggcactagatggacagataggggcttagccttggatagcaagcatgcaacgacccacccacccaaacctgggaggcttagcactcggcaggtgacctcatctgttctcaagccatcactgggaggtactcaataaatatttgctggggtgaaataactgaaatgggaaattagatcaaagaggaaaaataccagcattaagctattgatgatacaagaagtgtccaggtgccgtggctcacgcctataatcccagcactttgggaggccaaggcgggtggatcacctgaggcca

SEQ ID NO: 100818 - DNA, 1551 bp, Homo sapiens
tttttcattcaaaacttgccaaagatttgtctattttagaggtattttcaaagaaccaaacttttatcgatcatatctgctgggtaattttcttacctgattcttttatgcttttatctctgaattcttcttttctgtgtttctggatagatttcgtggttctgcaaagtcttgacaagctgaggagtcatacctggaaaggatggtttgttcaacaaacattgagaccctgtactaggcttgctggggatttcaggggcaagactcagacctgactcttcaggagctcatgattgtagcctagtgggaagacttaacaaaatagacaattgcaaattccaaaaacaaaacaaacaaaaaaaaggcttttgtgtccctactctcctgtggcgacacctggatgataaatgaagccaagattattgcttattttgctctccctcggaaagcagctttctgttttaggtcaagcccgcttaagagtcacaaacaggcctccctctgaaagatttgtggccctttccagcagggagcctgcagcccaccccttcccaaagtgactgccaaatcagcattctgtcaccccacagtgcttcctaccttgccaggcaaccaccccctcttcctgaactgccttttaggaaaatgaaaagtagataccttttctggaaaagagtaggggcagcaggccttagaaaaacacacaattacattggtcactgtggctcagtgtgaaacggttgcccacatggtacctagtgaccacaagacaccataaggcctaggtctgggcttctttaggaactggttcttaccctgctgtgggccccagtttccagagaggtaaaatgtggtctttggagcagacagtttttctagtcctaatatcctgggagttctttctcccaagatctagggtcttcctggacccatttgaggatgttagctgggctctgagtaggtggcagtgcactttcaggatggcatgggctttatgctttagtcagtgtaccatgtgagcccaggtatttcctctgtcaggaagcttccctggatttcttctccctggggatctacttgactggagcgtttcactcagccttctgttgagtgctactgctagtgttacgcagacttccccttctgtagcgactgagttcatgggctcctcttgtctcccaagggggcctgcattgtcagtcatttggctggtatttggcagaatcccatgcaggaataggccttgagactacagggtggacagttcctgccattagggagccctccaggctaatgggaaagggcacaacattgagcagataatgccagcgatacacaaccgtggactgtgtcagctgctagaagagaaggtctaagaggggacccaatgtaggcctggaaggattgactttcaggtggagacctgaagaacaaatataaaggtttgagcagtgaagtaatgaatgagatgttattattattttaccatctaatcaagcatctctgcttacagataaagagactgggatgaaagtaaaatgaaggaccacc

SEQ ID NO: 100819 - DNA, 5582 bp, Homo sapiens
gcccatccagcgtaggctggagaggcgggcgcgggcgcagcttgtccacgagtcagggcagctggagcttttccaactgtgctgagagctgcatggcggcaagctgattggacccacaacttaggtatacctcacttctcgcaatgggctgtgtccctggaggatttcgaaaagcgaatcctacccagtaaatgcagcattccaggaacaccttgaaggaaatatgcgattcctttggcaaaggattcctttagcagggaattcttcctgcaaagggagcttttagggtaaatgattttatgggcaaagcgctttcttctgatttatctctttttacaccaagcgcttttgcctcttttttattttttttattattatttttttttttgtaaagcaattgtccttttttggaagtgctttttttccccttctatttttctctcgaggggctttttcctctaatttttttctttaaagcgtttttgcccgatccatttttttccgttagctcccttgtctaatttttttctgcagtgcgtttttaatctaatgcatttttttctgccaagtgcttttctccgatttatttttcctgcaatgcgcgtttttctgttttcctgtgaactactttttctctaattcgttgtagggttttttttttttgcgaagtaatttttattttttctgagaagtgcctttttctaacttattttttgttccacccccgcaagcgctatatgtttttttaaataaaatttctccgcaatgcgcaattttttaaggtggaaaattttcactctgcgagctgtaaagtctttcaacacagtagtgccccgcctccctcctggggtcgagtccgggtgtagcgggtttttcttaccgcgtaggtcgctaaatgcctgggtgatcgtccgcagcggtcgcccgccgcgccccgagtctttgttccctggcaggcgcgggcgcactagggagggtcagcgcgaggaggacggcgcagggaatgggcagggggcgcgcggtgccggcagcggcacttgggcaggcaaggatcgcggcaatcggaataggacgggtccgggaagcggcaatcgcgacgcagtcttgcgggttctaggggcgcgagttgggaaccctctcccacccgaaaccccgtcagacttacctgcagcagcacgcggaagatgtaccagccgatgatgagcagttcagccgaggccgccgccactgccgccatggttccaagaatggtaggtgggtggtcgagaaagagggtttgccgagatccgctggtctcggagtccgctgttgggcgcactgccgcagccgcggtggccgcgccttaagtacccgcccgccacctaagtgcgcatgcgcgccttggggggtgtttatgaggaggggtggctgggggcgctcctcattcgccaggagaggaaaaaaataatccatctgctctttccataccgacccccgcctcctgagttccatcttagcccccttccagaagattccgccgtgcttgcttttggattttgctttaaaatggaggggtaccacgactctgggtagagtacagggcgagaatgggggtgcaggtctcttagtgtggcgcccttctccccagtccctggcctgcaaatttgagctcagtctccggtgccactccaaagcctaccttggggatggatggaaaaccgaaattagggaggggtcatctgccccatagagcaaaaaacgtggtgcccctttcagaagctttggcataataggcccgtgctcggcgctcttttcctgatactgaatgagttttaagcccaggtcctctgcttcatgagggtgcctgagcgcgtaacccgtctgattctttacatctctcttacggtagcgaggagatgagaatctgcggtggaggtcgctactgtagggagctgagccagagcactgcgctttgggcgcaaaagcagtagtcacccggtatctgtaggagggatacaggaaggattggcgcccttcgtatgcacggaaggaatgagctctacggagaagtggttggaatatgcttggggatagttttctgctggacaggtcgtttcgacctcagtcttccgctcccctcccccaagccctggtaggtcggccttagccagtggggttctttgtacccgttgcgctgtgcggctggatcaccgaacggggttacgctaccgctaccggagggttgtggctaccgcagccccgtttccaagtgaggcgggtcccttttagaccgccagtcttgtgggtccctcgcacagcgcggattttcgggcgggaagaccggaatgcggtttgtgagtgtggtccccgcgcaccggtagccagccgaaagcacctctttccagcaagctgcctggcccagggaccaactggcatttgcccctatgtggatagaaaattaattttcattaaaagctcccagaggtcaggttctatacagtgccagcagcagatggaggtgtaatgatccaaacgagttcagtttggacaaagtagcatagtgactttttttctacattgactttcggagaagttggcagattctggcaaagtgacgctgggctgtttgaaaaaggcaagcttagcctaggctgccatcttaaaatatttcgaggctgtagctgcctcaggatcctttgcctgtggtctggtggccggcagtgccccgctaacagctttaactctgcacttagtgcctgagcacctatggctgtgagagatgctagatacagaaccctgtccttaccacgtgggggcacagcagggagcccttggtcgtcctttggcaaccactgggcggtattgtgaggtctgggccccttgaggacgggctgcagccccaggaggcgatacatgatctctgctgggcagggcccaggcaaagccagcccactgtgtgaaaccgtgccaaagagccctctccccgatcccccaggagaagccccggggagacatcccaggaagcttcccgaattagtgacttggagaggagtagaactttcacgggtgggcagggaggaaagggcatttcacatttgctgttgttaaccatgatccattttcccaaataagtatacattctgttcctgttttttttttttttttctttttttttttttttttttgtctgtctgtctgttctttgtctgtttgtctgttgtgttgacttttctcttcaggatccctgctgccttggtgatcccgggctgacagccagagagcacagcggctcagctcctggagagtgagggttgaagaaagcggagggcagccgcctgcgcccgctggctcccattaggtcggttcctgcagcggtgcccggcagccttggtgaaggccctgcccggcagagatcatgtattgcctccagtggctgctgcccgtcctcctcatccccaagcccctcaaccccgccctgtggttcagccactccatgttcatgggcttctacctgctcagcttcctcctggaacggaagccttgcacaatttgtgccttggttttcctggcagccctgttccttatctgctatagctgctggggaaactgtttcctgtaccactgctccgattccccgcttccagaatcggcgcatgatcccggcgttgtgggcacctaacggcctgccctgttagctttccaaggaagcagaagacgggaggggaggcattgacataggtcataaagcattggagtttcaaatcccgcagcctcgcgggtgtcacattcctgacggcgcctttttggcctgtgatgttttatccttacaatgtgaataatggcactgaccggtgcttttattgtaaagtcctatagtcgtgggtggtcttgtggttgtgtgtgttctgtccccatctaggtcctggctggccgcatgaccacccctctcgcctcattactgtgaggagtctgggtccatcctggtcagctgccccaatgtgacctggggcagataaaatgccagtctcattgtcacctctgtgacccctccttgtcagggtctccttccttcccagaatgttactgactcctcagtccctcttctggtttccctttatttctcttctacccttttccttttttggggagtacctgtccaagacagggctcatttttgcacttatctcgaatttgaagagattgctgacgcccgagagcctcgctttttcatccttctttccttgttcagcaggctagacagaaacatgtcttgactgttagttgtccacaaatcttcagtattttctccacttcatttttaagaaaggaagcaacagatagatgttgctctttcacctgggtgtctgggctcaagctttcccgcccagcctcacttcctttgcccttcctcctgcctttctcaactgtcccaaggagggggcctcattgtgtctcccgtgcatgctctgcagcattgaagtatggtgtgttcacgtagttctagcagtccccagctgagtgagtgggagagtacctgtgtgtttcgtaacggccttgatccccttgatagatgtttggatattttttggtgtgccctgtgtgtgtgtgtgtacaaatacatgtgtatattccttttaaagaagctttatcgaacgtggtctgattttgaggtttagcaatagctagctatatatggtaggtgccgctacagtttttatttagcatggggattgcagagtgaccagcacactggactccgaggtggttcagacaagacagaggggagcagtggccatcatcctcccgccaggagcttcttcgttcctgcgcatatagactgtacattatgaagaatacccaggaagactttgtgactgtcacttgctgctttttctgcgcttcagtaacaagtgttggcaaacgagactttctcctggcccctgcctgctggagatcagcatgcctgtcctttcagtctgatccatccatctctctcttgcctgaggggaaagagagatgggccaggcagagaacagaactggaggcagtccatctagggaatgggactgtgaggccatacttgtgaaacgtctggactgctattctagagcttttatttggtgtgttcgttgcacagctgtttgaaatgtttaataaagctttataaactttactttgtggttttatgtggctgcagtccatttgggtcgtggtgttggatttcggagttggtggggggcagggggaagcatggaggggctgagtctttggcgccagagtaccttagcctgaaaatttgatctgctttctggagagcagatggtggggatgggggagggggagcagggggcaggacaggcggtgaacaggagggagtctgaaagttttcagagatgagacatttgcgtttctcagctcccatggcttcttgcctgaaattgtttccctccataggagatttgagtaaccgatcccttgacaaacaacttaagacagctggagctctaatcatcaaggatttttatggtgctgcttttgaagtaaaaatagtgaaaccccttatggcatttcaagtggaaaaataaataagactggctgtccaa

SEQ ID NO: 100820 - DNA, 2178 bp, Homo sapiens
gaaaggaagcatgggggatgggggacagttgttttttccttcccctttccaaatctcctttagtttccttccaggcctccgtgtcccatttcatcgccgaatgttgggagactggggtctgtcctcggaaagaaacagcctttctgtttataggtttggatcgtctatccctttcagggaactggtgtgttggggacggcttctctgccctgcctgacatggtccagtcatcccgtcagccttctggacggcaacaccaaagctgggaccaaaaaaaagttccagcttaagtgctaatgccaagtgttagatcttgtttgcttgtttgttttaaatcagagactaattaatgtcaagcaaatctgttaaaagatttgatcacgggaagcctggtcggtttccagtgaccaggtcaattccatatctgaaattagtcttgttagagttgctgccaaaaacagtttaacctttaatctgtaatatgttgtttcaaagaggaatctgggttagactgtctttttttgttgttgttctcctatctttgaaacacatgcattccatttcaagcctgtccctgtgcgatataccaagaaccacgcgttgcctgcctctctgacttcctgctctggaaatgctcaggaatctggatcctgctggggcatgcatgggccctgtgggagggcaagtcggggaggggaggataaacaggatcactcccagggaagatggtgacaacgtgtctctggggcatatagaggaagtcagaggttaccggggggaaaagagattgttgtttgactagtgttttgtgtatgtgcatgagtgcacacgtttaaatctctgagggggggtgggggcggtgggggggggaagttaactgcaaattcagaatctccctttggggtgttggctcctgaggagatacacatttcaaaatagatatctagtaaatggctcacagcaaacctgctccccgatccaacagtaatccgttgcccaagctcaaggaacttgcccctgcccttccctgacagcagacatcccttccttcagtgacaattcaaatattccacagataaaggtaacagtgtcacatagcaccctgcacccctaaaagtcatggtacctaaacacctctggacttaacttcagttcgttaggctaagaaactaacatcctggagtattagtctcaagggtctctcacctgttgctggagtcccacagagctattcccaattccttcccaaccgatctgctctgtccttggccttgtgggggcaaagtcttctgggagcaatgatggtttaggcaaaggggacgttcagcactgtgactaagggctgtgcagtaaaacactagtcattttcaattcttcgcattgctctctatcagaataaaatgtttaatggtatagtttgtggaaaaaattttataaacaaggtgtgtttggaccatctaggcattgcatggcattgcactggatggaaagtgaatgcactgtcttctctggtgggttaagtttgctgccagaacatgaagttttgtgggtggaggatgcaaatggggagtggacattgcacattgaagcccacacgtgcaggtgcaggccaccagggcagcccttgcctggaaatctgtcatctcaccttgccacactcacagccctgctgatggacggatggaggaaaagggctttgccaagatgatatggaaagctctggggctaccaggagcctcttgtcctctaagtgggggcacaagaggtgctgtgtccagagcagccagctcttaccatgctgctttggcctacctccctgaaatctgctaccttgtcacttgggctgaggttagagcatcaagaagggcagtggggctatgggcatacccctcaaaagctccgaagggagggtcagccttcatggagaacacatgttggtatgttcatgattctgtgggtttagtgtggaaaaccacagaaactcccagttttgaggcctgccaagatatggggttcagaagggaggaggtgtgggcattgcctgctgatgagtcacactggggcgagaggagacctgcctcaccttcaggctatggtagcagctatagccacccagcctaagaaagatgaagtctcagattgcacatcctcttcaagtcctgatgagtcctgattgcc

SEQ ID NO: 100821 - DNA, 1415 bp, Homo sapiens
tatactgtttgtgtgtgttccaattttattacaacctttttttaaaaaatagaatcagggcctccctgtgttgtccaggctggtcttgaactcttggacttgagctatcctcctgcctcagtctcctaaagtgctgggattacaagcgtgagccactgtggctggccccagttttattacaatcttgatagtactagttcataatttattttttccactaatctactaggtatattaaatactagttcaaggttgctttattaagcattattttcttcttgtgtgagtttatcatttgtattattatgtgcctcataaggtagtcattgtaatttcgtaattgagtttttctgttatatgggttttttggttgttgttgttgtgtgtataagaaacattactgaaaatctgaaaactggtgctcagatacatccttcattctgtgaaggcctcatcccagtagccctaagaatatgattctaatcatgaagtcattttatataggctctttttgcatgtcagtttagtacattttgaagttactttttgttggaagtgtgactctaacagataaggaggaccagaacagatacagagctattctcattgataacatttcagactgtttttctctttcatctcatgagtgatttttttccttaagttcacttcctccctctgcgttcttctcatcatctctttcttctggcccattcttctcacacttacaaaacacattctatttatatgcctccttacacacactttttactaaactgtagacttagaggcaaggaccagcacctagcagagcatctcaactgtagttaatgtctaatacatggttgtttaatgattgaatgaactgggacatgcctttgtatatgccctggttgtttccccttctggaaagctcttgttctactatcttgttagcttgttggcctacatctctgtgctttcatgtcagacttcaagaaaattgggttcacaactgatacttcagttgcttaatcattttcctcttctttattatcatatcttgccactcttgctacaaaacctatattctttgctttttaactttttattttgaattttaaacttagaaaaaattataaaaatagtagagtttccgtatattcctcatccagcttcccctaaagctaacatctcatataaccattatgtaaagatcaaaactagggaattaacattcgtgtaatactagtaactaaactgcacacttaattcacatgccatcagagatgtctggtcatttttctgttccaggtttctatccaggatcccacataatgtttgtcatatttccttagtcttccgttatctttcatgttgaagagtactggtcagctattttgtagaatgtccaaaacctacattcttgaacttgt

SEQ ID NO: 100822 - DNA, 1215 bp, Homo sapiens
cccaacaacttggtgacaaaatcggggtcaggcagtgctgtgtccttgattatgcgtcctcttttccatgtgcaaaacatgtatttttcatcattttgtatggagagctttctaaaacatgaacattcttgcctttctcagtaggacacactgtgatctcaggagcatcattatgaatacatgttagttgtgcctgaattctctcatgaccttttgaaatctggaaagcttttacttctgcactgtggaatagtagggattttgagttcttgtgcctactttgtgtagtttacattcttttccttggtgtcagctgtcactccttagtgttattgtttgtttgatatgatatctaacctctaaggccttttttgcccattcttttaatggtgttttgaaaagttgaggttgttggaagaatgaagcattcgtattcttggtcatttttggatgaactgcaaaactttttagagctctgttgctagattccgaagtctgtgagatactagaaatcattttagcctgagtagtctatattttccatgttgcttttcctctagcatctctttgccccccccactgccatcctgggaactagagaacatctgagcaattactgttgtccactaatcatgagtctttcaagtgaaactaccactcacaaataggggcttaacctggccttctgtggggtgctcctttctttcatgatgcttatctttctggaaggtagccatttacctgtctgattgccttaaccctgtatcttttagtcagccttatatccatatacacacacccacaggcccgtgaaatctaattatatcgatcacctgagaccctgtatgtttgttcttcaccagtttatgcctctgctcacttcttgtcttgtgcctgactcttggctctctgtcataccctacctctgctttcgtctcctctccaacacacacaccagtttctttaggcttgatatgtacatgtgctctgtggctcccaacccagagtctattattaagggctctgcatggttgggatgggagctgccatatacagtgtgcctcatatggtgtgccctaccctagctggacctttaagacccaacctttggccctagcccattatctggcccatctgatcctcctgtgaaaggacagtttgagcaaaaccttgcttgagaagcttacagactttccagttctgcaactctgacag

SEQ ID NO: 100823 - DNA, 1031 bp, Homo sapiens
aaatgtgggcatcgtgccttttgttgagcgccctggcctggagagaatgaagaaagcatcccctcatggcctgaggacaatgcagctgaccctcagcacctggtaacttgtaggaagctttagaatctataaacttgatgtgcttctgcaaaacagttgcagatggtctgaagtgatgattaaatatcactgccactttgcccagatctgctatggccattctctccatgtctggttttacattacagtgggtaattaagggggcacaaccatttctagttacttccaggccatctttttcaattggcttatggggaaattacagttgctgtcagttgtgtaagtgactgcattgagcagcgattgtgaatggctactttttgtgttcaaaataatactaatacaaaacacccaaacttaaaaagaactgttcctaatgaaagggaataattgcctgcctctgctgtctctgctggatctccactgggagttctgccatcagacttgtcagagttggttggcagggactttttctcctgagttagcacatagagatatgaacgggcagagataacacaaattagcaaagatacaagcatatctgcagaggaacagatttccttccgaccagaagtgccgttggtgggcaccaccctaattttcagtgcatctcttagtgctgatgacaggacttttcagcaaattttttaaaaaatggcttaagcaccaccggacctgggcagtttttataagattttagagtttcaaagggctgctaagcttgccaatgtaaagtcactgaatattgtctccctggctgctcactggggatccttacacctcactcagcatgatgaacttggagacagaaattcgtaagcttcagccccattttttttgactgaagatttctttttccattcccacaaaacttgcaaggacacagaaggctcagtgggggaaaaagatggcatgtgcctctggctgacatgacttgtgccagtggttgcgtggggattccataatgaaga

SEQ ID NO: 100824 - DNA, 1030 bp, Homo sapiens
tgaattaaataaattattttttaaactaaaaaaaaggtggtggtaaattattgttttgaaaaacagaaaaatagttttcatttaagctggattaaggcccagacattgactacgagaatcttagaggtctaaatagtccagccaggagggtctgttgacagcagcatgacatataatttggactctgttgggacactttcagtgaatgtgtctttttctttttcactttagtgagtatatatatgctaatatatatagagccaaaaatctgtctttcattgatttaagtgccagctatgaacaaggcactcttaggtgctgagatatttgttagaagcaagggtcaaatcctaggatccctactcttgaagacctagctcatgatttagtagaggaaatagagacttattcacacatacattgtgtgctgggagagatctgatacagtgccgaggaagctcacaagttttactggagtatgtggaggactctcaagggaggtgacatttgagtgggggcttaagactgagtagcacttctctagctgcagtgaagggggatggaaggtgatctgccattttttgtagcactgtttgcacgtactctattctaaggcatccgttaataactgatggtgattcactcctgggtccctgcctgaatcttcttggattccattattgatttttcctatagcaaggcttccagaccctctgctatcccgctcatatattcccctgttggtagtgtctcttttaatgcacagtagctaactcacgactgtggagctagggtgaattgggttttatacttctaaaaagtgcacccttaatatgcattagctttaaaaataattaaagctggttatcctgttgactcattgaataactctgtgagagatcttgttgactttaaggtaccctgtgagtgttataaacccttaatcaacagtaacaatatcaaagcagcacaaccagttgggcatgacttggtctgcctgatccctgctagcttctggtggtacccccct

SEQ ID NO: 100825 - DNA, 1037 bp, Homo sapiens
gtgtgtagcacatcctccctcccttccctcctcaccagcttctgctcaatctgttagccctgcagcagcagttaattggcaggtataattcccatgtagggcaaggctggtactggaggattaggatagtagctgtcatgggtaagtggtttctagcctgggagacagaaatgtaatgtgggaccaacccgtctgttaagggacagggaaaaagagatcgctttgtaaaaatgacacatggaaggctacaagtccaggagttattttctcactgccactgaagtcccatttgatgaaaaacaagtgatgtttgcccctgtaaagtcacgtgaacttgtaaaatattattgtcctttttgtgctacatcatcagcattcatctttctgaaatctccctctggtttctgacgttgagctattggagatactgctgtggctgatgactaagactgataattcagttttcccccagtgttggagagaaattaaaggagggaaggccaaaccccggagaggctaggacttcggaaatcccatgagagctgtgttaacactaatgtggtttttctccagagtggggcaagatgttagctaagaaaagaaaaagtagcagatattgagcttacttgaaagtgatttaaccctttcctagaaatgttttgattattttagttaaattctagtggtatgttgggtacattgtgcctgttgctgataataaccataacagcttgcattcatgtagtttacaaagtagttttatgtacatcctttctttaggtcatctctatgaccttgagagataacaggtaacaatttcattcatccccttccttcccctcccctcccctcctcccttcctccattcctcagatcttcactgagtacctgctgtgtgccagacactggagagtctacttatgccagagaacaagtagacatgggctagcaatgggagtctttgcactggtttggggttggagagattatctgggcagatcctgccagatccttacgtagatcatgtgagggatttg

SEQ ID NO: 100826 - DNA, 1050 bp, Homo sapiens
caaggtagaaggaaacagacactttaaaagagatataataggagaagaaacagtaaataccaagttgggggctattgagggtgtcacagaaaagatagtagttgagctgggccttgaagattcatttttattaggcggaaaagaacacaggaaggcatgccaggcaatatgaggagcatgaacaaaggcacagaggtgtcagcgggcacagagtcttcatggcaacctagagaggccagcgtggtcaactatgttgtccctgtgctgtggatgagaaggcagagtggggagaatgtggttactgggcctagggccacagccctctttgatagtaggagtagctattaatagatcagggcccagcttatccagcattagagtcctatcaggttttgtactgatctccaccatacaggagcactgtgtgtgtgtgtgtgtgtgtgtgtgtgtgtgtgtgtgtaattacacaagtaatgcatgaatagattgtcattctgaaaataccagtggtacatgagtagagtgaaaaatgaaagttttccttcactactctgatccctttccattcctctgcctagaggaaccttgtgaacagttaattatgcaaatgtatttgtttctacttaaatcatactgtgcatattctgcaccttgattttttgggtcatctaacagatctgtccaggtggtacatgcatatctaccttgtgtttttttaattggtgcatagtatttcatggtttggaaataccatgacttatttaattattttctattaatggacatttgattattttaaaatcggcttttatgaaaaatgctatagtgaacctacttgtacatgtgtctttgtgtgcatatatttccataggatagatacctaaattttgaattcccagattgaagggtatgtacattttaatgatagctactgccaattttctcactgtatttttaaattctccccccagcagcagcatctcttttcttgtgttcttgcccacaatgcatgtgatcagtctttaacatctttgccatttgttttgttgt

SEQ ID NO: 100827 - DNA, 2112 bp, Homo sapiens
ctctgttccttttaggagatggacggtgtcttgtttgtctctagtgcctaccacagtacttgccttgctgtaggtgttcagtaaacatgagagagctcatgtagtccctgtcgtctttattacatccccattgcttgaacctaaggatacattatgaggaagctatgctgcgggtaatgatactggaaatttaagaaattcagtttacttctttgaacaccagtatttccttcgcccgcttggtagatacacgtctctcaatttggagcagagtttctgcaggttatgttcaccatctacatcttaggtaccttagtgttacagttcattaactgggtttaagacaatgtgattttatttaaaaaaatcggtagtgttttccattcagacaaaatgtatatactattttagttttaaaatctgagcatatgaaaattgaaattgtgcataaagaacttttttttttcatgtcgaaaagcagttaggaaactacattgtgttttaaccttgagttcttgaattctcactggtgcagtgtctttcgtaattctctagatcagcgaggtgaaattaagatgaaaattgctagagtgtattcggatgaaactttccggttgagatcagaaacattcaaatttattttcccatatatccaattgtcattttgatcgcatacccaaaaatgcctctcttcatttgactgcatttgagattcagttgacagttctccttatgcaccctccaatttgcactgcctgatctttctcctaaacaccacattgactagagtgtgctgtttccctagaaagtcctttaatagttcttctcttcatttttgcagggacagaattacttagtttactgattttcaacctttttggtctcaggatctccttgtactcttaaattattgaatatcccaaagtgcttagaaaattctggcaaatacaagaatagacaagcacacatttcattagccatcagggcagtgatgtcatcatgtcatggagcccttcagaaaactccattgtacactcctgaaagaatgagagtgaaaaaggcaaatggtgtcttagatttattataaaatagttttgatcttataattccctgaaaggatctccagccaccccgctaccccatcctggggtcctaggactacactttgagaactgctgatttacttggatggagggagcatcatgttcccccagcagtgattgcatttaggacttaccaatttctgtggctttcccagtgtttttgaactttgctggtcatttgctgatattcacccttgtggttgaaggagaatatcctgctggtctgaagcaaatgcacatgggcagcctaggaaaatattctctgtcatattagatggaatcgatgaccccatctcagcctgggttactgttttaatatgttgctctattgctttcccgtcacctctaactttatcctttcccccagctgtgagtcatctattgctgaaggtatgcctaattcctaaagacagttctctgcaaatagtagtgtgtgctttaaatgagtaggctcatgagtaggctgtgcttggtcaggcaaaacagaagacgactgttataacaaacttgagggtacatagattcattgagtacttgtatgtgccagctattattaggcactgtatatatattatctcttttaatcctcactataggaagataaggaaatcagggtctagcaataagttagttaatattctgtgtcttccttgatcaggttgggacaccacgctctgtgttccagtgacacttctcttggtagtaccaggcatgcttataattaatggtttgtaatagattatttatatttaatggaggccagaaactgggattattttatctgttatatcctcagtgcctaacacagtgactggcacctagtatgtgcctagtaaatatttgtcaattcactgttcatggccacacctctagtaaatagcatggctgggagtatgacccaggtcagtctcattcccaagtccagcatttctcacggtatcttgttactcacataacactggacccagtatatttttgtaatatttccctgcttgcagttttattctct

SEQ ID NO: 100828 - DNA, 1038 bp, Homo sapiens
aggaggaagagggagggcatttttggatacagaaaatcttatcttctttggtaaggggaataactggcccttgatctgaagtgggaagtaagagaaaccctttttggatgggtagtaggataactatgttcagggcaacagagtgaattgccacaccaaggggtaatggtggctaatctataggactggtggaaagatcgtttagtgctacaaaatgcttcgggagcctctgaaaggcagcttgtgactgcaagagtaagggaaccctgtaatgagatctgaatccaagattgatttttgtaatgaggaaatcgatttcccaaggaaattgtgtgacagtatgatgtttggatgagtgtacttcttggttggtctgttgtagacactttgacagattgccttgttgtctagattgttgctgtttgctcctcattgctgatagtgcccctttccttctaatgatgtcttgttttccctcctaggttcatggaatccgagctggacctaaatgacatcattcaggagatgcacgtggtggccaccatgccagacctgtaccaccttctggtggagctgaatgctgtacagtcgcttctcggcttgctcggacacgataatacagatatcctttcagatctgacctcagtaggagagctgacatggtggggaagtgctgttactctttctcctgtctctctttgtagatgtgtgctataaaatctgatgttctgtttccattctaattatcttctgtcttgaaacacacaatgctttttactcatttgaaaacctggtttttctctattaacaaatcttgcaaatcttgggcaatccttaaaattgtcctatttgctcttattagtactagaattcatcgtgatatatctgttcatacattaacagctttacttttcaggatctggattggaaggccccttatgggggcaaagccagacagatttgaatgtgtaaatctaggcatctttctgctgactgatggtccagtggagttgagactagagatagtgaaccatggta

SEQ ID NO: 100829 - DNA, 2004 bp, Homo sapiens
aaaaaaaaagactgagtacacagtaaatagcatttaatatttgttgagtgcatgttggacctaaacagacaatctaggtttgactctcaaccgcatttttgtgtgaaagacggtgcccttccacaacttgtattcttttttgcacagatagagttaataacttttgtctttcagtgttatttttatttttatttgtttttagagacagggtcttgctttgtcaccctgactgaagtgcagtggcataatcatagctcactacagcctcaaactcctaggcctaagtgatcctactccttagcctcctgaggagggactacaggtgcataccaccatgcctagctaattttttttttatttaattttttggagatggatcttgcaatgttgcccaggctggactcaatctcctggcctcaagtgattttgcctcagcctctggagtagctttccatgttactgagaggatcaaaggagtgtataagtgctgagcacagttcttgatacatagtaggtacttggtaaatgttacttgtcactgaatctgattcgtgacttccaaaaccattttatactttatcttggctatcaggtgtgcagtagctttattgcaaaggcttttgatgtgcctgtggacagggttatgttcattaaaccaaattctcttctagtagttgttctgtttgaatccagatttccaaaggtaagagacaaatgtagttagtctgcttgagtgatattcacagggaatctgctgttgcttcatgttattttcatctttctggtaatctctctcctgagagcgtgtctgactaagttcttgcctggctgataattctcatagaaataaatcagtgagtaattttaatgcaggcttcttgaagggcagtcttaagacatttctgatgcttcatgtaatgttagatagcatcaagaattgatctgttagctcccagatttatgactttgttcaccagggtttgctgtggggttctgggttgtataagaaccctagttagcttgctgctgagtgagctcagtgtatggtctcatgaaattcattcagtagagctgctgtgagtgctcatgatgtaccaggcactgtgctaggcccttaggaaccataagctgtgctggttgctcaagcagcatcagtcagtaagtatatattgggtattgtcttggtctatttgggctgctataacaaaataccgtaaactgggtggcttataaacaacaaaaatttatttctcacagttctggagactgggaagttcaagaccaaggcaccagcagttttggtgtctggtgagggtctgcttccaggtttgtagatagctgttttctcactgcgtcctcacatggtggaaggagtgagggagctcgctgtgtctctttttaggacactaatcccaagggccccacctccaagtaccatcacattggggataggcttcaacatatgaatctgtggggggatataaacattccatctttggcaggtaactgccatatgcctagctctattctgggcactaatggtgttcacagactcagtgactacgagttctggttgttacttcacatttcagttcacctacagaagggtagatttcagaatctgatcagaccttagagaggacttagctcagtaccttgtttgtttctacttagtgacaagtgtgaagtccagatgttggacagctaacttgaagttaagacaggcactccaggtctgtgattttcagtccggtgttcctccagtgcacctcaggtcttcctgtgggatttacgacattgctgacagagtcgcatggtcacctgttaccctgtatattattagtacagaaatgacttattttctttctggaaacaccactctcattcttttttctattcctgctaactcaaaataatagtagctgcttttggaagatactgacattttgctgattcaccagcctggctcctgccggggagaagactgacacaaaaaacgctgct

SEQ ID NO: 100830 - DNA, 1038 bp, Homo sapiens
gggtaaatatcacctttaagagtgaaggagtaagacacagaaagcatagttaattattcgtgatggtcagctggtcagttagagatgagtaaagcaaaccttcaagtaatttttctttcagcaaaagacctgcatgtaatacccagaacatcagtcatcagctagcaagtcctgtcattcttgttcttatattctgcatcttttattttttcttttaagtgaaactgccctgattctgacctttgttgaatcttctggattctgttgtatgtagtagctttggaataggtctttctccttcaggcctggctcccacaactacccacacatgctgtccacatggtggctcctgtgtgccacccccgtccctcatgctcaccgtgctttagtgcgtcctgcacacagcttttagcttattctttccaaatactattttcttcagctagttacaattttctctcccttttccacttccttcccctctcctccaatcctttcttctcttcaaatgcctttgtacattccagtctctctgcttttattcctttggttttgctttctagtctccctgtcctcatatttttagttgcctgttttctgagcagtcttcttctagcaagtcataactaattccccagctccatctgattgctccttttcaggacgcctgcagttcatattgtctgtgtgtattcttcatttgttacatgttggttatgtcctgtggtgtatggtttttaaaattgttttagattatctatctttctcattttacagatgaggaaactgaggcccagaatgaagaatggattggcctttatcatgttcagtactttagtcatcatgggcattcaataaatgcagtttgctggagcaaggtgtctgtttctctctctctctctctctctcccccgttgtgtgtgtgtgcacccgtgtgtgtatgtgtgtgtgtgtgtctgtgtgtgtgtgtgagagagagagagagggagttttaaggtgagggaaaggaaacttataagtttagttctgccacccagt

SEQ ID NO: 100831 - DNA, 1200 bp, Homo sapiens
taaatttttccctttgttttcaaccaattatatcatgtcctgatctctgaagactccttggtgaacatcagccacctcttctcagaaattattactgccttcaaaggtgaactgtacaaggtagttaagattatactgagtttcaagaatttaaattatgagatgaggttgagggtgttggcctatttctcactggaagtgacttcccaggcgatctatttaaaattttgaaatctgtgaaaattcagtgaacctgtggactaagcagccaggaaggcagcataaggcaagagactgagtgagtcagttaacatttaatgaacacctgctgtgggtagaaccttgttgaagagatgttaataaaactggagtctattaaaggtagatggtgataaagcaattgatgaggaaacggaagggaatcaaggattaagaaaaatactggtaccgtttcagtatgtgtgttatacccttaacatttttcacatgtgtccatagctgtggtcgatttgcttcaggaattaacagatatagacaccctccatgagagtgaagagggagcagaagtgctcatcgatgctctggtaagttgcacatcctctggggttttgcaggtttgtataagttgttggcattgccaccaccatcgtctcggagagtggccaccaggtggaactccacggcaaggctggagtgtggtgaggctggagtgaataaggagagtaaaaaagtagagatgtggctggggcagtgctttatgctttgggactgtgtcaggtagaggcctcgcccttattaagtctctgctgtgggcagggccatttctcattcttctcaccacatcctctcacatgggcattattgctattatttccatttacagccatgaagctgtgacttaggccaaacaaatggcccatggtcacacagccaggatttgaacctgtggtctcctagactctatgttttctgcccctttcttccctcctctcttttgttgctactgacctttttacaaagagctttcacaaatgtttttctcatctggactttctaatcccaagtgccagtgagaacaggtattattattattacttattttacagataggtcatcagagaggaattggagaatgtcgaaaataagaacaaactttatagctcattgaggccagaatggcattccctgcctgtagacgac

SEQ ID NO: 100832 - DNA, 1056 bp, Homo sapiens
atgggaggcagtttggaactgcttatatgctattgaaatggccctcaggcaggcaaggatcctaactttttgtgagaaggaggcacttgtttgtaactaaagtaatgctctaagtaatggccttgctctgcttcagaatgtcacaagcatccagaaagtctggggtgtatcaggtcagatttgtcctccactgtcttggcagggctaaaggagaaggttctgcctaagatatcatatgctgcatggttttctccgtttctgacactctagtcttctccaatcctacttattcagccgtttgttcccattaaatctgtaaccttgatttacataacatattggcccaaggatgctcagctagcccagctgctaccatcagtatgagcacatttgcctagcagaggtcagtaaactctaactccctccaaaccccatccctcttgcctttcagtcttgcatccagcaagtagttaattcaggcattgtcatttgcaacttccttttgacctcctctcttgagtctaaatatcctttggttttagaactagacttgtttctcatttaatttcctttacatctctctaaactccgtttcttctttcctcagtattcaacacattttttattctccaaagccttgagacattttgggaacaaccagtggaggagaggaaagtagagcaccgagttttaaggggatggcgtagatgtcagggacctgagttgttgggggagtagccacacgttagggacgcaaccttgaaatacacaaaataattcaatagtttttttgtctctgttatgtcgggacagatttttccaagttacttgagacttaatactgattcagggatcttcattaaactagaatgtcttctgccagagtctttttttttttttaattggtaacataggaagggaaattgacttttgagtgtttggcttggatgccgttacccttatgatcataatgaaggggcccatttgatagtttagcaagctattgactcttgccacataggcactgcattgatgtaatcctcggggcacaaatag

SEQ ID NO: 100833 - DNA, 1047 bp, Homo sapiens
atggtgttgcccaaaccacatgggaaccacgtgagagagcctgtgagcattgggccttggcatctttgaagccacctcctcttgccaagctgcttctcagctggcactgcttttaggttctgaagcattgcagagctcagcgttggggagttatcgggcctcatcattttggtttcctgattagattcttccttcatgccaatttctcagtcagaacttatattttaatttaaaaatgatgaagttatcagtctggtttttaaaaacttactttggttaaattggaaactcttagtagtgtcttacagcaaaaggtggagatttcctgtggaaccaagaattctcagtagcaagaaactcagctggtcggtgcctgttatgtatacaccagttcccttagtacagccacttcatgaggaagatattaatttggccagtctcatagctggtaactgttagagctcagattctaatgcagatatttctggttatggttgtcagaaaaacttgtggtacctactgtgtgttaggtactttcatattatgtttttaaattctcatagtaactctccaaataagtgggattttttttctatttcttttttctttttttcatgtcagtgcccttaatcaaaaaagtgctattttttattttcattttacagatgaggaaactgagactgagaatgtttcttgggtcatagattcccattgtcagcttacagcattcttagtgtctcagtaattctgtttttacagcaccgctatgccaaaaagtacctaatagtctcatttattaagtagttatgtccaaaccatttaatatatatttatgtccttacaatttattagccatttgagaagataatacacacaaattgaaagaaaaaatatttttatttcattcttaaatatcatagttacttcctaatggtatgtgtgccttttggtactgctcaaatccttaaaccttaggatcagattgaacgctacgaccatcattctgatttcacatcgattttcacagttatttttgtcagagcagct

SEQ ID NO: 100834 - DNA, 1049 bp, Homo sapiens
gttgtttctcatcctggataatgatttcaggggtgttcacttcatttagttttatatgtcctttatggagtttttctgtatctgtgttatatttcacgataaaaagattttgttttttattgggttttggtttttaaaaaaatctgcttgcctggaactgtcaattactgatggacccagtggtcagtagagtgttttggcttttttttttgcatgtatttaatatatgtgaatcatttagtttctctaaaatggaaactgatgagaattttgtttggtgagcttctgtttcctcagtcgtagagttatgacccacaggttttaggaattgttggatggaggctcatgaaaagacattctcttatagctctgtgctttgtgctgtttttgcttgacaggtgtttaaaagacacaatcccagcacggctgaggagcaggagatgatggagaatctgtttgattccctctgctcctgtctaatgcttagttccaatcgtgagcgcttcctgaagggcgagggtcttcagctgatgaatctcatgctcaggtatgtttcgaatgccctagttctcccaccttttttgcctgacttttcactgttagcctgaattcaagagcatgtagctatgatcatttattctgttgggtttcctagactttaccctgaagagtaaagtcttcaggcatggggggatgtgtttgtataggtatgtggtctttcctaaagttagagtagatgaataaaaagtatattgtgttctgtttgtgccctactgtggtggttgctaatacgtccactccattgaaggacattggtgtttttcctctccttcccatagtgtgttagttttggggaaatctagccattacttctaaacttggactaattttctgtatatatcacatagacctatctatgccatatgtttgtatttttattgaaagcagcgtatcattcatatttttcactcctcattcagtaatgagttgtacatgtgctgtatgcctagcttaggaaatatgaaaacgtgcaagacagttctagaaac

SEQ ID NO: 100835 - DNA, 1019 bp, Homo sapiens
aacttcaagtatactgaaagttctgttgaactaagatatttctttggaaaggtttttcataaatgtgatatatatttgttaaatagaatttagaatactaacatataaaactgctattaaaacattgacaaggtactatgttaagtactgggcatacacagaaatacctaagacagaatttctgtctccacaaagttaggaaaacagttctgtgagctaaacacagcctgtctttgggtgtatattttcttctagtctttttttctataatttttaacaactttttaagcctgccacacataggattttctgtattgctacatttcagacataagatgctgtttcccatgctgtgaataatcttcatgagagttttcagtaactgcatcatggcctctaagggactgtagcttacttagtattcttctgttgttggcattgaggatatttccaatgttttgccgttataacaaattctacagtgaccatttttgtgtttaaaatgatgttaggattatccaggtacagtaagtcctcacttaacatcatcagtaacattcttggaaaccataactttaagcgaaatgatgtataatgaaaccagtttttctgatcattgttataacggtgttatttgaggatctgacctcctatatcccgttttacttaaagttgccatttccaagtctatctatgatgttaagtgatgacttactgtgtatatttctaaaatatattatctttaaaaggcttctggggggctggaggcacagtagacctcttcatttgtccagtgtgtaccagaccttgcattgaccaaaagtcttcctttgaggaattgcttttaaaaacaatttttaaaaaaatgcagagaggagcatgagaaattactcagaggccttttgtgtttagctgatttttgctagctttactctcttgagtcttttgtttatctcccttacccttctaattgcttgtccttttgttgaaatgacccaccttctctcaagtaaatagca

SEQ ID NO: 100836 - DNA, 1092 bp, Homo sapiens
ccaagtagctgggactacaggcgcccgccactacgcccggctaattttttgtatttttagtagagacggggtttcaccgttttagccgggatggtctcgatctcctgacctcgtgatccgcacgccttggcctcccaaagtgctgggattacaggcgtgagccaccgcgcccggcccataactgtgttttttaatccagcgtgaaagtttgtctttcagtagatgaatttaactatttgattttatagtaattacgtttagcccttttcctgtttgttttatggtttccttggttgttttattgttttgtcttatctttttttcacttccattattttccttcttctttggagatttggaaaatactattctttctattagtgattacctttagttttttagaaatgtggctttatttctttgtctatgaacgtttgaaattgtttctagtcccctcaagatctggcctctgcctcatcctcctactgccatctctttcattctttcctttctgcacatttacattccactctctaaaccaaactattttagatcccttgacacattttgttattattattattttgatgactcacttttgatgtttaggcttaaacttctctaagcagccattttcttccatgtctcttcccccacgtctgtcctcacatccccacccctaagttttgaaggttgggtgctagcatcctttgctgcctctgtcagagcactttctgcaccatgcatggtaagttgtacggctgtgtcttcaattgtactgtaatacttttcagagtagagacagagtcttcttcctctgtatctccagtatctagcaaaagatacacctttggttttctgtgtttggtttcttaattttctaaattaatgagaaacattttgctgtttaggatcattggcccacggaatttttggcaaaccgtgttcatagacccaaaggaagaggagttaaaaagcctgttgccgagaactcagtctcttgcctgaacatatttagttctgttttccctgtcaaatttttcagtgcatggaaagcacaaaacggggccatagtgtgttgtaatcctgatc

SEQ ID NO: 100837 - DNA, 1779 bp, Homo sapiens
gctgttaaaaagaaagaaaaatgaataatgaaatgtctataatctcaacaccccgaaataatctcttataattttagtctctttctttccagtcacttttaatgtacatttttcatgtgtaattgtggtaatgcttcataaagaattttgagtattgccttttgtgtttatcattctgactgtaagaatttgtccaccctattgtagacgtcttctcctaattgttaacaagtatgtaatatttccatttagatgtataatgtgtacggcagcaaatacccttttttttttttaagctctataatttccccatgaaataccttatctgaaacctcttttgttcacagggaaaagaagatctcccggagcagtgccctgaaagtgctggaccatgccatgattggccccgaaggcacagacaactgccataagtttgttgacattcttggcttacgaaccatctttcccctctttatgaaatctcccaggaagatcaagaaagtgggaaccactgagaaggaacatgaaggtagggttcactggaggagtcagcctaatttaggtgcattaggagaaatagggaaatgtgaactactttgaaaaattctgacgtgtttgggggatagaggggaagagtgctacctttttcttactattttcttatttttcatgaatgaaaaagagaccccaggtcactgatagcctttgttgcaccagttctctgcttgtttgaatcctggtcattccatttccttctggactgttaataagtctgtgtgtgagggttttgttttcttcactataatttgtagcgaggtgtctctctgatggaagacccttttgaaaagagtaatgaggtggcaacacatgtcacctccagagtggtgctttcatgtatttctgtactaaagtatgattcagccaacatcaggaattgccgaaataaactatttatagcccagattccccttttatgtttctcctccctgatggtgcacgctcccagcaaaatgctgccatgaattgtgacgctgtaaccagagtagttactgctaggccagtctcttcctgctgttgtctagtggcctgctgcagccctctccccagtaaatagccacagtgcaatctggaaggccagggatttatgagcattgacagttctgctggaggctggcagacacttgcaccagggaatttacatggttggatggttattttaaagtgtggggagcgggtggagaggagtggggaggtagtgtgttgagagaggagcagaagctgagctgactggctcatttggctgttttctcagaagcaatgttcgtcccatggtttaggaggcttttttttttgtcagtgcttggtggaattggcatgggtatctgcaggatcttttgcattcctcatcctcatagacgaaagtttgagaactcccgcctctctcttttccagttgacttggcttagtctctcccaacttggagtggctaaagggaaggtggtgtgacctaccttcagtggttatcttcagtgatatcttctctatcaaatcaactctccagagacaacaggaaatctggctggagcaaaagaggaactggccttgcaaatactgtggcctagagacctgagaacaagtagagacttcagtttaactcattttgaccaaacactagctataaatatgttaaccccgtgctagattttccccactgaaaattcagcaaaatgagtccctgggagagggaatggagggggtcctggaggtctaggagataaa

SEQ ID NO: 100838 - DNA, 1045 bp, Homo sapiens
aaccactgtgtccggcctggtccttagttttgatgtctctttctcagggaagcatgtcatgaacccgtagactaggatagaatcttctgttcagtggactcttggtctcaggactctgccttcatagcccttgaaattatggaaccaatggccttgtcccctctagatcccattgcctggtcccgtggtgcttggcatgtgatagatgcacagtaaatgtttcttgactgtgtgaatgaacaaccatttccctgaaaggctcattgaggacaaacatgggtttggggctttcctcagaaacctacaaggttgaagtcaatacagttgatttcagttcagattgatggttgtcagtcagtcatacacctagagtgaagggtctttcatccagcttgtttggatgctaaaatgagtgggttgctagccctaagttttaactctgtcacattggcttggagattatggcagaacccccactttagagccacacccttaagagctttgctgtacactgaccttccctataggcaaggccaccctgtgacaagcacctaggggtagcccagctcctaggtggaacactgaggcctgggaatcagctcgccagtccagaagctctagagagctaccccacactcttccctttctttcttgtgaagcttcagcgcttgtcactgttgtccacaagagcaccaggatggctaactagtagaaaggagaggtttgttgatgatacaagtttgtaaactagaaagagacagtctgtggcgtgtactaaaggtgatctgtcttcaaaaaacgaaagggcaggttgggttttaggcctcacaaggtctgtattagacaaaagagtcatacacattcagcaggttttgggggaaagctacacatatttatgaggggagtcaagtgcatgcgcaatgggtaaacatatgtaacacattccatgttcactctggggcagggttttagcattaaaatgaggtaggatttggctctttatatcaaaaggtgaactgtaagacacaaagtttgtgtatagtct

SEQ ID NO: 100839 - DNA, 2395 bp, Homo sapiens
aaaaaaaacggagtaggggctctggattctgttgcccagctagtgttgagagctactggccagaattctcacagtacaagccttggtaagcagcccttttactttctctctgtgccactagaagatttttgaatggtgggtctttgggggaagacttgttcaacacagctttattgctttatctgagtatgaataaaataaactcatgcagaaaatttttaaattgtgaaaaaagatgaaaggaaagtaaaaatcacccccaatcctactagccagagttaattactgaaaacatcatggacaccatccattcaaacactatgttagggactctgtgagtgtgtgtgtgtgtgtgtgtgtgtgtgtgtaattttgtataaagggaatcatgatggatatactgtttttactcactgcatcttgggcattttttagcaagggtgggcattttaatacagttaggagctagactatatttttagaaggcagggtaaatttcaggtgaaatgattaggatgtggaggtaatagcagtttggagaggtgagctgggcttagatggtgacattggctcctcctttttttttttttttttctgagatggagttgcacagttgttgcccaggctggagtacgatggcgccatctcagctcactgcaacctccgcctcctgggttcaagcgattctcctgcctcagcctcccaagtagctgggattacaggcatgcgccaccatgccctgctaatttttgtatttttggtagagacggggtttcaccatgttggtcaggctgctctcgaactcctgacttcaggtgatctgcccccctcggcctcccaaagtgctgggattacaggcatgagccaccatgcctggcccacattggctcttctaagtgttgtgaatgtgttgggacttcagggtagtaagacagtgagttgtagactgaagactaatgcatctaggttcatttgggttatagcataagaaggggaagtgaagatgcctttcaaatggtatttttttaaaatgtgtgaatacttgaatgtgttagacatgttggcatctaacagaagatataatgtgaaagggagtaaactgaaaataaacttgtatacatttcactgctcataaagaatacaattacgtgtgtgaggtgtttgttagtgtctaccttcctggactcttgtaatattggatgtgatttttatacgcagcagcctgcaggttgctggggaaatgctctgtgtatttaatcatcttgcagtcttacttgtttgttttttttatggtaagaaaatgttgttggcttgcttttgtagccagattgattttgcttgtgggtgtccagatgctgatgagctgtaattagcataagaaggaggttgaaaagatgttgaacattgtttccaggtagccaaacaaaggatccccaaacagaaattattctcaagtatcaggttcaagagaagcagcccttttctcttttaggagcagtctattaaaggatgtgtgtgttaggctgggtaggtcaccactacggatggggctgtagaaacttgctgggagctggtcctgggggtgattttctgacgctgaacatctccctttgtgagagtagtaaatttaaatcacttgggtagtctagtagaaagtagccctgggctgggttcagaagacttgggtttgtgtttctgccataattgttgtgcttaggttctgtgacttgagtgtcgtttgttctctgaacctcagtttcctcacctttaaaatggagacaatgtttcacagcatgtgagaactggataagataatatacgagaaagtgatttatatactataaaattatgcacatatatgacatggtagtgttgtggtgtgtattacattcattgtttttcccgtctcttctacatttcttatactttttctaagtaacactttccttccttgtccctggctccaaagcagaaagaaaagtatggtaatttggtccctgtttgctgcagggttatcataaaatacattaagcatgtcattttgataatcacaaaaaaaaaaaagcctacaactttcttaaatgtattgattactaataaatcatgtctatgttaagtatgcctgctggctcacaaacttctggaataacaatgtttgctagcctagttaactgggtgattttcctgatgatgtgtcatctggtctgaggctactgtagatattgatgatggcgatagtgtgatagtgtctcacattactgagtatttgctgtgttccagggtatacatgatgtcattatccctaacatcaactccatgtgggttatcgttagcctgctttattactgagagaacagccccaaataagttaagtactttttcaaattgtgcagac

SEQ ID NO: 100840 - DNA, 1041 bp, Homo sapiens
tcatgttgctttgcacccagtaggtgcttagacaatgcttgtggagcctcatcacaactgaaagatgagactactgagttaattttggcaatatttcacattaaatgggtttcagtggacctatttcaatggaaaaggcattcaaaatttcaaacaacagacataaaaactgctttctggaaaaatagcctttgggtatctcatcattcatattccaagtgcacactttttcttgcctccttctcaacattttcttaagataattttcaaacatacagaaaagttggatgagctgtatggcaaatactcatgtacctgccacccagattctacaattaacatttttctgtatttccctcaccacatgtttatccatgtctgtgtcagtcatccatccatgttatttttgatgcagaaagtaagttgcagacagcattacatttcatccttagacactttagcatgaatataaattaactgagtgtcgtatgtataatacgtatttttaaataaaagtaaaatgcatggctcttgagtgcaccatttgagtgatgataaatacaaaccatgttaagatacagaacgttcccaccaccccagagcattctctcatgccccttcctgggcagatccctccctgtgcctcacagaggtaaccactattctgagtttttaccatagattaggttaacctcatgtagaacctcctatcaatggactcattcagtgtatattctttttgggttaggctttcactcagcatactgtttttgagattcaccataggttgttacatccattggtaatttgttcctttttactgctgggtagtattccagtgtgtggatttatttttccattcttcctattgacaggccattatgaacagggctgctataaacattttttgtacaagttttattgtggtaatatgttttcatgatctcttgggtaaatatctaggaatggaattgccaggtcattgggtagctattcacatctcttttgataactaagatcttataattgaactgagagagg

SEQ ID NO: 100841 - DNA, 1310 bp, Homo sapiens
agagaactgttcaaagttacagagaagatttttctcaaagtatggactagaaacccttgtctcctaactctagcgttctctacagcagacttccctttttcccctgagaaagaaggaaatcaggattctttccagaagatcattaactctttctgttgttgcttggggagaattaactgttagatatacccgggtgcaggagattgtgcttgatgcctgtgcttctgtagtatctggatctgagcctgcttctcctccagtgtacatccctgcagctgttccaggatggtctttgtggaacgtagacctggtcatgcagcttatctccatcaaccatcatgcagggcctgtgggagaaagtccagactctgtagttgagtgtgcaggcctcttgcttctcttgcctcaccttccaccttattgcccatcccctgcagcccaccccatgccatgttccttcatatctctgggcctctaaatctcttgtgtttggtctggaatgcgtttccccctttgttgccctgataaattccatactgtttcttcatgatttggttcatccagaccctctcagggagtcagttacacctttttatacatacgtacctcttcaagctaacttaccacggtggtttgttatgatatcacattcagcattcgttgaactcagcacaggactagacactgaaggtacagatacgactgagacgcgggcctggcctttgagtttaccatctattgagattcctgtaacaggatagtttcagtacaacacagtaagctctcacatgtgttgcagagaacgagagctcatctccgcacatccttacaagcattaggtgtttgaaagcttcaccacatgaaactatctcatgactttacttgcattactagtgaggttgaatgcttttttttttaaaaatatgcctattgggtatattttaactcttgaggaaaacaatcaagttgtattatggtggaactaactaggtcacctcctagctgtgagaccctggaaggcaaatttcttttgccaactgagtctctagttccttgtctgtaaaatggggagactaataaaatgtgtttcataggattgttgtgagaattaaatgagataacatgtgtaaagcacacacaggcacatagtaggtttgcaatcgatgtggcctcttggagttcctggcccctagcccagtgcctgccacctatgcactattcagtgtttgtgaagaatagggatgtatgtaccccgtgtatgtgtaaaaggggctatatatagatgctcacacagatccatctgtcttgag

SEQ ID NO: 100842 - DNA, 1294 bp, Homo sapiens
gacacctgctggatgttttttctggaggggctgtgcttactatggtgttatcccaccctctgtgtttttcacctccttccgttttgttctccaccatctctggccactgtagctttccatctgtattccttaatcagggtaagttttcctatcactgtttaatgtccaatttgtattcgctcccctacaagacacttctcaagtcttcagtcacattataaaatgacgcctggcttacttttttccaagtctacaggagacctcattttccttgtgatcttgttttgctgcatcactccatccttttcagtcttttcttaaagatacacttgaggcttttgaacttcactggtggaaggactgattttagtatagccctccccaccttcccgtgttgggatcatccagctaaggctaccgtgttgcactgggaattacaccagcattttccctcggggcatgcctcaggccagagtgagagactagggctgtggggatgtggggagacagtgaccttgttatctgtcctgtttctctttgccacttcttatccacctcttccctttcataaaatgtggcaagattaccttttctactagactgctgcacctctatctagaagaccagtcagtcactgaccaacctatcactgcgcttttaattcattccatcgtccaaaaatgtcagagttaccaaaggttgtttaacttaacctgagggaatgagggaaaacatgaagcttgaggggttggatcaccttggctagtatcattcatgaacaccagcagataggtagctgtgcttttcattcttgtgatttccctatgatccctaaactgagtaagtcctcagaagtttgcggattgattgaattgattaactggggctttcttcttttatacagtgatactactgcaagataaaaggcagagactctaaattctgaggctgcactttagatattagcatgttccaccacaattctttcattccaattcaccccaacccctttgttctttaattaaactttccgtttccatcttttctaccctatacagtaacttggacgtgaaggacactcagtggttgttaaattgtgggaataatgtactccttctctttatctgaatgataattagaaacaacttgaaattccctggacttttgtaaggaaaaagccatgagacagttagaactccagccctgacagaatccccgatgttatctgctagggaggttttgaggggtggcaaagagaagacctgggagtcaggggacctaggatttaagagca

SEQ ID NO: 100843 - DNA, 1103 bp, Homo sapiens
gagtggggagaggtcatctaaggctagagtcaccctaaactctaggggggctagttttgtggctgagcattcgtgctgaacctaaaaaggtagggatatctagggcatttccagcctggagtgaaacagcaaaggagcagcagtgggaagccaagtgaagggggagagaagagggtaccttccacgagtggagggtgtgagaggaagagcgtgggctttatagccaggctttatcctggttctccgactgtgggcaaacagttgaactgccctatccttattttctttctggatggtgtttgttttgtgtttaaggtgtatgtcccagtttgtgtactttgagaagttatgtatgtagggatatggtgtcggtgaatgtattatgcatgaaagctgcttgcacagggcctggcacacagaaggtggtcagagaagctttagctttcttttctctacaaggactgtttgtgtccccctgccccgcccccgcacatgtgtacatacccactgtcctgattccctgctgctgcaaggttttgcatgacttgactcttccctgcttctccaacctcttctcctgccactaggcccctcctgccacacagcctttgtttccttctttacatttgccactcccttctgccctgagcctcctctctgctatcaggtctcagtaaaatgtcgcctcctcagagaggctttcagtgattaccatttgtaagagagccctatctccctagctgcttcagaacctgtaattatttcatttatttgtttactctctgtctctgggactgtaatctctcttgttcatcgttttctcaggacagcgtgcctcacattcagtaaatgaaagaccactgctcattaggtgaaattaatatctgtctgtgagtattaaggaagatacggcgagtcaccctgcgctttccacattattccttaacactaatttttaaccctgatttttgttttctctgtgattagacctgccaccaaaaatatttaagtacagttctgtggattctgtggcataactatagcaatatttcataaggaaaaatactacttcgaagaatcaacaggactgatagataattcta

SEQ ID NO: 100844 - DNA, 1025 bp, Homo sapiens
cacttttctctctctttactaccaacacttacattcaggctaccatcatttgttttcttccattagtgcagcacccgcctaactaactagtctgcctatctgtaggtttgggccctccagttcattttctacacagcaaccagagatttttctaaaatgtaaattcatgtatgcacttctccacccaaacacagtaaacagtggccttgcatcgccctcgggatgcagtctaacctcctgcgccggcctcatggtgcctcgcccagtttggcccctgctggctgctctagatacatccctcaccctcgtgatgtacaaaagccattctgtaccactcacgcttcctgaccttgtgctttctcaaaccttctagacattggcccattgctccgaactctgcccagaatacctctctgtgccatcttttccacatccctttcatgaagctggctaatgtattactctgtatccttcagaattttggcaaacaaattagtcaataaacatgtattgagtgtctgtcatatactaagcattctgcttagcgtttccctgacagtttctgcagaaaatcttccctgagaccacctggagcccctcctgtgtgccccaagtgcacccttgcactgcagcctcaggctgaagatcagggatgctggagccagactgtgtagacataaatcctggctctgactcctaccagctgggtgattacaatcaagttacttaaactctctgcttcagtttcttcatcagtgaaaggatgagaataacagtacctatcatgtaggattgtggggcggattaagtaaatgcagtatatgtaaatcacttggaatatttcctggcacagggaagtatgccctaagtggtagctattattacaagtattttgggcctgcatgcttatctgtctctccctctaaactaactctcagtcttcacaaatagggactaatcttacttactttctccttttctccagtagggttgtcgttttcagccttgtattattgcatcgctat

SEQ ID NO: 100845 - DNA, 1034 bp, Homo sapiens
cagagaataaaggtgatgccgtcttctttttaaaacagaccaaaacttgagaagatagaggactgcccacactttctcactttcttgttttccataatcattctgcttattttatttccttttaaacactgagtacacatttatatttggcttccctgaatccattcagcagtaaatattccatgccacagagttgtaacaggctagataaggtgctattctgacaacagtcaacttcactgcatgctggtttctatggcacttctaaaactgtcagggcagaaacttcatcttcagaagccaatctctgtttcatctctgtgcatgttcaatgcagcaatgatgatgcctttcttggagatgagctatagtcgtatctcagatctacatttgaaaatttcactttcaaatcatgtggccatatggctaaaagtagaatgtcgcattgaacattgtcagagtcttgaagttctgaggaaagagaagaaagtggagtttggcattgctctcttgagtttgtcctttctaaatgacaatatagagaaactagaaggtgcagtgtgtacctgcctggttaaaagaagatcagatgatggagaaaagtatgaaaatggaaaaaatcaccaggggtacttctgacctaattagagaaacttaattttgctaagctccattcttgagcctccctatcactctaatatttaatgtcttcctttgttctccagacagctccgaaatctatacccacacaaacatggtagcatgaaaagagcatggactagggtttgagtcccagttctgccacccactagccttgaggagcttgttctgcctgagccagcttcctcatctaaaatgggggtaagaatccctgcctctcaatattattattattattattattattattattattattattattattattattatttgagacggagttttgctctgtgccccaggctgagtgcagtggcgtgatcttggctccctgcaacttctgcctccaaggttcaagtgattctcctgcc

SEQ ID NO: 100846 - DNA, 1071 bp, Homo sapiens
gaagcctgctctatgcccagctcagctgggtggcaaggccacaagggtgtgtgtgctccaggttcaggaaggcctgtggccaccttgcctcccagctgggaagcagagtaagagctctcccggggaaagggctggagagggaggatttaatgaggtcccagcccaaccgcctgtaaatctcagctggcttctaaaatcaggagacataaaatccccataagaagaaaacccagataatcaggatggaaaagccctccagaaacagagaagcctggctgtgtccagggccctctcctccccagggaggcacccgagggttctctttgtttctttctgggtagcccttggcccctgacaggtgcctgcggcaggaggaatggaggtgtgagttcatgaaggttgcttcaccttgggacaggcaaacaaacgcagatgggctttcttcctaagaagccaagaagaaggcattttgtaagaaagcttagggaactgcagcatgccttggtgggaggtgtctgcctcagcgtgcagtaggagcttaagtcctccctcaaaaggaatggaagagatcagctctgatggaccccctaccctaagccaggccccgtgccaggcttcccaggatgccacagatcaggcccctgccctcagggagcctgcagtccccaggagagacacacatgccagagactgctataggaacaatggctgggattgaacctggactgccatgtacagttgttcagaatgtgcactgttcatatggccatgaatcatagtgctgcccagggttatgcagggcaaactgcatgttggagctatggaaggaggtgcaggttctagaagatcctaggagaaagataggctcgtgtctgcctggagagtcaggggaggttaccaggagaaggggacttgcttggacctgaaggctgactgaggtttgcacagtcagaggggactcagaacagaaaagggcataccagagaggggtctcccaagcccagccttttagctgccatcaccatttccacagggtccctgtaccacatgcaccattatttacttaatatt

SEQ ID NO: 100847 - DNA, 1067 bp, Homo sapiens
tctcaacctgctctctcaatcagtaccctcacgtcctcagcttcctcccacacaggcggactcagaagtaaggaaagcacctttcagaatctctgaggctgtttccaaggaaaaagatgggtggggggaggcggggagaagaagtagtggagaagagtcagaagttccttcatgaaataaaacatgttgcgttacctgggcgtaggtgtgggggagggataggcctcagcgcaccccacctcttgttagccttccttctcattgtctcatggaccccaccgggtgcactcaagtgtttcaccccaaaccctgccccagttccctggagggaatcgaactgtgccacagctcacaggtgaccttgggcgctctcttcccctgcctgtgcctcagcctccccatctactaggtaaagggtttgaaccaatcaatccccaagcatcgttccacctcctcaacatctataatttgataatataatgttggaaagtatatggggagacaggcatgtacattggcacaaggtctttggaggtcagttgggcagttatcgaccaaatttgaatgcacacacttttgatcagtaattctgcctcttaagtatttcatactcacacatgggcacaaagatgtacacgcctaggcagttcactgcaacattgttccgaatttttaaaaatattttcacaaatattgaatgcctagtatgtgccaggctttatgcttgatactcttccttaatatccaacgaatggaagcaaaagataggaaataacctaatcatggtgctgagctcttcatccagaagagactgaaatgccccccacaacacagaaattctactgagctatactgaagagtgatacctcaaatgtcatgaggccaggcatggtggctcatgcctgtaatctcgacatgttgggaggctgaggcaggaggattactggagcacagcagattgaggctgcggtgagctatgattgtgccactgcactccaaagtcatgaaatattactgttaactattccttaaagtaagtagaaaattagaggccaggtgcagtggct

SEQ ID NO: 100848 - DNA, 1401 bp, Homo sapiens
agggtccaactgccgacttcagcagcgtgctggaggaccataatattaaggcttgctcagggcccccgagcaggacagggagccctgccctgggcctgcctcaaccctgggctgggcctgtgagctgagcaaagcctttaagaaagggtacactctgtcgtttttcttctttgtgaaaactcctgctttctactctggaactcaacctctttctttgccaagagcttgtttgctgtcaatattgttctgctcagactaattactggtttctgtatgtcgatggatatgaaactgttacctgtatttcggttgggctttgggaccatcctactggtcctgtcttaggaactcaagtgggttttttctactatttgaagtgacttgatattgttatcagtttcttctcaaatagcctggtaaacagcctcctggttggggctgtagcattccccgccttccctctctgtaccctctactcactcctttccatctctccacagcgtcttcctccacttgatgaaggtggacccagactccacctggttcctcctgaacgagctttactgccccgtgcagttcacacctccccaccccagcctccaccctgtgcagctgcacggggccagcgggcagcagaacccctacacgaccaacgtgctccagctgctcaaggagctgcagtgaccctgctcccccaccacagaggccaccgatccctcccctactgccagccagaagctgggctgaccccaccccggccataggcggtggcagcggcagcagagaaggtgaattagttagccaatcgatttataaattgatcgatcacacaactgcttagaaatggattgaaggaaagtagctgactattatttatgtttcataccttgtgttgtcaagtgacattgtctggtggctctaagggtttaaccccttagcctaccatctctatagccccagctccctcacaggccacacacacacacacacaagaggtcagttcccctccatctgcatacacctccctgtcttcaaataatgagatggaactaatttgttttacctaacctgatctttgggaaacaaacggaaataaagacacttcttggatgaaaagtatgatcaaaagctcactttgaagttttttatttaaactgggtggtttttttaaaatgagtttatattcttgaatggttaatatagaaccatggtataaaatccaaatccaagcagtacaaaacagaaaacaatgaagagtaaatctccccctccccatttcccagccgtcaggtttctctctccaaaggcaaccactcgtaacaatgttttggttacttttcaagcaggaggttaattttttttaacattttactatgggtaatagtgtaaattcccatgtcc

SEQ ID NO: 100849 - DNA, 1050 bp, Homo sapiens
aacagttcaggcaggaggtgggcaagcctacctaggctgctatgaagatgtctttatcttcaagggtacataccttccagggaggggcaggaaacaatgtggcccgagagtgcagccagctgggggaaaggtccgagtcagccctcatagtgctcagcacagaatgccactttgaaatctgtgcccaatacactgtcgtgggatctaggcttgcagggttcctggaggcaggagaactggccagatggaaagggctgcttttaaatctcgccccagtgggatgtaaaccctcctagattctggcttatttttgaattgtctataacagattggacctctcagcgccatatccttttaaatatgcacaaagcaatggaatcattcctctgcatttatgatactttatcttgtggcacttcagaggtatggttagcatcatttgcttctactggtgtttacggttttaagtcctgcccatgttgcatttaaatatttttgatatgggtctctgtgtgagtatgcatgttggcgttagatcgatagatgaatggttttgaacaggtaaacatagttaagtcaaacgagcatgtatagctgcaaaggtaattggtagtatttatttggagagtaaatcgttgcttcaagtcataatcctccatttccaacatttagaaataaaaaacgacctccgtgcaggggaagatagctaaattgaatagcaagaaaggacaggcttgaaatactggttaaccaatgaactgagacccattagagtaaattaccaagtatagaaacatagccccactgcttgctggctaggacgcatcaacaccctgagcatccatttgtttaaaaggaaacacacagcctcctttgcagcatcagcatgcacagagtgatgggagaagagatggccagagaggaggagagtgtggaggctgtgctgccagagagggaacaacgggaacaccaaaataacttagtgagtatgcctgctttcccacaagtgagcttactttcccactgcatttaaccatgcccacatagaga

SEQ ID NO: 100850 - DNA, 1078 bp, Homo sapiens
actggggatttcacctcaaaaggatctttttcatgttaattgtgccaccactgtttgcagaagtcaggaccgggtttgaaggttcatttacagactgacttccctgctctctttctagcagtaggatcccatcccatcaaagaaccagctggtgccttcaaaccctggacgaacacagaccggcacaggctcattcatttcatccctgtcagagccccaactcctctctttacccacacatgagcctattatatttgaacggatgaggagccacagaggtgatccattagttcagctgagcttgaaattagtagctcatccccttaaatggtgtgggcagtttggctgagcttggactgcaaagctgttcccccttggattgcacccagcatggaaatgaggacacacctaatattttttccttttgacacttgattaatagttgacaaatccaaacccaagtagttagctttcctattatccatcttttgacaggcattgctggttttctttttgagtcccattgttctaaaaatacactcagatctggagctgttcactgtgcatatataggcctgatttcatggtgtcaaagataagagacatctggcaggcagattacaaacaaagtgggttgctgggtttcagaactgaaggcagggacctctgggctacttaaatctacttaaattcagtgctgccaattctgtcccttcttccttggtgttgtcatgtcactgataacctgccagggtcaaccatcttaccacccggtaggaaagccaagcgtggggtgtgtgtgcacagtgcatgccgtgccaggttgggagcagaatgttctcgatgacagatcgagcctggtcgcagcaccgcctgcacaaagtgggttttggtcatcagaggctgtggtcgaccacagggtagtcatttcctcattctgcaggctctgtcatccctctcgaacacctcagaggcgtggaagtaaatgttgtctcagtactgagtaaataaagtagccagggagatgatctctatttgtcttattgtatagatgtattttaaaagatttttattgggt

SEQ ID NO: 100851 - DNA, 1452 bp, Homo sapiens
ctcaagggatgttaggaagattcaagaaatgatctatgtgaactgctttaagctcttctcttttttttttttttaacaaaaatgggagggaaatcaagatattaatcatattattcatccaacccaagattcctttgaattattccccatgtaatctgtatttatgggtagaagcagccatgccttgggagcagagacctccaaattcataactgtcagaatcacaaaccatgggcaaggaattaacagcagtaattctattttttttttcccccaagcagagacctagatgaaatcgaattaccaagcattctttagctctcttgctgccttggcaatgttcactcaccaggttggaggctgtttctgcaggttttacgtaccctgggaagcaagtgtggtgactttcttcgcagccggttctgcaaagatgtcctgccaaagctggctggctccctagtcacccaggcccccatcagtgccagggctggaccagtttactcgcacacgctggccttcaagttgcagctggctgtcttacagggcctgggccccctctgtgagagactggacctaggtgggtaccaggcagttccacctgaacacacacacttagcatctgtctcacccctgccatcatgccctctgctcagtcgtgcccccctcccctcccctctgtgtacctccttccgtcttattttggcctcatttgtccatttatcttgatgtgttctttggcgggatggagtagagagcccagagcatcttgcctagctgttgcagtttctccagacacagttggtcactgcttgtcccaaatgaagtgtaagggctgatgcttgttttgtttttcttttctgcaggtgagggtgacctgaataaagtggctgatgcctgcttgatttacctcagtgtcaaacagcccgtgaaattacaagaggctgccaggaggtacgtctgcctgatcacccgcatccctttacgtttgttctaaattacagatgatttgctaatggcaagcagagttgaggcatctctgctcttttctctgtcaccctgccaggttaagataattctttaactgtgccagcactagagatggtatttttactagatgtgtttctctttgccagtaaccttttcctctgctgcaaagtcagcaacaattccagagggtcaagaagcagaaagacggtgtgctagagaggactcagcaccctcctggttggaggggaatctgcttctaggcctggagaccaggtgcctggcacttcttcatgccttggcttcttcaacagcaaagtgaaagtgctgggttcctgatatggcatatgtcgactccacggcaggtcttagatgggcatcggtgccatgaaccctcacaagtgcaaagcaaaattgtttgtgtgcaggcaggtgcacatgtgcctttttctaataggaaccattcat

SEQ ID NO: 100852 - DNA, 1036 bp, Homo sapiens
tgttttcaagcctataccatctgctgaaatcgtgtctctttcaggtcttggatgtgctggatctgtgtgtggttgttcttcagtcccacaaaaaccagctgcttcccttggctcatcaggcctggccctcgctcgttcaccgactcacacgggacgcccccctggcagtgcttagagccttcaaggtactgcaccagcatcccccatggtctgttgtgagggtagagttagtaggcacagagctcaccggggccttttggattggttctcttcacccgattgcaatgtcacatactgtgaagaaagtatagaaacataagaaaagcacaaagaagaaagtaacagtctccttttgaacttgaagcagatgaactagtagatgaaaaggccaggcagtaagctcagcactcctccacaaaggagtttgtctccttacaaccactttgcaaggtaggtatattgtctttacttttggcagaggaagaaagaagctcagagaagttaaggaattttctcacaatcgaacagctagtaagtgatacaaacccagagcattgagttcacaccatatttgcactgcacaggagtcaaggcgaaggggctgaggttctagcagtgggcatcctctgcccagctgagtgatgctgacaaaacccaggaccacccattttcgtgttgggcttaggaacacctagcccacctttctcatagtgttgtcagggataaaatgggactgtttggtgaaatgctttgaaaagctaacagtcctatatatatgtaaggtattattctccctggcttagtttggcttacattagcacggatattttagcttatttatatcctttcttgttctaaaaagcccttaaggcaacctgcagagatacataccacagcgagctgccataaattagaagaaggtgcgcaagatgaggcagagagaaaagatctgtagggacacaaaatgaagctggtaatgcaccagataccgttggccaaagtagtttgatcttctgtaaattcttcagcatatact

SEQ ID NO: 100853 - DNA, 2124 bp, Homo sapiens
caccactgcactccagcctgggtgacagaggaagactgtctcaaaaaaaaaaataaataaataaaaattcaggtgggaaggcccagaaggaagaaggggcatgggtctttggagaatggaaaagaggcctttgtagagagtgttgcaagatgaagttggaaagaagggcaaggacaaatcctggtagggccttgaggagcaagagaaggagtttggattttattttgcagctacttggaagcctgtgtagtgggctagtcactggggagtcagccatgaataagacccacttaggcctgccctcgtggagcccctcataggactgactggttgcttatgcagactaagactggcttccatgggccaaatatatcccacctgtactgctttagcgacctatgctatgtttcaatttgaaatttttaaaatgtaggttaagaaaagccctgtgaaatatatctctcaagaggtatctgaatttgggccttcaaaattgaattgtcttagattgctgatgtcttcggtcatctctgaaggaggagtgtcaagactcctgtgtagctttgtagtgcttttaaaaaaaaaaaaatgaggtggagggagagggtctcccttgcagaaaggaaaattgaatggttaagactgactctggggcttccttggaacagaagcaaacttagagctagcttttatgaaagttttgaaataacccagaatacactcactttttgaacaggaagtagtactcaggtggagttggtatagtcactcataaatcagagtagtaccttttgctgtcatttctgtttgtcatagaattatctaactgacgtccactcttttaagatgggtgtggaaatgtgttctcagagaacttctgaaaggccttagaagaacccagtaagagctttaggaaattgagttatcattaacatagtgtgtcacatgcagtgactaaaaaagcattaggtgccacggtaagggcaagaagcatcagttaattactgcttaatcccaactgctggttagctgattattcataacaagaaaaaaatagggtagctttgaaaataagtatttatgtcacatacttcacaacttggagaatgtgctgctgcattctttttatggctgcatagtattccatcacgcgtctgcaccatagtgtatttaaccagtcctttcttggtagacattttggtcatttccagtctttggccaccacaaaaaatgctgcattgaatatctttgtaggtcattttggacatgtctcagtatattaataggatgaatttctgaaaaaaatgctggtttaaagggtattacgtttaaatttttgagagagtatcaaattgctctctaagaggttgtaccaatttaaactccatcagcaatgtacgagagtgccagttttgccacgccatcacccacactgtgtattaccaagcttttgatctttgctaatccaataggagaaaaatagcaccttattatagttttaatttgcattaaacgtgagattgagcttcttttcatatgtttaaaagccatttgtgagcaaagacattttaatgtctgtcaccagccttgaatctagaaataatctttgcagcatatctagtcttagcagtgtaaatgctgggtccaggttttaactatttgggaaccagtgccttagagtgcactaagtagctgatagacaactggggatgcagtttgaagaatgtcataatggatccctgggtgtaggaacctccggctcacacctcacacatttgctctctgatactgccagttgcctggccctgtcatctcccatctgctgctgctcttgctctgtgcagatgctctttgatgaaaaggagattagcaggtgctaaaggttatcagagtttttttcccagctgtctgcaaaaggagggcactggaccagagcagtgattttcaggctgtgggatttgttgttgttgttgttttattctttaagtattaagagccttttttgaaatgaagcctttggggaaccctgatatacaaaaataattgaaattagagctgagttgtttgaaggaatagagaccctggaacccatgcctgtagcccaccgtctcttggtgccctccc

SEQ ID NO: 100854 - DNA, 1054 bp, Homo sapiens
tcccagcactttgggaggccaaggcaggcggatcaagaggtcaggagatcgagaccatccttgctaacatggtgaaaccccgtctctactaaaaaataaaaaaaaaaaaattagccagacgtggtggcgggcgcctgtagtcccagctacttgggaagctgaggcaggagaatggcctgaacctgggaagcggagcttgcagtgagccaagatcgcgccactgcactccagcctgggtgacagagtgagactctgtctcaaaaaaaaaaaaaaaaaaaaaggaatggcaaaattttggacttcaattataaggaaaggaatccttcaactggatagtcaatctttcaatgagaaaataataagctgtatagcttgggtcccttttatttaaagagcatatttccagtatttatctcagtactgctaatagcctctgagaaggtggaatggtcactggcctcattttgtcagttgaaaaagccaagaccttgtaagaaacattctcatggaaggtaactggggcagggacagtgcactgccctgtagctaatgccatttccagtgtttgtttattcatgcatgagcattcacgttcagcataaatgttcctttttcattcattcattcaagagtgcctgccatatgtcagacactgtgctaagtaatgaagatagagcagagaaaaagacgaataaactcatggaacttccctgccactgcaagagagatgataaacaagtaaacaaatcattagacaagctcacggcagattctgataaacaccgtgaaggaaataaacacctcagtgtaacagacacaggctcctataagttcagtggtcagggagggcctctctgaggaagcaacactaaagccaaaacctgaaggatgagaaaggcccatcaacacatagggggctatcacatttatttttaagaacattcaggccgggtgccgtggctcacacctgtaatctcaacactttgggaggctgaggtgggcggattgcttgagcccaggagttcaagaccagcctgggcaacctagtatggcc

SEQ ID NO: 100855 - DNA, 1070 bp, Homo sapiens
tgcaataaagttctgagacattttgcagatcaaaaagtagtggtgggcaacaaagccctcgctgacatcttgtcagaaagcctgcattcccttgccacatctcttcctcgcctaatgaactcccaagatgaccagggcaaattctctactctttccttgttacttggttatctgaaactcttgggcccaaaaataaactttgtcctcaactctgtggcccatctccagcggctttccaaagcactcatccaagttctagagctagacgtggctgacatcaagattgttgaggaacggcgttggaactctgatgatctgaatgcttctccaaagacctcagccacacagccttggaaccgcatccagaggagatatttccgcttcttcactgatgagagaatcttcatgctcttgaggcaggtttgtcagctacttggttattatgggaatctttatttgcttgtggatcactttatggaactttaccatcaatctgtggtttaccggaagcaagctgccatgatccttaatgaactggttacaggggctgctgggctggaggttgaggatcttcacgaaaaacatattaaaacaaacccagaagaactgagagagattgtgacatctatacttgaagaatacacaagtcaagaaaattggtatttggttacctgtcttgaaactgaggaaatgggagaggagctgatgatggagcacccaggcctccaagccatcacgtctggtgaacacacctgccaagttacatcttttctagccttctcaaagccaagtcccactatttgctccatgaacagtaacatctggcaaatatgcattcagttggaaggaattggccagtttgcatatgcactaggaaaagacttctgtttgctcttgatgtcagccctttatccagtactggagaaggctggagaccaaaccctactcattagtcaggtggctaccagcaccatgatggacgtttgccgtgcttgtggctacgactccctgcagcacctgatcaatcaaaattcagactatttagtgaatgggatctctttaaatctgcg

SEQ ID NO: 100856 - DNA, 1045 bp, Homo sapiens
tttgaacttgacatttttactgaacagtttccttcctccagcctgcaggatgtttcctcaatgaggggaaggctgctgcacaatggcagtttttgatactcctgaggaggcctttggtgtcttacgtccagtctgtgttcagctcacaaagacccagacagtggagaatgtggagcatctgcagacacgactacaagctgtgagtgacagtgcccttcaggaacttcagcagtacatcctcttccctctgcgatttaccctgaagaccccaggtcccaaaagagagcgtttgatccaaagtgtggtggaatgcctcacatttgtcctttcttcaacatgtgtgaaagaacaggagcttctccaggaactcttttcagaactctctgcttgtctgtattcacccagctcccaaaaacctgcggctgtgtccgaggagttgaaattggctgtgatccagggacttagcacattaatgcactcagcttatggggacatcattctgactttttatgagccctccattctgccacgtttaggatttgctgtatctttactgttaggccttgcagaacaggagaaatcaaagcaaattaaaattgctgccttaaaatgtttacaggttctactcttgcagtgtgattgtcaggaccatccaaggtcattggatgaacttgaacaaaagcagctgggggatttgtttgcctcttttttacctggaatctcaactgcactgaccaggcttatcacaggagactttaaacaaggtcacagcattgtcgtatcttccctaaagatcttttacaagacagtgagcttcattatggctgatgaacagctcaaaagaatctcaaaggtccaagcaaaacctgcagttgagcacagagtagcagagctgatggtttacagggaagcagattgggtaaaaaagactggcgacaagttgactatccttattaaaaagataattgagtgtgtttctgttcacccacactggaaggtgagactggaactggtagaacttgtggaggaccttcttttgaagtgc

SEQ ID NO: 100857 - DNA, 1767 bp, Homo sapiens
caggccgctccctgccgggcctcactgccgccaccatgtcctccttctctgagtcggcgctggagaagaagctctcggagctgagcaactctcagcagagcgtgcagaccctgtccctttggctcatccaccaccgcaagcacgcgggacccatcgtctccgtgtggcaccgcgagctccgcaaaggtaaacaccaaatccccaccccctggacggtccccggattgtcctctcgcccacatacaacctaggcccctctaagcctcttcattgagccttgctttccaggcctgatcgagcttctgagatgggagacaaagttagccccatttctcgaagaaggaaactgaggcccgggaaggtttaaggtacttgcctgagggtccacggactgggactcaggtgtccagacttctagttcatcaagccattttcccttcagtttccccctgacatttgtggctgttattatctcggctgcattcactgccgtactggccctagcatgtcgggcccagtgctgggtatttggagtaaaagccagtgggctccggagtcagactctgcagatcgagtcctggctcagctatttgccagctgaataatactgggagagtttcttcatctccctgtgtctccgttttctcatctgtaagagggaggcaaggatagctaccccttacaaagcctttacttcataccagtcactatactaagacctttgtgtgtatcctcgcactcagtccttagaacagccctgtgaagtaggtagtctctcccatcttaggttaaggggccacccagaccttacctctcctctcctctcctctctcatgcagttgtcattgatttcaggccctgctcaggttctgacagacaattcattgaactcattctgttatgtgccaggcactggcttggacacttgcagcatgttgcctctgccaactgcctagaatttaagcctgactttgccgccttactgaccccagcaacttaacctgtctgtgccttaattttcttatctacagaatggataactgaaatttactatgtctttattacatgcgaagtgcagtactgatatctttacatacattgccattaaaaaaaattctcggagccctatgaagtaggaactttgcagaagaggaaaaactgagactcatctcgtggtgaggagtaaacgggataatccaaatgaacatttagcatggggtgaggcacagtgtaggcattcagcagattatggtgagatgagacttttgattactcactgtgaggcatggtctttaccttcaagttgcttacagtctggtggggaaagatggacacctacactcccggatgagtttcataatggaagactgaagaaatgaagctcagagctgctccagacaccctatatgtggtaggcctttatagcgaagtggctttacaagtgttctatactatctgtgagttggggacaccacagatgtcctgctctacaggtgaggaaactgaagtggctaagtggtattttcaaggctttcgaactgaacaggctcagactacaacaggctggcaaacaccaaaatcttcatgatttttttcaggagacccagttctagccctttagcagggactgcccccaaatatcgcgtactgtactgagatagggatcccctcagcccttcgggcagttccgggaagaggtagagcctggagtttatggggccttcttcatgtaccccactgtgccattcagaaattatttgaagagtg

SEQ ID NO: 100858 - DNA, 1208 bp, Homo sapiens
attcaggtgttccaatagccacacgtggctagtggctaacttactggacagtgcagagttaaaaaaagatgctcttccaagcatcaatacctagcttccgaatatccaggcttatttcatgaactgaaaatgcccccacactgaaagaaaaggattctgtgccctaatgttcagattgattagccctgtaggttctacctagggtgaagtcattttccgtagctgagatgctcacagactgtctctgagttgccttcaaaatatatgagatttataaaaattaactttttttcttgcttaaatacttctattcctgatgtgttgtctttccattttctaggaataatttttaatttatcccatttgagctctgttctaagtagaacgtctccccttctttatggactagttttggtgtaaagtgctcctaaatgaatgtttttaatggtgttttgtatcttggcctgaatgtaggtaatgggcttttattgcagaattactttaagactttctgtagatgtcaaaaccagccaaacaagtgaaaagttttgattaaccagttgtttaaattttactcaacaactagtttgaccagtttggaatggacatgggtagtgagtgaaaggacctatttctgtcgtataggaaggacatctgaacaagtgagttgtcccccaggattgggatggaggggtgtgcatgttgtgtgtattgtgactgtgtgtgctcaagagctctagggttttgtcatatcaccttgacacacatggtgcttatgttgactgttgaggatgttgaatatggagggatacagtttatcctaaataaatccccattgttaagttctggggtgatgaaaattaattggcattgtaaacagtgaaaaccttgggtctcaagccccttagataccttgtttgtctactgagaagtatatatcaggtcttgaatgtccacactgacattttacaatatggattctaggttttttttttttcaacataaagtgtatggaattttaaagcttcacttaatgaaatttgctttgttgaagttctgttttgctttcgaatctgctaacttgcatgggattataggtgtagtagtttcacttacatcaactttgcagagcaaggtttgctttaacaaaaaagcacgttttgccataatcatacctttgtagcaacagtagatattgtaactactga

SEQ ID NO: 100859 - DNA, 2248 bp, Homo sapiens
acatatctacttgaccccccaggtagataatacttgtcttaatgtttttttaggagcagcccagggcaaaagaattgtgaattgagaatttctttggtgtaagttaaattcttttcttttctttttttcagccaaatcaaatagaaagcttacttttctgtatttagcgaatgatgtcatccaaaacagtaaaaggaaaggacctgaattcactagagaatttgaatctgtccttgtggatgctttttctcatgttgccaggtatgttgtctgttttttggatttgtttttaaattcattgcctttcccacctttttgttctttccttttctgtgatagcctttgtaaattgacaacttcctactttacagagagttgtggaggccgaattgtggttttatgttttgttgagccctcaagaactatcgagacatgtaaacattctgatacatttgagagattcagcctagcattatctttcttctagatatattcattttcattttttgaatttatttcttggttatggtattttccttggtttggttgagttgtctcatcagcttatgatcaaaaaacaaagctaactagtaagggaaccttttagtaacataacttaatagcaagaaattaattgccaaatgccttcctttttatttccttctggatttctagatgtctagtttactaaaaatagtaggcattactgtaactgcaataatagtaattattagtgtagaaagtaggtgtttgctctggctatattgtattaagcctggtgctgttgtgttttgtggcagagaggagtggcactcatacaactaataccatagaaagcatacattggattaaaagttttataaattactttacttcatgtaaaaacaaaagctttctgtgggcttaaattaggtgcccaggaaaagcaaagaaaaactatcgttcattagaatattatgtttataagtaaatatataaacagatatttgcaaaaggaattgggaaacatgaatgggagactagtaggttaaacataaattgttactaggtctaaaatatagtgaaaggccttaaatgagaaatgaagtcctgctttcattgcaggatttgaaaagtttgaaggaataaaattagaaatccaagagaaagaaatgacacctagctttctagagatgaaaaagatggtttttgtggataagttacataactggctcaccttttgatcaacatgggcgcaagtagcaaaatgtgttattaacttgaaaaaaatactgaatcttcataacagagtaagcttagaacagactactagaggagctatctgaaatagacagattttcttgctttgatgagatttagttcacagttgcttagaaattgatggtagctctgcctcagacactatgtgagtgaccttggatgtgttacttaactttttgagcccaaatttcctaactggctaaagggggaggataccactccccctcataagagttgtgagggtaaagacagacaatatgtttaaaagtatgtagtacaatgcctgttccacatttgctcattcattggatcatttgttttttcctatattccaggcacctagtaaagtgtctggcacagagctgctgagttatgtagcttgaaggaataccatttatatagcctccatgtaagtggtgtcccaggagctgggcaacattatggtctgccctgacacagtaggcgttcagtaaatatttgttaaatgagttaattaatgttaactcattatggaagagatttggtctagggagttggctggaatgatttcttgtagggatagtaaacataacagtgttattaaaaaattccagcctgggcagcatagtgagaccctgtgtctacaaaaaattttttaaaaattagccaggcatggtggtgtgcacctgtagtcctagctacttgggaggctgaggcagggggattgcttgagcccaggagttcaaagctgtagtgagctataatcataccactgcactccaggtttagcaacagagcatgaccctgtctctaaattacaaacagacaaacgatctgtaatctttagctgtcctgaaaccaaaaagtaaatagaaaggggtggaaaagggggtgggcaacaccagggttaaaaattccttttttcttgggaacaccttaaaaactagccaggttttaggtgtcttggcagattcagtggcagtgtgaggaagataaacctggtccttct

SEQ ID NO: 100860 - DNA, 1062 bp, Homo sapiens
tcttttaagattctgcttgggtattacattcaggatacccatgtttccaatctcctttcttataccccattattgggacagaaagtccaacagttctgcttcaaccgtgatgcagctcgtccacagtaggagtagcctaattaacatatactttctgtgtgctttttctgtggtcagttgatgaacaaagatagttgacccattactgttgactaaattgatgagggatatttttatgataaaagacacctccacacccaaaacaaacaaacagtaaaaaaaactctcaagtcagagaaagctgccaagttcataggatagatttgatttgaatagcagtttaattaaccagactgcaaacttgcttttcatacaagtgccttgttttcttcccagtgaggagacagctgtccatgtcatttttcattcaacatgtattggagtgccttctatgtgccaagtatggatccagacacggggggagcagcagtgaacaaggcaggcaaagacaattaaatgagcaagatactttcagagcaggacaatatggacatagtaaaatggagtgatgttctagagtaggatctcacaggtagtgtggttcaggaaggcctctaaggaaatgacatttgcggtaatcatgcgaagcgggagcagctattaagaaaaacttaaggcagagatcatcttggccttctaagagaaacagaatgaaggctggtgtggttagaatatagtgcacaaagggaaaagtgatatccagatgaggtccgagaggtggacatgcagcagtcacatacaccctgtaagtcttggaagttaggatttttttctcatgggatgtcattgaagagttttaaccaggggaatgatatattccaatatattccaacatacatttttaaaacatccctctttaaaaatggcttagtgtagagggatggattgtaaaggccaagggaggggcggggacatgagtttggaggatattgctgtgatgcaggctagaggtgacattgcctaggactcagaagcaatgggaagatactaatagcttccatt

SEQ ID NO: 100861 - DNA, 1075 bp, Homo sapiens
attgagtgcttccttcgtgggaggatccccacctctccagtgtaaaactgataggatttataggcgttgagtgggagctggtagtaagtgaaaagagaaatcaaagacgatttctaggtttttgatgtaaggaatgactgatggtgccctttactgaagtgaagattggggaaaagatttggtggaggaaatcacgagttttgttttggccaggccgagtgtgaggtggctagtgaatattccaaggagtgatgccaaataggcaggtggataaaatagtctgaagctcagtagagacttgatttctggagacataaatttgagagttacccacatgatatttacttattgttgtgggccccaagaccactcccaggtttggtgattccctagaatgactcacagggctcatcatgtagtcatagtcatggcagtgattcattacagctaaaggatccaaagcagcagcagcagcagagggtgatgtgcatgcagtacccgcagcagactggagcgctctgggtataagcttccgagtcctctctcagtgttattccacaaacacgcttaattcctctagcactgagttgtgatgtgtatgatgtgtaacctaccaggaaagctcattaaagactctgtgcccagagtttttattggattggtcatgtagacaccctctgccaaaattctaagctcccagaaataaatcaggtgttcatttttttttttttttttttgagacggagtctcactctgtcgcccaggctggagtgcagtggcttggtcttggctcactgcaagctccgcctctcgggttcatgccattctcctgcctcagcctcccaagtagctgggactacaggcgcccgccatgatgcccggctaattttttgtattttttagtagagacggagtttcaccatgttagccaggatggtcttgatctcctgaccttgtgatctgcccgccttggcctctcaaagtgctgggattacaggcgtcagccaccgcgccaggctcaggtgttcattaagaaccgtattgcttgcacaaacaatttaggcccagtaaacca

SEQ ID NO: 100862 - DNA, 1035 bp, Homo sapiens
gattgtgtttatacatgtagaggtgttggtgtgttagaattgatgagttgcagtgaatttatttcctgttttaaacatctggttttttaaaatcatttttctatctttaagagttctgatccacttttaatttccagcagaatgtctggcattttaattaacgtcttcttaaaaagcaagctatcacaactgataagatggagttttgataattttctgtctgtaaaaattggccattgacttttggtcctatttgatttcaattatggcatgatccctcccactgcacgaagaatgtagtttgtggtcaagttttgggtatccaggtattacaatatgtaccttatttggttttaaatgtgtaaatcatttagtcagttgttgatttcttttttttttaagtaggtctgtcctaattaaaagcaaaaaatcttaagcttatatatatcttttcatcttttctgggcagagaggcagatgaaggctgtaaaaaacctttagaaagattgctgaacatctggcaagaacgaagtgtgtatggcggcgagttcatacagcagctgaagctgtctatggaggactccaagagccctccccccaaaggtagaaacatcaccacatgtttacagctcttggtctttgcctactttcgaatcaaatatgaaaagctgcagtggggtttgctgtgaaccaccagcgattttatgattcttcagagagacagatgatcatgaatgatggtgagaatttatgtagtgctcacagcgtgtaagcctggttctagtattcatgctattcatcctctcacaccctgacttttgctctctgttctccttggcttgcttctgtctttcagagactttccttgcacaaggaaaggaacaacaaagttgttcagagttgtggtgaactaggaagtagcctggactaagattttgtccttgctctgccattaactacaataggaccttggataagtttcttagctttttaagaacttgatttaattaaatgtagatgtgcttttgaaacata

SEQ ID NO: 100863 - DNA, 1068 bp, Homo sapiens
ctgacatcttccctggcttgtctgggcccatgtggtcattccctccttgttctctggtactttatacatgcatctgctatagaacctagtcatgattagcatgtgtgacagtatccttcactgagtaacccttttgtgtacccttcatgatcctttccaggtctggaattatttgcattttgcagtgggtaactttcctgtgaaaccaaaggttagaggctttctgtgaatgacataagtgctttcagactgcaggtcattgttgttttacttggtgttgctagaagataattttaggatcactcaggtgattggtagcttctgaaaagcaagatgtttcctgctttggattctggtgtttttattgtgtcctttggaggtcttcagtacagctttggggaattactcagcattctttactctgccttagagttcattggtaaacagtgctggtttttaagaacacctttgggcaagtaggagagccttgaaagaggatgtttgaagctaatgttgaatttcaatttaatgtacatttgctggacacatactttgaataaacagatatgctagatgctataggaaagagggagaaaagagtgaggaataggtttgcactctgggaatgtgtggaatttgtggcagtgatagtattgggaatagcttcagtgggtttctgatttttttttgaaagtctagacagacattaacaataatagaggcagtttcctctaggtagaggataatgctaatctaaagataatttctctttctctattctataaagatgaaaacacacatcaaaagatttcaacatgtgtgttagtcccagctgactcactctgtcttcactctctggacctgagttatcagaatattttaccacagtcctttcaaatgttgatgagttctcgagaagtttatttccaaatttgagtagtccttttatattccagctttgattcatgggtaattctttgtcttcaggcaacttcatggagtttacctctgaaataaaaatttttctatggaactttgacagttcttacaacattagagaatgcatga

SEQ ID NO: 100864 - DNA, 1591 bp, Homo sapiens
cgagccaccacacctggccacaacacacagttgttaacatctgatatttatacctttattctatactggaaatgatacatcatttgaaattaagcaacatgaaccaaactccattgttttgaattgccaaaaacatgttcttttagaattaaaaaataataataattattcagaatttcattcatgttctgccatggacttagataaactaattttgtggattttcttagagtccgtgacattgacttacatgtaagctctggggctaagaacagttttttttaagaaatggcaggaatgactgtttttagaatttgcctccacctcatttaactccaactaattttctttaaaccccatgtcttaatgggtagtgttgtttgtgttttcatcttacagactgaggaactaatcaaagctttgcaggatctggaaaatgccgcatcaggggatgctactgtccgacagaaaattgcttctctgccccaggaagtgcaagatgtttctctattggaaaaaataacaggtgagaaggtagagtttgggtgaaaggtgaggagagagggacataactgtaatgcagtaaccctaggccatacttaacgtctgcaggtatagactactttccatgttgtattggttgctctaccatcttgggatttgcaaacataactcacatggtgaacaaagaaacttttgaaatagtcaaagcttgaatagtgattctaggaattattgcagaaatgctggtgtgccacaacctgtggctctctaaataaggtctgttaaaaacatagtacaaattgtgtgcgtgtggggtgggtgggggagattaggtattattctgtctgttagactcataaccctcttactaaaagaaaaaaaattatgattcagggctgtgtgatttgtgccctgctctctgacaagccccgtagatgatagtgcgttcagtgccaggaatttcaggtgtctgttagacatgtcattttgccctagtcgtgacctccctagttaaacagggaggggcagttgacacgattcctgctttccttatgggaaattgaaaggaaggaatgaagcatgaactaatattgacagtaggctttgcaccggtacttctgttctttgtgatagtctttggaggtgactaaatgtgtgtctccatattgcataggaggacattgaggctttgagaagataggtgtcttgtccaaggtcacacaagtagtggatcttgggattctaatctaggctgcaaagcctatgttcctccccttacaaaagctcagacctttcattccattgtcttccaaaggccaccattttcccactccagtcccttgacttggctgcttctctaacttcttccatatctatctaaaggaaatcaaggtcactgatgaaatatttccctcaacaaatatttgaggcccacctatatcccctcaagtgaagtgtcaagaaggaaaataaagcagggcagtgggagcggaaaatgattgcaggcggtattaatggtattttaaaggtgtttggggaaagcctttctgatgagatgaccttgagcagagacccgaaaaattaggaa

SEQ ID NO: 100865 - DNA, 1129 bp, Homo sapiens
ttgcttaatcaactcattgtttgtccacaggtgctggcttattctcagactctgtatattgggagagaaaccgttaacctcccccagaaatgtttgtagtcatacctgtgtgatttgtatattttctctattttttggtctcatttgtacttagacaaagaggcagctgaacgtctttcaaaaacagtagatgaagcatgtctgttactagcagaatataacgggcgcctggcagcagaactggaggaccgtcgccagctggctcggatgttggtggagtatacccagaatcagaaagatgttttgtcggagaaggagaaaaaactagaggtgagtgcattgaaggcagacccagactgcccacgtttcccttcctgtagcccacattaggaggtttttattatgctttaattaacaacatttttatcgtttaaaaattcatgatgtgaattctgaacatccatcagatactgtaattatttgagcccagttaaaaattgaagtcatgttcttatatgtccaggacagaacaaactggattgtaggaaacaaacagtgaactcttaatcacagccttaggatcttaatattgctttcgtttgaactcatgtttttaaaaaaattacgaattgaggtacaaaaaggatagcaaatcagtgaaaaccaaagaatatgtttggtagtatttgggaagtgctgaaaaatgtttctttcaagtcatttggaggtttatttctttttttttttgagacgcagtctcgctccgtcgcccaggctggagtgcagcggtgcgatctcggctcactgcaagctctgcctcccaggttcacgccattctcctgcctcagcctcccaagtagctggaactacaggcgtccaccaccacgcctggctaattttttgtatttttagtagggacggggtttcaccatgttagccaggatagtcttgatctcctgacctcatgatctgcccacctcagcctcccaaagtgctgggattacaggtgtgagccaccgcgcccagccgtttggaggtttatttctgactttatccatgctgcggccaagaagttgtctgcctccaagatctatctgtaattagctcttaaatgtcacagtagtattta

SEQ ID NO: 100866 - DNA, 1831 bp, Homo sapiens
gacatagcgtgagtgggttggatagggttcctgtcttgtcagcgtgaataaagcatgatacagacatgttctgttagcatgatcagtgcatgtggaagagtgtgtgtgtgagaaagaaacctatttgtacaagtattaaggaaagaaaaaaggtcaggaacctgcagttttcccttcttaactgtgatttttttttttttttttttgagacagactcttgctctgttgcccagggctagagtgcagtagagcaatctgagctcactgcctcccgggttcaagcgattctcgtgcctcagcctcccgagtagctgggactacaggcgcatgccaccacacccagctaatttttgtatttttagtagagatggggttttgccatgttgggcaggctggtctcgaactcctgatctcaggtgatccacctgccttggcctcccaaagtgttggaattacaggcatgcgcctccatgcctggccttaactgtgaattttattcagatcatggtgtctgactgtcagcgatctagaactgaaagcagatagtcctgtgttgacccacatgccacatggtgcacacacacaaagatgatatgccacacagggaagagctcttgagaaatttgttccaagctgcagatttattgttttagttgaggtgaaattcatataacgtaaattaaccatgcacttcaaagtgcacacattttggtggcatttagtacgttcacagtattgtatcaagttccaaaacataattgtgtctggcttctttcggcacgatgttttcaagattcatcccatgttgtagcatatatcagtacttcatctcttttatggtagaacactaatctgttgtatggatgtgacacagtttataacctgtctatggacatttgagttgttgccaccttttggctcttatgaatagtgttgctataaacagtcatgtggaggtttttgtgtggccatatcttttcatttctcttggttatgtataaatctaggagtggaattgctgggtcatatggtaattctatgtaacattttgaggaaccatcagactgttttccacagcagctacatcattttacatccccactagcaatgtgcgtgggttccagtttctccacatcctcatcaacatttgttattgtctctttattttcgacaacctacatgtgcaggtttatctcattgtgattttgatttgcattttgctaattactaacgatactgatcatctttcagtatgcttgtcggctgtttatctttggagaaatgtgtgttcaattcctttgcccattttcaaattgggttatttgctttttttgagttgtaaaagttctttatatattgtggataatatacctttatcacataaatgatttgcaactattttctcctataagttgtcttttcactttctaggtaatatcctttgatgtgcaaaagttttttatttttatgagttccaatttatctatttttgtggttgttgctcatgcttttggtgtcacatgtaataatctgttgccaatcccaggtcatgacaatttttttctgtgttttcttctagaagttttataattttatgtcttaaatttacgttcttaatctgttttgagttagtttttgtatgtggtgtgatgtagggggggaccaacttcattcttttgcctgtagatatccatttgtcccagcaccatttgttgaagagactactcttttcctccacctgaatgcccagcacccttgtcaaaaatcaattggccacagatgtattggtttatttctggattctcaattctattccattaatgtatatgtc

SEQ ID NO: 100867 - DNA, 1587 bp, Homo sapiens
attgaatagctcgtctcgggcaggggaagcggggagttggggatattaattgggggttttaattctattatcatgtcagctgacattatgactatataatgtagttagagacaatttttatcttgcttatagtaaaggttcagcctgccaattgtaaatcattctaatttggcaggcttatttttgacattggaaagggcagaaagcgatttgccccagtagtgtaataggagttatagaccagaggctgaaacccaaactatataaaaaggaattcagtggagggggctttgtaatctccattaatttgtgttgctacttccaggatcaccaaaaattacatgtaattttacatgttaaacacattgaaacataacctatgtttataaagcataacgggcttcccttccagaagctctcctgcttgtcatgaagtgagaacaatgaaaagtcatagcagatactcagtttaactctgtgtagaacctagtagtgtttgagctgttattcagatttgaattcagactgtgtgttgtttgcttatggacactgcctgtcgttctgtcactgttaaattaatgagtctataaggtttttcttccagaggccataggtgacatcactaaaattgcaagataaattgtaatctttgctgctgctgcactccccaacctctcccccaccccccgtggtgtgctgctttctagatgagcgtgttttggagcaggcccatctgggacactctatgctttcaccaaggaagtgcgatctgagcagccacaatccagccaaaagaggatcgtagatatttgctctgatcaactagatgaaaatatagcagaatggatttagcccactgctctgttttatccaactgagtctctgaccagcaattggtgcataattattacagcaaaagttaagaaatgaaactgtagcaattatgtaaatgaatgtgttggcctcttaatacctgttactagtggacttcctgtgaggaagttagttttttgttttgatgaaatgctttcgttttttaaatcttaattctgctgtccacatcctcccaaagtgtgcttacttcatttgtttaatttaaatgaactttcctccttgtatgtatgaggtgacttggtgggtggggtgggtggtttttgtttttgtgttttttctttcttagggcatctgtaggcctcaaaggacctttcctttaggtcatattcctcagaaagtcttcaatcttcccttgtttttgtttgtttgtttttcttaaagaatattttcaaagcttaaatttgtatattaatttaggactatttagaagtataggctgtcgttggcggcagcagtatattctgaaatgtctcatagatatatatttttgaataaagatggtgttgttgaacaacattgtgtgattttttttttaaactaccctgttactgaaaacagtgcctttctttgtaagcagtgggtgattagtaatcaccaatagagaatgtgctgtcggcacagaatcttgtcccttgggagtttttgtgtctgttagcggcacataaatactcagcatttacgtagtattttctg

SEQ ID NO: 100868 - DNA, 1073 bp, Homo sapiens
ctagcatgttgtcagttggcggtcaacaaatgctccaggaacacagggctttaccagagaaaggctccaggttgaggttgagcaggtacttggtgccacactcgggccccaagatcccattgtagctgacggtgcgggcacagagcaggaggcggcagacgtactcctcagcggtgttgttggtgatgtgggcaaagacgtcaaagtcactgcccatgttcatgctctggcccacacggatccgcatggccatccctgtctcctccttctcggccagtttgttcaggtggttcgcccttgtgaaggcctccctctcctctgaggaccctgtaggggttgagaagagagcctcaatcacagctggaatagatcacaggaagggggctgcaacagggcgagctgtcttcgcagaggcctgatgactcagggcagccatgaaggagccccttctctacatttctgggccagaaggacacagcatttcattaattttccactagtgaactcctatacatccctcaagactcaaccccaaatgacccctcctccaggaagccctctctgaccactccttcccctgtgttgttttctgtttcaaacttaccttcttgagctgctcgagggctaaggctgtgttttacttatccagtgcctacaacagtgcttggtgcatactaggcacgaatacagtgcaatctttcttaccttcaagcaattacacagggattacttctacctaaaatcctttccctccctgtctctgattgctcccttccttatattccatttgcctctctcctgtgctcctttgatttttttctcccagtgttgttgggtgcatatctatttattctatgaaactatcagctctagacctttcaggggatggggagagcatcatttcattctgtgttatccctttcagctagagtatggccaggcaaccctggaaagtcagtgagggtcaggccaaggcaggaactatggtttcttagtcccctctgtatgctttgctatgcttagtatttgcttagaaattagataccatattgaattggctgttcgatgtgctc

SEQ ID NO: 100869 - DNA, 1045 bp, Homo sapiens
tcacagggcatgcaactgtttaaacatttgccaattgccttccagaaaatttcaccaccagcaaggtttgagaaacactgttttcccattgggggaaacatttattttttaaataaacgagccaatatattttaaaaaagagagtttggttggtgccagatgtagcttcactctcaaccctgccgtctgctgggggtgagatctcaagggagctatgtggcttttttgaacctcagtttcctcatctgctaaaccaggccttcctagccgagctcttaagagactggctgagatgaggcaagatgaacagtgatgaatatggggtctttctgtggggagggtggacagggatgatcataggagtcaggcttcctcatccactgatctaggcagtgaaaactggcttctaagtatgaccttatgacttcagtgatgtcgcaagcaggttccagtccctgtgcctccccttcccgctcccaggaacccatccagcctcaggaactgcccccagccatcgagccttggctacttaagggacctgggcccaatccacagctgggacagtcctggcccactgcactgggaatctaggatgggggccttggccagagccctgccgtccatactgctggcattgctgcttacgtccaccccagaggctctgggtgccaaccccggcttggtcgccaggatcaccgacaagggactgcagtatggtaagaagccacatctgctggctggacttggcaaacccacgctccaggctgctctgggtacagtggggacagggagtggggacacagaccggaccctctccctggggcagtgccaccttctgggtcaggtggctctggctcctattctggccttactgcccaccagctgagtgccctgggcatgttatttgtggtagtgaggtcctccaccagccaacagaacacagctttgcgtgcaagtagttgatttgggaaatgattccaggaaacactgtagggaatcggtactgagatgaggaagggagggcagccaggagagagtgtgcaat

SEQ ID NO: 100870 - DNA, 1052 bp, Homo sapiens
gctgccaccatcttccctgaatctgtttcccccctacctggatgtattgagagagaggagggttagcaggaactgcaaacccaaagggatatgtctacggaccttctcaggatgccaccgggggtcattagattcatgggttctgatgcagactgcaaaaccgtgagcaattgcatcccttcctcaaggttctatttccccctttgtggaaagggagcaagaacactgctgaccccttcagtgtggcccatatggcatgaagaaagtaacgtgcttagcatggtcataagatcgatgcctggggcacagcaggtgcttacctggagcagatcctgctggtctagtccccactgtggagaggggaggcgcaaggtccctggtgaggctgggtccaggcccagggctgacacctccttccatgtctctcccttcagcctgaacatccacagctgtgagctgcttcactctgcgctgaggcctgtccctggccagggcctgagtctcagcatctccgactcctccatccgggtccagggcaggtggaaggtgcgcaagtcattcttgtaagttggctctgctcccaggccctggagctcttggccttggccttcgccccatccttcttaggtccaaggtgttcctagcttatcagaaaggccacgtgatggacagatggagtccaagcccggaggtggcctggggattgagtcctggctcttggatgagtgtctttctgtctctgagtctctacttcctcatctcccaaaggggacgggcctgcttccttgatggagtcatgggagggctaagtgcggtaatatcatgtctccttggtttgcttcccacagaagcagactttagggcaagaattccagtgcaatactttatcttggaagcgatctgaggaaacccacaggggagtggggaagtgaggaagggaagggaagggaaggaagtcagcctggtgggcaagtgaagctctgtctagctggggaactcagggacagtggagaacacgcctctgagttactccagccccacgctgtcacccc

SEQ ID NO: 100871 - DNA, 1129 bp, Homo sapiens
taattccagctactcaggaggctgaggcaggagaatcacttgaacctgggaggcggaggttgtggtgagctgaaactgcactactgcactccagcctgggtaatacagtaagactctgtcaaaaaaaaaaaaaagagtgggatagtccctgagaaagggataggtatagggctgtggaaccacagagcacggagagtgttctcccaggtagagggcttgggaagcggacatggaggaagagatagtctattccagaagaggaagtaggagagggactggtggagacagtgagcagcacatgccaggagcagcaggagggtgggcagaggcatagcaaaggcccaggcacatttgaaggtgattgtagagttcgatctgcagccatgggagtggcccccagtcctctgaacagcgcgacccctgtcatccagtgttgtggatcctatgtgctgctacttggactttttaaattactctggattcagagagcacagccacacagtttcatcacttactggctgtgtgaccctgggcaagtcacttcacctctctgagctgaaggtttcctcatctgaaaactgggggtaatgatagcatctccttcttaggattgctgtgaggattcaatgagataaacctcaaattagcacatgcctggcacctccaagggctccatagaaaggtggggtattactgtcttaccgtgtaattgaatggtggcattataacgctatttttcaggaggcttgtgaaaaaaataacttctcattaaaaaaataattttagactttaaaaaagttgcaaaagtagcacaaagaattcctgaatacctttcaccaagattacaaatatacacataaagaaaaaaacagggccgggcgcagtggctcacgcatgtaattccaacactttgggaggccaaagcgggtggatcacgaggtcaggagatcaagaccatcctgcctaacacggtgaaaccccgcctctactaaaaatacaaagaaaaaaaaaaaagttagccaggcatggtggcacgcgcctgtagtcccagctacttgggaggctgaggcaggagaattgcttgaacctgggaggcggaggttgcagtgagccgagatcatgccactgc

SEQ ID NO: 100872 - DNA, 1489 bp, Homo sapiens
tgtattcctgtggattactctagctggtcatttgccccgattgtgaactgcttgaaagaaaaacgaaacttctaagatgtttgtcctttcatgtcctttctgttaggattttttatttggtgtgcgtgaatgaggagcttcgccctgcttgaatgggacccctctcagtggtgtcagcttggggaggaggagatggccctggagactaaatacttgtatgctttcttaccctcttaggtctcagccttagatccaaggacagtccaaggaagtcctaagaccatggagttggtgatctgggatctgggtttgctgatatttctcaccgtggtgagttgatgccaagagccagaacccacagccagaggctcagctggtccgtgtttatgcagatgggaacctcaaatcactggtctcacttgtcctttgtttcagaatctcttggtggtgtttgtgggcacgagaggggcagagaatggagagtgaggctaccacatgaagcgtcaccagagctgctccctgctgcctgctcagagcaccccggatccactgttcaatctgcacaagattcggggtccagacatgggagacttcagctgcctcagaggaccgtggacagggaaggccagcctcgcatccctctgtccatgcctggaatgactttaataaccaagagttttatttttgaatttgtagctgtcgttcactttttacccacccattcaataaaccttacagaattgctccatgtgcttcttaaatcagtgacaacctgtgagcctgccaggctggctttggagaaggtaggccataggccagatctgattttcactcttccttggctcagaggatattgtttgaggtatacatttggaactaggaggtgaacaagtgctggtagttggttcacatttaggcatttaggacccatgataattcagggcattgcagaatagtcagggtagattatggagtgagacaggtctgatgtcattcaggaaggctggagtgtcctggatgacgcggctcataagtaaatgcctacttgtgagatcaactgtcccagtttgcctgagattgagggacttcccagaaagtgggtttttcattgctaaacccagggagatcttgagcaaactgggacaagttggtcagcatgtgtgggatgtaaaaatccatggtgtcagcttgagaggacaggttatggggtaacagtgggagtagggtgaacatggagcagctgccattgatggaactgaggggtactcttaagttcaggctttggagattagggtaaagtcacttattgcaaggcctaggcatggtgccttgtgcctgtattactagcactttgggaggccaaggtgggatgatttcttgaggccaggagatcaaaaccagcctaggcagcagaccccgtctccacaaaaaattagccaggcacggtagcgcactcctgtagtcccagctactcaggaggctgaggcag

SEQ ID NO: 100873 - DNA, 2312 bp, Homo sapiens
tgtgtgtgtgtgtgtatgtgtaacttggggacaggatagggtagcatctttacatctttacatgtcattggcctggaatagggggtcctgaagggtttgtcgtaagaaagagaaagtgctcattgctgcaaggggagcacagccgggttctgagaggcaaaacacttccctcacttcccacccaagagtttcgcctgttctctcgaccctctgaggtgtgcattggtgtcactcactggccaccattccagctcttaattcctctgccttttgtgctggcctttggggctcccctgaggatgactggttctcaggttgcccctggaggaatgggtggagttgtaagatcaggaataaagctagagagggaggaccaaggggaagtcactgatgcagccgccgtctagcccatcccaccccgattgagaggtcgctttttcctgttgaacatgttggatagtggaatgtgttataagaagtgatatgtgtggcttcttgtcattgcaggattgtcagctgacctctgtcctgtgtgcccagtggccccaggtgacgtgtcttcaagaagaggctgagctgcggtgcttgtaaggtatgaatcctgggtgcttctctagagaatgcactggtgttcaggctgcaaggacgaaggctttgaggtcactagaggggaggcagaggctgcttcccattgcttgctcttccactgaggcccacagggacatgtgacaccctcttttcctcgaactctgcgactccactgtgtgaatcacggtggggcttacagagctccccttgggctctgagtcatcctagtgtggattggcatagtttgttgaagtgggaggagtactgcattttggaggcaggcagttagctagtggttttctctggacttggtggcgatccttgttatgaagtgatttatggatttttttttttttttttttgaggcagggtctcattctgtcacccaggctggagtgcagtggtgcaatgatggctcactgcagcctcgacctgggctcaagtgatcctccacctcagcttcctgagtagctgggaccacaggtacgtgctgctgcacccagctaatttttagaaattttttgtagaggcggagtctcaccatgttgcttgggctcgttttgaattcctgggctcaagcaatccttccaccttggcttcccaaagtgctgggattatggatagtaagtccaggcctggccgacgtgtggatagtatcacacaatccctgacttcctaatccagtgaattctcaacatttcacccagagttgatcttccatctcattctcttatgagggaagcatttgagtagtggttctcaaactgtggtcccagaaccaggtaccatcagtattacttgggaacttgtaagaagtgcaagttcttagccctgtcccaacctactacatcagaagttttggatctggagccagcaatctggcttaacatggtctccaggtgattcgtattcatgctaaagtttgggaaatcaaaccatgttagaaatctttgggaatcagaagcagctgctgcaattctaggctgcaaatctggtcactgacttgtttccaggtctcttagtttgggcccttcctaagctgctgtcagtgcctcccctctcaactcactcactgccctattttgtccctgtattcgaaagtgatcgtgggctgcctttgccctggtcattgatagtgcagggagaggaatcaatgaaagcgcttccccgtgtttgaagggtccactcctatcccttccaaactctggagctttcgtacatgcctttattctcaccagtgatgttacctcctggtacctggttgtcgtgccagacccctgtttacctcattagggatggcaccaggttcaacaggccggagaagagacctggagccagtgaaggaaacagggtttatctggggaacttgagggcagtcagcagtctagtggtggggggctggatgggggcacctcatccacttgtaaaatgcatgcagattatatagcaccttcccccagtaacctccacatggcaaccctcgtttcctaagaagctattgttacatgcatctaccatacactggtgctgtatggttcattgagtgtcccttgtgcctagcatgggactcagaggctcctgtcaaaggacagtgaagcagggacctgccacactgagtttatgtctctgagctagttttggagccacagtagtggttaccccttcctagagctccccccagaagctctctctgcctccccatcacactccttcccacctctcag

SEQ ID NO: 100874 - DNA, 1496 bp, Homo sapiens
gctggagtgcaatggcgtgatcctgactcactgcaacctccgcttcccgggttcaaatgattctcctgcctcatcctcccgagtagctgggattacaggtgcctgccaccatgcctggctaatgtttttttgtatctttagtagagatggggtttcaccatgttggacaggctggtctcaagctcctgacctcagatgatccacctgcctcagcctcccaaagtgctgggattacaggcgtgagccactgcacccggccagcccagtctttgagaagagccccaggattctcaatatttctgcccatgtttgccttcctttctgcttctggcagggagtggtaagtgatctctgggagtcagaagcagcatctgtaatcttaggctgtaagtctgctcattgccctgtcagctgttctgttccaggtgagaccattgcccggaatgccagcattggcctcctttctgggcttgccctctgccctttctgcccctgcattcgaaagtgatcatgagctgcccgtgccctggtcattggtagtgcagggagaggaactgccgagagcacttccccgtgtttggagggtccactcctgtctcttccaaaccctggagctttcccacacctcctccctcccaccacgtcttagatggctcctggtgcctggcatcatctagtgggttgtgttgctcttctccctggcccagggcagttattgtgagacatgagggaagggtgtggggtgatgggtttggcctcatggagcagaagggctgggtgtggagctgagatagggctgccctgctccttcctcccggaagctttctctgcctccacacctctccttccacgtccttatccagcccctgcaccaagctgaacctgtggaaattgttgcctgacttgtttcctggctctctttgctgtggtctcaagggcagtgtctgaattttgttccctactttgttatgtctgccagatggtcagtattctgacagtgtgggacaaaggaaaaacggcagcctgggcaaccccgcctctataagaactaaaaaattagccaggcatggcggtgcatgcccctgtagtcctagcttctcaggaggctgaggcaggaggctctcttgagcccgggaggacaaggctgcagtgagccatgaccatgccactgcactcagcctgggcaacagagtgagaccctgtctcaagaaagaaaaacgagaaagggagagtccctccactgtaaggagatcgggttcattacattttggggtgttggagaaaaatactgagtcagcacctgtgtgggattggtgggagcagatttggtgttttccaccccttcacaggattctgaggtaactcatttctgttggccttggccttgtatggggaggatttccctccagccttgtatggggaggatttcccttgtatggggaggattttccctccagcttgtgggaaaggaatcaaggaccagagacaggcagggg

SEQ ID NO: 100875 - DNA, 1845 bp, Homo sapiens
acctcctccccgacaaaaggggaaactgaggccccgaggggagtgggaagagccggctggacgtcaggcccagccgctggtgcagtggtccgtcccctctgccggggtgggcccctcgggtttcgcgtgtcctcgggaaagagactggcgggtgagccgcgccctcggccttcgctgggctaagccgaccccatgcagacgtcaaacccccctaggtcggcacagcctctctgcggggaggcttagtgcccccttgagaaacggcttggcaacgctgtgcccggggccttgcacgcgggctgagggggctagagacctcgcgacttttactcccccgaccccgatctccgactcctgactttggaagcccccaaagctgcttttcggttgcctacaaagtgtcggtcattgtgccacgtccttggaaccgtgaactcattttctcctcaataacctttaaaaagtagctgtaaaacctccattttacagaccagttggctgaggtttaaatggaggacgctcccagggccccagaggggcgaattccagactcctttgccaggaccttgtactaagccccttccctacgcttttccctgcctaggcctcgtgggctgtgcggctatcctggagacagatgacagctctcccttggatggctttgctggttccgcaccagccagcgcccccatttttcctgcagcaccctgatctgcactccctgaggggctcccactgtccgcggtgtgaggatgtccctgggtaagtggtgctggtcatgagcactttgggggacccttcaaattcccttctgggggaccccagcggagggcatggtcatgaattccgagaactgtatggcaaagccgggtgcagaggagagcctggctaagttctttcattctcctgagcttgactttctgtaatgtagggaaactgcgaaagctctgtaagtggggagatcttgcacgtttttcttgcttttgaacccatgatgtctggctacttgtagatactcaatatttgtgggatgaatgaacaatttaagccttttttttttttaaccagaaattggtcttctgtgactttcttgatgggggcagatgagatctttgtactgcattaagtggatagcgctcaggtcctttgggcttggcgctttggcaatctccaggcagctcactttggcctctgttcctggatcccctttgctcttttctgcgcctgcattcgtaagtgatcacgggctgcccgtgtcctggtcattggtagtgcaggcagaggaaatgcgggaaaggttgctgtgtttggagggtccacatcttcaccctcctgtcccaggagctttcctacactcctccttctcaaagctgcacacacctggggcctccaggggattgggggctgccgtgtgtgttatatcatgattagagctttcacttcctgctccctgctgttgggaaccaggctgtgtgtgttgcttaaattccccttgatgaccagcagagtcactgccactcagccatggcacactgctgtaaacctggttttgatctcctttcaatcttttgctgattaactacacattgatcagtgttggccaccctcaccctgccatagaccatccgctgtcttcctctgtagagttaactattttctcttttatgaggaaatagtgtgtttgcttaggagtgtttactgtctggtaactactgtgctaagccctttcctgttgcctgccatccctgctgcgagcagggacaagctgggtgctcactcatggcatcttatctgttgcagatagtccactgtgtgcagaggcatgggagttgtcatgttgggaac

SEQ ID NO: 100876 - DNA, 1778 bp, Homo sapiens
tgctctggtcatcaataacgcagggagaggaattgctgaaagccgtttcccgtgtttggagggttcacacctgtccctttcaaatgctggcgctttcacacactccttctctcctgccagcaccttctggtctcaggagcattgcaggatgttgtgtgagtgagtgatgggagacactttagtatggcttttttcagcttagcctcctgttatcagagagcagtctctttcagtgtcaaggtttgagtactagatggtggagaaagcctgtgtgaattatttttaatgaataagtgtgatgatgggtggcatacagtcactgccttaagattttcaaagagaagcagccttttggaggtggtgggcctgggcaggtctttcaaggagtgggatgtgatgggcagtagaaaggtattccagggaggggtagcaacatgagaaggtctttcaaggattgggatgtgatgggcagtagaaaggtattccagggaggggtagcagcatgagaaggtctttgagtctgggatgagcaagagtgtctagtcccaccagggagacagatgtgtaggcaagtaatgacagcatggagggatggctgctggggtgatccttggctcccagcacggcgaggtggacatctatgggaggggccctgagaggtctcttgagctgtctttctgccagttgcacatctgctcagttgcctgttaagactcttaagacagttttgctggactcttaagtttttattttgatattctttgggagcattgagattcctttttgagatgagtttggtatgaaagaaactggcaactcatacctgattgattaactgggggcattcccattgacatcagcttgaagaaagacgacagaacactggagaccaagtacttacagccttctgctctgtggcccctcctcactccagggatgctgccttgggtctggaaactgttagaggaaaccccaagaggtgcaggcactgagcctctcaggacaatgacctggggtcccagctcccctggaggggcctcctcatggtaagtgaatgccaagaggttaagttggcctgtgtttccgaggtggaaattccaggtcgctggcttcatttgtcttctcttttagattgtttgggggttgatcacagaccaagagtgacgagtgatgtcaccctgtgactcatggctggaccttcttgcccctattgtctcagcacaacattattcgacttttccctcagcgtgggtgggcagaggaaaagccctgtggctctggggacttgggatccagagttgaagacccttcagctggctctgccctgccagtgccacagagtgccatggcccaggaagacaggttttcttccatctaggccaggccatccagtggccatcctccgtgtcctcccgcctcctcctggtgtgacttctgaaaaccaagaatttgttcctgttgactttttctgtgctatggaccattgtcctctcacccactcaataaatcttgaaacatgccctgctgcttgttctttcatttttgtgtgtttggtttttttttaatcagtatctccgtgtgccagcaagactgggtgtagagagtgggtcacaagggcaggtcttctggttctcactcattaagactttccccttgacacatacccaaggcttgacctagggaatgtgagatgggacgtgggatttggaccggggttgaacaataatcccaagtgcatctaggggtgggggggttcaggcttaggagagaaggggaac

SEQ ID NO: 100877 - DNA, 1034 bp, Homo sapiens
cctatatgcatatacacacccttttcttttctttctttcttttttttagacagagtcttgctctgttgcccaggctggaatgcagtggcatgatcttggctcactgcaacttccgcctcctgagctcaagcagtcctcccacctcagcctctcaagtagctgggactaccacgcttggctaatttttgaattttttttgtagagatggggtttctccatgttgcccaggctggtctcaaactcctgggctgaagcagtccacccactatggtctgccatagtggtgggattacagatgcgagccactgtgccaggcctacatacccttttcttcctgtctctggctgcattagctttaagcattcccttcaagatacctctgtccctgacccctacccaccttgagtccttccaatttgctctttaggaacatcgtagtgaaacttatcagttatttttctgagttgtagttctatccctacttctagattatgagaagctttagggcagggactatgttttcttcatctctgtattccttccagtgctttgacatacagactcacaaagcttttactcagtggaatgtttgggtccttttatgtcatagatagatcatgttgcgaacagattcttctctatttccatttttgtaaaagatgtttggtagttcccagcttatagagttttgttctttttgcttaggagtgagtattctagttatgttcagcaatttgtccagcagttgaacacacacattgagttcttaccaattgcaaggcactctgtaactaaccatgtgcaatcaacattgtttgatttttaatgtctgattctatcacaatcggacgcaatcatgtctgtagggaaagtctttttattactgttagacctttgcatgtgttccctacttcattgtccaaaaaagtgtttagttgtcatccactaaatgccactgccttgttggtatttggtaaatacaagcagatgggattgccattggtaatgtttggtcctgttcaccaggagagagg

SEQ ID NO: 100878 - DNA, 1031 bp, Homo sapiens
tgatctgctatgtttgagaaactcaattagatatctagaggcccctcgacttatgatgggattacttcccaataaacctatcaaagttgagaagatcgtaagccaaaaatgcatttaatatacctactgaacagaatagcttagcctcatctaccttaaacatgctcagaacatttacattagcgtacagttgagcaaaattgtctagcacaaagcctattttataataaagtgttgaatatttcatgtaattgattgaatattgtactgaaagtgaaaaacaatggttatgtggataatcagagtacggtttttactgaacgcatatcactttcacaccctggtacagttgaaaataataagttgaggatagtgagtacttggtgtgtgaaatgcacttagctatataaactgggaatacaaagataaataagacacggcccctgtcctcaaggagtctaatcaaagttataataaaataatagtgtagtatctgaagcagctctgtcaaatagaattttctgcaatcatggaactaaatcttacttgctctaatatggtagccactggccacatgtgacttgtaagcatttaaaatgactagtgtaaccaaggaagtgatgtttgactcaaatagtttaaacttaaaactattaaaattaaaagtttttaaaatttaaatagttacatgaaatagctgctgtattggacagaggtctgttttatgcctcagagaaggtctcaggcataaaagatgagaactgtggtggtgctggtagggggcagacagggtattcaaacgttctttgggtagcttaccaaaaactaccattttccatgttttgggagagatgcaggcagaacctgtctttgtttcctgtaattcaggtgtttgataggatctctaatagcatctggtacataggtgaataccttccttttttgccagctttattgatgtttgccttatggggtcaatgggactgcaacagcaatatgaatcatgaggttatatggatgaatttggtgca

SEQ ID NO: 100879 - DNA, 1656 bp, Homo sapiens
tgcctgtaatcccagctactcaggacgctgaggcaggagaattgcttgaatcgcggaggttgctgtgagccaagatcacaccattgtactccagcctgggcaacaagagcaaaacttcgtctcaaaaaagaaaaaaaatgtattttccattgtgacccagaacatatgcatatattacaaaggaaacaagtttcacagaaacattgcttgcctttattatgtgtgatgcctttatcatacatcctataccatctaattaaaacaagtattatccataacatttatttcatgacccatagtttgaaaaacattgatagtttcatgacccacagtttgaaaaacattgatagaggcaagatgtttgcagcattctttatcatgccaatagtctatacatctgttttatttatttctgttaatttccaatagtataatttgacatgcatttctgttttgtcttttcaggtgccatttggattgtactttagtggcacgatgtactctgagtggaggtcactgcatttggtgattcagaatgatcaaggccataccagtgtgctgcacagctatccagagagcgttggacgagaggtggcaaatgctgtagtccgtcctcttgggcaggtgttaggtaccccttcagtggctggtagtgagaatttgttaaaaactgacaaagaagtaagtgtttctaaatttcattctcttatatgaaaatgtacatttgttcttgaagaatttgtttaatgttaacttttttgttcttttttctttgaaaagagctgtagtagaataacgtcaactttttaatggatttctccccaacgtagtatgacttctcaattttgatcttgtttgagttgagggctgggactcggagtttgtggaggttataaggagtgagttgtactgttttgctgctgggactttttactagttatggtcaattctccacttgagctgaaggccaagacaaagacttgaatgtcaaacacttcccccaaagatctaggcttagtcttctgatttccatttagagtgtgtttggaaggcctcatccctacctctggatggcccctgactgaagactcatgtcaagttttcaggctatgtgtatgctgtgcttaagctctcccctgtccccatccctacctactccttcctggcttccaggtttaagagtgctgcagagaagccaagcccttctggcctaagcctaggtgattggaattggggttgtgtttgctgtttctttttttttgacagagttttgctttgtcactcatgctggtgtgcagtggcaccacggctcactgcagcctcagtctctctgggctcaaatgattcttccaccccagtgagtccccagtagctggaactacagacacatgccaccacgccaggctaatttaaaaaatttttttatagagatgatgttcttactatgttgcccaggttgggtgtttactgtttctaaagataggggctcttggaatggcttgccctgaagctggccctttgttcttgggttcagcggcccaggctgaagttaaaaagttgccattgggaagtcatgaaggggccctgagaatggagtgatagaggagcttgctagtataaattctggctaagatgcaggattaaaactttgtccct

SEQ ID NO: 100880 - DNA, 1069 bp, Homo sapiens
ctcttatgtggctaaatcttgctacaccctgctccaaatttgtcacagcttcactgtgctgttataggcttctttaacacttactgcagttaaaccatgtatttcctacccttaacctttgtagttgcttttgagcttaacaaatttaatacatatatttatcttgttagatttaactttggttttaagctgttgaagcctttttgaatcctgaatttctgtccaacaagttggccatcctttttagctttgtggtatctacagatgatcagcatacactgtttttctttttttttttcccctaagttagaatcttggcagagcctttggcatgccactgagcacctttttccaaaatgatcttggcatgttaatctactgttactctgtcatgtgatgtcttgaccagttgtaaatctagccattctaccatcctctgggccatatgtctccatcttgtccacaaggagatcctgggtctgtctagatttcttgctaacacccagatacccgtttgccggagaactctgttaatggtatggagagaatagcttaaaatttctagttggaagaccagggttcaagttttcagctccaccttttataaaccagtgacttatgccaaattgcttaatcttgctaagcttctgttttcttatgtgtacagtaaggatagtttaccctgtctacacagagttattgtgatggctagatgatatttatgaaagtgctttgtaaactgcaaggactacactgttgtcagccctctaaatagtaaccctattaataaaggaatgaagctcatttggcatggcttgatcttattgagcaggctgggtcttggtgatcatgcttctcttttgtgagtgttcactgattgcttagtaatttgtctcaaagttttgtctggaattcacttaaactttccagtttacaatgtctggaatacagtttcctcccttttttgcaaattggggtttctcatagatggagacatatagctcagatgatggtagaatggctggatttataattggtcaagataccacatgacagaatagtattagac

SEQ ID NO: 100881 - DNA, 1113 bp, Homo sapiens
ttgtaaagtaagagtaaacagttgatctttcttcctgttgtttgtgcatttgcataatctggagatggaatgtgactgactttatatgattttctaaatgctacacatacttaaacattaagtggagaaaaaactctaaaatgttctattttgcatatctaatctctatggaaatttgaaatgacctgtatttactttttagttcacagagcaaataataataatatctaaagggtaaaaaccagcataggcttgatattcaaaaataagtaatttattttcttcttaaagcttttgcttgggaaattgtatgtttgatatgtgaaaaatgcattatctaaaataaatctgatatttacgttgagacgaatatactgtcaatttagaggtttttggcaataaaagagattgacattttaaatcagtctactgagataggaacgtgtaataattctatatggatattttcttttgtctaggtaaaatggaccatggaagtaatttgctatggactgacccttccattggatggagagactgtaaaatattgcgttgatgtatatacagactggattatggctttagtgttgccaaaagattctattccattgccagttattaaagagcctaatcaatatgttcaaactatactaaaacacctacagaatctttttgtaccaaggtaagctatacctgtctatctggcccattatcagggtcatagtaaaatattcataaacgttactatagtataggagctgatttcattgttagtcctctgaacagtgacttcatgtgttcagttaaagattgtattaatgtgaatgttaggagagatgggcttatgtaatgtttactaggagtttttaacaggtatgtgttctttaaaggtttttagctttgcttctaaaatctcatacctgttagatattaaaatactgtaacatctttcccttctactcaaaaaaatatacttttgcctatcacaattcttgtttccatttaggctaaacacaactaagggagatgcatctaccttaataggcatctttcctatgagagagtgaagacacttgaaatgattatgggcaaattgttagtaagccaaaagat

SEQ ID NO: 100882 - DNA, 1050 bp, Homo sapiens
atcgcttgaatctgggaggcggaggttgcagtgagccgagattgcaccactgcactcagcctgggtgacagagcgagactctgtctcaaacaaaacaaaacaaaacaaaaaaaacaggaaacggttgggagtacttagaatattgtttataagcaggttcttctaaaatggtgtaatagttttaatactttcttgttatcttatttaggagcctactaggctttttcttcgtgcctgggatagtctcatgagtagtattgtcactgtgtctctttcctctttgtaagcctactacctttcagtgctcagttaatttgtattgatgaaaaaaaattaatggcatttgagttaattaggcttgtgcctttacttttctcttttgagaaacatgactaccttataaatggttttgctatttggtaattaccttgttttctcaaaagtatgtgtgcataagtgttagtaaattctgagagggtactcaactgagaattagagttctcttcctggctaatgttttaggaaaattagctgaatattttcaatggtaagtattggtgttatgatctcatctcccattatttgaagttttagttgtttatttgattctgatagttcacaaaactgtcatctaagtttacttaattagttgtttttataaaaactgacattcaaaatggagggaactgcctttgccattttgctagagattatgtcagaatgaatgtaacatttctcttttgcccatcagtttgatttttttttttaagattgagtgaagagtaaatcatcttttaaagttggttaaggttttaattgctcacatatactatactgtactttagaaaaacatattattgttctgaagcagggttagcaaagagtcagatagcattttaggctttgcaggtcatatagtgttataattagtcagttctgctggtgtggcatgaaagcagccatagacaatatataaatgaatgatcattactgtgttccaatacaacttcatttacaatatagatagtaggccagatttgtaaactctat

SEQ ID NO: 100883 - DNA, 1988 bp, Homo sapiens
aggaggaaggagcctcagtacctgaggaacaggtatttcctttcctgtcattgggcaaatacctggaaatggtaggtagacctaagttaccatgtaggaggcatgcactcttggaagggtgtcagtcccagggccattagtggtatttttatttcttattctgggcttcctcttatattacttgattaggtttggggctatgctatagttttttattcttcttcaagtaagccagagcaatagacacaagcttgagccttagggctttacatggactagatccacctttactagatccacctttagctgaatgtggaacatctccccgctcctggaggtgcttggctcttcctaggcaattttctcatcattttgctttaggtctgacttctttagggaaaacttagtggtgtcatttgcttgcaactctagggtaagtgtcgttttctgcatcatagcccagaatctgagaatctctcttctaaggttgggttgacagttctaagggaactcacttcattttctggaatttcttgaggaaactccccagtctgattcaggtatgtttctatcagttctttgtgacaaatgacaatatgtagaaacttggcctcaagacttttttcagtaatattagatacttctcttgggtttcccataagagatctggaggccagcttaccacttgctaatacaatgggtttcctactattctcaaaattctcagtggtctactttggaaagtgagggtaagggctgggacctggacctctatcttcatcttcagtcctagccaaaatactttgatctgttttatagatcattcttctttataagatttcccttggaaaaaatggtcctgcggtgagttttaaaactgttgttccggggtatcctgggaaacttggagcctccatctttggctaagtgtctttttctaaaattagagcagcagtagcaggtatttatttctgaagcaatgcctgcatacctcattaattttggggacctattaggctattccttctggcttgtaggcccttctctaacagaccttagcttcagagggactatgagcactgtaaaatcacatgcagaattcttgcaaatatgtgtttaaaaaaattaaaaaagaataccaaggccattctgcttcaatgtgagcagcaagggtggcggtgggtatttacttgttcattcaacaaaaacctattgagtgtctgctattatgtgttaggcacatgttagacatagaaaatccagaagtgaagtttatgttctagtattcccgccttcctcccagaagctttcgagttctcataggagtggtaggtttagattccagagtgcttaactttacgacgagtaagaagtagctttaaactgaagacggtatgcctagccctctctgctgataatattagggagcttcattggaccactgcttgctacatccataagtcacctgtcctgaagctgttgctgtctctcctccaggcttgtcagtgatatctgtctgtcttcttcagacaggaacagggttccagtcagattcgactatgcttacaggtcctgagagccattcagaaactggcccgtgagtcatctctcatggcccgagaaacttgggaagtcttactgttgtttcttctgcagattaacgacatacttctggccccaccaactgttcaaggtttgtttatttttttttttctaatttatttctgagctccaaatacagttcatctttaaactcagtgagcggtagactcattggggatttaaattttggcatgatggtttacaaacaaaggttaacagttcttagaatggaaactctcaggcacaatataactttagccctgatgaagttattttaccttcagtcatgattttgctaatgtagggagggactcagtgaattatgcatgtttgatagtgatgggagcagtagcttgtttaataggataggccaggcgtagtggcta

SEQ ID NO: 100884 - DNA, 1028 bp, Homo sapiens
cttacaacttttcctgtgagtcccaactttgccttctggagctatgcggtgtaaagaccactgctgtttttccacctggttccagggcttagaacaggggaacagccccattttcatggttaaggctctgtccttcccaacaccagtccttttgctccattatttgtctctctgtctctctcccttgaagggtggctttcaaatacttggagcattgtatggcaaagtttggaggtaaaaagacatgggtgtttgttgtgattccttcacttactggctgcatgaagtcggagaagttacttaaactttctgaatctaagttttctcatcttcaaaatgggtataattagcagttggtattaggtattacagatacctaccctgcagaattaatgtgaggattatatgaggtcatttgtatgaactatttggcatagaaactgactcatagtagtcagtcatcataggcagtcatccttttccttctcccctgtgtccctctgtcccccttgctggaggattaaggccttcaataagaactgaacagggcaacttgaaatctttcaaagtaaaaattttttgatgtgtctgtgattttgggtacaggaactcctaagaattgcttctcatttttactattaaatgattatttgaaagtcaaaacttaatattgcacttattttaattttttgaccagttctcccaaatcagtgtcttaaagattctgctttaaaaataagtttgccaaagatgtgttttctttttgttggtaaggtggcattgctgagaatctagcagagaagttgattggtgttctctttgaggtgtggttactagcttgtactcggtgcttcccaacacctccttattggaaaacagccaaggagatggtggctaactggaggcatcacccagcagtggtggagcagtggagcaaggtcatttgtgcactcacttccaggtaggttattgtcattgccctgccttccttcacctgtctgaccttaggcagctttctggcattcatg

SEQ ID NO: 100885 - DNA, 1045 bp, Homo sapiens
ctgtagggggaagaaaaaacagaaaagaaataatagaaaagccaaattctgtattatatatctgtatgtggatacagatatatacaaatgtactctgctgatcaaaaattcagttgaaaaatgcttcttgtaccatctgttaaactgacaatgccactgtaaattaattgtaacctattttcaaagaagatttcagagagccctttttaaaaatattaagacatagttgctaaacaaaagcacttattggattcaagtagctatttaatgacaccaatatttgatctttgtgtccagggtcccatgagcctacgtggcatattgcaaatataataaaaccctccttttctctccccagccattacaacacaagctagcatggagtttcgacggaaagggtcacaaatgtccacagacaccatggtttccaatcctatgtttgatgcaagtgaatttcctgataactatgaagcaggaagagctgaggcttgtgggacactgtgtaggattttttgtagcaagaagactggagaagagattctgccagcttatttatccaggtcttggaatttttgtttgttttttcatttatatagttttgatagtgaagccattgttggttggccgactgaaccgatgagtgatgttggtctgaaatacctacagatgtctgtaagtgatcgacatttgcctgaaatctttcattttacctgtctcatcagatttggtaaagacccttaagaccctttttgttttagaagtgctatttatgtcatcttatttgaatctttttaatatggagagatttcgaaggaccacaattatttgttaacaaatttttagcacagtattcccatgtaggcagtccagaaataagtcagctgtaaatcctgcctccaaggagcttattttctgggcaaagccccaaacaaagccgtgtacacatgtaacaatgatccagcaggaattaggatattgatgggagaggcacagataatgtgctgtgggcattcaggggaagaagcagcgcacatttatttactgt

SEQ ID NO: 100886 - DNA, 1920 bp, Homo sapiens
ctaggtgaccatcaggaccaattagtatctctgaattttaattatagactcctgggaaggaggatctaattaatctgcctgtctctggtctagtcagctacagttgtgaaggtgggtcacataagggtgttggagctcacccacttgttgtgggggcatgtttctcaggaactctgggctggggagatatcctaaatggtactttggtagtaggggagaaggctatcaccatgaactttctgactgagccataagactgaatgggtggtagtaggacaaaccaaaacaacagattcatgagagggcaagttattagtttagttttgaatcgattgaatttgaagtgcctatgggatatttatcaacaaatatttattaagtcctactttgtgccagatattgtgcacagaagtaccataataatcactagacatccagatatccagtaagcttttgggtaatagatctggagttcagttgagaggtgtgggttagaatgatttgattatatttagtgacttaagaagtgtttaaaatcaggttagtaaaagagagagctttgagaactaaggttgtcagactgaggaacaccatctttagggggcaggtagagtaagaggacctgtaaaagaaaatggtcatagaaatcagggaagagcaaggagagaagggagtagttagagggctgaatgctttcaaaaggcagaatgagttaagacttagtcatgtctcttggatttggcaatcgagagcccattggttatttgctagtatggttttagttgagttctagggagagagatagattgaaatgggttgagcagtaaccagtaggtgatgaagttgtttctgaagagttttgcagagaagagaaactcacctcacaatagaagagtataacagtgcagctgctgttgaataacgggagattgaatgcttagtaagttgattagaggttgggggtggagttaaaaactaagctatattcaggtatattcctaaaaggaatcttattcaggtgaccttcatgatgaatacagatgatcgaatgcaggtttctttctttcattgtccccccaaaaataatggggaagggacaaaaatgtaaacacacctttttccctaggaattactaaatgttgcaacatttttctcttacggaatttaactcagcagttcccccagtttattgaaaagtactgcagcctgttgttttgttttgttctggttgccttatttgcaggcccctagaactttgagttgcaaggcttaaggtttgagaaggtgcaacagacatgaatttttttttttcttcattaagaaagatgatttgggtcttagtgtatatgattcagaattgttctaattccagtaatatcctttaaagggtaaaattccagtaattccagtaataacttttaaagggtaaaattctaataaattccagtaattccaataatgtcctttctttaaagggtaaaaatagtgatgagtggaaatagactttcagttaactatgtagcaaataataattatgaaaacttttgatcagcagtttgtttaaaatttttttcttgctttcctagattttacatgcttttaattcaaggtttgcagataaatgattatgtgtgccatcctgtcttggccagcgttattctaaactctcctcctttgttctgctgtgacttgaaagggattgatgttgtggttccttactttatttcagctcttgaaaccattttgcctgacaggtaagctatcattctctgctattatatcaactgtctgatttggcctggtctgttggtgcttcctccccagtttcctaatgtatcctgtccagttgtcttcatagtccaagagaactcaggcgacattaaatgagtgtagtgtgtccaaacccacctcatccctgaa

SEQ ID NO: 100887 - DNA, 1046 bp, Homo sapiens
ccaacagaattgcgaagatcctccattaatatcctgctttctttgttgcccctccctcatcattttggcacagtcaaatctgaggtaatgttttgttaaagtttttttatatcctatattctgttttttgtactaatttaagtcaaatcgaatgttaaaaatgaaacaggagctttttttatttttcaattcaagttatttcatcaagttatttcaagtgaattaacaaagttgacttgtgattttttttttttgttctgtcagtttttctaccagttttcaagcagttataggctaaggacatctattaacatattgttagtgacagattcagcacagtggctaatattagactgaaagcctttctcattatactgatccgttcctccatctagctgttcccacatgggcatcataagctgcaacagctgatgttaaatattatttgttttttccataggtggtcctggaaggaaagtttagtaacgatgacagctcttcttatgataaaccaataacttttctgtccctgaagttgagacttgtgaatatattaataggtgccttgcaaactgaaacggaccccaacaacacccaaatgatattaggtttgtattcacacgttattttgtaagtgaaaccaaagtactgttgactacaggcctgctgaggaggcggcagtcggtaatgggagcctaaacctaatgtagctctacttactctgaatcagaggcacaagttagttttttaatgtaaaaaaatttaaagcagtgagatgagggaagtaaagtgttacagttgtcttggttggtcatttatttgtgcttttgcttttctttctcttctcccttctctcctttctccactctttgcctctccttcccatccctctcttctttcctcctttcttcctgctctccttcctcctgcctctttctcttcctcccgcctcgtcctcttcctcctgcctcttcctcttcttcttgcctcttcctcttactcctgcccattacttacaggtctcatcagtctgcactttcgtccta

SEQ ID NO: 100888 - DNA, 1051 bp, Homo sapiens
ttggctcagaagttttctttttaaaaataatgtatattttgaggtttgcttttcagtgcctcttcagctgtacatcaggttcccgagatattctgtatgagagaaactacagctaaatccagtctttattcctgaacagtgtctgcttaaaactgttacttgttttgctgtggtggcaaacttggttgaataacctaggaaaagccctagccagcaagcaactagtttaactttttcttacccatcaattctttctaacccctctagacctaagtttgcaggtccctcaaagcaccaatgcttccaaatcaaaaatgcttctcagagacttccagtgctctctgctttgtcttcaagatatatcatccctatacttggagtataggcaagacaatggaggggttaatagggtatactggggtaagttgggtagatgtagtaagctgagtagatgtaagatgggtgatcaaattattattacggaaattacattcgtgtctcagtagatggtgaataataatttactgatctgaatataatgaactgtgtttatatggggaaaaatgagggaagtctaacagataggtttattagcccctatacatacgggagttaaaactaaccctagtattgtttgtgttttctgatataactgtatttgaaagttgccgtttgtttattcatgcctttttgttttttgttttgttttgttttgctttggttttgagacagagtctcgctctgactcccaggcttgagtgcagtggcgcaatctctgctcgctgcaaactccgcctcccaggttcctgccattcttctgcctcagcctcccgagtagctgggactacaggcgcctgccactgcgcccggctaatttttttgtattttttaatagagatggggtttcactgtgttagccaggatggtctcgatctcctgacctcgtgatccgcctgcctcggcctcccaaagtgccgggattacaggtgtgagccagcgcgcctggccttattcatgctttttaagcttatatttctgttctgaggttttg

SEQ ID NO: 100889 - DNA, 1148 bp, Homo sapiens
aacaaatctttttgatttagctgtatagcttttgggtagtatattagatttggggtagtatattaggttttataattgatagtaatgggtgatcagtaaacatttctgaattctctaccatgtgtggtggtagagaaccaaataagatgtggactctgcctcagagctcacagtgtagtggcagagatgtccaataagccagttattgcagtgtggcaaggagggtaatgggggatggattagatagcagcccagaggagagcatgtcttcatgttaaaacctgtgtaccccctactgtagctcactagattctttagccctgaaacatttttattttctgccctgccaagtaaaacatttgccagccaagcatcctatacaaggttgtcccctaccttgggcagttgttttatggattctgtgagtttgtgggtacctttatgtttttctacacaagtactaacagtgtattaaatctgtgagcacttatccagctagattggagtgatatctagattcttagatgtgagtttaatcctttaatcatctggagagttcatgagccatgttcatgaggttcatgaggcatgtcatgagccatgttcatgagttcatgaattcatgaggcatgtttctatggtttaagtttgcaacaagtatccttgaacatgtcagatatacataaagccattatgtggatatttgacacatttaaatattatattcgtgaagaagttatttaaattatcttattcactgtgtatgtagatttaggtattctataggttgaaaattatttttcatgctttctgaaacacatttaagctaaataaatttttcagtactggctgggcgcagtggctcactcctgtaatcccagcactttgggaggccaaggtgggcggatcacctgaggtcaggagttcgagaccagcctggccaacgtggtgaaaccccatctctactaaaaatacaaaaattagctgggggtgggggtgggtgcctgtaatcccagttactctggaggccaaggtaggagactctcttgaacctgggaggcagaggttgcagtgagccaagattgcgccactgtactccagcctgggcaacagagcgagactccatctcaaaaaaaaaaaaaaaaaac

SEQ ID NO: 100890 - DNA, 1006 bp, Homo sapiens
gccaccattttggaaaacagcttggctgttccttaaaaaggtaagcatacacctacatatgacccaataattccactcctaggagataagagaacatttatcgatataaataccttgtacatgaatgtttatagcagctgtatttataatatccagaagctggaaacaacccaatgtccattaataagtaactagataaattgtggtatatccatgcagtggactactattcagcaatagaaatgaatgaacaattgatacacccaaaagtgtagctaagtctgaaaataactatgctgagtgaaagaaaccagaccaaaaaaagtacatattgtatgatctttatatgactttatttatttaaactctagaaaatgcaagctaatctatcgtgacagcagatcagcagttgcttagggagaggggcaaagaggagtgggaggaaggattacaaaggtgcatgaagagatttggaggtgatagatacatccgctgtcgattgtggtgatagttcacaggtgcatacttatgtcagaattgaccagttgtatacttgaaatattgggcaatttatgacaattatgcctctgagcagctgcacagaactttctgcagagcctagtgcatcactgtgaggttgggttaggggtttaaaaatgtgcccatgttctttcagtctctgggaatgatgaacaggtatacccaatgggtttgggttttagggcatgaaaaactatgctaatgaaatactgtttgagcacttgaaaaatgccactattttttgtggagtattacaatacatctgaaataatctgttcctgtatataaataatataaaaaagcaaggcttcctgtagtgtatgacattgtcaaataggtcaagcttcagtgcaaatgctttgaaattggtacagtaattcctggctgattgtttttgttctccaaatgaatatgctcaggtaaaagtgatggttgactcaggagaccggaagcgagccatcagttc

SEQ ID NO: 100891 - DNA, 1492 bp, Homo sapiens
tcaataatgagaaaatatggcttttaaacaccaggagatcaataatgagaaaatatggctttggttttctaaaatgggatagagacggttgtcacaaagcatatggaatatgagcttgctgtgttccatgcaagattctaagatatcagataggttgctggtaagggagtaggtcactaagatcaaattataccagcctaactgcattttctgttccggatattgaccagactggaaaggcagattaaatgtctctgaaataaagacatacaggtatgcatctggggtaatgggctttttaatcttggaggggagagtctggacagcatgccatggcattcaccacaaggagtaaatctgacctgtcaagaagcatggctgtggtcaattaaaattcagaagagtggaaggggacacattgatgcacaaggtaaactgaagattttgctttgggaattaactgttatcttttccattctccatagcattatgcagttgctcggcgcatttccttcacctagtggtcctgcctctccttgtagtcttgtgaatgagaccactttgattaaatactccaggctgccaaccataaacaagcatagtttccggtactttgtcttggataacagtgtcatcctggcaatgctggaacaacctcttggaaatgagcagagtaagtttatagtactttgagccttctctactgcttaatcagtgttaccagtaccatgaagctgtttccaggatcagggaaggacagcctacagattctaagtaggtcagaaagatttctagctgtgggacaatagcacctgaaaaataggggggcaaaaaaatagaatatacatattacatagagtcttttaaaggctcttgatgtgcatctgaactagctctgtagttttataaaaggtggtgttttagtgggttccattgtgttgtttatctttgtcactttttcttcccccttgaacttcggatcctgcccctctgctcccctccctctcactcctcatgttctgtatcaattgttggtgctacctacacaggctagaaacttgaggagttatctttacctgccccttcctgttactcacttatataattagtttctaagtttccatcttcccagggacccttgaatttttcctttcctctgtattttcccaatacatccaagtgcaggtccttattatttctcacctagattattacagctgtttcctacctactctgattccctcaacccctaaaccccttgccagttctaacatgtgttttccctactttcatcctacttgctgccaccatagtattcatcttcaaccacaaatgaccatgccagtgccctactgaaaatccttcagtgattttccattaacacaacatgcactgttttcctcctttccctccccctcagttataagccatctcacaatatgtgattatcactgcgacccaaactatccacaagtacattttttttttctga

SEQ ID NO: 100892 - DNA, 1819 bp, Homo sapiens
aacttctgttgtgttgtggtgagatgcggtgacattaatgtgaaatggaatggtgccttttattattgtctaacttcagaactgctactcccaagtcttttctacaggcatctcatccttctctaccctagacatggagcttgcttggctttctttcctagcctgtgcctgttcatgattcctccagcctcctactccaagccatctgctgaggagtctgcaaaatcccagtgtccccttcaggcttcctggcctttttccagctttttaaagactctcctactttcattccaaataatttcattgcataggaagtgtaccaaaaatacaagcaattggaattgtatagatttacaaggacattttaatagtttattgtaataataagaaattatagagaagtttgaaggcgtttgactcccatatctgagacggaagaataaaaaaaaggatctgggtcactcgggaagtccatcctgagtgttttttttaacacccccatcatgtccctgaacttctgctgagatggaacagtgcctgcctgtggtgggcagtggtacacaaaggcatgggcagatataacactaacactgcaaacacccagtctgtctttctacacttaagttgttcccaacattgggaggttaagagtatttactaggacagtgtttcccacaaatgtgtacatgtaccattggaggtatgtgagatgatcttagttgatacattagtgaacattattttatgtatttttaagcatgtgctttaaaattatataattagtacatgccaaaattcatgattttccatttagagatgcacaagagtggttgatacaaagtaatagtacttacagtacacgggtatgggtacggcagaaaccacagaagtggtacacaaaagatcaaagcttaggaaacactgttgggcctttgattatgagaagctctgcagttgataacaagtttattttaaatggttgttgtctgaaattaaaacttttatatacatattttattctagatgattttttcccctctgtcactgtgctggtccggggaatgtctggaagacttgcttgggcacaacagctttgtcttttacccagaggagcaaaagcaaatcagaaggtattcatcagaagttacagggaagtgtgtgtgtgttttgtaatttaaaggttaggtaacattccaacagaagacacagatcaaataaatatttttgatccctagccagattctcagtcagtgggttcatatcagaatcatctaggaacctagaattccagatgtactcaattactctttaaagacatgttcaaggcaggtgtcttttcaaaaagctttccaggtgattctgacatctacttaggagtaattgctgttgtggacaatggccccagttttttccatgtaattttacaaatgtaataaaagtcagatatataccatacgtgaaaaaaatttggtgggacttttgatttgtccgcaacaggacttagtttgaaattgttttatatgatttgttcttatataataattggtaatatattgtataaattttattttttttataaagagtcagggtcttgttctgttgcccagactggagtgcagtggtgtaatcatagctcactgcagcctcaagctcctgggctccagtgatcctcttgcctcatcctcctgagtagctgagactgtaggcacatgccatggcacccagctcatttttaaaattttttgtagagatagggtcttgctttgttgcccaggctgatcccaaacttctgtcttcaagtgatcttcccacctcagct

SEQ ID NO: 100893 - DNA, 1028 bp, Homo sapiens
tgaaggttcagagacatttagagaggaaaggagggaaattgaagaagtttatgaaaattttaatcctggttcttggcagtgtaataggggatcccagacagttcttaagaattgccaggcagtgcagctgaggttaagtagcattatctatagtgaagttatttaactcactctgctgactttcttcaaaagtccttgggatctggaagcataagtaaagaatttgactggtgtggagattgacaggtgtggaaatttggaaggaggttcaacacagccatttaatgtgcttaaggagagggtatttagctgttagatgtgggggcttcagtttagttgggaagcagataaagccagaaggatgctaatggagtgggaaagcagggggagggattgagtgccccaccgcaatagtagagcacgagctcaggaagtgaagggataggagttgcacaagggggcttatgattggagagggaatttcagacttacagccctggaaagcagggcacatatcaggttcaagtttgttttcatggatggccaaaattgtgaaggttgaggagcttgtagaattctgagccaggttgttagaaggatcgttactcacccgggaatggaactttaaacaaggattgatcagaaggaaaggtgggagaagtctctaagagtacagtcatgtcatccatacagatgaggaattaaacacagggagcacgtcagggtgaagatggacagtgatctgcaagcgaggggtgagagtgacaactctgccccctttcttgcctatttgaagggaaccagagactgaatgttttcatttacagtgaaaacatgaaggagcaattgttgaaggtatagggaagtttttttggcatttgttttaaccttggaccatgtttgcttaatggcatactctacattgaactgaatcacaatgttgatcactgaaaattatcttcattttctttgttgcttgtagctttattttcattttaaaattaagattgacttagctaggtgcagtg

SEQ ID NO: 100894 - DNA, 2370 bp, Homo sapiens
tgtcttccaaagtagctgtaccattttgcatttcaccagtaaggaatgagaaaaaaagtacattaaaagtaagttctagaaagcacaatattatagagaaaactggatccaaaaattatatacacaatataatctcagttgtctttaatttaaaaagaggcaaataaaagaactaaaaggaagtatgttaaatagtttctttagtttaggattatggttgtgtttattcctaccattctatattttttaattttatttttattaaaccatgagcaagtattgtttttataattataacaatgaaagaaaataggtaataattgctcctttcttcttttggtggcaggaacctgcaaatagtcgtctacctcctcaccttattgcacttgattccacgatacctggattttttgatgacattgggtatctggatctcttgccatgtcgtccttttgacacagtttttattttctatatgaagccaggtcagaaaacgaaccaagaggtaagagttacgaattttttttttttggtatgtttttgtgctataaatacacgtctaaagaaaaaaattgaggcaaaattaatatggagagtttatttgggccagagttgaggactgcagcctgggaagtgctggaaagtgcttccaagaacaaaggagaggctcaagtttttaaagataaaaaggatgagtcaggagagtaggcaattacaaaagttgtttttcaggacttctcattggtttacagaaataacattgattaatgagtggatataaattattgaactgtaggatatgagctatggtgtccagcactgttagattagctaatgaactgttggtggtgacacacagtctagagtccatatagcacgcagcttcaaagtgattacttagctcaagcgggagtgagatgtgactgctatcaaaaaagtgcctttctaggcatgataatttgagggagactcacattccttaaaaagtttcattttcatatacaaaattttacatggtatgcacttgtctatggtaagaagtattttgtacttgatgcctaaagacttgctatgaaccagtttgaaaacagaattaatgaaaactatgatgcttagagtcctgagtcttttgacccttaaggaatgtgatttaaataggagctgtaggatatctttcttccccttaaggaattcagattcacaagacaaaagaaactgaaataacgaaggttagtcataaaagttaaagtaaggctcaagaagaataaaacaatagcaacaaatatttatggaacatcttccctgtggctcagcatcccaggatatagaagtgagtaacagtttcctttttgagaagcagctcaccttcctagtaatttcagaagcaaatcatttcagttgaggaatgcatagtgtgcagtgggagaaataacacctgaaataaaggagaaaaacagaaggactggccgggtgtggtggctcacgcctgtaatcccagcactttgggaggccgaggcggatggatcacccaaggtcaggagttcaagacaagcctggccaacatggtggaaccctgtctctactgaaaatacaaaaattagccagcgtggtggcaggcacctgtagtcccagctgcttgggaggctgaggcaggagaactgcttgaacccgggaagcagaggttgcagtgagccaagattgcaccattgcactccagcctgggcgaagaagtgagactccatctcaaaaacaaaacaaaacagaaggactaagtaaaacatacctggatacgtggaacaaagagactaagagaaggacgaagaaaaatgtaagataggtgagaatggaaaactgagagcaaaatggcaggagacttgaagtgctttttggaaaggaataattgaaatatggaataggcaggaagttactgactgtaactaggaaagagccgaaggaagacttgtaaaatgtcgtattcagatgtgtagggcactgtgactacatgatcctggaattttactgtagtcattttaagacaatcagctaatcaaattagcatgcctaaagaaatttaccaaagtttccaaatgtttacactagaagcactgtttcaaatgatttgtgagctcctagaaaagaacactgatttatgagaaagttttttttttttgttattgagtcaataaagttaagaagtgtctgttgttaggtaccagggttatagtgccgaacaaaatctacaagatttctggccccctaaaactactgcatagaagggaaggcagatgattaaataagcaaacaaccattgtaaagggtgttaatagggtcattaaagcatgttataggagccatagcaggaaaacctaa

SEQ ID NO: 100895 - DNA, 1031 bp, Homo sapiens
gcctcctgagcaggtaggactacaaatacatggccctcaagcctagaaatgttttcattttttgtagagatggtgtctcgctatgttttccaggctggtcttgaactcctagcctcagtcgatcctcccaccttggcttcttgaagacaggcatgcgccactgtacccagcctggttttgtatttttaacaagactataaatcacagtaaagggggaaaaaaaaaaacaagactaacaaacaagaaacaactgacatttgaaacactgtgagttttaccttgttgagatccttcaccatcatcacaacaattaatagaccaactggtagaaacatgcccagtccaaccagggtgtctgcccacatctactgaccagccaagggaaagcaaaaattctaggaaatgtggctgaacagttctggaagactccacattctttaaaatctgaaatacataccaatcatcagctataatgaaggaaacaaaataatatatcaaaataaatcttcataaaaattggttagttttgaagcttctgacaaatcatgtccaagctcagaataaatttgaggatatatcactatagagaaaaatgcattctccagagttagacagatttggattggctgagccttgggcaagtttcttaaccccactgcctcagtttcttaatccataaagtagagataataataatggttgtgaagtaatgcaagaaaagccctgagctctcttcctggcaaaacaattactgaaccaggcatgtttactaaaagacactatgtccctgccttcacagagtttactgtctggttaatgagaaacattacataggtatgcaattatttaactataaatcttgataaatgctataaaatctactaaaattcaataaacattaggtgtaattaataaatgagtatgaaaatatccttttcttaggccaaagaagagaattccaggaaaaatgaagtgtccagaaagttctctcctcttcactaagcactaaatgtaatgcgtggggtttctac

SEQ ID NO: 100896 - DNA, 1017 bp, Homo sapiens
tgctgcagaataggggtggatagagtggctattgggatagtaaccacagcatctactacatcaaatacaaagtgcctgcccggagcccacaccaggagtcagaaaactaaagccctgtttttgtaaataaagttttattggaactcggtcacactctagattatacattgtctatgacagctttcatgctacaatgacagaatcgagtagttgtggcaaagaccctgtggcttacaaagcctaaaatgttatctgtctggtcctttacagaaaaagtttgctaacctcttgtctaaagcttcctatttgccataccttcaccagaattaggtatcttccaattttttcggtgagaaatttttaatttttaataatggttgagcatatcttatcatatttttatttattccctgagaagtacttgtccatttcccctttccaatttttggtccgattgttggtcttttatgtattgctagtaggacactgagttcattttaattgagaactatatagctctcatgaatgtttcttttgttaattcagtcttcctggcttagagcagatactattactaaaactggctgtacatttttatacagtgtcactgaccattgaggaaggtggaacataggccaacttgaggagccatagagagagaccagggatagaaatgccttaaaagcaagagtccagagataacgcacatgtgcactctctctcttctctctcttcttctctctctctgtctcttcctccctcctcctcctcttcctcctcctcttttcctcctcctcctcccttcttcttcttcttcttcttcctcttcccccctctctctctctctctgtctctctctctctctctctgcctgcctgcctgcctgcctgtctctctggcccaactcccttctgagggactgggatggtcttccttttgattatttatttactggatccaaaggactgctcccttaatctgcttcatacacttgaattaaaagccctgctaatcaga

SEQ ID NO: 100897 - DNA, 1050 bp, Homo sapiens
tcccatttcaactgatattttgctttctttaatctaattaatcaatacataggcttattttccagttcatttctttctctaattacgagtgatccctcacctacttttctattcccatatgagagcctttgcatggaaccacctagaatcctacaactggaagtatctcatgatagcatatggccattcttctaacactgagcaagagaaacttcagcagcctagaaaagatggtggtccaagactttttaagaattgggagtaattattacttcttagtctgaactcacagttttattttgcccagaacctttgctctttgcaaattaagcctgtttgttcatgcctgaccgagtaggtggtctggcagtaggtgggaaacttcaccttcttctttgagatcatttgtaggatgggatactatacatcacgatttcagtcttatttccagactaatgacttttgttgtgccctaccttggtagctgcctaacctttgtacttggacccttgatttctcactctaggcccctccctgtcttactctctggggccggctgtgttcctggaaggttggaccttccatggtttaggtttgaattataacagctgttgggcttcccgtcaaggttctggtttactacttataattccagaagccagaacctgtccgtcctctttggggacatacctgcctggtttctctggcccagcctgttagtaccagacaagtcctcccagagctagagcctcgtccttattctatagctcctgcaattgggtctttgtctcctgttgtgaaacatctcctatgccaactgtgcccactccaactcagcttcctcctatttctgatatttggggatttttttggatggggtggaggataactttctgtgtacttatctccaaccagattgctcttaatcacagagactagatcttctgtagcttctggatgtcccagtgcctatttggcacaatgctacatgattgaatatataatctaaataattcagagagtaataatggcatttattatattctacat

SEQ ID NO: 100898 - DNA, 1046 bp, Homo sapiens
tttgataaccttgtacattgtatacaaacttctttctttgatcttttttgtttttatttctagttgtctacaactctttcgtttcataattccttatttattaagctgcaatcaatatgttaaaaaaagacacgctgatgaacttcaagcaaatagagtgtacctcagtgaagtgctactatttgcagtagtttccacaccagtactgatctctgtcatcagctctgagaggggaaagttttctggaagaaaataatagcattacaattaatatctccctcattttcccaaacagataataggaaatctaattttctaatcgctttacataagtgagtggcaaatatatggactgtgctgtcctgaaatatcatcttaattattctctacaaattaaaaaattctctctcaagacattttttagctaatttcatctaaagcaaagagtttttagaaaatatgttctgtgatctttgagggcttggttgaaaagtaactatcacactttcccacaaactctgggctggatgggattttaggcaagtatatatttctaatgctctaatgttgcttatgtaaaaatcatgagaaacttacccagagtgcaactcttaaggacaaattaagctttatactaaaacgagacagtaggacatgtgggtggagagagggtaagtgaagtgcttccccttcccctttccaaaggtcctgggatgactgagaccaactggcaacaaaccactgactgtgatgccaacatgaatagccaaaagctttgtatctactggtctcatcgaatcttcacaactatgaaaaaagtaccaggatttaacagaggagtaatctaaggcttaaagaaactgagtagtggagctggggtacaaaccaaggcttgctgaactccaggactagctcctggccacaccaggcttatgtgcccactccctgtagacatttagcaagtcactgtcatatattgccattttatttatggacaaagtcctcatacagtacctatatcatcatagcgttccacccagactaca

SEQ ID NO: 100899 - DNA, 1593 bp, Homo sapiens
ggtcttcatatgtggccgaagagttaaattttctttttctttatcatttttataaaccaaaaagaagtaaaaataaggaaatggtgataattaatagcttccacatgtaggaaatggtatggctcttgttaaaaagggagcatgtttcgttctttttaaatctgtccttaatctagtaagtgtaagtaaaacctcactaacttctagtattaaaatattgaagatagctgtttgtaatccaggacagaaaataggtttttagaatagattttgattctccttttccttgtcattgtgtgtttcttctgacagttttatcttagcactatgtctatctctctggggatgggaagtttgcaaattgaatgaaatagttttgagtatgcggagaatagttcacctgaatacttacagttcacctacgtaagtgactagtttctaacgtttattttaaaactctctattttcaaggctttctggtgaggcagactgtaattaacatttgtagaagaaagagactggaaagtgactcctacagtcccccccatgtccgccggaaacagaaaatcaccgacattgtcaacaagtaccggaacaagcagctggagccagagttttatacttcacttttccaggaggttggactcaagaactgcagttcttagaccactgaatttctaagactgttgaactccagtttgggaactataacacagcagaacagtttgataggtgatcactgtaaaaataaaaacaaatcactcccaagagcttactgtttaatcaccagaatagaagaaacacattataacccatttgatagaagactttgggctatctagtgaaatgggctcccagacacaatcacactcctgctgataatgatgatatacattttagccataaactttcttttaaaagtgacaattttagttaaacataagccttttgaggagaaaggcttttatgcatctcagttaaacacgtgcattggtagtatcaacaaatttgcaatatagaagttgaagatagttttttacctcactttttaggaggttgtattcaaaattaaaatctcagaatcttacaggacatttaaagactcatgttgatagcatggaggagaaggaaagaagtcacagccttctactcagttgtaggtcttcttgtcatccagctgtcacactgacaaaaagaaaagatgatacatgttttttgctcagataagaagcctgacattaaaagatgtcatatttttttctccacatttcaaaaagttgtccttctcatcactgcacagatctgtctgaaagcctcagtttctgagtgacccaggaacagatcagaaatggagcatggccttgtcctttaatggggatgcaaataaagtttgtggggttaaaagttataagacagcagtgataccccactctctccattattgtccagcggggtgacataatgacaggttaaatatttgtgattcattgattaaatattatttaaagaaatgtaaattcacaataagggttgaaaattatttggtttcatccattgtctcttatttcaggaccaagcagcaaactgcagtag

SEQ ID NO: 100900 - DNA, 1012 bp, Homo sapiens
caccagcccagtgcgccctgccgccgcgcttgggaggccaagctttaaacatctctggttcctagtttctgattattcggggatgggggggatgggaggggacagggattcacgatccatcgcgtctgcgtttctgttgtcctttcttttccacaacaccctggttttggggggaggcggggtgcatttgcgggcagggttctctgtccttccaagtggggccccgacactttggttccagtcatcgagggggttgggaagggagggagagggggcgcagctcgcaggcgtggcaacttgaccttgggggaatatttcacatccatccagagctcggaatctacagcgtccagccatttccagcaagagcgcttcccattccggagacgtttcaaccctgcagcgggaaaggctgactgggaaatccattttgggtgggcaatttccttcaacgaagccggaaggcgagaagccgcggcggggccagcttgcctgccggttttcaggaatctaaactctcatcttgtgcaatttatcaggtgtggaactgttctactgtgcgtgtggtgtgctcgtggtgaataagatgaaatgtatatcagaaaaaaatctatctctaatttagagtgcggtacataattatatccgcaaataaagaagagacaaaggcttgcgcggcccggtgtcgggtttgtgtgttcgtaccagccgggatcccctggcgctgggaggcgtgggaactggctcccgccggctgaaaccggagatggtgagcagctgtggttaaagggtccggggagggctctagggagtacaaagattagttggcggcgaggaggctcctcaggtgtgaggaggaagctgaagacggagagtgctgtagcggccccctcagctgccaggtcgaggtttgttcgaatctctcccctgggggcgggtccatctgagaatttggtggaagctctcaacttccaacctcaaaacagagagggacagggggagcttttatgta

SEQ ID NO: 100901 - DNA, 1047 bp, Homo sapiens
tcagactcctgggcttaagtggatcctcccacctcagccttctaagaagctaggactacaggtgaacgccagcatgcctaagtcatttttacaattttttgtagagatggggtctcaccaagttgtccaggctggtctcgaactcctggcctcaagtgaacctcccacctcagcctcccaaagcactgggatgacaggcttgagccaccatgcttggctgttaataagtgtcgaagtagccaaaagagcttaggccccagcatcttagttcctgtatggcaaaggggcagcctgcaggtcactcctcagtccagaagtcgctggttgagtcgcctgcctttagaactgaaacaaagagtaagtgtacatcctgttcctggatctgtcatccctagaattccaaaacaaaggaacttactgccttgagacatgttttaggcaggataaaccagactagcctcttgttttttgttttttgttttttcctttttaaatcagctttcattaagctgttgattacttatcctttcagaaaaaaaatgatactttggaaaaatgcaagtcagtgccatttgatgctgggtgtagcatagtgcttatcagtgatgtcagagttgcctttggctcaacaggaagcttgcttttgcagtgatgggctcccagctggaggctcgctcaaggttctgctctcaccgttgcatcctctacatctcattcccaggctgtcgattatgtgaggacagtacatgagtgtatgctttatagagcagatcctgagataggcttactagatacaccttattggatcaccaagatcttgtgtagaaggggcctttaccatcttcttccaacacagcatcccagatcagcctcagttgaatcagtgtgtgccttttccattttgcttctcttggtttttcaggtctttgagatttgagttgttgtttactgaaatccggaaccatgttgtctttgttatgtattcatccatatttagtttttatcatgcttgacatgttagcaggacatagttttctttataccaga

SEQ ID NO: 100902 - DNA, 1051 bp, Homo sapiens
agataaagctgttattaaaaaagataaaaagaaagcacaggtcgatagatgggccctcaaaagggaggcatggcttttggggataatggaaatgttttgtgtcttaattgtagtgatggttactggaatgtataaattagttagactttatcaaaatgtatgtaaatttatcctcaagtttattttttaaatgtattataaaagtataaaaattctaatcatgttaaggaaataagttgaccattcagattacggttttgtctggctgtttggaaacattgggctggcgttttgtagagacacaaatgaaaaatgaaagttttgattttttttttttttagctttttgtgtagaagtttttctgttttgtactgagagcttacatttctgcatccacatttcgttctgatatttgagttaagggactatattaggagttgtttctttcctaggtacccaaaggacattcaggaaatgctggttcagaacgttttcctcactggcggcaacacgatgtatcctggcatgaaagccagaatggagaaggaactgttggagatgagacccttccggtcttcttttcaggtactgattgttcgagtagtcaattattttgaaaatagcattacctgttttctgattgcaaaagtaataatcatgcagaaatatccactgttaacatttttgtggcttttcttctggtcttaagtccatgcttaatttttaaagcaaaatgggaatcatgttttatatactgttttgtggtttctttaaattggaagatgaagacatgcgtagaattctaagagtgtgaaagagtgtacatcaaaaataagtcattctcctacccagtccgggcccctgtagacattgtggggcatgggatacattggagcgttccagacagaaggactagcatgagcaagggcacaggggccagaagcttgttgagggagtgagaagtggctgagtgttgctggagcacatggctgataaagaggagaggaggtgggtaacgtagagaggtcagcagagcccacactgcagagcc

SEQ ID NO: 100903 - DNA, 1081 bp, Homo sapiens
aatagctgggattaccggaatctgccaccatgcctggctaatttttgcattttttagtagagatggggttatgccatgttggccaggttggtcttgaactcctgacctcaagtgatctgcctgcctcagcctccctaagtgctgggaatacaggtgtgagccaccacacccagctccttagtcatcttatgaaagaccctatctctgtatgcagtctcatgctgaaatactgggggttaggacttcaacataggaatttgggagtggtgggactcagttcagcttataacactgtctaatgggagaagcaggattaatattcaatgccacaacgatgtacaaaatgacaactgtggtccctggggttatgagagctactaccagggggtttggctgagtgggctctaggaaaccttccctgagaaagtgatggttgagctgagacctgaaagaggttgggggctaagcagagggagggaacagcaggccaggtgtagggacaagatatgctgcagggctgggaataccccagtaggcacatgaagaccaaaggcattaagcggcacaggttgctgaggggggacttctgggcactatgttggagatggtggcaacttaccccaggtaaaaatcaccagagcactcttttaaaaatacagatcccaggcctcatccaggtctgctgaatcagaatggccaaggggaagggcccgagaatctgcattccctcacaatttttcttattttgaaaaatatcaaatctagagaaatggaaagaaaagtacaaggaacacctgaacccccttcacctagactcaccagttgttaacattttggctcatttttgctttctctctctccctccctcactctctcctcaccaagcatctcctaaaaataggggcctaggccaggtgtggtggctcacacctatcatcccagcactttgggaggccgatgcaggaggattgcttgagcccaggagttcaagaccagcctgggcaacatagggagatcctgtctgtataaaattatttttaaattagccagctgtgggccaggcatagtggctcatacttgt

SEQ ID NO: 100904 - DNA, 1059 bp, Homo sapiens
gtttcaacttcctgcagctcagaagaggggtccccacccgagagcgccgggaccctgtcccgcgctgcctcccaagccggatggggttgagcgcgcccaccccagtcccaggagctcaggccccgccttgggggaggagccgagaggcggcgcggaggctcgcggccgagcagagccagctctgtcgccgctggagcagctgcggctcggggacccacagacacagccggggtcgggagccgcccggggcagggctcgggagagcgggtgagttccccggcggcgccaccaccctccttgcgctctgcggcttcgcagggcgggggatgaggatggggcggggaggtggtcccagcctgctatcacctagctgggggccggggcgctttggccaagggacgatagcttgagataaatgggagtgtggggactctggaaagacgggtaccgagagcgctaggtccgggagtcgggctggaatgggggcgttctccccggcctcgcaattccttgacgaggccaggggagggggcgcattggcaggttgttggctgcggccgtcgtagaccgatcttggggcggggaggtggggtcctcggtctgttctggactcatggggccgccgtctgccgggggtgcaatgccgggcggcgggagccacagcggacaccaaacaacccccccccgcgcactctcccggccgggcatggtggtgccgccccctcgcgtggcggggcttggtcctggcgggcagcggcagggcgcagagagcgctcctgcccgggcgggaaagatccccaaggcaggcgcctccacctgcagacccgccccgcctcaggatccggctgacagcaccagccagcccggggagaccccgcgagtggtagttccccgggaggggcgcgcccggcctctcccagggccccgtgcgccggcggctgggtcccccgcgccaggagcgctcccctctgggcgactccggctcatcgattccggcccagaggagcgcccccgggcgccgaggatgggcggagacgtgcagccgcccctgagaggtcg

SEQ ID NO: 100905 - DNA, 1036 bp, Homo sapiens
gctgtggatcccactcttcatattaccatgcctaagcctcactctgccctccagaggcctggaacaaagccgatccttttttgttgccttttgttaacacctggtctgctcccaatatggcccagccagttcagacagaggtcagtaggtctgttattgttccactgctggacatgatgacatgattcttctcctgggaaagctcaagatgcatgagttgtttcatcactctttgttcttgttaaatgtgtggtttttgaatcctgcctcctctaccttcagcctccccaacacacacaaagtcctgctaaatggggttatagtcaatgggcttcaggggacagtgacaagtcagagatctgaatgaaggagcacagctgggagaattggagttacggagttgacctgtggggatctgagtttcacgactgatttaaaaccaggagatctgtctatgatggcaatgcccaaagtctagaaggttcatcctagcaggagtaggacagtcagtccacaaaaatcccatgggaatgagattaggggagacaacattgatttctaattcaggtatttggagcaccaagggccccagaagtctctttgctcatgagttaaagcatctttatgctggaaaaaaaaaatgacgctattattcaaagaagtgtgttgtgggagggcgggggtgtacatcctttaggagagaaagtaggtcccgagtgagatcccaggagtaggaaagccagcactgtttgttttgttttcttctttccctcatgctcaatggtacaggaaacacaaggagaaaaggacccatcgccttcctccaggctgctgccaatattgtgtagagaagaatagctgaagaacatgaaaacaaatcttcacatttccttttaacagtgtgaactttgaaacactttctgactcatattttaaaatctcttaaatttgaattcaccttccttcatgttgtttttctcgaggcactaggcttgagtccaaaaatgtgtcaaccgactgctcccccagaattaag

SEQ ID NO: 100906 - DNA, 1054 bp, Homo sapiens
ttcatttacatattatctatggctgctttcacattacaatggcagagttgagttgtaacagcgaccatgtagcctgcaaaggttaaaatatttactttctggccctttatagaaatactttatgggctcttgcactaaaatgtttcctcatctagtgatgtatattaaacctatgttttcttctagggttttttggccttatttaaataaataggtagtatttctggacttcattttagtatagagtactaaatgaaaatctgtctatattttgtttccaaagcatcagcaattgtcccaacatcccttccttccctacaagtttgtgaggccacccttgtactctagagcctcatctgtaatgaagggtaactctccaacctgtctattctgttccagcaacctattttggtgccagttacatactgctttcatccttgtaggtttatattgtggcttaatatgtgataaaacaagtttttcctcagattactcttttttttcaaaatgttcctggttattttcagctgttcacataatatttaggactgtttggtcaagttttccctccaaacctcaaaaatagatttctccaaagctttgcagggacatggatggagctggaggccattgtccttagcaaactaacacaaggacagaaaaccaaatacagcatgttctcacttacaagtgggagctaaatgctgaaaacacatggacacatagaggggaacaacacacactgggtccctattggagggtggattgtgggaggagggaggagatcaggaaaaataactaatgggtactaggcttaatacctgggggatgaaataatctgtacagcaaactcccatgacacaagttgacctatgtaacacacctgcacttgtacccctgaacttaaaagtttttaaaaaattaaaataattaattaatttggaccaaagtgatatgtttatcatactgagtttttctaagcgggcaaatagcacatgtctctgttaagcatgtattctttcttgtcttttaggaaagctgtagggttttttgt

SEQ ID NO: 100907 - DNA, 1011 bp, Homo sapiens
taagaatacttttatgtgactgactgatagaaggccgccattgagtaaacagagatagagaaaatgggagtagttatggcaatgtggggagcagaagaattagaaagaaaaaggaagagatgttaatcttgcctctggcttattgtaactgaggctactggcagatgatagtaacagccaaactgaccgtgtccactgtctatcctttatttccatgaatctgcacggtgacccactcccctcccttccctgcatcattctctccactttacagatgaggaatctgagtccaaaagaggttaagttacttgcccaaggtcacaaaatagagattaaaatttagttttgtctgactccatattcttaaccttcaaggtccactgcatctctgcagagcttcccaagctttccactgaaggcctctttatattctattgcacctatgtcatccacattttgaaagattttattactgagcacactgcatttgtgaactaataatttcttccatctggctgatgattatttttctactcctgtttctgttacaacatcaatccagactttaatcccaattattgaaggttcaacataatattataaaatcacataaatcactgttgtgtctatgcagctaataggctaataaaattaaatcagcatatgcgccattgcccagtgctgaattctgaatgccacatggttttagagtcaatgccacctaaacactaggcattctcaacccaaagtccggggttcccagagagaggcagtgtttggtccaccccatacatctcagacattccagggacatcaatagccaattacagtgttcgagcaacatgatgtgcccagggttatcacatcgagttgctagaattcggatctaaagcaaagcaaagtctagaatgtgtggtagattataacaatggcccccaatgaatcatgcctttcagtacccaagcgcttgtatagactcttcccacactgactctgagcttggccacgtga

SEQ ID NO: 100908 - DNA, 1081 bp, Homo sapiens
agatagacacagacctgctccccgcagccttgttgagagccacacttctgcccatgccaggagccagctgtgtgaccatccaggggtggagggggaaaaccaggcaatttcgttcctggaatcaaccaaatcatgttttcctcttggatggaagtgtcaaaggcagaagggtgtgggagggggacaaggtcagtatttaccaaagtgtatctgattttaaaaattcctttagtctgtaaaactcctagagggagggaggtaactgaattcacttctttttgtggatcgtatcaaggtcactgggttttactggctggtgctgggaaaatgaagctaagtgaggagcttccattggaatgcttttccagggagagaggccagttaatttaaaaaaaacagtcgctagttaacagcgacagagcccagcaccctggggtctttgtgaatatccagactgtttcagcccagcccatctcagccaaccctccttagactgagctgtcagagcaagcaattaggggccagcctgcctccacctcccacccccttccacctccatcagtcatgtgtgcagagtcagtgctcgggatcccgggcccagcttttgcctttttggggatgcttggtgagacagatttgccagtcagcccttttgagttcccgcctcacccaggggctcccagcctgcacttgcaggagtggtgatgccccaagtctgcgaatccagggtgcacgtggtcaatatcccctcctgcattcaggagagccatggtagggctagagttgggtcttgcccagccctgcagtttcatagtcccagccttcctggtgctggggagggaggactgtgaatggctgttctcccctcactgctgagtctcccaggaccccctttggagatgcccatggcatgggcactgcccacaggctcagccagaacctcttggtgtacccgataagctgcaggttatcccttgctctgtgcgccttttatttgtccttaaactacctccttagagctctgaaggggtctcctagttccagattttaatttggggaacagatctgggttctttttaac

SEQ ID NO: 100909 - DNA, 1835 bp, Homo sapiens
caactacggggcattaggaagcaattattattgctaattactttcatgcatcttttgctgtaaaaagcagataaacacgagagtggcaaagtgagagccctgccgctttttctttcttgtcttttttttttttttttttttttgagacagattctcttttgcccaggctggagtgaagtggtgggatctcagttcactgcaacctccgtcccccgggttcaagtgactctcctgcctcagcctcccaagtagctgggattaccggtgcccgccaccacgcccggctaatttttgtatttttagtagagacggggtttctccatgttggccaagctggtctcgaactcctgacctcaggtgatccacccgcctcggcctcccaaagtgctaggattacaggcgtgagccaccgcacccggccccctgccgctttttctactgccagagactggaggggaaactggggcaaggggtttgttttccataggctgggtctgtgccagattgcagtggtctcctaaaatgcagatacatttgcattagatcggcttctgtattcatagtgggttttggtcctactgtctgactcttagtatggcatggtcatgggtgcaatggaggtcttgtctgcttgccagcctcgataaagctgcagcagggtgctggggatcaaggaggaagaaggcagcctgcaggtgggtgtggcacatagagtgtcgtggcagacaccttggtctggagccatggtcaggttgcttgctgactggcagtgcccagctccctggctatctgcctgtgccagggacatggcagataaagccccagccatgttaagacttgttagggctggtacctgagtgtgtctgagtgtgggtgaagataccagtgcattgtcaggttgacatgtccaagccccgactctcaccaatgttcttaatgttctttccctgactggtggggtttcagtggtagtggatacagtgacctagtgccttgcctttgagggagtggttgtgggctgcagctaggctcttaccagccctgaggtgctttgggtggactgagggttttttgatgcagcagacattttccttgcgggttcagtgaaaagattaaaaagatggaaaaggcagacttgtgtaggtatgcatccccaaagctcatgtccagtagaacttgagcacttggaacctgaaaaatgtaaagaactggtctgtatagtgagagctgtggattgttctagtcttttgcccagccccaaattttagtgatagcaaaagggcactggaactagaggccagagggaaactattaaactcacgtgctggcgtgaggaggggatggagccaggagctcagactctccctcatctcacgggcattttgtaatactgacatttccagatagaacctgctgccctagtctagctacccacagttccctccgagatgctgtatttggaacctgggcagttttaactgagaaaggtggtacattacctttaaatccaatgagtattggctgggcacagtggctcaagcctgtaatcccagcactttgggaggctgaggcaggcagatcacgaggtcaggagttcgagaccagcctggccaacatcgtgaaaccccgtctctactaaaaatacaaaaattagctggacgtggtggtgcgtgcctgtaatcccagctacttgggaggctgaggcaggagaattgcttgaacctgggaggtggaggttgtagtgagctgagatcacaccactggactccagctctgggcgacagagcaagactccctctcggaaaaaaaaaaaaaaaaaaatccaatgagtattt

SEQ ID NO: 100910 - DNA, 1065 bp, Homo sapiens
tgaaatgagttgggtttgagacagtgctgaatttgaggtcccaaagacaatctcttttgtttaaaaaaaaaaaaaaaagccaggccatggtatcatgtgcctgtagtcccagctactcaggaggctgaggcaggaggatcatttgagcccaggagtttgaggctgtagtacactatgactacgctgtgaatggctactgcactccagcctgggcaacacggggagaccctgtctctttaaaaaaaaaaaaaaaaaaagtaatgctttctgtttgccaggcactgttctaggtgatcccaaggaaggtgcgattatcatcttcattttacagctgatagaactgaggcatagagaagttaagtggccccgaagtcatgcagctagagaatgaaggagcctgtactcaaattgaggcacagaatgtctgaaccactgttaaccaccacactccctgtggagggttcaggagcctgtgctcaggtggggagaggtgacagcagatctggtggctagctaagagctactactatttatgggcatgcattgtggacaagggagtggctgtgtcaccttgaccacatcctttgaaatctagtacctgtgacagcgaggaccatgaaggtgtaggtctcaggctgctttcaggatgaaatgagaagctgttctgcatccgtgttctgatagcaaaggtacctaatggtgatatgattgagcactttgaatgggtcagtttctgtgctaaacccttgacctgaattacctcatttaaccctcccaacactgggaggaggctacaattaagaaaagaccaggcacagagaagttaagtaacttgcctgagatcacacagttagcatgggacagagctgggctcaagcccaagtctgtctagttccagctctgaagctcaagtgttttttttttgttgtttgttattattttttttaagacagagtcttgctctgtcacccacgctggagtgcagtggcatgatcttagctcactgcaacctccacctcctggattcaagtgactctcctgactcagcctcccgagtagctggga

SEQ ID NO: 100911 - DNA, 1034 bp, Homo sapiens
ctccagatatggctggagaagtgcaggaacagtggggtcctggtcagcaggccggccattatgcccctgaccagctggatgcgtcctcctcacgtctcctgttgtaactgacttgcactgagttgcaaattgcaaatgggtgttgaccctggaagggactcttgaaagtcaccactctcacgactttctagtccttagagagtgggtgggctccatgcagcacagactgggagagtgccatgactgtgggcacttgatgtgcaagggctgcctgccttccagacatgccattgtccttcgcacattattgcctccaggagtgggagcagtggccaaatacacatcaggtgtatttctggacccacaggctgcagcaagagcaccggatacctaggagttgcatcctggcttggaaagcaggactcggccggttagtggatgagtccaggtcattgctcagctcagtgaagagagtgtcccttcagtctagccccaggtctacttcagctatgcagggattggttgcatgagggctgggacacaggaatgggggatggggatggggatttgaaggaagacttccctactgattgcttctacagtaggactatggacttttcctctgtaaaagacaagtacttttggctgggcatggtggctcatgcctgtaatctctgcactttgggaggccaaggtgggtggatcacttaagctcagaagttggagaccatcctgggcaacatggtgggattctgtgtctacaaaaattagccaggtgtggtggcgtgtgcctgtagtcccagctacttggaaggctgaggtgggaggattgcttgtgcttcagaggcggaggttgcagtgagccgagatcacaccactgcactccagcctgggcgacagggtgaaactgcatctccagaaacaaaaaaatagacgaatatttttaagagtcctgctttagtaagaaaggagtggatgctgggtgtaggggaagtcaggggaagaaaaaaacctccatcaaccctacgcaccct

SEQ ID NO: 100912 - DNA, 1037 bp, Homo sapiens
ctggctttgtttattttttgtttttgagacaaagagtcttgcccaggccggaatgcagtggacgatctcggctcactgccaagttccgcctcctgcgtttacgtcattctcctgcctcagcctcccgagtagctgggactacaggcgcccgccaccacgcccagctaacttttttttgtatttttagtagagatggggtttcactatgttagccgggatggtctcaatctcctgaccttgtgatccggccaccttggcctcccaaagtgctgggatgataggcatgagccaccgtgcccagccagatcctggctttcttatatggcctttagtagctgtctcccaaagggtgaaactctttcactcagaattactatcaatcccttctgtcagaatccatttgataaagaaaaaagaaatctctgaaaacttacttggctctggtgggatcacatgcccaccctgaatgaatccctgcatccaagggaataggatactctggccagtgtggaccacatgcctgcccctattgtggttggagagagtatgataatgaaagctttctggggtacaggtgggtgtgagttctgctagcagaggagggaggcggggaagggacaccgtacaggcaagggcacatggccactaatcagctctaaaatgttttgagccatggtgttttgtgaaaatggcagcacagccccatgactgtgggtcctccactgttagtgaggaagactacttcagcagccacaaggacaagcttgagggcaggaaggccactgatgttgccactcaaacagtagcaaggagcagggcattagcaattcatagggcctagggtctgatctggagtccagcagtagctcccctctgtgataatccctttatctggtttccttacctttaagatgggggtgctggcctaaatagttttcttacctttaaaatggggatgctggcctaaatatttagaagccctattttttatttttaattaattttttgagatggagtctcgcccagtcatggaatct

SEQ ID NO: 100913 - DNA, 1946 bp, Homo sapiens
caagtttaattgggaatatgaggttgtttctgctgaagacatcagttaatactctgacttcctctgagacagtgacaggattttggtatggttactacttaccaagtgcacatccagacactcagttttattagcgctcacgaaacagatgtgtgctcagctacaagagaccaaagtgcaaactagaattcattcagaactgttcatttatggctagcaataattctccagtacagatggacacagttgacatatacactttgtccctgttggcacatccacatgggaagccaaattgtaatcaggaagtacagagccaagacaggttacagaaatgtcatacagcccctgatgaggggtgaattctccctgctccacaggatgcccttggaatgacccgagtaggtgtggccaccagcatctgtgtctctttctttctcctggacggtgctgggtgaaagttgctgtgttctatctatctgtctgtctgtctgtctgtctgtctatctatcagacagggtcttcctatattgttcaggctggtcacgaacccctgagctcaagcagttctcctgcctcggcctcccaaagtgctgggattacaggtgtgagcagccaaaaggtgccaagttcttatactcatggagttcttttgactagactgtgctgataattcctcttctattaatgtgttctttctccaaacagataggcaacagcagccttcttaatttagccagattgccttacttggagttttatgtggctcccaatattttagtcacaagtgaactgactgtctctgggtttcttcctcaagtgactaacacattcactatgtatgaatgttagcaagtttgactttcaggagatgaaatgataggtttactattgctttctcaccactgagggacagtttgagctgtgatgaagtgtccggactctggagctagacttcagggttcaaacccaagcttcaccatttgtgtgctgtgtgacctcacttctccattctgagcttcttttctttatctgtgatgtaggactacaggagcacctacctcataggactgttatgaggaccagatgagatcatccatgcagagcatttagcaagatacctgacatgtagtaaatgctcaagtacaagggaaattactgtttactcaagtatttaaattttggccttttcttgactattctttgtctcccaactgtacttacaagataacataaatgaaacagcaaatgaaaaaaaaaaaagcaacaagaagttaagaaatgtttatgaaattaaaatggtaagaagaagggtgtaagttactgatataaagcaaagcagagtttaagtacagttgagatcttataagatgttgaagatgaatcgagacaaaaaggaaaacaagttacctctacgccatcctttttccctttcaaacaaaaagtaaaagtagctttaaaaacagaaattggaggctcggtgtggtggcttacggctgtaatcctataggctttgggaggctgaggcgggtggatcacttgagacaaggagttcgagaccaacctggcaaacatggtgaaaccccatctctactaaaaatataaaaaattagccgggcgtggtggcacatgtttgtaatcccagctacttgggaggctgaggcaggagaactcttgaacccgggaggtgggggttgcagtgagccaagattgcaccactgcactcctgcctgggcaacagagcgagactccatctcaaaaaacaaaacaaaacaaaacaatgttggaactaaagcatcaagagattgttaaagatcactgcctcttccccagcaccattatgaggccacctgttcccttgtctgccttctttaggctgctgtatagacaatagtgactctatcttggatgcaagtctgccatgttcacttctgtttagacccagt

SEQ ID NO: 100914 - DNA, 1050 bp, Homo sapiens
tctcgcctcactgcagcctccccccgcctgggttcaagcaattctgctgccttagcgtcctgagtagctagtattacaggcactttccactgcgcccagctaatttttgtatttttagtagagacagggtttcaccatgttggccaggctggtcttgaactcctgacctcatgatccacccccggccctggcctcccaaagtgctgggattgcaggcgtgagccacctcacccggcctataatttcttataagtgaaaatgtaaagggcgtatgcattatgtattttgataagtgttaacacgattgcagttgtattcgctcatactgagaggaacagtacctgagggttagaaatacattttgatagttctacttaaaattcactttcctttgaaaacagctcatttcacaatgtttaaatatcgttgtttaggtcttttgagacaatgtatggctatttgcaaggtgtgttattctttttcagcttaggaatcatattttatacttgatagaaaattatcagacagtggtgattgttggtgaaacaggatgtgggaagagcacacagattcctcaggtgagtacatatttaataagtgtctttacacttcgatttggctggaagaattttgtaacttgagagctctctttactatcatttacatttttaaggtctcctttcaggaaatgttcacttcaactagatattttttattaaacttttagggcttataatttctttggtgagtactaaagtaacagtttgtcttcgatttattataattccaaaatagtaatggaatggccatcttctgaaagttacaatggagatttattcaaagatgtgaaatatagagtttttatccttaaatagttacagttgaaggggtggggtaaaatgaattttgctgtagttgtaaataaaaattggctgttatagtattatgcagtgctatggaagaaccctttcttactaggaaaaatcctatgtgatgtggataggagtagaaagaaggatcaagaaaggccttgtaaaggaattggcattt

SEQ ID NO: 100915 - DNA, 1039 bp, Homo sapiens
ctttgagaggctgaggcgggcaaattgcttgaggtcaggagtttaagaccagcctggccaacatggcgaaaccccatctccactaaaaatacaaaaattagctgggcctggtggcgcttgcctgtaatcccagctacttaggaggttgaggcaggaggattgcttgaacttgggaggtggaggttgcagtgagccgagattgtgccactgccctccagcctgggtgacagagtgagactctgtctcaataataataataataaaaattgcaaaagttattatgcttgttctctaataacttgtctcttttcatttttcattgtgttcacatactatttaaaatataaatgacctttagattttccatagtatgtgcgctgtgcagtaatttctatgtctctattttcagcatgatctttcttcccaaaggttgcagggagagtagctgaagaaaggggtgcagtgctgggccacgaggtgggctactgcatccgctttgatgactgcaccgaccagctggccacgagaattaaggtaaagtgctcaagctgcttttcctagtggaaataaggaagaaggttattttgggagaattaaaaacatgtagtccttgctgctgtacaggacattgataccatggcagaaagtgaagaaaagtatcctgacattcagagactttagtcagctaggagacagagagctcttccttttttcttttttttttttttttttgagacagagtctctctctgtcacccaggctggagtgcggtggcacgatctctgcttgctgcaagctccgcctcctgggttcacgccattctccttcctcagcctcccgagtagctgggactacaggcgaccgtcaccacacccggctaagttttttttttttttttttttttgtatttttagtagagacggggtttcactgtgttagccaggatggtctcaatctcctgactcgtgatccacctgcctcagcctcccaaagtgctgggattacaggcgtgagccactgtgcccggccgacacagggc

SEQ ID NO: 100916 - DNA, 1064 bp, Homo sapiens
cttgcctgcctgcatggtcacttagctcttctcagtctcagcttctctttgtaccttagggtcacattccccaagagaggatctttggtggcgtttccttcccccatcattggctggagccctcaagacaggtctccttgtgggctgcaagtggtggtcaagtaccattaaataggatgtggacacctgtttggcagaaactgccaagagacacttctcccaacagggtactgcacgagtgttggggaagtacatgattgatggcctaccccatacaaagcctcgcactcactactgtagggcgtgtaaagatggagaagacactatccctgccatcaagtggcctaaaaccagtaacaatggggccggaaacacacctactgttcacagaaggaaaagtttcctatcaaatgatcatatctgtgttttccagatagagttacccaccaacctcatctaacctgtactgaacttgagtcacacctttgacctaatttttgcttaaatgaaatacagaggataggaataatataaataatactaaagctacatgttaactcagatgctatgctgaatgcagttttgaaatctaacctttattatttttattaaaactttagtaaagacactgtcattgaaatgtgattccccacaattacagttagaaaaatgtgaatttaaaaaatgtattttgcaacccataatctgtattgcacatatataatcttgctactcacctgtctttggcaagttttatattattttttctttccatgaatcgctacgaacctttttttctaagagaaatgaagaattaatttttttctttttagaaattccgggatttctttaatcaaaatgaaaccagtgatccagcaagggatacatgtgtgatccttacagtggaagggagaacatttccggtggatatcttttatctacaaaggtttgatgatgcttgaattctggatgatggtgtttagaaaactcagcctctgatgtagaatgtcagaactgcatttgctcacaactctaaaggatggggaggagcatgttttgtgtcc

SEQ ID NO: 100917 - DNA, 1047 bp, Homo sapiens
cttgtctgtcttgtttatcctacatcccagcaccttgaacagtgcttggcaaagtgcacaccctcagaaagtaatcatgatatgaatgaataaatgactatacctgcgcaagatggagggtgatttactttggttatgccaaagggaaaaactaacaaatgctaggctctgatcactttatatattaattgtatatagtcccttcagtagccctaggggaggtggtaaatcttattatgtagatgaggaaacaggttcaggaggttgagtaacttgtccagggtcacatgattagggagaattcaaacccagggcaccccctgacttggaaactcacagtctttctagtatattaaactgcctctcacagattctgcaatgttggaaatgttaaatcttttaggatttttacgagtttgttaaaagcaaaaagaataaaatgagttttattcttctttctgtggggaacgtaggtgatagtggccaccaatgtggcagaaacctctatcacaatcagcggcattgtgtatgtgatcgactgtggctttgtgaaactccgagcctacaatcccaggacagctattgaatgcttggtggtggtgccagtctcccaggcatcagctaatcagcgagcaggacgtggtggtcgtagtcgctcgggaaaatgttatcgcctttatacaggttagtgtggctttccctaagggtttttgactttcttatagtcagcctgggcaacagagtgtagcaaatgtttactcctaatggtagaacttaacataaaatacaggccttcctcacaaggccctgtgtaatcagatccccactgctttcctcactctaaatatggtgtttctttgttactagtccccattggccaaagctggcctgtgagtgactgcttatttgctatcctgttctaacctaacatctgggcacaggcctgtgtagccatttgtccctagggtgtgggctgtgtgtcctggagcctgtctttcttgcctttctttcttgacttaatgtgctgtttttgtattccaagatccc

SEQ ID NO: 100918 - DNA, 1012 bp, Homo sapiens
atttcctatcctcagaggaagcctttgacaagttgcctcagtctacggttcctgagatgcagcgtagtaatttggcacctgtcatcctgcagctgaaagcactaggaattgacaatgtcctcaggttccacttcatgtcggtaagtcctgcctgctgtctggggccatagggaggctagggagctcacagggggatgtcaggacattgtcgtagggcatgccatctttcctttttttccctactcaggtcatgtgttgtgtgtctgctttgcaaccaggccctgtgcaggacgtaggggaaaacagccagacaaggtagcctcaattcctattcttacatagttcctgttcttgtctgctggggaatagagacaagtaagtgggtaattacagagcagtgtgcccagggctctgagagacaaaggaagggcctcccaggtgaaacctgaaacccaaatagaatctcaccaggttaggagtggagagttccaggacagctagtctttgtagaggcctagatgcaggagtaccatgattgggggatccttcctgcagctttagatagagctgcaggaagacccttgtgcctgattgcttcctgagatgatttctaggagtagaatgactgggtcaaagggccgttgtcctgtttagggtcctgttacatggccagattgctttaccaatgtcaactctagcagtgcctgaatgcccaccttgtggtacttccattgtgccatgttatcttctttgggtttgctgatttgattggccagagagaggaaatcacctttattataattatttttaaatttttcataagatagatttttataaaaacatttattagtcagtttttatttcttctgagttgttaagctatttatctgttagaatttgtgtcagttagtgattttcaagagtcctttgaatattaaagacattaatttttataatatttcttacaaatattttctatttatattttactgttttttttttaatgtgtgga

SEQ ID NO: 100919 - DNA, 1025 bp, Homo sapiens
gcggccagcagagccgagtgctgctgaggccatcaggaagatgccttgcgtttggtgctacccagttgttaggttcttgggaagagtggtctcttcggagtagtgggaacaggtgaggctcttgtggattgaggagagggtacaagcaggagaaggctgcagggggatttccttataattaagtccttgaatagaagtctttagaagtatcagttttttaaaaaattgggtattcaagagctcagtggagatcttttcttcttttaaggtaatggcactctagtgtcaaatggagtttggtgtagtgcatgaatcatcttttggatactttcttctttttagcatacattatcttttattctctcagcaactgtgtgccttccaacacaatggtacctgccttctgatttcttttgttgttcttatggcaggtctggacaaagactgtcgcctaactgaaccgcttggcatgagaattgcagagtttcctttgaatcccatgtttgccaaaatgctgcttgaatcaggtgggtagagcctgatagcttgaattgattttattttgactgtcagaggtgttgtttgcctgaattctgagcaccctggggaagagggtacaatatggtaaagaagtatatatatatctgtaacataacatttattgttttaaccattttatgtgtgtagttctgtgatacaaagtacgttcacattgttgtgcaaccatcagcaccatccatttctagaactttttccatcttttccattgaaactccatacttggtaaacacaaattccttattctctcctctgccccgcccctggcaaccaccactactttctgtctctatgaatttgactgctctgagaaccctcagaagtgcaatcacacagtatttgtccttgtgactctcttgtttctgttagcataatgtcttccaggttcatccatgttgtagtatgtgttaaaattttcttcatttttaaggcggaatagtattttattgtatatctataccatgttt

SEQ ID NO: 100920 - DNA, 1091 bp, Homo sapiens
tgtatgtggctcagaagtctacgcttttaaggaagtgacacacccgcctcagcagtcagcctgaaagcctagtgtgccaggtactcagccacatcctcagcaccattagtacttggtaacatttcctgagtgcttataagtggctagacagtgcactgagtgttccatgtgtttattaatttaatgctcacaacaacgctgtgaaacgtgtgctcttttccccatcttataggtgagaaaagcgtggctaagaggtaaaatgtaacttgctgaagttacacagtgagggtatgatggagtcagaacctgagcccaggcggttccatttaagtcttcttttgtctttatactaagagcaagtgattaaacaatgacggagtcttggcttttactctaagggaacagtgtaatgaagggagagattcatatggatagacaaagtactaagattatcagtcctcttcgaagttaaagtagtagatactttagtaatcatagaagacgtgctggcagatgtggaaggaatgccgggaagaaggaatccagagagggctagcttgggaagtctttcagcttccttgaggtgtggtgggagtccggtcaagctttggggtctggttgaattagaaaatggtggcaaagagcactctagggaaggaggactggagacaagtgcttggagtgaggagtatatgagacgctcagagaatatttgatgggtgaatacactcacgagagagggaagagttgaaacctgggccattgagccatgttggagtcattgatagaaacaggatgcttacaaggagcacctagttggagagcagctcgtcaaacgcctgtcacccagcaggtagatgacagccttacttcagcaattggtgttcttcacctgtgtttcattatcagacccctgcccaggagaaaagttaaatttaaattctacccagcctgagaaattaaatactaaggaataagattttgtagggtaggattgagctttggagggctaccggccattgtagtgtctaagatgctcccctccccctgcctccaagaaccagtttccacccctttggaagtgatatcac

SEQ ID NO: 100921 - DNA, 1020 bp, Homo sapiens
tcaaataaatgtaatataaaagaaggtaacagaaggtaacactttttgccaaaacattgctagtaagaatgcagtgaaactgccatttttatatattgttgatggctttggaaatagtaccacctttatggaacttacttaccaacatgctttattccattggatctaagataccatcatgtgtaagaaacatcgttattttatgtgtcaccaaagaaaaaaaatgctgccagttatcattgtaaaatgctgtcctaatttcagtgaattaaagttagaaaaagagcgagtcttaaaattgatgagatgtgatatgtcattaaccataaaaataacattagccttttgcacaacaatttggaatgtatcctatggacatcatctaatagtggggaagctttattcatggaagatgttagctgtagcaatagaaacaccagttaaaatggaacatttgaaaaatttgaagaattacttcaattttcaaacactagctcataaccacagaagtaacgttgtatactatctccagtttgtgttttatagaaagaacattgttgccatatgacactcttttacaaaggagttctgaggtcactgaccagcctgcagagcagcactcttaggttctggtgcccagccatggtccagtcatctgtggcttaggggaggttggaggggtcccaggttcaaggagcagaccagcattgttgtcagcagcagttgtggggagtgggacctccttagatggtgctggggcaggcatccagcattgggaagggtagggctggagccatttcaggagagggtttccaggtgtcttgaagcagcctggggtggtgctgggagtggatcctgtgcattagagcacacggagcctagggcaggcaagggtttcacccgcctctctgttggctgcctatgtaggtgacccggatctggttctgaggtgcattgtctccggcttcttcgccaatgcagcgaggtttcattctactggagcttataggtaacatgata

SEQ ID NO: 100922 - DNA, 1487 bp, Homo sapiens
actgtacccggccccagcccacagttttgacatagggacagacacagagtcaactaccttaggggaagggctttactagcagcatggatgaagtgctgggctcagcacatcatgtgccagtgagagtcagggcaggcttcatggaggagataacattcattctgaacctggaaacaagagtgttcagtcagaaaggacccggagggtattctaggtagagaagtagcaggggcagagccatggaacataaaggaacctcatgcgtttgggaagtggggaatcattggtatgggtggcccatgcaatggtgctgctctgtaacactgcctaggaagaaagaggtaagcacagaagtctagagtaggcctttagacatctttataacatttcaatggttaagtttatgtttgtccaatttaataataaaaattgggggcttatatttttcttgtttacaatttcatttttctagaattcatttatattgtattttaccaataaaaagtactgattaaaagtactgatcaaccatggattggattttgtttttttgagacagtgtctcactctgtgtttttgagacagtgtctcaatctgttgcccagtggtgtgatcttggctcacttcaatctccaccttcggggttcaagtgattctcctgcctcagcctcctgagtagctgggattacaggtgcatgcaaccatgcccagctaatttttgtatttttagtagagacggggttttgccgtgttggccaggctggtctcaaactcctgacctcaggtgatctgcccacctcagcctcccaaagtgctgggattacaggcgtgagccactgtgcctggcccagattggaaattttaaagacgacaacaacttgtccttctccaattggaagatggagaagccctgggaaaaagggtggggtgtgtgtgaagagagggagagaagatagcggtagatttgaaggcaagaaagtctgtggtcaaacactttgtaccctagaattgcagctttcaaaatgtggtctccagcccagcatcagtatcacctggaaacttgtacgaaatgcagcttctcaggccatgccaagtcccattcaatcagaaactggactagggcctaggactccattttaacaagccctccagatgtttcttttgggcagtaaagtttgagttctgtttccctagaccaaggaatcggatttatcctgtagccactgcagacctagaagttgcttaggttgaaagcaccttggtcggttctgggtttagaaatgttacccagtgaccacactaatgtggtcaggatacgcacactcgtgtgcaggataatttgaagagtgcccacgcctgtcatctcagcacttttgagaggctgaggccagaggattgcttgaggtcaggagttcaataccagcctgggtgccatagccagacctcaactctcaaaaaaaaaatgagccaggcatggtggcacgtgg

SEQ ID NO: 100923 - DNA, 1117 bp, Homo sapiens
ccagctaatttttgtattttcagtggagacagggtttcattgtgttggccaggctggtctcaaactcctgacctcaagtgatctgcctgctttggcctcccaaagtgctgggattacaggcatgagccaccttgcccggccatcctttagtcttttcttggtgctaagatgcttttaggaaacaatggtgatagtagatggtggttttattttttaatgttttctttggaaaaataaaatgtcaacagtcgttcatctatcacccaattaaaaaccaattcaaaatgatgaaacaaaaactgatgtaatcctcaagtctgggaactactgggttgtggctgagtgggccgggcagggcatctggcagcatcagcaccaagatcatcattctgggaagtggatctgaactgccaagcacccacctgggtttcaagtgaactttggcgccgctggaggacatttctatcccctggaagaattcgagttggcaagtctcagccccatatccctttttcacctcaagataagatcaggtattttccactctccaatgattcatctgaattttctcctcagccttctaatttgtgatgaaacaggatgatggaactctggatttcttgtcagtttaatctgtttttttttttctttttttctgagtcattggaactggaaatagccaatcaaataattgcacaaacagctggctactgtggatgaccaggtggaatttgcgtggcagacggtctggagagggcttgtccctgggtcctcacagtcattgctccctccagcaagcaaggatgacacgttgacgtctctggtgaatcctggcagtgttcccttttgcactcttgggtggcattggacttgctggaacagggcgtctccttgcctgcttaagtgcggccaaagagattcccagcgcagcgttcccccaggccctctggcacacatggccaccgctcccacttgtgggttctcctgaaggcaatgagcaggctagggaggctgggaggttcacaagggaggggtggtgcaggcacaggatttaataccccaggatctccatagccaggtgaacgaccagcacaggctactgcccatggcttcttga

SEQ ID NO: 100924 - DNA, 1049 bp, Homo sapiens
tcatcttctactttagtgtattagtttaaaactcaacagttgacttcccattttattttacttcctttgccccccttctcttcatttctttttttttttttttttttgagacagagtctcgctctgttgcccaggctggagtgcagtggcatgatctgggctcactgcaagctccgcctcccgggttcacgccattctcctgcctcagcctcctgagtagctgggactacaggcacccgccaccgtgcctgcctaatgttttgtattttttagtagagatggggtttcaccgtggtcttgatctcctgacctcgtgatccgcccgccttggcctcccaaagtgctgggattacaggcgtgagccaccgcacccggcctcttcatttcttattatgcttaatttgctttagtggttggcaaaaggcctacctgtaggtgtgggagctgggggaaggtattccaaacaaaggattaaatgtcaggaatgtacaaggagctcctataaatcaccagtgaaaagacaactccagcagaaaaaaatgggcacagggaatggaaggcaatgtataggggcagacccaacactccaccaaaccactgaagagatattcaaagttagtcatcaggaaaacacaagctaaagcaacaattagacatcactctgcaccaatgagattagcaacacagtggaaaggtggcggatggagatgcggcggcctctgtgcgcagctggtacggcagtcctggagagccacctgggactactcatgtgtgttcctgccccacagcccagaaactctgcttctgggggtgtgttcccaacaaaattctcacccgggtccttaggagacacatgtaaggatgcttactggtgtgatggatggggtggggactaatgtccatccctgggaggtgtgcagggacaatgtattggatgacactgtggatcagtacagagcaggttcatagaacacagacctgagaaatagctgagtggaagaattaagaaactgctgtaatcccagcactttgggaggccgaggtgggca

SEQ ID NO: 100925 - DNA, 1005 bp, Homo sapiens
ggagaagctgctgtggagacagaggcagagactggagaggtgcagctgcaagccggaaatgccaaagactgcgggcggctgcaggagctcagagacaggcatgggacaggttctctctcggaccctccaggaggaaccaatccggccaacacctctattttggactgccctccttctcagaactgtgtgagaaggagaaatgtctgttgtttgacatcaccaagcttgtggccatttggtacggcagccctggggaactcatactggggggtaggatgccgtcctcaaagaaatgagggttgtcatgtggaagagggaccctactcactctgtgtccctggaggaatgtgagctttcctctgagcttctaggtccttaggaaaagggctccgtacagtcagggggttcagggatggagtgggctgcactggggaggtgtgagtaccccattactgatatgccaccagggagtttcaactggcatctgttgtgtagttgaacttgaccatttgtgaggccccctccagccctgagaatctatgcactggtgcaaagaaagaggtaaatgtttagagaggtgacagaggacctagagctaatgtccaggatgctgcccaggggccttagagatggtgacaatggttggtggggatatgggtctgttggagaggaggaagaagaggaagagagcctgactgccaggcaggcaggggtatctttggggctctgggagccccagcctctggattctgccctcagtgagctttgcaggacaccctaccataccccctccctgctttcttctgatagagtcgtttccatttggatattgccttgaacatgatgttcacaatccccaaagggaagaacatccctcaataagccacacaattctcccagccaagaacttgctgttccaaattcattaaaattgctgtgatattctcttcccatttatgtgccaagagccgttgtggacagaattcataataccatggagtggtg

SEQ ID NO: 100926 - DNA, 1042 bp, Homo sapiens
gttttctgggactcagaactttcagtgtcaaaactgggacagtcctgggcaaactggggcctgttggtcaccgtaggctgtctgtgattgtaacacagagtagttgcacattactcctgctgaagacaccaggtagttattgccatgttttggaataatctctatcccgtagcacatttccaggtgagtcacgttgaccacttcatccacatggtagataacgggttgactggctgattaaaacaccttcggatgtgagtaataggcttccaatgtattggagaatgactgtttggacttgaggtcacatacttttcacgttgagttccattcttttttttgtcacccaggctggggtgcagtagtatgatcatggttcactgaggctttgagctggtctcaagcaatcctcccacctcagcctcccaagtagctgggactactggtgcaagtcatggctcctggctcttgagttccactcttttaagcaatatggaccttaaggtagttgtacctgtggagtgccactttccatttacatttcattccagtaaggaaacttgggtgtctgctctttgcattttaaacatttaactgagctttacaattttcataaaagaaaaatgcatgatatcagttagggcagcaaacagatgattttaaaacatttcaacaattagttttttttaagaaaatgaacactagctttaaaaagcaggtatttgggtagaaaaaagtagtgagatattaaacaaatcttatgactgggggaaagcactacaatggaggtataaaccacagccatatgggtgtgataagtgcctgatatggtttggctctgtgtccccacccaactctcatgtcgaattgtaattcccaaagttgggggaggtacctggtgggaggtgattggatcatgggggcagatttcccccttgctgttcttgtgatagtgagttctcataagatctggttgtttaagagtgtgtagcacttcccctttcactctctttctcttgctcgccatggtaagacatgtttg

SEQ ID NO: 100927 - DNA, 1524 bp, Homo sapiens
tttgtttttttttttttgagacagggtctcactctgtcacccaggctggagtgtagtggcatgtgatcctggatcactgcaacctctgccttctgggctcaagcaatcctagcacctcagcctcccaagtagctgggaccacaggtgcacaccaccacacctgacttttttttttctttgtagaggcagagttttgccatgttgcccacggtgatcttgaactcttgggcttaagtgatctgcccgcctcgacctcccaaagtgctgggattataggcgtgagccacaatgcccggcctatatgcctatgcctcatttttgagtgtcactgtgtaccctagtcggtgttagacactgcaggtccccgaagaagtagaggtgactgtctgtaccttaggggcaggcacagttggggcgggacccagaattcatggaacacttaatcagcaattaaaatgtccacaggaccagtgactcactcatttaatacgtacttaacatttgtggttcggagacccggaaatgacaaatcaaggtcctacttggtttcagagtgagccccgagattgaatcagcaaggaaaccttttggtatacttgcctcctgattatgggcctgtcaacaagcctcagtgggagggcaggacgggtgatgtgtcctcactgcccagaaaattgcactttcctgcctcatttattgtatgtagagaagtgaactgaggagcccgacaggctgggcttgccacaggtggtttctaggaccttgggtgactcactcccttctctgagcctcaggtttctcatttgaagcatggggaggctcctcctgccttgaaaggcacatttctcattcattcattcgtttgtaaaagatggtatttcataagaatgtggagggatgactcaataaacatagccatctgggggaaaaaaagaattgggtgatttggtagattgtattactgttcagcaaatatttactttccccagcccccaccaccacggaaggaatatacttcctcaccctgttgatattgcacttggccacgtgacttgctttggccatgagaatatgtgtggaagtcacaggggccaggcccaaggcacaaagtgtttccattcatccctttgagcaactgtcctcggccatgagaaccacaagtcccagacagtggaggctccttcagcctggactccaaatgagaagatatatgagacagccacctactcaccccaaagcctggagcccagcccagctagccccagaaagccctgcagagccccagcttgacccacagacccctgggcaagaagtgaatgtttactgctgtaagcaccaggcttctggaagttgtcttttatgcatcattgtcacagcaaaatctgaccaatgtggatccctggctcactccttatattgattttagcttgggtcttgagcgaggattttctttttttttcttttttattattattatttttttcgatacagtgtctcactctgtcacccaggctggaatgcaat

SEQ ID NO: 100928 - DNA, 1795 bp, Homo sapiens
tagctgggcatagtggtgtgtgcctgcagtctcagctactagggaggctgaggtgaggaacacctgagaggctgaggcagcaatgagccaagatcgtgccactgcactccagcctgggtgacagagtgtcaccttgtcttaaaaaagagagagagaggaccctgatgaatgaagttcaggaccctcgttcctactttctcctgaagcctggttgcatggttcctgttctggcacctttaaattgattcccccttttgcttaattgcactctgatgggttggtcctaatctctacttgattcctgggcactcacaaggcttttgtcatccttttggcaccccctctggggctatcatgctgtggaacaggatgtcccacctgacgttttgacccttggatgctggcacattcttgactttgccaattctttgacagtgatgtcttctagcagctctccccgcccatgcctaagaatctgctgccctttcaagattccgatacccttggaaaagaaactgctgggtgctcaagaaaggagattcaggctggtgatctcaggaacaaccagaaaagctctttgcctcctagaatgaaacagctcagcaacagttgagatgtgtggaataaaaaggtcagaatcaggccgggcgcagtggctcacgcctgtaatcccagcactttgggaggccaaggcgggaggatcacctgaggtcgggagttcgagaccagcctgaccaacatggagaaacccctctctactaaaaccacaaaattagccaggcgtggtgctgcacgcctgtaatcccagctactagggaggctgaggcaggagaattgcttgaacctgggaggtggaggttgcagtgagccgagattgcgccattgcactccagcctgggcaacgagagggaaactccatctcaaaaaaaaaaaaaaaaaaggtcagtatcaataagaaagctggcaactcttgaattatgaaatgagaggcagtcaagcaacaaagatgtaggatcctggccatgtggcttggggcaagaaaagtagtccacttgcatctccattgtcttcctgccagaatacatcctaaatgaggacatttattcattcaaccagtattccctgaggaatgaaggcaaataggtactacttacctatttgaggttggtaggtcctatactaagccctagagatacagctatttataagacctaatcctcattttggaagagtgcctagtctgataatgagacagaggtattctccagctgtaacactaaggtataaggaataatagggaagaggaggccagccaccagttgctgtgggaactcttgagtaaaggagcacatccaactcaccagtggtggtgggggcaatattaggaaaggtttctagttggacactattcttgaaagatgaggggttgctagcccgtggaagagaagaaaagatattgcaagaagagaggcaatatatgcagagccatagctttggtcaggatggagcagagggtaaaagtgaagatataaccaatgtaggctgggcaggtgggagaggccctcccagttctggtggagatactgcaaggtgaattatgacagggttttaaacaggtatgagaacaatcacaggcagcagagggggaacagtttggtggaactgacactggaaataggcagattagctcggaggtccagggagaccattgtgtttcagaagcaaccttaatcatggaagatcatttggaatacctgaagatagaaagtatctgtacctgtgacggggacagaag

SEQ ID NO: 100929 - DNA, 5476 bp, Homo sapiens
cggctcgctaggccgcgagcgagggccgcgaagttacagttcgaggcagggatggctgccctctgtggccacccccgggtccccgtcctccccgggggcgcagggtgagccagaccccggccgcgcgcgctcgccgccggaggggttaaagtggctgttgtttgatattctctccttttctttttccagatcgaagcggatttccgattgaatggtgagtgtgccccctgcgccgactccggggccccccagccgccggccgcctcccccgcgccctgccggtgccgggcagaggacagacatggcgtcccagagactaagtcccggctcctcgctcaccggccccattgttcccatcgggccgcctcttgaccccctttccggggaccccagctcctccagatcccggccctcccaagaggggacaacggagaccccgtgtcgtccgccaccgggcctcgggcggtctttccgggccgggattcctcccgggaaagtcgccttgtcgacggtcgggacttagtctctgcgccattttctttttctctctcctctcctttctgtgcctgtgtctctttctctccctccctcggctctttccttgagctgcccagaatgagctttctgcagagcaaagccgtataaatcacatacttcaccagagagggaaggctgggggactgaattattattttttaaactttattttgggggttattccctttatgcttcatgtttgtttccttttctgcttccagaatgaaagatttccttaagcaactgttaattttttttttgataggctgtttatgataggaattatggctctaaaactaaagccacgctttgtggagttctttatatttccaggttgtttttcccaagttacgttctttgcaaaggtagcagtacctccctaaagaaagtttgcaagttctctgtgggtcacccaatgtaaatgttggatttttaaaaaattatgttagtcactggaacttttcattgtggtcgaggttcccaatgcagtgtttttctggaaacgcagtttagtgtacttgttggaaggaaagattgttgagcatctcttgtggacctggtgtgttggccttttcgtttgggttgtaaggaggaaaaaaagattttatttattgaagcaaagagtgtccagtacccacccctgcttcctgttcattctttttcacgagccactgtttttcaggaatcaagaactggctttttttttttttcccaattctttatgtttttgaacccttttcagccaaatcaaggcatttattcttactgtatttccacttcagttacccagggaagagtcctccaataaaaagctcatccttgcaggctttcgaacaaccctgttgaaggagaagttaccttctgtagtgtgctgggaattcccactgattttgatggtacataatcctgctcaattgagtttgggttccgggaacctctccaatgggagaagttgatgagtaggttttctaatgttgtaatcagcagtccatcatgttagcctgctctactgagagcaaccttatgttcagagtttgaagtggggcatccagcaggagatggtactcagccaggagagaatctggtttaaagtatggcatttcttgagcaccagatatgtgccaaccactgtgcttggtgctagagctgatcctgtaaccataacactcccttgctctcaattcagtctattgggggagacataattagttaattataaggtaactactggggcatatgtgtacccaaaatgctttgaagtataggggagttaattttgtctgagggtggggaaatttctcagaggaggtgacttctgagctgggggttgtggaagactgggcgcagagaattgtcaggggttggagtgtttcttaagtacgtttaaccaacctatcacgattttaaaagagggaggaggtgaggcctgcagtttagaaagccacagtatagacatgtttctttgggatacaggagcaaagaaaggatgtgcaggtgaggatgtaagaagtccttttgaccttgctagaggaaggtgggatctttaatatggaatgtgttcttttggctgtcaggctgggctgagtaggtaatgtaagtaatgaaacaaagtttagccctttcttgtgagaaagttaacttacatggttctcacctaagtcacgtgaatgattgtgagctggctaggttattgatctttactgacatttttatagaggctgaagtaatctgcgtatgttgacttttagaatgtgttggctcacatttaatagcaataatagctaatatttattgaatacttactgccaggcatgaatctcagctctttccatggatcatctaattaaatgtaatccttggaaggacccttgtgagttaggtcctgttatttctgttttgtagatgaggaaactgaggcttcagtgtatttactagcttgcccaagggctgtgagttggccactctaaatcccatgagctgagccactatgctagagtgatactatatgatactagcatgaaaaaataaaaagccacaaatctctattttcttacagagctgaaaaaggagagaaggaaggatttgataatttgtcatttgctttttatctaaacatgctttttgaagagaatctgccaccataaagttctgacattggtgtaattattctttgtgaatattgtctggaagatgtggtgttggtaactatgcttgctatctcaagtaatacattgttaaccagtgattgatttatgtaactatgaaaaaaactttaaaaaaagtagaaatcaatgtttaattatgcccagacatgtcattattgaactttgtattaagagattgtttaagcgtgattttaagagggcctaacccatcttacagattaactgtacaagttcatatattaaaatcaaacgtctctcattttgcctgccctcatcccctaagatataaaagattcccccccgtccccccactttggagctcattcttcgcaatatttaaaattgtagctctttgcatgtaatttagaacattctgacccatactcaactgctgggagactctgttatttatatttaaaatgttgacagtgagttaggaatttggagcagaaaccatatctaagtctaagtgaaaagacttcctaagtattggtagaactaactgtagtggggctgagtcattattacagtactgtacaggctgcgtagctatctgtagaattgataatggtaataccaggttaaagtgttagcgattcttctgctgtttcagaggtcttgaagtttttgcctgtctgctatggagatagggagttctcccccatttgacccccttagcaaagcacaatacttggctccatcagtctttagtctaagaagtgatatataggatcatggtttgacatcatcttgtgctgattctggttggcttaatggaatcaaattggatgaaggtaattaaatatgaattgtttctgatgctaatagatagttgtacttctgtctgttgggtatgggttgggatgggcggtagcatagctgattgcggtgggggaatttcagatagctgatgatgtggctatctgaaaattgccactacatttttaaaactgaaaagtgatggtaccgccaaatgaaatctgcagcatcctcagactcaatcaggaaatacttaagcattatgctccagggtggttttcttcccttacattgcaactggactccttgaggcacctttttagaattagtgagccgctaggatttttatactatgctttgacataaaagaaagttgcttgtcaatatgtgtttttttagtttaccagcatatcagatctcacaaacaaattttaggctcggattggatgtttctagtaaaaacaagaaaatccaggcatcactaaaagaatcagaaatacgttgtggcttgaaaggtgcaaactaaataatatagctagcagtaacggtcaccaactcctgcttttctttggttcagtagatagagtaaaatggaaaataggaaaccaaggtcagtccccaaatctcattttaaccaatagcagcaaaaaaaaaaaaaaaaaaaaggaattgagtctgactttttccccttgctgtcagcataaagatggggaattgagagagttggaaagacattcattagtttgttcagattattaaataacatgtcttaaagtttatattccaaaattgggctgtgaggtttttttgttttgcttgttttcagtgcatgtgtggggtggggaggtgcaaaaaaatgtttgccttctaatatacagctttgttgtatattaattatatagtaacagttgtccctgctgctaatggtatggaaaatgattctgttgtgctttctgaatacatatcattttagaagtttcagattatactaaaaccatgttatttcatattagttggacatgaatgcatatttatatgacacatcattatcaacttttgccttttgccatctttttagtgcaaagtaaaactgatattcttcaaatccaaagtcgtttcctcagaagtgtgttttgtgagggattgcatctttcccatgtgaaactgtgtcgaactccagtaaactgtgtttgcttgggaaaatgaattcaaatgtaattagtttgaatgaagctgtggaaatgtttgaaatgagtattttgacattggacctggaggtttaaaaaaaaaaaccctattgaaagaatagtaaaatatattggatgtggaggtgagagtcagttgagtgaattttctgtgttgtatggtttagattatctgactatcccttaattattttgaaaccattaactttggataataagggcatttaggcaaacagttgacacatggatttcttaaggtaaaaagtttagagacttccaaactagtccttaagaggcgaatgggtattgtgtttaaaggaagctttcagattgtgtttaaacttcgagtagtaatatttggaactgtcttttctccctatttccatgcctcatacatctcaagtttgagcagcagctttccatccccatggctccaggccaatagctgcagtagaaaatctaaaatagaggccagggttggaataattagcattttgccaacccccaccctccctgccacctgcctatctagatgtggacagtatgtgctgtgttgatagcatagggcctgggaagggtggagagggatgtaaatgagggcagggtggacaaagtttgattgggggttgcggggaagcttgtagaggaatgtctgttagatattgatggtattttggtggcgttatgagaaatggctgatagtttgctgaaatgatttaatagtaaatagatattgttgaacattttctgtgtgtataggaaagatcctagatatttttcacactgggagagaagtgatgttactggtat

SEQ ID NO: 100930 - DNA, 1880 bp, Homo sapiens
ctcacaatcattcacgtgacttaggtgagaaccatgtaagttaactttctcacaagaaagggctaaactttgtttcattacttacattacctactcagcccagcctgacagccaaaagaacacattccatattaaagatcccaccttcctctagcaaggtcaaaaggacttcttacatcctcacctgcacatcctttctttgctcctgtatcccaaagaaacatgtctatactgtggctttctaaactgcaggcctcacctcctccctcttttaaaatcgtgataggttggttaaacgtacttaagaaacactccaacccctgacaattctctgcgcccagtcttccacaacccccagctcagaagtcacctcctctgagaaatttccccaccctcagacaaaattaactcccctatacttcaaagcattttgggtacacatatgccccagtagttaccttataattaactaattatgtctcccccaatagactgaattgagagcaagggagtgttatggttacaggatcagctctagcaccaagcacagtggttggcacatatctggtgctcaagaaatgccatactttaaaccagattctctcctggctgagtaccatctcctgctggatgccccacttcaaactctgaacataaggttgctctcagtagagcaggctaacatgatggactgctgattacaacattagaaaacctactcatcaacttctcccattggagaggttcccggaacccaaactcaattgagcaggattatgtaccatcaaaatcagtgggaattcccagcacactacagaaggtaacttctccttcaacagggttgttcgaaagcctgcaaggatgagctttttattggaggactcttccctgggtaactgaagtggaaatacagtaagaataaatgccttgatttggctgaaaagggttcaaaaacataaagaattgggaaaaaaaaaaaaagccagttcttgattcctgaaaaacagtggctcgtgaaaaagaatgaacaggaagcaggggtgggtactggacactctttgcttcaataaataaaatctttttttcctccttacaacccaaacgaaaaggccaacacaccaggtccacaagagatgctcaacaatctttccttccaacaagtacactaaactgcgtttccagaaaaacactgcattgggaacctcgaccacaatgaaaagttccagtgactaacataattttttaaaaatccaacatttacattgggtgacccacagagaacttgcaaactttctttagggaggtactgctacctttgcaaagaacgtaacttgggaaaaacaacctggaaatataaagaactccacaaagcgtggctttagttttagagccataattcctatcataaacagcctatcaaaaaaaaaattaacagttgcttaaggaaatctttcattctggaagcagaaaaggaaacaaacatgaagcataaagggaataacccccaaaataaagtttaaaaaataataattcagtcccccagccttccctctctggtgaagtatgtgatttatacggctttgctctgcagaaagctcattctgggcagctcaaggaaagagccgagggagggagagaaagagacacaggcacagaaaggagaggagagagaaaaagaaaatggcgcagagactaagtcccgaccgtcgacaaggcgactttcccgggaggaatcccggcccggaaagaccgcccgaggcccggtggcggacgacacggggtctccgttgtcccctcttgggagggccgggatctggaggagctggggtccccggaaagggggtcaagaggcggcccgatgggaacaatggggccggtga

SEQ ID NO: 100931 - DNA, 1020 bp, Homo sapiens
cagcacaagatgatgtcaaaccatgatcctatatatcacttcttagactaaagactgatggagccaagtattgtgctttgctaagggggtcaaatgggggagaactccctatctccatagcagacaggcaaaaacttcaagacctctgaaacagcagaagaatcgctaacactttaacctggtattaccattatcaattctacagatagctacgcagcctgtacagtactgtaataatgactcagccccactacagttagttctaccaatacttaggaagtcttttcacttagacttagatatggtttctgctccaaattcctaactcactgtcaacattttaaatataaataacagagtctcccagcagttgagtatgggtcagaatgttctaaattacatgcaaagagctacaattttaaatattgcgaagaatgagctccaaagtggggggacgggggggaatcttttatatcttaggggatgagggcaggcaaaatgagagacgtttgattttaatatatgaacttgtacagttaatctgtaagatgggttaggccctcttaaaatcacgcttaaacaatctcttaatacaaagttcaataatgacatgtctgggcataattaaacattgatttctactttttttaaagtttttttcatagttacataaatcaatcactggttaacaatgtattacttgagatagcaagcatagttaccaacaccacatcttccagacaatattcacaaagaataattacaccaatgtcagaactttatggtggcagattctcttcaaaaagcatgtttagataaaaagcaaatgacaaattatcaaatccttccttctctcctttttcagctctgtaagaaaatagagatttgtggctttttattttttcatgctagtatcatatagtatcactctagcatagtggctcagctcatgggatttagagtggccaactcacagcccttgggcaagctagtaaatacactgaagcctcagtttcctca

SEQ ID NO: 100932 - DNA, 1157 bp, Homo sapiens
gcttaagacaacaaatgaaaaatgaatacctaccaaaaagaaattaagggtcaggcacagtggctcatgcccagcactttgagaggctgaggtgggcaggctgcttgagcccaggggttcaagaccagcctgggcaacatggcgagaaacctcgtctctacaaaaaatgcaaaaattagcccggcgtggtgacatgcacctgtagttccagctacttgggagggtgaggtaggaggatcgcttgagcccaggaggcagaggttgcagtgagctgcaatcacactactgcgctccagcccgggcaacaaacagaaaccctgtctgccccccaccccgcccaaaaaaaaagtaaaggaaagaagttaaaattaaaagttgcctaccttccttggaatttctttcttactaaacgttaagagacataaatgacacacataaagacagttaatacaaacttcgatacagatagccaaagttgatattacgatctatatactccagagatatgcatgagataccagtaacatcacttctctcccagtgtgaaaaatatctaggatctttcctatacacacagaaaatgttcaacaatatctatttactattaaatcatttcagcaaactatcagccatttctcataacgccaccaaaataccatcaatatctaacagacattcctctacaagcttccccgcaacccccaatcaaactttgtccaccctgccctcatttacatccctctccacccttcccaggccctatgctatcaacacagcacatactgtccacatctagataggcaggtggcagggagggtgggggttggcaaaatgctaattattccaaccctggcctctattttagattttctactgcagctattggcctggagccatggggatggaaagctgctgctcaaacttgagatgtatgaggcatggaaatagggagaaaagacagttccaaatattactactcgaagtttaaacacaatctgaaagcttcctttaaacacaatacccattcgcctcttaaggactagtttggaagtctctaaactttttaccttaagaaatccatgtgtcaactgtttgcctaaatgcccttattatccaaagttaatggtttcaaaataattaagggatagtcagataat

SEQ ID NO: 100933 - DNA, 1030 bp, Homo sapiens
acgaaagaaaaagagaccaaagctttgaagacttttaaatccaaccctattgtgggcacattccttgtatactgagggcaatggagctacagagcattaacaaatactcatcttcccagatttttttccccatattttatgagctatatttttcctgatatgtttatctttgaagactctttaaaattaggccctattccataatttctatacaacaaaattatgtcctcctgcctacttttaattgaatttaagtctgcgcctgttgtgatgcttctgtgataatccttttgctgaatggcgtaagatctctactaagatccatttggcttaaacctaatgaacactagtgaacacatccttaaatgacttttgtttatttcctttaagtaacacttccaaaaaaacaaattcaaggcaattcaatattcagcattagctagacttatgagccattactgaaatttctactgactttatcaaattttttcatggaatctcccaaatgcctatactcacgcataactgttaacacggcatttggtactaaattctcacacataagctttattatattatttaaggtattcttattcccaagaattactatttcaaagaaaaccaagttggtcactttaagcaactatttgaataaatgaaaaactgaagtaattctcaggtgctttgagagttctctgtttaatttaaaaacgttttgggggagaagtaaaatagtggcctttgaaaaaatatgctgacacaagacatattgaattttgtggttttaaaaaattaacaaataatgaacttggcattttattaaatgcatcgaaaagggtcaagttatttttaatagaaaatccataattctattaaatggttgagaaattagtcacatcaatagacttctttcatttctgagcccatcttctgtactgctacaagttcctttggcaatgaccactttgctgtaaacattcttagaaaagtaggaattaggcttggcgcggtggctcatgcatgtaatccc

SEQ ID NO: 100934 - DNA, 1089 bp, Homo sapiens
tagaagacaacactggaatttttttacttatctctgaaagtaattaactagtacaagacccttaagatgggcaattgcatttctttttttcttttttttgagaaggagttttgctcttgttgccctgctggagtgcaatggcatgatcttggctcactgcaacctccgcctccagggttcaagcgattctcctgcctcagcctcccgagtagctgggattacaggtgtctgccaccacgcctggctaattttgtatttttagtagagatggggtttctccatgttggtcaggctggtctcaaactcccgacctcaggtgatccgcctgcctcggcctcccaaagtgctgggattacaggcgtgagccaccacgcccggctgggcacttgcatttcaaatactgctctataacaagtcacattttcacaaggacatccctgcactacaaatgcatcttctttcccaagaggcagaacttaaaagggaaaaaggacttgtctaacctgaaaatgtatcttctcaggccagctcaattagggcaggcccattcctgtaggcttgtcctcctttgcttccattaaggaacgcttaatgcctgggaagagtgagagtgactacaaacctctggcctacgtgcggatccacagctcagcctaaactgcctttgtttccaatggtcaggggcctccaaacacactaagaccatactttgtctggccataaagactttaagtgtgctgacacattgtttcatgtatcctattactaattcaaccaagggaccttctttgtctagacaattctcattgacagggcttgaaatgcgcaggccattctctgggccactagctgtagaaagaataagactgaacacacctctcctactgaagtggcatatattcagtagaaatacaagaaacctttctggtgttaatcatataactgctccttaaatttttttatactccagaagatcctcccccgattatgaattactccaacttcacaactgtaagaaagcacaagtaatgaactccatacatggttccttgtgaaagaacaaggaatactgcttaagaggttgaatta

SEQ ID NO: 100935 - DNA, 1103 bp, Homo sapiens
cctggataatttcatccagtagaactttttgtcatgatggaaatgtcctatatttgtgctgtccaatatggtagctattagccatatgaggtgtgtctgtgtgtgtgtgagtgagagagagagagagagacaagagtcttgctctgtcattcaggctggagtgcagtggcgcgatctcagcttactgcagcctctgcctcccaggctcaggtgattcgaccctcagcctcccgatagctaggattacaggcgtgggccaccacgctcagccagtttttttgtatttagtagagacggggttttgccatgttgaccaggtttgtgtcaaactcctggcctctagtgattcacctgcctcagcctcccaaagtgctgggattacaagcatgagccactgcacctggcctatatgaggttttgagcccccttgaaatatgtggtaagtgggaccaaagaacttaattattttattttattttattttaatttaaatataaactagccaatagtggctaccatattggacagctctagataaaatttaggtaagacccaagagattgtggtttagattctgcttggaatatgagtgattggggctcttggaatttaaaaatccaaagacacgtgtgaatttgatgttatgagtttgaataacagccttccttcagtatgtctacattgttttatcctgactgacattgtaagtcctaagaggacttacaactggtaagtaaagttgtgtttaccaaagcagttggaagttcaggcagttgtacgttttatttgaccccttagagctaaacaggtgaaaatttcaggtcctttggatgaagtaagttctcattttatctcagcaaccctatgaggtaggttatgtctgttgcgtagttgacaaaacagatgaacttatatttatgtacacctttatggattagtagcctttaaaatggttagttttatcccacaacttcatttgaaattgtaagtttctagcatgttgcctataacaagaaggtaatttatttctatttgttaaattgttatcagtaataagtcaatatcctactataagtggtagagaatcaaagattgtagactac

SEQ ID NO: 100936 - DNA, 1014 bp, Homo sapiens
cacaaaaactcaagttactcataaattgactaccctaagataactgcttttaatattttgatgtctgtattccagtcttcttcatatgtatttatgcgtttgttgaattatacacagagtagttttttttaatgtgatgtcctttccatactctagggctgtattagcagatcttgatgttctgaagcttgtttattgcatctggcctgcaaacaaaattaattgacacacatgctttattccagattgtggtgctattacatgtattgtcattattatgattttagccataagtgtttggtttgaggcagaagtagtgggatattgctgtcaagtaaactggggccactaaccttgtgggaatcaacttagcattttaaaattatagactcgaggtttttagaagaagctgaagggttctgtatgctgcatggaagattgagttcaaatcctacttctgacaccatatgatattatttttcccatctctgtaggatgggaatttcttacagttagtactacggtcatgcagatttctattttcccagggcctgacacagaatagatgctcagcagattatgacacatgtggcttcttttgctgtgagccagtcatgggatgaagacacattgcctatgcattattaattgattgctataaaacatgttgcctcaaaatataatagcttaaaacaacagacacttattttctcatgtagttcctgtgagtcaggaatccagacatagtttatctgggtggctttggcttaccatctgtagattgcagtcagtatgtcagccagggctgcagtcatttgaaaacttaatttaggctagaaggtccacttccaggatggctcattcacatggctaattggcaggaagcttaagtttcttactacatgggcctttccagagggcttctgagtgagtacatgacagtgtgtcactggcctcccccagagcaaggagagagcaggaaggaagatctaataccttttatggcctagtgtc

SEQ ID NO: 100937 - DNA, 1036 bp, Homo sapiens
aaattctgaacctatgaaaacttcatctctgtctttctcttgtctggcctgtaacatgacaagaacagctcacaccaaagttagaagataatttcatcagtcatcacttatctcttgacactgcttctttctgttagcgttaatattttgctcctcagatcctttttctttttttttggagtcagggtctcattgactgctaagcttgggcgcggtggtgtgattatagctcactgcagcctccctgggcccaaggggtcctcccacctcagcctcttgaatagctgggacaataggcatgcaccaccatgcttggttaattaacttttttgtttttaatagagatggcggtcttgctatgttgcccagggtggtctggaacttctgggctcccacattggcatcccatagtgttggggttacaggcatgagccaccatggccggccctcttttaaaaaatacataaataatctcaaaaggaatactcttctagatgccaaggaattacgtagcttgtaggatctcacgagctacctttcttaaagggttacattcttatccattgtttatctttaatagtagatctcttgtataaacagaatattattaaaagcaatttgggaggggggcttgattttagaaaataagagaatcgtgtgaaatgaaattcctcctagttttcgactctgtgcatctcttgccaattttaaacctggcattcacactggagtgacaaatttgtggaaagcaagggaagacagaaaactgctgtaaaatagcaagggaagtacttttccagccatattggcagtgctattctgtactgtcagtgtgagaaacatctgagaataaggatgcttttggcttctgctttccttttagttccaaatcctacctgaattgtaattgagagaatgtaggattttaggaatatgcacttgaattacgcatctagttctcagattaggggagatttttctgaaattaataaaatttaaaagatatgtttgctgctttccttgtgagtggtttgcc

SEQ ID NO: 100938 - DNA, 1050 bp, Homo sapiens
tttgatacttctataatataaaacgccggagtccttgtgattttgtttagagatatataatcggcattgtagtgtgtaatgatgatggacattaaggaacccttgtttcttagtgccttttggaaactggctcatttcagaagctgcgctcttttcccagaggcaacttttgaagttacttaaatatttaatttaacaaatatcatttaagatttaactgtctactatccttgaaagggtcatgagtttccctcctaaaccaagactttgaagctctctgtgctgtctcacaggaatccccatgatccaacttcatgtgacctgcagaggtctgctgccttgaggagtagacaggtagctgggctgttagtggctaagtccttttctcagaatatgtggaggctccttctacctttaacagtgcttttttgctttgtttgggaagtaacagagtagtcaagtgcatgaccctggagccagactgcctgagtttaaatcctgtttctctctttagaggtagttccttgggtgagttacttaacttgtctgtgcttcagtttccacatctgtgaaatgaagataccagtagttacctgagttttgttaccgatatcaaatgtgcttagatgagtgcttggcactgggtgctactcaagtatctgttaaatacttttatgggggatagaggacagatttaaatggtttcccatagccaacattctagctttccagaatatcagtattttgttgtggtagcggtggtcttttttcctaaagaaacagtgcttcgccagaagggagacattgttccctactggctccctacttccaccgtttctcccactcttctatataagtgccttagagaaactctggtcacccttttctgtggtctgcttagctccaacaagaatcatagaccaaaggttttgctgtcatcactttaaaaatagtgtaagttatttttttctttcctttttttaaatttttttttttttgagatggagcctcagtctatcgccaggctggagtgcagtggcgtgatctcgg

SEQ ID NO: 100939 - DNA, 2213 bp, Homo sapiens
gtttgggggttatggatgccaggttgggctccaggcactctgctctccatttgtggaggcagggacggtaacagcacctgacaagtagggatgatcacattgtattcagaagcctggtggagctctataaacccaaatttctaacagtctccaatgtaatgccctgtaatagaagctgtccttaaccctcaatcatctgtattcagctagtataaaaatgcaaatctgctcttatgcctaaacagttaggagtagaggagacttggcttcctttggaaagtcaggatgatagcttcatcccattctggtttttgtgattaattgtgacctacaaaggggtttactactctagcaggaactttgaatttcctatatacatctctttctggttagcaggcagaggaaatatcgttgacttttggcttcctggcaaatgtctcatttgccttgtcatttgttgattccttttccctgatctctgtttggtgtgataatgtacagcaaagctgaaaaccgcagggctacatgtacacttgtaggtacctatgttgtgattgccaaaaggctcagaaagccagttttctagtgaaaatggctaacattctaagaaatgctttcactgagaaagagaacgggtcaggggaaggtggaacttaaaggaagatggagtgttcctgaattcagattcctgaattagccatttatagtttcatgggaagacaatgaaaaaaaaaaaaaagaaagaaagaaaagaaaagaaaagaaacaagcaaccccaaaggtttttatcctttcaggtatccaaacatctttattctagaaagtttctcctcgatggtaaaataaagctaggaccttatagcaagtctcagactcaccatggctgtttcttaacaccagtataccttaagcagtaggtatcaatttagtggaaatataagggtattgatatgtagtggaggctgctctgaacttggaggtggaaatactaagtttaaatcccagcttttcttttaacattgcaactttgagaagtcttttaaccattgtctcctgtttgtatcagcatgaggggatagataataaaacctgcctcacaggagtgttgtgagaattgagtgaaataatgtatgtgaaaataccaagtacaatgcttgcttagaaagtagaattttgttttgccatcccctcccccactatagttggcagggcagggggaggcagtatattcatccatcaatattatagatgcaattgttcccagatgttttgcttttaggcaaaaccttgtatagatgactgtataccctcttacagttgatgcttaataaaacaaaactaccatggttttataatggaatggtaagctcaaacattttgctggtagtataaaaaccaagtgcctgtgattacctatacattaactcctgaagaatcaattataatctcagcaaccttgctctttgaccattcattctaaagcttggcgaagttaatgagaacagataataggagtgctaatgcaattggaagacttttttttttttaaacaaagtaaggaagggatacatttttaaataaaacattgcattttggtaaaaaacacagattatgagaacacattgagttagaggaacatcatattgattccaagaacaaaaagcatggtggagaaattttgtaaccatgcaaatccagtgtgctctgttctcatgagttaaaaagaattttcctcctatagaaacttgttatttaaatgtgtgtcacatgtaaataacagtctaatgagagcaatatagagggagaaatatgtaagcaagggaaagtgggcattgttttgtttttttttttctccatctatttcaatacttgggtctttcctaacctatagtgtgtcctgtttctccctggctagatttcttaaagtttctgcctattcatcactcaagtacctatctcaagttgtagctacttttgtgtgcagggtgtaatagcagatgttctcctgatctagattttgttgctctgcctaactgcatgccatcatttgtttctccctttgtgatcttctactgtagtcaagtgtccctttagaacaaacttcatgggatggacatagcctaatgagctcattgctgatgaagtctttttttcctgtgcattggttagtgcagtaagcaaggctccttaactgcctgtcccagtgtactgaa

SEQ ID NO: 100940 - DNA, 1004 bp, Homo sapiens
aatttaataagtggtggctgtggcactggtagttttaagatctctgtgaatccccacagtgtcttaagttaaccacaaccagcagtgattctgctctcagccttcctgggtgtctgtctacccacagctaggctgccaacagatgttcttccaaaaactatgtcatcttcatatatacagaggcagtgttaacaagaaaccacattttggcttataaccctgaagaaatttccctaagaattttttgctgatcattcactttaggtaaccattcctatctaaagttctttaatgggtacccctttgacatataattgacacccaaactctttactgcagctcctcccaatctggcccctgcatcttgtgtctctcttcatcttgtgcctcttctctagcttacttgtaccagtcacactagcctcctttgtttcttttccacaccagattctttcaaacttccgagctttacgtagcacctgctgttcctctatctggaacacacatgctcccttctttatccttttggcctataaccttcctcaaaaaactcagttccgtttaaatgctttcctaaatgttcttgttgatgcttgtggtagattgaaaatagaatcatatgcttcctccttttgacacttttgagttcttgtaccaaaaaattgttagcaggtaattcaagaaaagatgtcagaaattcacaggggtcttaatgatgccctcccctaagacaagaaggggttgggtgagttcttagctcttatgctacatttgaggttagccactgtcatgggcaaaatgggatcacaaatgtaaagtggacagtttgaagtaccagcagtaaagagaatgatagtgaaggggcagggagtcttaagaggataatctatcataatagaatgatgttaataatcacaattaaatgtaataggtgcttaccatgtgccaggcactcttctatatatgtatcatttcatttaatccttacaacctgaataggttgt

SEQ ID NO: 100941 - DNA, 1056 bp, Homo sapiens
gattcttcataaagaattacctggcgagtttattgcaggtgttaggtgtgactttaaatggagttttcaatctcttagcaaaggtaaaatgctgtgatgagtcaggactataatgttttaaggaattagtgttgcaagaccaagactcataaatatatggtcaatgatagtggtaagaaatttatggaatatggattattgacattttgctcaaaccagaaaaacttcccttaatttcaaggattagcattcagaagctacagcatctgacctttatttctaaatttaaaaaaattaaatatgagttttatagcatactgtgaagtgcttgttaactgcaagggaacttgatatcaaacagcacatggagtttactttcctgtctttatatttctagcacttttccacctttcccccttcaagcaaattttattattaaattggtacttgattattcaagtcaagctgccaaagggaagccatttcgatgtctaagtacatgtttttgtttgtttatttgtttttaaattgcggggggcggatatatgcactcatggggaggctaaaaggacagaactgtttgcttttatttgtataataatagctgtcagcccagtcacatgagcttactgaaacagatattctgtctttctgtttaaactgaagtttagtgttgtgatttgctgaatctcttaatttgcttaaatggtaaagaagttgctgtgggtcttcaggatacacatgttgaaataggagtcgtaaaaacagtttggagtcttgatttaaaaacactgtagggccgggcgtggtggctcacgcctgtaatcccagcactttggaaggccgaagcgggcagatcacgaggtcagtagatcgagaccatcctggctaacatggtgaaaccctgtctctgctaaaaatacaaaaacaaaattagctgggcgtggtggcgggcacctgtcgtccccaggtactcaggaggctgaggcgcgagaatggtgtgaaccctggaggtggagcttgcagtgagcggagatcacgcgactgcactccagc

SEQ ID NO: 100942 - DNA, 1078 bp, Homo sapiens
gtctcagtctcctgagtagctgggattacaggcgtatgcccccatgcctggataatttttgtatttttagtagagacgggggggtctcgccatgttggccaggctggtctcgaactcttgtcctcaagtgatccgcccaccccagcctcccaaagtgcggagattacaggtgtgaggtactctgcccagctgcaattcatttattctttttgttacctgtgttttacgtgtcatatccaataaatcactgtcaaatccaatattgtgaagcttttcccctatgttgtcttctaagagttttatatttttgctcttatatttaggtctttgatccattttgaattaatttttgtgtataatgtaaagacccagtttgattattttgccaacactattgttgaaaaaactgttctttctccattgaatggtcttaagcatcttgttgtaaatcatttgaccatatatgttgactttggttttatagtaataccattgttacaatatggtttgatacatgtaatttttatttgatgtttctgaactttgtttaaaatattggacttgttccatggctgaatgattgataataaaataataaataaaatattgtacttggaaagtaaatatgagggtagtaagttagttatctattcgagtaaaagaaacttgaggcatagccagttgcaatttgtgagcctgagttggatcctggtctataaaataaatttagataaaatagggaagtttttaatatggactgggaattagaattatactaggagattattttgttagatgtgataatagttttgtggttatgtggaagaatattatttttatagagatacttgctgaaatatttagtggtgaagtatcaaatctgcaaccaactttgaaaatggttcggccaaaataggaaatgtagcaaattattaaccttttttttttttttttttttttgagatggagtctcactctgttgcccaggctggagtgcagtggcacaatcttggctcactgcaacctctgcctcctgggttcaagcaattctcgtgcctcagcctcctgagcagctggg

SEQ ID NO: 100943 - DNA, 1009 bp, Homo sapiens
gtcacagttgcttctccctctattaggacagaattcagtaaaacagcccaaaatctcattttttttaaatttatttttatatttatttatttgagacagagtcacactctgtcacccaggctggagtgcagtggcacaatcttggctcactgcagcctccacctccaaggttcaaacgattctcatgcctcagcctcccaagtagctgaaattaacaggcacgtgccaccacacctaagttttgtatttttaatagagacagggttttaccatgttggtcaagctggtctggaactcctgacctgaagtgatccttgcaccgcctcctaaagtgctgggattacagatgtgaaccaccatgctcagccacatttttttttaaatggtgttaacagtttacatttttttcttgccattttatttcatttattttattcctaatgacttaatgttttcctttatattggaaacatgttacagttttctaaagaagttcagggaatcttttaatacacagcctatcttccccgaagtgtctttcttccaaagcagaagcttgggggttgatgggggcagctgcgccacctgttggccttttaagttaatggcgtccaaagtgggttctttctattataactgtttcaatattgtgctacagttctctacacccctgcaaagtcagattgcatatcattatgagataagatgtcttctgagttttgaaataaatggatttctggttaaattttagttttctataaagaatgtgggcagccttggtgaattattaatacctgtgtaatagtaaggtggtggaattatagttaacctcattttaagtatagccaaatgctcttagtatagcatggattggttcgaggtgatgttgtaaagttggatttttaagaaagaatggaaattggcactaagagtactgtcaaaagcatttgtttgaaaagtggattaaattcccaagtacttttctttcattgctttattaactaaatca

SEQ ID NO: 100944 - DNA, 2707 bp, Homo sapiens
tttttgtttatttgagacagtctcagtctgttgcccaggctgaagtgcagtggcgtgatcttggctcactgcaacccctgcctcctgggttcaagcgattctcatgcctcagcctcctgagtagctggagttacaggctcccaccaccacgcccggctaattttttatatttttagtagagatgggttttcgccatgttggccaggctgatctggaactcctgacctcaagtgatctgcctgcctcagcctcccaaagtgctgggattacaggcatgagccactgctcccagcccctttagacagcttttacataaacaattggatacaccaggaaccccagtcatcccttgtgctgtggatgcatcctggttccctgaaagaggcagcatcatggtacccatgttccagagcagtgtgtcgcaaactctagtgtgcatccaagtcttgttaaaaatgcaatttctgtataggattcagtaggtctaggagggggcctgggattctgcatttctaaactcccacatgatgccaatgctgctggtctgtgaaccacttgttgaatagcaaagttctagaagaaggtcttattaggcttttcatatgggaaatctgggcttgcctagtatggatatatatttttttattcatattccacccacctaactttgaagaagaaagatgcctatttcttttccccacaattcctttcttccactccctgccctatcccttcctccccttcttgaacagaggctgcttagcttagcagtggcaggagtccctctgaggatttgatttttaaaaaccattgaagaggtgtaaaggaccctgcttgctgaaaggaaaaggaagagtgactgggcctcccccaggtcatccctgtcctgagcaggcacctgggaacaattaactggcatagtctccagagaatgacccaggtaaatatatgctaaagagaaggagaatttgtacaagtagatataaatcagtatgttgtctttgttgttgttgctactatgtgtcaccagacctttatataccatgagaaggcaaaccattattaaagagaattcgctagccctgggtatttatgcttagaacatgaatactatacctcactttttggaaccacttttttctctaggtaaagtcatgaagctgagccccaaagcagaggaagtagctacgttctttgcaaaaatgctcgaccatgaatatactaccaaggaaatatttaggaaaaatttctttaaagactggagaaaggtactgtagcccatgtgttaatatcctagtaccttgcaaaacaatcaagtactaagtaataaattatcattttgcaaaacatttcctgatgtaaaatttgagttgtatggattttgttgtatttaaacttgcgtattttttgtcttcatttactatattatgtagggtttctgtccaacaagagtacttgtatatctttgctattggctctcatgtgatggcaggtaggtgggggttatcagattaggccaaacagaaaacctcaactccagttgcgcacaggaaagtttgtcgctgcaggactgccccgtgtctgctgttgcaaagagaaatgttaatctgatgtccctctcgctgttaattcttgctcatttattttaggtactttctactcttgaaaccacatatactatatttgcctaggtgattttttaaaatctcattattctcaatttggataatgtggacagaggcagcagtaaagtttacttcctgaactagctcagaaaaagcagacttaataaatgaatagaataggggtaatgtttccaagagagaatcagtatgggatttcaaacttgtattcataatgcctgggggctgtgtgccacggagtctaagaaaccacataagaattcatttttttccatgataagtcattttaaaacattttaatattagtaagtacatattttataataaagtaatacaactgtatttttttgttttttcaaaattcattaattgagattggctacttccagaaacctttgactgaaaaaatggtgcttgggtgtatttgcaaagaaacccaaggacttattagtgtattttcgttgtttttctttcatctccccattttcttttgactaggaaatgactaatgaagagaagaatattatcaccaacctaagcaaatgtgattttacccagatgagccagtatttcaaagcccagacggaagctcggaaacagatgagcaaggaagagaaactggtactacagaatttattaaacctctggagaattctggaattgtgattggttcatttaactttcttcttggttcttatgacacaacattaacatcagtaatttcacatcattctatgctaaagacttagagttctcaaagtctaaattttcttaaaggttttagttagactgaaaattgtgaacaagtactttgctcagtagctctgtacaggaatcttggtgcttcagtgacctaaaaaccagtcagtaactccagccaataatatagtaattaaggatgggcagacctgtcccacagtggctactggatattaaggatttaagacagatgaaatcatattggccatgtacctccctgctctttgatctattttactctggaatcttgtgatgctcatccatctccatcttccagccttggccatcctcattactgaaggatc

SEQ ID NO: 100945 - DNA, 1023 bp, Homo sapiens
cgtttttaagctgtttaactgctgtttaattaaatggcttgagctattcttttatgaggctctatcagagactcttctccatttcctgttttgatagtactcagtaaaacagtatgaatttttaaagtacatttaaaaacacccaaataacatttacaaacatatatcctttaagacacaagaatcagttttgaatctagttgaaatcaatccttataggcagatctttttggggaattttatgatatttaagtttgagaaaaccactagaggttttcctttatttgaatttattttttagtgatttttcagactttcctctaccttgacttagtctcccacaagagataaaatgcattagtagagaacagcaatctgaatctattttgagtactttcttgctgtcttccagaaaatcaaagaggagaatgaaaaattactgaaagaatatggattctgtattatggataaccacaaagagaggattgctaacttcaagatagagcctcctggacttttccgtggccgcggcaaccaccccaagatgggcatgctgaagagacgaatcatgcccgaggatataatcatcaactgtagcaagtgagctcgcacttcatcctatgggccaaaaagggggtggagggcgtcctttattgtacttgggaatatttcccaggttacacaggactgtttgggaagggagatacttaagagcaggacagtatttcatgcgtaggtctccagatgtttttgaggtacagttgtctcccctcatccacaggggatatgttccaagacccccagtggatgcctgcaacttcgacccaattgctgtcacttggaacacatttctgttgatgtcttccacccccaaatttaatgtcttttccatgtttattaagtacttatcacatagagtggctataacttttgcagtctgaggcacaacagcaaaactagcacgactttctttttccttcttcacaatttcacagatggaaggttaattcttaccttagatct

SEQ ID NO: 100946 - DNA, 1744 bp, Homo sapiens
gcttctgtatggcatatccaaattgccaacatcaccactttcacactttggggcctttattaagtaaaagaaggattacttgaacacaagcaatgtaaaaccattaaagtcaacctgataaataaggcagctactaggttacccatgggcaagtgacatatacagcatggtatgttgtatatatggttcacgcatcccaggtgggactacaagagatttcatcatgctcctcagaatgatgtgcaatttaaaacttacaaaatgtttatttctggaattttgtattgaatattttcggatgacagttggctgagggtaagtaaaaccatgcataaggtgggactactgtattgactgttaagaaggaaacttggaaaattatgctcagcagataggtccacttggggtcatgaaaggtgaaattattcctcacatcttatttcactatcctcgtgctctgttatttccagagatgccaaggttccttctcctcctccaggacataagtggaaagaagtccggcatgataacaaggttacttggctggtttcctggacagagaacatccaaggttccattaaatacatcatgcttaaccctagttcacgaatcaaggtaaggggatagttgagagctgcactggttcatggtgctgataacctttttttgttgaaatgtaacgttctcgtcctctagaatcactttgacaaattaaaaatcctccccattgaaagaaggcaagtactttcatagttagcattatggtgatcttcctacagtgcctccatttttttggtcacattgtaatcttatttattaattcacaaatatttactgaaatcccaaatgtgccccacacagtatacatttgatgctaggaattatgttggtaaacaagatagacgtaggccctgccttcatattgcttaacgtccagtggtcagaatgtgttgaagtatggtgattgtatattggcctctgcagatgtcttctacttcctcacctctcttggttatgagaagggaatgtagtttctgtatatcctgaaacaagttgtaaaatctaatgtcttacatacttctggcttcctgcagtctcatctgggtaggttcaccagggccaaatgaaatgtgtgtgaaagcacatcataaaactgtgttacatacctatgcactgttatttattgatagtgttattgcaaggagataactgccttgggggaaatcagtttttgtttgccagatagctatgtatatctagctttggagagtcccacgaacttcttccctccaacatactatgaaatataaacctaacagagacaaaaacacagtcaaggaattagttctatgtagactgttaactgttttatgtgcaggagacctgggactaaagaccttcttgatcctcgttcataggttataacatctgttaaaatgtgaaagccacagctgaaaaggctatgtgaataggcaagactaaactgtacattttctggcttgtagccctgtgttcttctgtatatcactacttttctaatgaaaaatacctgtttatatattttctccaattataaaatatacttttctggctgggtgtggtggctcaagcctgtaatcccagcactttgggaggccgagatgggcggatcacctgaggtcaggagttcgagaccagcctggacaacatggcgaaaccctgtctctactaaaaatacaaaaattagccaggcgtggtagtgggt

SEQ ID NO: 100947 - DNA, 1710 bp, Homo sapiens
ggcatgtgtgggcagaaatcactaccactttcctttgttgcgggtggggaaattaagagcagagattcttggattcttaaattccttctctatgtttatgtcatctagtctgttttatgctgttttatgtaattccctgcttctggatttcttgaatttttttccccttctcacttgtcataattggctcttgcttgtgagtctattttcattcagcttggtagcagaagtcttcttcactattgtttagattcagttttcacatggttttagtaacccttcattgggtttagaatcaacttttaacccttccaccaaaagctcttatttttttaaaggcttcccagaaacatagtttctctcaatctcatcaagaaatgcttttaaatgcagaagttagaaaatggtgaataattatggctgttcctggaagtcattgtgtccttagtaattacatgttgtagtctttggttctgcttctttgacagctccaccacactgtaatttaatggaattcacttagatttaatggaattcagtcctggtagaaaactgctattgggtcacagagttggcagcaaggctgtgaaattgatgtgggaatgggggtgattatgtgctttgtgttgacagaagttagtttttgggacatcccatgtgggtttttcccaggaacataaacattttagagaattagagctagaaactttcttctgggaaagccttagaagtcagttgtgcttggcagtgagatgggacaatgtgcattcttaacaggttaaatgtgccaaactctctcttcagtactattcttttttacgtttgcttaaggtcaagttcctgctcttttgttcaaagtcttgctttgtcacccatggtggagtgcagtggcgtgatcttggctcactgcaacctctgcctcctgcgttcaagcaattcttgtgtcttagcctccctattagctagctgggattataggcttgcgccaccttgcctggctatattcaaagtctgtctttactacactgtcccaaagtaatctacatttgggtttgggtctttacagggtgagaaggactggcagaaatacgagactgctcggcggctgaaaaaatgtgtggacaagatccggaaccagtatcgagaagactggaagtccaaagagatgaaagtccggcagagagctgtagccctgtacttcatcgacaaggtgagagcatcttcccatcggcattgtctagtgttgagcttaacaaagggagtttctgctctgccccaggccctgtgccacatactgtatatcacaactcaacatacatatatttgtatgtaaaactgaatcaaaagttgcacaaaacaatgcttagccttactgtgagcagtagattctgatctttttttaactctatttcattcctttagaaagttggttataacttataaaattgtttaaataaaccatgcaggtatcaccattatatagttttaaagaccacgctctagaggagatcaatttcttggtactcacgagaagaaaaaaaagttcatgtttttcccccagtcttgtattttaacataagttctgaattgtctcaaaattcacactagctttttgagtttgattgcccagagtagcagcactccctcatttgctgccttatttaattttttttttccttttctccatccctatttcagaggacagaatag

SEQ ID NO: 100948 - DNA, 1022 bp, Homo sapiens
gtgagtgggggaggaagtaacactgcagaatccagagttcccaggccatgctgactgatgctgtggcttcaaacagaattgggaggcttctgttttggatgcctagaaattgcataagggtcaaaaggctgggcgcagtggctcacgcctgtaatcccagcactttgggaggccaaggcaggtggaacacgaggtcaagagaccatcctggccaatgtggtgaaaccccatctctactaaaaatacaaaaaaaaaaaaaaaaataaaaattggcgtggtggcgggcgcctgtagtcccagctacttcggaggctgaggcaggagaatggcatgaacccgggagacggagcttgcagtgagccaaaattgcgccattgcactctagcctggcgacagagcgagactgtctcaaaaaaaaaaaaaaaaaaaacacagaacgaaattgtgtaaggatcatgtctcttccattcatgctcatcttttctttctttcctgggcagcttgctctgagagcaggcaatgaaaaggaggaaggagaaacagcggacactgtgggctgctgctcacttcgtgtggagcacatcaatctacacccagagttggatggtcaggaatatgtggtagagtttgacttcctcgggaaggactccatcagatactataacaaggtccctgttgagaaacgagtaagttaatgtacctgtactgtctgacttgttttccattattcaacaagcatgggttgactgcttttttgtgtgctttgcactttgctgggcaccagcaaaagtgacttgagacaggcaacatggcacatgcctgtagacccagctattcagaaggctgagacaggaggatcactggagaccaaaagtttgaggctgtagtgtgctgtgatcacacctgtgaatagccactgtactccagcctgggcaaaatagtgagaccttgcctctcatattaaaataaataaaaataaatgacttgaaagaggggagaggtattatttgatatcttgtgta

SEQ ID NO: 100949 - DNA, 1032 bp, Homo sapiens
ggttaaaaaggaaacaaattatattgaaatacagttatcaaaatacattttaaagtccgataatagatgtgcttccttattaaggtcttgaggtggcctgtagtaaatttcaaggtagtaattaattaatatcaatgatactttaagatttctgcagcaattcaaatatgaaatgaagatgtctaacatctattgatgataaagtcataagtgctgctgctattactatggtttgttccccatattcataactgaagaagaaatactaaatttcagctagaagctgggtgcagtggctcacacctgtaatctcagcattttgggaggttgaggtgggagaatcacttgagctgagtaattcaagaccaacctgggcaacatagtgagaccctgtctgtattaaaaatttaaaaataaatataaataagttccaaaaagaggttattgaaattatagattttttctcatccaagttcatggaattctatacttgtacaactggagtttaagaactactactgtggaatgagactgcattttaaggcccagaatattttccatttgttgagatttccttaagataagtacccatgagtaatatagctggttcaaaaggtacacacaacttataatttatgctacagatgccatctggctttcttgaagagacgtacatgtccacagtgaatgagtatacatccatagacctttgattccttggatcatatgattggcaggcaaagaactctatagacggcccatcctagcagctcacatttgctgccactctgttaaatgctggtcatctggaattgtttattctcctcatgttatcattacaagccagaaataaaagcatgaatattcaggtgctgtttacctaattcaggaaaacccctcccaggagcatgaggaggtcttttgttgctctcgctctggaaccgggtttgggcagcccaggctgcctgccagatgagccctccaaacccaggattcctctcctgtgtgcccacaaagcaaacacacgcccct

SEQ ID NO: 100950 - DNA, 1035 bp, Homo sapiens
gcctgccaatttagcattcacagaaatggttaaaagatcatggtttgctacatttctatcctaaaaagaatctggctagtggtgtctgtgatgcttttgtatatagaatcagtcccctcagtttggctttggacaacatagatgttggaagtaagccattcatagtaaaacatatttagtgatcctctcacaatggtggcctctgtttccaatcttgggctgtgtgtatctaacaacaaacaattccaggttcagtgagcagcccagtgtgtgtcagacatgttatttactccgtagaggttgtcttcacctcacatagatgaccataggtatggggttctcctgccctctgagtagcgtgagctcagtgacaggggctctagctccatgttgttatccactgctgtctctaagcaggaatctgagaagaacttagattcaccaggggtgcttcaaagattctaacaagcaagaaaggctgaaactgcccttgtctcttcccttatagatatggattccatgagagttcacatggggaaaaaagctccacagctaaaagtgttttcacatccattgagtgacaactaaggtccttcccacctcagacttctctcctttttttttgagacggagtctcgctctgttgcccaggctggagtgcaggggcatgatctcggctcactgcaagctctgcctcccgggttcatgccattctactgcctcagcctcccgagtagctgggactacaggcacccaccaccacgcctggctaattttttgtatttttagtagagacggggtttcaccgtgttagccaggatggtcttgatctcctgaccttgtgatccgccctcctcagcctccccaaagtgctgggattacaggcgtgagacaccgcgcctggtgaccgctctccttttaaaaacagaatgccaaagctaagccctgccatgtcctggtttgggacagactggctgagctgtttggcttcctgggtgtcttttaattgccagtttgtagccccttgagtactct

SEQ ID NO: 100951 - DNA, 1398 bp, Homo sapiens
ggttgcccagtagatgcaagtatcctgcttcagtttcctaaagaggagctcctacagtgttcttagaatgaaagctaagaactggcacaggatctatttgataaacagctgtcatttgtagccatcctcccagatgtatgacagcagagtgttctctgatggaaagatcagcacccagattcccagccccagcgggttcctttccctgagcccctaggttactgccctgtaaaacccttgtttctttccagatcactgaagaacaaatagttgaattcactagtccttgtgcatcttctccctgccttcatgaagccacccttgtttttttttatctgacaaaccactgacagagacagcctggtccagataacatcttggtttcaccttctcaggtggagccatttttcctctacagctcataaccttaccactattatttcccctagattgatgccaagaaggaacagctagcagatgcccggagagacctgaaaagtgctaaggctgatgccaaggtcatgaaggatgcaaagacgaagaagtatgtacctggtattgtgaaagttggggctggtagagaaaagtgtgcagcatctgtcagggcccctggggccctggcttttcgatggtttctgagaaatgtcttttggaaatctctatactagggcttttattgactcaaagtggcaggatgggtacagtgtgctcttgtctagagcccaggcctggttcttgaggactttgctattcttctagggtagtagagtcaaagaagaaggctgttcagagactggaggaacagttgatgaagctggaagttcaagccacagaccgagaggaaaataaacagattgccctgggaacctccaaactcaattatctggaccctaggatcacagtggcttggtaagtgttgagccctccttgagctcctgctgctagcttaagaaaggtggagggggttccgagagcactggtggccttcacatgccattcctaagctacacactttagtcctctggggaaacttctggcttcagctgtgtacaagttactctggttgctgaaccttgtctgtaaatgcattgcaacattctggttgctcctaaatggtcagtgctgttacactgccttgtagtgtatatttttaagaggcaggtgccatccctattcctaatggaactttaggacaggaatggaaactcttagcttctggaagaataggaaagagcccatccatctctacacttcaacaaaacttttcgttgaatttttttgcagttgaaggtaggaacaagagataaagatgagaatacagatctgagcaacttacacagagaggcagagggacctttaacaaaagcagataaatactaggtttctctgtgtgtcaca

SEQ ID NO: 100952 - DNA, 1022 bp, Homo sapiens
tctttatctcttgttcctaccttcaactgcaaaaaaattcaacgaaaagttttgttgaagtgtagagatggatgggctctttcctattcttccagaagctaagagtttccattcctgtcctaaagttccattaggaatagggatggcacctgcctcttaaaaatatacactacaaggcagtgtaacagcactgaccatttaggagcaaccagaatgttgcaatgcatttacagacaaggttcagcaaccagagtaacttgtacacagctgaagccagaagtttccccagaggactaaagtgtgtagcttaggaatggcatgtgaaggccaccagtgctctcggaaccccctccacctttcttaagctagcagcaggagctcaaggagggctcaacacttaccaagccactgtgatcctagggtccagataattgagtttggaggttcccagggcaatctgtttattttcctctcggtctgtggcttgaacttccagcttcatcaactgttcctccagtctctgaacagccttcttctttgactctactaccctagaagaatagcaaagtcctcaagaaccaggcctgggctctagacaagagcacactgtacccatcctgccactttgagtcaataaaagccctagtatagagatttccaaaagacatttctcagaaaccatcgaaaagccagggccccaggggccctgacagatgctgcacacttttctctaccagccccaactttcacaataccaggtacatacttcttcgtctttgcatccttcatgaccttggcatcagccttagcacttttcaggtctctccgggcatctgctagctgttccttcttggcatcaatctaggggaaataatagtggtaaggttatgagctgtagaggaaaaatggctccacctgagaaggtgaaaccaagatgttatctggaccaggctgtctctgtcagtggtttgtcagataaaaaaaaacaagggtggcttcatgaaggcagggagaagatgcac

SEQ ID NO: 100953 - DNA, 1826 bp, Homo sapiens
ctgttaagttctgagcataggtggagatatcctcccctatggcacttgctagtccgggctaaagtttccatctaggtcttttgtacctctttctgctcgttttgccttgtttggtgctagagatttggttagctcttaaaaggcaatatagtatagtggttaagaacatggagaaaaactgcttgggttcaaatttcaggtcacttaccagctagctgtgtgagaaaatcagtaaattacctaacgtctctgcctcagtttcatctgtacgtttttcacttgtacatctgcagaagcacctactttagagatcactgccaagattaaatgagttgatcacataaaacctttagaacatgcttggtgcactattaatttgcatcctcactagacagatgtgaaagagaagatggaacatctgaccctgggcctcagatatgggccattgctgagtcaccctaatcccccccttatttctcctttgtttgcaggtgcaagaagtggggtgtcccaattgagaagatttacaacaaaacccagcgggagaagtttgcctgggccattgacatggctgatgaagactatgagttttagccagtctcaagaggcagagttctgtgaagaggaacagtgtggtttgggaaagatggataaactgagcctcacttgccctcgtgcctgggggagagaggcagcaagtcttaacaaaccaacatctttgcgaaaagataaacctggagatattataagggagagctgagccagttgtcctatggacaacttatttaaaaatatttcagatatcaaaattctagctgtatgatttgttttgaattttgtttttattttcaagagggcaagtggatgggaatttgtcagcgttctaccaggcaaattcactgtttcactgaaatgtttggattctcttagctactgtatgcaaagtccgattatattggtgcgtttttacagttagggttttgcaataacttctatattttaatagaaataaattcctaaactcccttccctctctcccatttcaggaatttaaaattaagtagaacaaaaaacccagcgcacctgttagagtcgtcactctctattgtcatggggatcaattttcattaaacttgaagcagtcgtggctttggcagtgttttggttcagacacctgttcacagaaaaagcatgatgggaaaatatttcctgacttgagtgttcctttttaaatgtgaatttttatttctttttaattattttaaaatatttaaacctttttcttgatcttaaagatcgtgtagattggggttggggagggatgaagggcgagtgaatctaaggataatgaaataatcagtgactgaaaccattttcccatcatcctttgttctgagcattcgctgtaccctttaagatatccatctttttctttttaaccctaatctttcacttgaaagattttattgtataaaaagtttcacaggtcaataaacttagaggaaaatgagtatttggtccaaaaaaaggaaaaataatcaagattttagggcttttattttttcttttgtaattgtgtaaaaaatggaaaaaaacataaaaagcagaattttaatgtgaagacattttttgctataatcattagttttagaggcattgttagtttagtgtgtgtgcagagtccatttcccacatctttcctcaagtatcttctatttttatcatgaattcccttttaatcaactgtaggttatttaaaataaattcctacaacttaatggaaacttaagtgtctgcctctttgttacaaagggcctcaggccaga

SEQ ID NO: 100954 - DNA, 1043 bp, Homo sapiens
ccagtttcatctctcacaagtgatccttcactctccattctccagccacaaggcctttttctggttatggaatataattcatactctttgtctttctgaagccattcttgaaactcacccctgcaatctatctacccttgtcagcaccgccaaaattgaggacacccacggtcgcggtggagcctgtctgacatgttgagccaggcagtgggtcggctgccaggcacagcaggacaacttactgcatttcagaggtgagaagcccaacagagcttccagctgatgccagagaaagagccaggcttcctgggaattgtgagatagtaggactagactagagtttgtaagagcgtgtgctcaggcaacccactcagctggatagtgacctggggctgctgcttctgactttgtcttgctgtagtggaaacttgtgtgttaacgttgatttcctcaagtgcgtcccctaagaagctcagaattcagcatgacattgagaccctttgtcctagccagcctctgtggagtaaggagcggtggggtagctgagatggactgccacctagtggcaggtctttacgtgggcgggacggagctagcgtagaccctgtgctgaaggtgtgcacctgtggtcacacctgatcctcataattatcttctaatcaggaatgatggtccacaatttactgatgaggaaacagagattcagagaagttctacaatttgccccaaagccacataacatgactaggtgggaactagaacccaagtcggcctgactccatgagttttctgcctcacaggagatccactggcttaggtaagtcctggtggtcagtagtcagtgggcatggaggctatctggttaatcagcatgggtgaggggaggcatgctcaccgctggccttgggcacagggaatccagcagaacgtgagtgctcacagagtgtggcttgaactggcttaggcttgaagttctgtggaccctgctcttctctgtgttgggcattgacaacatgaggagcacaagagagacacagcgccag

SEQ ID NO: 100955 - DNA, 1001 bp, Homo sapiens
acccgagcggaagaccttccaggtcaagctggagacgcgccagatcacgtggagccggggcgccgacaagatcgagggggccagtaagtgcgcccacttcctgcctgggcccgccccgcgcgggggtcgtgggagcccggcccgactgcttgcaccccggccggccgccccagcgacttgggcaaactttcgggccctcccagactccctccgggccccgcccccgcttcgtctcgggtggtcactgggggcggggggcatccgggtcctcggtcacctgacaggacaccccccctcccccagctggggggagtgttccaggcgctttgccctgaggcctaaaaatcctcgcgggctggagacctgcggtgcaggcatcgggccccccagaccctgggagtggtggcggcgtcggcgaggggagctaaggcagtggcccccaccctgcacgggaacctggggcctgaccagacggtccccgcccactctttatccagaaagagcagtctgtgaaactctccgggcccccaggctgggctcttatttgcaaaggaatctttgggttccctaagtagaacttaggcagatgttgggtagggctggtcttggagcagagctgggcctactcatctccctctgggggagagggaggaaggtggtcttgtttggtttggagaagcctgagagaagccagtggctggaatttttttttttttttttctgctacttttgtcccaaagctgggttttggaggcctatgtgggtgggcagacactcaatgccagggcagggactccccttgccctgggaagcacgttcccaggagatgggccccataaaggcctgccccagcgccttggagtcaggtattcttctcaggagtgcagctagtttgtgagtctagccctttgtcctctgtccggtggcttcagggagcgggagcggcttctcttagtttcctgccttttcgccttcccaggcctgagcttggctgcttttgc

SEQ ID NO: 100956 - DNA, 1050 bp, Homo sapiens
caggaagtgacaccccaagggggggtcccacaaaccttcttgggtatggtgtgcatgtgtgtagatagttgaggagattgggaggaaggaaggtcttgtggtgaggcagccaaccatcctcagctacaaactccagatctgacacagatctaatgcagctgctcaacttagaaatggcagcccccttcctcagtgcccccactgaccctgtcagccattgggagaacattttagtgacttgagagcctgtggattccaaagtaaaggaagaatcgacactgcaaagagctgagataaccctgggaacatcactcaggcatcaggctccaggcatggtccccttccttactccctatgctgtgttgagttggtggcactggctggaagttctcagagatctcctgggtaacagactgcattttaaaccacgcatattagcaggcaataaatgtagcacagtggttgatggcaagtctggatttgaagcccatatattcattgtgtgtttcccggccagttacttaccttctctgagccttgatttcctcatgtgtaaaatgggggtaataatatatccagtatatatggttgctccaggatcaaatgagacaattcatataaaacatctagcattgtctgacacataaatgtttaataaatatgagctgttattagcaataacattaacaatagaccgtggctgcccttcaagaccctgaactgggaatggtgagggggtgaggtgtggctataggtgaggatgaaggtgcaggaagggaggaggacggtgaccaaattcacatttcacttagattgctactcagaaaaaggcaggaaacagttttgttttgccccaacccatgtgcccactcacccacccaccatgtagaacagtgtttctgtagagaaagtgtttgcagttgtgcacatttgactcctgggtgtgacctttcttgtttgtaagttggggcctgaacagaaaagaggggtgcagagaggggatgatttatcatgcctcatgtatttgggggatggaggcaggcatacaga

SEQ ID NO: 100957 - DNA, 2051 bp, Homo sapiens
cagtaaacactggtgtagacactgtggaggtactctgaatactggctgagcatgtccatggggacttctgaggccccaggcttctgtctttggctgatccttcactagatacttttctagatgccaggccctctgaggtgaaggagtatgggtgcttgcttttagggaaatgaaaacaggcaatgacaattgtgagcagtacctttgatgaagagggtgagggtggcggaagaaaacagctaactgccttgatgaggcaggcgggctcagaagggaggtagtagtggaaccagctggctggggcttgacccctgtggctggggagcagaccacaccaggaggcctgctccgagggctaggcccacagcacgggagagggcaaggcccaggccggtgtcatcaagggttttctttgtactggctgttactcccagtgggagaggggcaggagcacatgtccggatctccagagctagccatccctgcctgtgtatttcctgtctgatgtagttttttccaagggaagtcagaccttttagtgtttcctcagcaccccaggcttgccccgatgtgtgggtttccaggcccccccgcccagctgggatcctctgtttcctgtgaacctaggaaaagggcctgcttcacagataactggaggagctgagcacacccagtcctgggacccacaacacctccagcttctctccagactcttgtgtgtgtgtgtacacagatgcacaggattcagttggagtttagagatcttggctaccagctttgctctgggtagcttcttggaatgaggcacatttattaatatttgcaataagtattattatacctccccatttgcccagtgctaggcaccaaggattcaaaagtttattgagacatggtttgtgccattgatgaactcttggaaaagacagatgtagaggcatatgattataaccctgtgtgttacataccataatataaaggcctctaccaagaactgtgaggagctctgccaggaaggcattaaaggagaggtgacctttgaggtaggccttgaattactgaggcacctgtctgtgccgaggctaaggaactgggaatcactctgtgcaggggtagggaacagatatggtgtggtagagaggaagctgggactggttggagacagctatagccctagtgtgccatgtccagcagattacactcagtcctggaggcgacgggagtcagcggaggctgttgtgggactgacttgcctctgcctgggagaccacagtggcagtggtttgtcaggcaggtgttggggagggaggccagtgagctcctacggtttgcacagtttgcaggagagagctgctgagggcccagacaagaccttcttgctgaggcagggtggggatgccatggtggtagatgggagaagggctgggtcttgaggggtgagacagagcttagtagttaagcatttgggccctagactctgcttgaattaaaatcctgttgtgcagcttacttgctctgtgaccttaaagcatatgactacctctctgggctgcttatctgtaaaaaggatagtattaaatggcatttattttataaggtttttgtgaggatttgatgagaacctgtataaagtgcttagcacctgtataaagtgcttagcatggagtgtggcacagtgtaagtgcttactacgtaggatccctgacaggacagagatgaggattaagttctcaggaggacctggtggggaggagttcgaatgcacctgctgtcctaaggggctggtgcctggccaccaagccctttgattcagaggcaaggaggcccgcccatcctctcttgcagctctcagcagtccctctattgtcagggctctttcccactgctggttttgcagggagacagggcagttggctggaagcagctgctttgggtggtaaccccttctgtagagtgaaggtatgatattgtcctatttctaagtgcctagcccaggacgctatctggagagatcttgtctttgaggaagtgctctaatgccacagcctcga

SEQ ID NO: 100958 - DNA, 1679 bp, Homo sapiens
ctgtatattaataataagggagattatatataagagtaagagattttatgtgaaaactacccagcacaacatttgtcacttagtggccacttaacagtattcatttcctttactctcacctttgttaaccacagagctccaatcttttccaccactaagctcggccacaagtggctgctccaacaacctgggctaggagtctgtttcctacttgctttctgtgttccttccctgagtctgtacacagaggactggggcatcaaaaaactctggaattggaatagcatattgggagttcatggaacattttctcacctgttgtattgtttgaacttcacagcagctccatgaatccatggagggcaggagttactatccctctcttacagaggagaaaaccaagccctaagggtaaggtcacatagcaagttcatggcagatcctaggatttcagattcctgctatagtattcagtttattctcccattctggggaaaatgataataggatggaccgttctataggaacagagggttattttgttttgttttgtttttcttccctctggccacatgtgtttgaccagcctagacttccatctgtggacaagctggactcattgcctcaatttcaaaacccgtcctgcactcatccttgccacaacaccggtgtcgagatgcttggcccacccagacctttcccacactcctacatgggggtgaatgtagccgctgattgggggtgggacacagaagagcctcaccctcttgactttctggtttgtggtgacacttccgcctaagcttctacagaacatgggaacctggggctccatgccccaaatatcctgagaagggcttttccaggattctctatgacaactcaagagcatgcattcattcatgtgctctttaatttgtcatacatttgttgtgggccttgctactgtgtgttgggcacactgagctggatgtgattactccagcctctgacttgttcatggtggcagtagatctctagcgtggtttgtgttccatctcaccatacctactctccttaaaaaaaaacaaaaaactagctttcttgggcctcagtggctcattgaataagtgagagacgacttgtgcttccctggctttagactctggcatttgctaactgtgccaagcactgtggagaccagtagtggacataaggttagggtagatacagccagaaaggagataaataggcagacagataaaattcttataggatttggtgagttctatgaaggaaataaggcaagaggctgctctgtcagggtaggtgagggtgtgctgtgataacaaatgatgcccacatatcaatggctggcaacaaggaaggttaatttcccctgtttgctatgtgtgctaacctacaccaccgtccctggagagtggcctcagtggttctgggtgaggcctctagtacagaacctgaacaccctgggcaaactaggctggagagggatttggagtatggaggtttagaaggaattaatttctatgacttaggatgcatgtggtgagtgtggctttgctgttgtggtagagtagagtgctgcctgtgtgggtcaagagactgtcttggctgacatctttgaaataggtatatttgtgtggcccttgcctaattgtcatctctgccatagctgc

SEQ ID NO: 100959 - DNA, 1837 bp, Homo sapiens
atgagatccctggcaccttggagtgagatcagagtctagatcactcactggggccctgtttcccaggaagcaaaaagggaacaggagagtggcttggcttgggctggcatggcgcaaagggagtgcagccagatgctgtggcggctgggtcaagtagctctaaaacaggagagcctagtgggttctgctgaagcaggatgtctcagcaagcaggcctctgacctgacgacttccggtcattatttagaacgtctccagccccacagatttactctgttggaggcttaaggactaaaccaacatttactgtccaagaggtggcagtaacacagaaaccaaagaggcaggaaccaaggttggggtggtgagatgtcatggggttcagggagtggcagaggggaaggcctctattctccctttcccacttgtctccctacctcagcccctgttgctctgacgcttcccccaccactatgagtcctaggcccctgttgtttccttgtaggagggagaccccagatttttatttcttctcccaacccattccatttcctctcccttgtgagagggctctgcagagacagggcagcagagagagacttggagatatgctgggctgtggtcaggagggcctcatttatctagtgagcaggaacaggttatatagcagtgatgctttcatagtatttttcttgaataaggtccccaaaaccttattaagttcctggtaggcatggagcattgaagatggcagacatggtgcagtctctcaaggagtttacgctctagtggagaaaacaatcagacagccttaaaatacatgtatggctactataataaatactgtgaagcaggagtgcaccacgaaacctggagtcctctccatcctccccttctgtctgtgctggccctgcttggccacttccaacaaggattctgaggcattacagagcacacgtctagggtacaggcagtcttggctttgaagtattgttggctttgccactcaccaactgccaccttaggtaagttaattaacctctttgtgctcaatttcctcactcgggaattggggaccctaatacttacttcatagtgttatttgcaagtataaaatataaggcagtttttatcgttgtaaggcagtcttatcaagagctttatgcaatgtctatgcaaagtaaatatgcaagaaattagtgttaggatgccagatgctgctgttgctcatcgtctcttcccacccagcagaggtagtaactacttcatcctctacttctcagcttcttatagtatttgtctgtggactctaacgtaagctatctagcataatactcatatctaatttttccttccacattcaagctccttgaggtacttgtattccaagtatctagtttaatgtctctcatgtaggtgctcagaacgtatggttaattttgaataataaagccagtgggacttctcagagggctggattgggggctggtgagagaaaaggagatgcgaaggatcattctgaagtttggagtttgggtacctgtttgaatggtgatgctcttagctgacccagggggtatggcaagaggccttggttctggtgagagagagaagacagtgtttggttttgaggagttgtctttgagacgttttgagatgaagagtggggatagcaagtaggcagctgaattgaaggatctgaagcttaagaggagaggactaggctagagacctgtttgtgaattatctgtacataggaggtaattaagggtgtgggcatggctgacactgatgaggaagaaggcagagcaccggaagagaggaccttgacctgagc

SEQ ID NO: 100960 - DNA, 1358 bp, Homo sapiens
gggcatccctgagacatggccctggtgggtccccagtctctctcctgtagctaggagcctggcatacacaggccatctagaaagaacttaggcagcatcagtctgcaagggaggcagagtttggagcacactagactcctgacacagaggctgacccatggctgcctggagaatcttctgggcttgtgcagaaaagttggggaaagccacctttccctactgtggcagtcaaggcttggtataggccatcttccctcccttctcatccatgatactctgaatgccctgtttgtggaacttagtggactcctgcacctctgtcttggtttccatgaacccctctgcccaatgtgtgcttgtcagccctccagacctggcttttacagagcactccaagacattgctctacacacactcagctccacagacacctccctgttgttctactcgttgcatgacctcatagttatctgcttccccatctgtttcctccatcaggcaggggttttctcaaaggcaggaactcaaatgccttattgatctctgtttccctaggacccagcccagggcctgacatggagtagatagatgcccgataaatgtttgatcagatgatggaatgaatgactgcataagccgaatagatcactgctgagtgctcttccagctttaatttctctgggtgggacctcctttcccttccttcctttggattctgttcttacctctgaaataggtgagattaatttagagtcctagggaagagggctgcctgcctggatggtacaaaggctggctgtggctgctctgtgtttctctgtatacccagtgtcagggatagcagctgctgtggggacactgcagagtgtcccagttctgccatgactcaccatatgaccatgacaagaccctttggaccctctgtttcctcattgtttcaaagagatttgtctagaatctagaccaagcttgtccaactcgctgcccgcgggtctggtttgaaggcagctgctgcacagtaatgggaaggacagtaagccccaccatcgccttccctttgccatataaccctgtgacctcagaagtccctgaacccagatccttgtttgtaaaatggaaagggatagctacccacccctccactttgaccttcctttggtggcagccagatgtgctcagggaaacctcagatttgtgagtatgtttctactgagaggcaggaggaggaatattatagtctcaggaagagggaggaatgagagggagaggagaactctcaccctttccacaggctttgggcatatgcagccagcttggaaatgctgaccatcctgtgacctggctactattgcatcagg

SEQ ID NO: 100961 - DNA, 1212 bp, Homo sapiens
ccgagattgcaccactgcactccagcctgggcaacagagcgagacacccagacccagagaaatatttcagtgaaagcatgtttcatgttcagaaatttggggtacttttggttatggttttcttggccatatcttcatcatttggtgggtttagttttcaatatgtcctcctgtccctttctgattaaatcacttctgtatctcttacctcattggcatctcactgtagtccaatgaaggaggtgccaggagtggtgattctattttgcagatgaagaaaatgaggctcagagagatgggtccaggcctcctgcccaccttgccagtgcttttgttcataatacctctctacaccctttttgcctgctgagcggttaacaggcttataaatttgggggacctctgtctgttgggctatttggaagtggcttttttgagcacaggggatactaggacacaggttccaacaagaaacttaggtctaatttagggtcttggatttgatgattgggctccctctcccccttctagggcctgccatgtgtctgccccctagggcaggattggctggctctcactggctgtgctctgaggagccctgcctttgctcttctctttctcttccctagggttcctgctgtccttgaactctgccggggcaacaggaatactgcccttatgcacatcctcgtggtggccagacagggtggttatcccactttactggacaggaagagagctagtggcaggcctgtgacttggcctgatgtctcgggggagtcggggtgggagcaagagtcaaagacaggaagcagccctaccttcagaagagccaggcacacagatgggtcctttgtggttattgtcttctccctttcccaggttccagactggctgcccgccatatagcttgtcccttcgacagcaccctctctccccactcagtggattgggtgctgtcccagggtgggggcttactctcctgcagaggcaggttctcagctggccctgagggttgtatagcttcacagctcccagagtgcttgggcatagggtggctcagatgaggaaacaggctcctcttttaaagggaaagcaactgccattactggcatgtccaaaagggggatgctgtccaggactgcatggcccagaagctccgctctgagtaactgctggtctctaatctctgtggtctcaggccaggagtct

SEQ ID NO: 100962 - DNA, 3308 bp, Homo sapiens
caggaagatgaagggtgaggttgggaggtagcacaggatgtggctttcaagaacctagtagagcatctcactgtgctgccagggccaggctggtgccttcttacggaagacagtacaagggatcaggtgtggccaacaggaacttgggagcattggatgcctggcgtggagctgcgctatgcttacctggttcctatctcaggcacctgttctgccttcaactgatctcaatggaaatatgtgcaggagtgcaggcctgttgactctgtgtgtgtgtgtgtgtgtgtgtgtgtgtgtgtgtgtacagtcacactcacctttgcaagaaggtgtgggagggggatgacagcagctccacaccggaagagcagactggtttctgtttcaaaaggcagagtttgtggttgttctgcagtttctgatctagccatttcccctgatggaagctcctccttctgtcattggaagccctgtgttctcggttaggtcttttatggcccagttctccctgcccctgtttctacccgagtataactgttcatttttgttccccatccctatttggttttccctccttctgcctgtgtacctgcctttttcatttcttcagtcattaagcaagccctggaggggccctgcctggccttaggtatgtgagcatgtatgtacgtgtttgtatgcacgaggcatcaagtgtattagtaccacaggaaggagcttctcagttgggcccttggtggaagagaagggagccggggaggtggacatttccagactaggaatcaagatgaaatagggatgggaagcaacagctattcttgccctaggtgtggcttagtgtggatggagcagagagggtgagagggcaaaagctggggaggtaaattcctgagccctgtcacaaagagccttcaaggccatagaaggtgtttgttgtttgttctccttagactggcagtgggcagcctcgggaggggcttgaatgaggtctaggggggtcagaataatgttttatgaagagccagaagactggggaaggatggctgatgggtgagaaccaggggtcagggaaaacagcagaaaaggcaggactctcagctggaggacaggctggaggggtttgctgaggggacaggtggttccaggtagaaccagaaatgtgtcggggagctagggttagggccagaagcaatgcccactgttccaggtgggatagatgtggagttttgtgacagttgctagagggacaggacaggaagagagcatctgggggagttgggccgttaggacattccaggcaggttggtgtgcagttcgggctggaagggctcctggggtgggggctggccaggcaaatgctggcactgcatctggctccgaagttaccaggccagtctgggtttagaggattttaagaggcttcagagcttggggagtactcaaagaaagtcatagctgttggctaagccaagcttttttcctttgacctaatctaccttaaatcggtgatttctgggctggaatgtctgccctccagccagcaggcagcccctccctgtgctggagagtgtgtcagagcctgtgcacctttgctgagggagcagaggagtccattggatgggccccctccatgtcccacatatagtgctgggtgtttctagctgttacgacttttgatcttaccaacatctttctgatgctattgtgttactcttatgttactctcttcacaggtgtagcagtgaggtcagagtggctgtcactttattgagatcacatagctaatgtgaggtagagctaggattttagttcagccagtctcacccagagctcgtgcatgttttttctaccaccctgccttctagagaaactcagtcaagccctttgctttacacatggtaaaactgagactctgagaagttaaataaattattcatcattgcctcaagttttagtggctgagggcaggtcatctgctattcaagcccgtgtacctctctgactatgccttgtgaaggccacgggagcatgcaagggccttggatagctaagataaggaaatggtcccaggcaaaatggtggtctgggtccaggatggttgctgctcttggacagccagtgccttggtcaggggatggggtggggattaggccccttgctgagacttgtgtggggatggctttagcagttaggcatttcagggatgcaccagtcctctgggccagagcctactttctcccagggatcctgaggcccatcttgacctacccagccctgcctctgggactttatgatttgatttgtgtgtaccttgtgtcaggaagtggtcctcatgaacagccttgggtccctatttcttcttctggagtctagctcttttgcaggtcaaaatgtctcagtgagggaacaaagatagggaagggacaccccacagaaccacctttcccccatatagccctctctgacatctcagcccttacttagcaaaggcctatccctagactcaacccagccctcttattaccagagtgactgagtggtcttggctctgcctctggggttcctccctgagagagagtgtaagaatgaggaaaccaggctgccctcctttcggtgttgactctgggagaccccagcttgatcttggcctctttgctaccttcctagttgacattcgtgaaattaaggagatccgcccagggaagacctcacgggactttgatcgctatcaagaggacccagctttccggccggaccagtcacattgctttgtcattctctatggaatggaatttcgcctgaaaacgctgagcctgcaaggtgggagttaagggggtagaggaggtagaggatagttaggggaatgcctgctggctcctgcccagtgggaggtatgtgccctcggggcagctattgataccttgctcacagccacatctgaggatgaagtgaacatgtggatcaagggcttaacttggctgatggaggatacattgcaggcacccacacccctgcagattgagaggtaagaaccactcctgaaggggttagggctgggagcattagggaccagggggacagggacagcagacctttgtgtgcccagacatctcccaggcctgactgtagatggagaagtggccctcacctcaggcttctctctccaggtggctccggaagcagttttactcagtggatcggaatcgtgaggatcggtaagtactgagctgtggctgtagcccagcagggtggggatgggcatccagaaccttagccaggcctctaagtagctgcccggagagccagag

SEQ ID NO: 100963 - DNA, 2260 bp, Homo sapiens
agctggatgagaccactggggatgtccctgttttctcagtatatcagccaaggacctgaagaacatgctgtcccaggtcaactaccgggtccccaacatgcgcttcctccgagagcggctgacggtaagtgccacccagggctgtctgtagatgggggcaggggaagccaagagcccttcagctgggggcctgactgcctgactggcactcctgctctataccatgcaggacctggagcagcgcagcggggacatcacctacgggcagtttgctcagctgtaccgcagcctcatgtacagcgcccagaagacggtgcatgagccacctgccctccctcaacccctgcccctgctcttccaccccacaccccagctctgcctgcctcagccctgctgccctgcttaggggcttttgggtgccatttctccagttcttctcctcttgaggcctgcccccatctgctgctctagcctgccttcttactagcccatttcccacatggcctcccaggggtcttgccctgaccaggttctgtttcctgcagatggacctccccttcttggaagccagtactctgaggtttggtttggagtggggaggtggggttttccctgggcccccttcatctctccactgggcgattcttgatccaggtgggaggcagtgggagtagggaaccatgctggaccattctgggaagctgtgctggctgggagttgggttctgccttccgtggggcaccttgttgtctgttgaccatactagctagcttaccttctctccctgcagggctggggagcggccggagctttgccgagtgtcccttcctgagttccagcagttccttcttgactaccagggggtatggctgggctgacattggcccaggctggtaggttgtggggggctgggctcatccctgactggaggcttctctcatcccctgccctccctaccccatcaggagctgtgggctgttgatcgcctccaggtgcaggagttcatgctcagcttcctccgagaccccttacgagagatcgaggagccatacttcttcctggatgaggtgagcccgatgtttcacccattttttgtcaagagaatgagtaggggtgaccaggaccccacccgggctccaggagctagacgctccttagggatgccaccttgtttctacctactgtgcaccttgcccacccccagttgggacagagcactctctctcctacccccaacctaccatcttgggttggacagggcagggactcactgtctcttcccttccacatgtttctggacagtttgtcaccttcctgttctccaaagagaacagtgtgtggaactcgcagctggatgcagtatgcccggacaccatgaacaaccctctttcccactactggatctcctcctcgcacaacacgtgagtgtggctccttcaggcccacccagcttcttccccaggagggcccatctgaccatacctacctgcctctccttgcctatccaggtacctgaccggggaccagttctccagtgagtcctccttggaagcctatgctcgctgcctgcggatgggctgtcgctgcattgagtgtgcgtggggtccagggctgggggagggaagatgggaggcctgcccgcttgaccatggtgatgttgctccccagtggactgctgggacggcccggatgggatgccagttatttaccatgggcacacccttaccaccaagatcaagttctcagatgtcctgcacaccatcaaggagcatgcctttgtggcctcagagtgagtcggaggctggatgacccaggggttaacttggctccaggtctctcgttctagagggacagagggcagaaagactcctcaaatgccctgtcccctctccctcagcctttcatctttgtccttcctcttggcctctcctcgtcacctgctccctgcttgagctgttgcttcccaagttacactttctgtttcctacgtgttgggcccactctcttcttcatgggtcctttagactgtagaacacatgctcttctcatcttcagaaaacatgccctggtttctttaggccagtgtcctgccaactcctttgccctcacagcccagaagattgtctctgttccctgtgtcccattccttcaattctgtttactgcttaaactgtggtcactggtctcccttagctcaccagggctctaacagctaactttggaggcttctcctctctcctggcctctttggtgtgaaaca

SEQ ID NO: 100964 - DNA, 1037 bp, Homo sapiens
gaaacatggcccaatacttcaagaaggtgctgggggacacactcctcaccaagcccgtggagatctctgccgacgggctcccctcacccaaccagcttaagaggaagatcctcatcaaggtggggtggcgggcttattgcggaagccccacacttctcagtgccttgcccaggccatggcttcagctgttgggcctaaacctgggtgaggaggtggggtgaggactggggtctgcattgccctgttctggttgcccctacagcacaagaagctggctgagggcagtgcctacgaggaggtgcctacatccatgatgtactctgagaacgacatcagcaactctatcaagaatggcatcctctacctggaggaccctgtgaaccacgtgaggactgggccaggctgggggtggtaggccagtgggtgtgaggaccctggctcacaagtccctctttggtctgttccaggaatggtatccccactactttgttctgaccagcagcaagatctactactctgaggagaccagcagtgaccagggcaacgaggatgaggaggagcccaaggaggtgaggaaccagctcaggtctgggggctgggccaggtcaggcctgggccagggtcacagtatctttgctgttgccttcccctgacaggtcagcagcagcacagagctgcactccaatgagaagtggttccatgggaagctaggggcagggcgtgacgggcgtcacatcgctgagcgcctgcttactgagtactgcatcgagaccggagcccctgacggctccttcctcgtgcgagagagtgagaccttcgtgggcgactacacgctctctttctggtaacacttcccatgcagatgcgtatgttcagtcagcgtgtgtacacagacatcacatcacccagagataatcagttaacatttgagcctttgatccaggacaataattaggctttacatggaacataatttcacctacatacacacacacactctctgtctcaccccccccccatacccctcccttttcggt

SEQ ID NO: 100965 - DNA, 1661 bp, Homo sapiens
ccactcccggcaagatgctgggacccccaagttcttcttgacagacaacctcgtctttgactccctctatgacctcatcacgcactaccagcaggtgcccctgcgctgtaatgagtttgagatgcgactttcagagcctgtcccacagaccaacgcccacgagagcaaagagtgagggaagggcctgggggcggacaaggcagggcagggccatgggtggtgctggccgggcctgactctgcctgttctcaggtggtaccacgcgagcctgaccagagcacaggctgagcacatgctaatgcgcgtccctcgtgatggggccttcctggtgcggaagcggaatgaacccaactcatatgccatctctttccggtgaggggtgtggcactgggttgtggggccttgcttgggtctgagctgccctgaccctgtgtgactgttttgtccttgtgaagggctgagggcaagatcaagcattgccgtgtccagcaagagggccagacagtgatgctagggaactcggagttcgacagccttgttgacctcatcagctactatgagaaacacccgctataccgcaagatgaagctgcgctatcccatcaacgaggaggcactggagaagattggcacagctgtgagggggctgtggtagacggggcatggcaggggaggcaggagagacccagaatcttaccagtctctggatgtgtgtaacagcaagacctggtgtgttgtagaagttcgtgggagggcccctgactccagctgggagccacagtgtgggtaccaggagggtgtctgcaggaggggacatctgagcagcatctttaaggatggggacaggcacataagcagagggttcctcatgagtcaagatgtggagtgaggaggttctggggctcacactgggagaggtgcacacagtggaaactcatccacctgggcttggcctggactctgtcctagggcagatgagatgaggctacccaagagtggttgtggagcctccgcctggtggatggtatggagggcagagccacaggaggtgagaccagtgagggaaaaagtcaggacccatggcagcacagctggtgataagggccctggacagaaggaaggggtctaggaccagaagatcagttgagagactgctgtcgtcagtagacagggctggctggggagagagaggcctgttgtccactggcacctgggactcaagtgatggagaggagcggcaggaggaatgtggggagtgggaaggcttttcctgactttgggctcagcagtgaaccaacaagccactgaactaaagcactgaatatgggtagtctgtgaagggcccacctgcacatagctcagaaatacttgggagtttgggcatttaggacctgagagattttagaatcctgggctgggccttacatgtaagaatgtgaagaaaggaaagggaacagtgaggccgggcctgaggcctctgaagccgtctctactgaggtcgaaggatccctgtggatcaggtgcaagtttgctgcactgggggaaagggaagctgctccagaaaccagtagctgctttctacctctgggctctggggcattaacatatcccattgtgtcctgtttccaggagcctgactacggggccctgtatgagggacgc

SEQ ID NO: 100966 - DNA, 1635 bp, Homo sapiens
aaatacaaaaattagccgggcatgttggccggcacctgtaatcccagctactcgggaggctgaggcaggagaatcgcttgaacccgtgaggtggagattgcagtgagccgagatcacgccactgaactccagcctgggcgacagagcaagactctgtctcaaaaaaaaaaaaaaaaaaaaaaagccactgaaagaaagtcctccaggagaggatgggttggggtgcttgtaagtgggcttctgtagagatttggcatggagatttgccatgaagagtgggtggttatatttgagttgggggcgctgaggcagtgaggatcatccttaggacacagatggaaaccaagccaggggcctgtatccccagtgcagtcacaggtaacacagaagaatcatttttaccccagcatgaggctgggtaataaatggtcagaaagtgtcatttgggagtgtggccaattccaggatccctggaaggtcactgggaacatgggtggtgatgaggagtctgtatcccccaccccccctaagagggttggagggcaaatgtgtcctctgggacagaaaagaggaaagatgatttcaggatgaggctgaggacagagctccctcatttactgttgggtgtggtgtctggaaggtacaggggaaggtgggagaggggcccagagcacctgcagtgtgggcatgcccaaggttggcaggggcttccttctcctgggcagggctgtagcctggggctacagggccttgtgtgtgtcaccagctcactgaagggaagataatggaacggaggaagaagattgccctggagctctctgaacttgtcgtctactgccggcctgttccctttgatgaagagagtaagggccagggcccaggcggggtgtgcatgtgcctggagggcctggtgggtgcaaaaagagtatttaggtatccccccaacacttcctgggtgggcgggctctgtaagtgttttccctgtttggcccagagattggcacagaacgtgcttgctaccgggacatgtcatccttcccggaaaccaaggctgagaaatacgtgaacaaggccaaaggcaagaagttccttcagtacaatcgactgcagctctcccgcatctaccccaagggccagcgactggattcctccaactacgatcctttgcccatgtggatctgtggcagtcagcttgtggccctcaacttccagacccctggtgaggaagtcccctgtgaggagggtgaggaggggcactgtggggcagctggactggaatacaccataatctgcctcttccagacaagcctatgcagatgaaccaggccctcttcatgacgggcaggcactgtggctacgtgctgcagccaagcaccatgcgggatgaggccttcgacccctttgacaagagcagcctccgcgggctggagccatgtgccatctctattgaggtgggtgctgctcatctgggcttcagggtaggaaaggggctgcttgccgttggagtctgtttatgttgagttctccaaaagtaggtattttcaggcatcaaggtggtcagggtgggtggggcctgagctgagtctttgaaggggtgaagatagcatgcagtcactgtatgcatctaggacgtgc

SEQ ID NO: 100967 - DNA, 1455 bp, Homo sapiens
tttcctggctcaggctactttcccagtaaaaggcctgaagacaggtgaggaccattcctggaggcagtgcccctgcaatcttgctggcagggtggggctgggccccttgctctgtccctcgtgggctgagggccaggcttttcctcctcctaggatacagagcagtgcctttgaagaacaactacagtgaggacctggagttggcctccctgctgatcaagattgacattttccctgccaaggtatctgcagcaggggtgggctggcctggggtaggtgggaggagagccaggcagcagcctctagaagtgcagaggagtcattgaccctcttgtgcacctggcttcgttgaagcaggagaatggtgacctcagtcccttcagtggtacgtccctgcgggagcggggctcagatgcctcaggccagctgtttcatggccgagcccgggaaggctcctttgaatcccgctaccagcagccgtttgaggacttccgcatctcccaggagcatctcgcagaccattttgacagtcgagaacgaaggtgaggaagatggaggggtgctagagccaggaaggcagtggctaggtcctccttcttcagtgtttctttctcctgggtagaaaagttgtaatattgtctggcattgggctgcaaggccctgcctgccagtaaggacactcttcccttctgtccagggccccaagaaggactcgggtcaatggagacaaccgcctctagttgtaccccagcctcgttggagagcagcaggtgctgtgcgccttgtagaatgccgcgaactgggttctttggaagcagccccctgtggcggccttccgggtctcgcagcctgaagcctggattccagcagtgaatgctagacagaaaccaagccattaatgagatgttattactgttttgggcctccatgccccagctctggatgaaggcaaaaactgtactgtgtttcgcattaagcacacacatctggccctgacttctggagatggatccttccatcttgtggggccaggaccatggccgaagccccttggagagagaggctgcctcagccagtggcacaggagactccaaggagctactgacattcctaagagtggaggaggaggaggagccttgctgggccagggaaacaaagtttacattgtcctgtagctttaaaaccacagctgggcagggtgagaagctagatgcccctgcagtttggccctggagccagggcagaggaatgtagggcctgcatggagaagggttctgccctgcctgaggaggaggacacagcacaagggcacattgcccatggctgggaacatgacccagcctgaaagatacaggggatcatgttaaaaatagcagtattatttttcgtctcaatggtattgtaactaagttatttactcctcctgctcctcacccctgtagggaaaccttggag

SEQ ID NO: 100968 - DNA, 2625 bp, Homo sapiens
aagaacatgattttggtttcaaaagcaagacctctcctggaaggcagaaggggccaccgccatgcttgtccttggagccacatgagcacggtgccctgccaggtccagttccctgggtaggggagaaggacggtccctaaaacaccaccagtgcttcttgcccaaagcccttgccctctctctggggtcttctagcactgtcactctgcccagcccaggaggtgtctgtgcccacgaagcctggtacttgtggcttggcactctgggaagcaggtggtttctaagaaatgagcggagctacaggtggacaggtctttagttcgcccctctttaccagctactctcagagcaaccggtcttggggaaattgaggatttaccatttagaacagctctgtaagcaagttttctaattttcaaaggcaccatttcctgtaattttctcaattcaaaaaaggacatgagggttaggctaaagtagagttcttgtttccaagtttggggacataaatataaaactttaaaagcatcctcacaaggaccagtgatgcccagcacccttgggcatgcatccagcacaccggccagaccctggggtgggagccacgggcactctgggtgttctgccagggatctctgcatgcaagtctttgtgctaaagaccaccctacctctgataattccaagaagtcaacaaatccctccagccttcacccttactaatgggccagtgtgttattccttcccaaaccataggaggctctgaaatgagtgtggagaaagggctctgaaaaccgcagtggtcaaagcttcaggctgtggctatagatttccacttacgtccctaccccatgtcttttttccatctttctctcactccaaacatgtctagattaaaaaaaaaatgcaggcacataggtcagcacattaggcttaacaacaaatgtttctttagttgatctgataactgaaaagttatggtccatgattcaaactcccatgaaaaagcagaattacggtaacaactaaagagaatggtaaagcatccaacgctaatcacattgccagtccattttttgaactgagggttacagcaggttctgcactgagtagcccacaaggcaaagcaagcctgacatgaaacgtagccggtcatcacttaatgcagcagagatctcttcaaaggtactgcttccttgaggaacacaaagggggcacaaaggggttccagacgtagctttgtgcctataacttccctgcctgactgtggaaggtgaggggcacctgtgacccagcaatccccagagaacagacacaggtcatttttagagatgacgtaactgacaatgcactgcttggctaaccaaagtttctacgtaatgacagtgttgataatctgatgttttatttaacatatagaggtggatgtatatgttaaaagcttgattctgtgtctatgaatatgactatgaactctgaactattttatccattggaaggtaaaggaaaggtcctacattgtgggaggaagaactgatgagaaccccatcttgcttgctgcttgcttggtggtgggcaggccgagggtagcggcaggctctgggctgtctgcgaggattctggaagctctcccaggtgcccagcagccgggcatgggaacggcatgtggcagcagagagtcgggtttggctcttccacgtggcaggcggtttcccagactggccagtccttcacattaatcagatcaaattcagtctgtttctgagaagaaaacacatgcctgtcactctacggcagctgccaccacctgccccccaggcagcctggtccttgctataccagggtggcatcactggctttgaggacctcttaattccatgagcaatgaatggccttctgccacccactcccccaccctccagcctgagggaatgtgggttaaggacaggatgctggctcaaccttgtaaggccatcagactctctgagagaccctgctaaaccctaggcctagcagcaggagcagtggtttggcctctccaggcccactaaatccccctagctccccaggcttccgccaccaccgtctctggagtcctgtcctaaaatgcttcatcctgccctctccttccaggctctccagaacatactgttccaatataatagcagctgggtctagttctgatatgtattctactgatgtcttcacttcatttgtaacttgcaaccctaacatcaaagtcaaagtaaggctgatatcagagaggttcatcatctgtgattcataaagaaatggtccttaattgcagctggctgagaaagccatgagaaaccaggtacagataaacagattggcccttcctgtacccacagttacctgtctcagacagaagagaacaatgccaatggcaatggccaccccctgccattcctgctctgtcccacaaaggacagcaacatgtcactttgtgttggatttagtagctgaggggagccaatgcttgtcattcaaatccactcatcacatttccatgttgactttaagaaaaaaaccatggtaaaatataaataacataaaattcaccattacgacaattttaagtgtacaattcagtagcattaagtac

SEQ ID NO: 100969 - DNA, 1090 bp, Homo sapiens
tctggatttctctttcatttttgaagaatagttttgccatatacagaaatcttggtttagaggttttttttttttctttttttcacgactttagatatgtcatctcactgcctttgggcttccaagatttttgatgaggaatcggctgttaatcttgtcaaaaattctgtgtgacgagttgcttctctcttgctgctttcaaaatcctgtcttcaggttttgacaatcctaatataacatgtcttggtgtggatctgagttcatcctgcttggattttattgagctttttggatgtgtagattcatgtctttcatcagatttgggaaattttctatcattatttctttaaatattctttctgtcccttttctttttctgcgattcctatatgagtatatgagtatgaatatactaatgaatataataactatatgaatatatgagtacattagtatgcttgatgatgtctcacagctctctcaggttttttttcctaaatattttttttctttcttctcctttggataatttcaattattttctcttcaaattcactgttctcttcttttgcatgcccaaatctttgttgaatccctctagtgggttttccatttcagggattatactttttagctctagaatttgtttggttcctttttataatttctatctctttattgatattctcattttgttcatgcatggttttcctgatttcctttagttcttcgtccatgttttcctttagctcgctgaacatacttaagatagttgatttaatgtctttgggtaataattccaatgtctggacttcctcaaggatggtgcctgtcaattttttttcctgtgaatggaccatggttttctatttctttttatgttttgtaattttttgttgagaactggacattatgagtattacattgtggtaactgagaatctaattctgtcatgcctcagagattgctgatttttgcttattgagggctggagccaactatttgtgacttttccaactatttttgtgaagtgtgtattctttgcagtatggggtcagtgaagtttctgttgtgatatctctgtggttaa

SEQ ID NO: 100970 - DNA, 1232 bp, Homo sapiens
cactccaaggcgtgacacaaatgtaaacttgggggtctgtgtggtcaggctgcaggagcttcttgtggaggagctggagcagacctttgtgcaagccactgcctttctttgccagcaccagccatgaactacgtggggcagctggcggagacggtgtttgggacggtgaaggagctgtaccggggcctgaacccagccacactgagcggcggcattgacgtgctggtggtgaagcaggtggacggctcgttccggtgctcacccttccacgtgcgttttggcaagctgggcgtcctgcggtcgcgggagaaggtggtgagtgctcaggctggctgaggtggctactgcagagtgggctttttaagctggggcagccactacagtcccaggacaggacctggggcctcccttaggtggggatctgtcctctggacaggcttcccttcatttgtactttctttgaaggtttttgggttgatttgggggttttggtctgggagggttcacagttagtttctcatggaaacagaccagtagggctcatcccagtgctggggccgtcagacctggctcagcttactaagaccttacctgtgtgttcttggtaagtcacttcatgcctctgagcccagttacttcacctgcacaaatggatatgattttatcggcctaatgatgctggtgggacaagtcaatagcaactgataatactgtctcagggccagctatgtgggaaacactcaaatgttagtttctctctcttaataaatccacttcaggctgggcatggtggctcacgcctataatcccagcactttgggaggccgacgctggtggatcacctgaggtcaggagtttgagaccagcctggcccacatggtgaaacccagtctctaccaaaaatagaaaaattagccgggtgtggtggtgggcacctgtaatcccagccactccggaggctgaggcaggagaatcgcttgaatccaggaggcagagattgcagtgagccaagattgtgccattgcactctagcctgggcgacaagagcgaaactccgtctcaaaaaataaataaataaataaaaataaataaataaatccattccaccttcacagggctcaggcaagcacagcagagatttttgttagcagcaaggtctagggtgtgaatcaagattcacactgaggcaactgtgacgtttccaggatcctaatagaaaagtgtagcctatg

SEQ ID NO: 100971 - DNA, 1078 bp, Homo sapiens
ggggtgagtgagaccccctattggggctctgcagggggagcctgggaaagatggccctgggtgcaggtgggtggcagggaggagccagcaccctgtctccagctgtgggtttttttttttgtcattcctcaagcaccaagcacttctttttttgttgtttttgtttgtttttgagacagagtctggctctgtcacccaggctggagtgcagtggtacgatcttggctcactgcaacctccacctcccgggttcaagcgattttcctgcctcagcctcctgagtagctgggattacaggtgcccgccaccacacctggctacttttgtatttttagtgagacagggtttcaccctgttggtcaggctggtcttgaacttctgacctcaggtgatctgcccaccttggcatcccagagtgttgggattacaggcgtgagccaccgcaagcacttctataccttttctttctcctgagaaatggccccattttacagatgggaaaaatgaggcctagagacacatttcctggccaacaaccaggaaatggcagagctgacacaggtcctcaggctcctgccccagacaaggggatccctattaaggaggggcagggcctctcgcagcccaaataagccagctgactttgtttcttttccacatctgaagtgacccagctgcctaaggctgggtggagagtagctaaggatggcctgactgaaaccaaagcaggtggggttgggaataagcccagagatacactttaggtatttcaggtaaatatctccaaggcagacactgagggctggcaaccctgggtctcggcaccctctgctgtcacttggctgggtggagactgccagcctgcacccctgtgtctgccaccactccaaatgggttgcacctagagggagggatcactgataccctgggtaggccctggcatggcggggacaggtccagcctcctcttggcatctcccgggagtgaaggccctttggctggaggagatggcctgagagccagtgtggtccacagggagaagacagaagtcctgagcagtgatgacgatgccccagac

SEQ ID NO: 100972 - DNA, 1027 bp, Homo sapiens
ttttgtataaaaatgaatcacatagtggaatataagattcatgtctacttttgagataaaatgcttccaagaagcccttggctttgggcatgcttcttgagggccagcctccaaacccgagggcatactttcactttggaggaaacactggagttgccctgtccccctcccctcttcacactgagtcttttttgtttgtctgtttttgtttttgtttttttgagacaaaatctccctctgtcacccaggctggagtgcagtggtgtgatcacagctcactgtagcctcgaactcctgggctcaagcgatcctcctgcctcgagagtgactgtcctgttccccactgagatgtccagctggctctcagaagcaggacactaggagaggctcaagagtccaggtcgatgcagtgctgtggccagactgaagcagctttgccacgtcaccctggtctcatctaccatcaggcccctgctggctgtgtgtgcctgttccccctcaggatgacaacctggcctcacctttctctgtccccagcgccttggggctctttgaaaatcctcagggactcccaaagcctgcatagggcaggagagctgggccgaggaaggtccacgctgcacagggcaggcaaggactcagcactgctgggtgtttagactctttcctggctcagaccaagaaaactctaaactctgtagacacagctcccaacccccacccactccccactccagctctgacccaggcttttccattcacagatcccagactttccagaccggcaaagagcccggaggcacaaggcaccgtgagtgccttgggcaggggttgggggcggggcggtggattgtatgaggctgaggaaagccccagccgcagccccttgggcctccccaggtagaagacacccctaccctcaccccagtcccttgtcaaatttccccgtcaagaagcagcacatacgtatataaggatactcctagtgttggtgtgcatctgagagagagggaaggagggagggagg

SEQ ID NO: 100973 - DNA, 1209 bp, Homo sapiens
aagtcaacattattttctcttcttcctcagcttctccatgtttaggaactgagaaagaaactgcctaagcagcacttccccatgtcctttcaccttcatgttaacgtcccttctgatggtctcactcttcacaggtagttcacactctgagacttgaagtaagctcatggttcagtactctgggggcgcagggctgcgcaggacccttggaaatgttgcaagtgttactagtaccagtttcactttttgttgtcacaatttactgtattttttactttttctgttacagttttgctaatttatcagaaggtccaaaagtctgacataactatttcattttgcattatttatttatgatgcttttttcattgtcttttatacatttgggattataaattatgtaaatgttaaaatgagcatctcaaagaagtctgttaaatcatgactgaaaaaaatcaatcagatgtatcttcaaaaagtggagtcccagttttatgaatcagagatataaaccagaaattctataactgatcatagaagaagaatccagtaattgaacaaatcctatttaatgacatccttgtagcatagatggtctataatgctgaccacagatttcttagaaatgctgctctctctatttaactaacattttgttcagttttgcctccagtggaagcagaaagggttttttcagctgttaaatcctaaaaatcaatataatttatttatgtaagaaaaataactcaatcaatatatttttgaaccttttaagtactaattttctttttatcaagtagaaaaaaaaatgtatttgccctaaatccttaaaatacaaatgctataaaaattcctgtatcttgaaagccttactgcaaatgagtattatagacatccagcagagtctggttttctttgttgtcgttgtgttgttgttgttttgtatggaaaagctgctttccccgggttccacttataacctccggtaggtcacagggttcaatgtggatctgacttaaaaacccaccagcatgctcaatcccttgttatccttatggaatctgtatgttaactctctgggtgttcaggcttctatttgactgctgttgtgaccctgtttgcaaaatgaatatgacactctgtggattatttgctctgtaaggcacaagtgcttcttatgattattttgacgtttccaagagcaaaagc

SEQ ID NO: 100974 - DNA, 2101 bp, Homo sapiens
tgagggagaagcctgtcaggtacagtcaggccagagagctgcacaagtaggcgggaggtgctccttgtactgggaacccttcgtgcagctggagacaggccaggccagtgcagagccctggtcatcaccctcagctgaccacctgccatcctgttgccttcagcattttgtgtttctttgtttttccaggggtttcttccagaaaacaagttcaatcacactctggctgagcctattcttcgagatacgggcccccgcaggagggggaggcggcctcggagcgaactcctgaaggctccttccattgtggcagactctccctctggaatggggccactgttcatgaatggactgattgctgggatggacctggtaggacttcagaacatgagaaatatgccaggcatccccctcaccgggctggtggggtttccagctggctttgccacgatgccaacaggtgaagaggtcaaaagtaccctgagcatgctgcccatgatgctgccaggcatggctgctgtgccccagatgtttggtgttgggggactcctcagtccacccatggcaaccacctgcacttccactgctccggcgtctctatcaagcacaacgaaaagtggtacggcagtgactgaaaagactgcggaagacaagccgagtagccatgatgtgaaaacagacactttagctgaggacaagcctggtccaggtccattttctgatcagtctgaacctgcaataactactagtagtcctgtggcttttaacccatttctcatcccaggagtatctcctggactcatttacccatccatgttcctctcccctggtatgggcatggctctgccagccatgcagcaggccagacactcggaaatagtaggtctggagagccagaagaggaagaagaagaagacaaagggggacaaccccaactcccacccagagcctgctcccagctgtgaaagggagcccagcggtgatgagaactgtgccgaacccagtgcccctttgcccgcagagagagaacatggggcacaggctggggagggggcactcaaagactccaacaacgacaccaattagaacttttttcatttaagaaattattgtgacttgtaagtttcttatcccataaaggtttgttacttccctcacttcacctccataagaacctgtgtttccataagtaagattacgtacctgatttcctgtctgagaactatggtaacagatgttaatagttgcagggtctcaccacttcattagataagtgttgtctacctagtctaggaggcacagaattctcattctgttatccagttcattccagcaatcatagttaatacagtacttggtgacacgccctacccccttctcttccaagtttcccactcacttgaggaggaaaaatggcaaaagaaagctgtctagggttttaccattgaagggtggaagaacagagacaaagaggagctctttttctgtgagctgggttgcacaggaagaatgtcacagggaaccaaaaagcacagaaaaaggaagtgctggtgcatatttttgagttaaaatatttccctattttatcatgattactaagtgagtagtatagacagaagtatataactaatggttgaaaatacatatattcatttctttataaaaaacaaaaaccttaccggtagtaatataatttcccccttggtggtttttcagacacctgcagcaagaagaaatactgactgactaggcattattttctatacatccctctcaccagtgaaaagattcctcttgctgcgagaaagctttacccaccatgagttattgctgtcgacgggggtggggcaaggacccgcgctccgtagagctacacgctgcttcacaagcacacggctagcgctctgctctcacctggttcgcttacagatttctctagccattaatttgcctctctgtgtttaaagagcaccaggaccgaatggattttcacttcaggctttccttcaccaagaataaggttctttctggagcctgcaagaagacagttgcccaacactttgacacttgctagtaggtcctttgatcaagagtgtctgag

SEQ ID NO: 100975 - DNA, 2834 bp, Homo sapiens
tggtggttgggggaccatctgtccttagttttatgtacattccatttgcggtggttgggggacggtctgtccttagttttatggttattctgctttaggacattcccttcaagtcatcgtactgtctttgtcctaagtccctcagactagacatttttaggagaggactcgagcacagatgtcttttttggtttttctcttctcacttgctcatctaccccaccactgtctttgtcctgggtgcgcctaactaataagatatgtaggtagagagcgcacaggaagaggagaacacattcacagatgtgcaccctccagagacaggcgaaaccagccaggcaagtagcagtgacaagagaatgcaaggaaatgatcaagaggaaaaggccagggattaacagggccctggcagcctggtgaatcggctcaggtgttctagtctggagggcgggggtgcccacacagcctgttttccagattactgtaggaacactggtgcttcaggagagaaagcctaggtgaagccaggtggctatttcctttagtttaacctggccagctcctgtgcagacaaccattgacgagaacaatagcaaaaccagttgaaaagcatcagcctcatcagaagaatctgggatagcatgttttgtaatattggtctccgttttcatcctagaatttttcagacaaaccaaagcagaggaggccacgctgtaaagaacctggaaaattagatgtcagctccctgagcggggaagagagagttcctgccatccccaaggagccaggactgagggtaaggaagaaggccacgtgagtgtggggccaggaggagcatcctggttgagccgtgccttacatacttgagagaaagccccagctgggaaggggttcgctgggagacatctttcaagaggactagaagccagcacaggaagttgattagcagcaagaaatggtgctgtggcatttttgagcgctctgtgactcccagtggtcatttgttttcaacccttacctccagaattgtttgttaaaccattgccaaaacttgggtttgtgttttgtttctcctatttgtagagttatgaggggaaagaaattttaacctttgtcagtgaacaaaactcattattggaagttttcatttcctaatttaggtttttttggctaccatttaagacatttcttcctggtccagcctcactggcaatgaaaaacagctgcctctaagcactacccttttcctattatagcatcatgacactggaagggacttcaaagacttctgcagaatacttctagtataacgaatccgagttaattatagtttacagattagtacaaatttggactacaaaagtcataacctctagagggcagtaacaacatttcaacttgaaaatgtgttgagtttgggcagattatacataaatgtgcttttagcctcctaaaagcactttctgcccaaatagggagctcctgaagatgctcatggggacttttgcctttcccaggttgttccataaactcaagctttcctgaatgccttctcttaagtactctgccagctacatctttcctggagtaggaattcccttctcggtgggattgcttgaatgtgatttctttttatagctccaaaagaccgcccaccctagtcatttcctcctctcgcagaaagagtttggcatttaatgttctcagggaacttgttcaagagtgtcacctggatgaccgctggtctagtagctccaccagtggccgttgctcatctccatctgctaccacagcccctttgggggagacttgggccctagacagtttgtcacgttggagaagctgcccttttttcccctcttgctttagtctcagaaaatgtcccttctacccttttcttaggactcttccctcactttcttccacttgcgtgagcagtacgagctagttcacctttgtttgtgtcccctctgtctttcctcaccccttcacgctgcctcccaccttctccttttgtctcggcacacggtgtctcagatacgccatcaagggaagatctccggttcttgctttgttgtagtctctgagctcttgctttagagatgtctcaggaagagccatgtggttcccccttggcttgcttgtttctttccccgtgtctaacagtttccctcatgttccttggaaattagtgttcatccctccctacagatgctgaccctttgccagaaaacccatttctaagctgttcttgcaagccagcctcttcccagagatgtgttagcctcttttattaaataaacacactccctgcctcggaggcccttttcctgcagtaaggcaagaagaagacctcgggcagctcagccttccgaacaggggcacccgtgtatctcctgcagctcctcttgggacagggccttctagggtgcactgtaccctttttctttgccatagaaccttagtccattccgactaccataacagaatactgggaggcttataagcaacagaaatttatttctcacagttctggagacccaaatgtccaaggtcaaggcactgacagattgggtatctggtgaggccccataccacatcatccagactggtgtcttctcactgtgccctcgcatggaggaagggacagccagctctcataaggtcactaattccattcataagggctcgacccctatgacctaatcaccgtcctaaaccccccgcatcctattaccatcaccttggggcacaggatatcagcatagtaatttgaaacatttatagcggaaaccctacccctctttttagaaatagatttaaatctcacaagg

SEQ ID NO: 100976 - DNA, 1099 bp, Homo sapiens
tagcagctttagcagcacctggaaacctgttaaaaaagcagattctcaggctctacctcagacccactgaagtagaatctgcattttaacaagctgttcaggtttgaggaggcctgagttagaagaactcctaaaaagatgattggaaacaatatgaggcctagggaaatcaggcctggagaaagagctagcattcagccacttgtgtgacattcagacctctcttgctgtttgtgtgttcacaggagagcttcttagctccagtattcacaaaggatgaacaaaagcacaggcgtccctatgagtttgaggtggagagggatgcaaaggctcggggcctggagcagttctctgccacccacgggcacacccctatcatcctcaatggctggcatggggagtcagctatggacctctcctgctcatcagaggggtccccaggagccacatcccctttcccagtgagcgccagcacccctaagattggggctatcagttcacttcagggagcccttggcatggacttgtctgggattctgcaagctggcctgatccatcctgtgactggacagattgtcaatggaagcctcagaagagatgatgcagccacgaggaggcggagagggaggcggaaacatgttgaaggagggatggacctcatctttttgaaggagcagacacttcaggcgggaatcttggtgggtattgaggtcattagattaaaaacatttacctttctacactgagaaacaaacccttcttcctcagacgcaaaataatttgtggatcttttatctctatttcggttgtcctgctttattttctctcattataagatgccctccatcttctgtagaactagatagttactaactcattaatggcgcttaatctgcttacagcctggagaaatgagccaggaggtcttgccatttcaaataggaacaaccccgctcctccagggtttcagaagagccactgttgacggcacggcagagcaagatggcagggttgagtgtgcagcggcttttctccggggtagtgaggctctccaagactggggtatgggagaaagaacaggagtcagggctacctgaat

SEQ ID NO: 100977 - DNA, 1033 bp, Homo sapiens
cctgtaagtggatctttgaagatccattcacgttgacacattgatgataaactttcaccattactgaagcttgaaagaataagttacatgtccatttctttccatgagtgaagtaattgaaatgttctgagtttcttggcatctttttttacatgaatcaggtctgtcttacctttgttgtaagcttcatgactttcatcctttctcatattaatcaccgtcttgccgtgttacatttcatagactgtcccttcaaagatctcaaagtgttagaatgttcagctttcccttgaccactacactaagtgagaagcctctttgtggttagtcatctctttcactcttggatacacaagaaaaatttcctttctcttttcttgtgttgggatatggatgcaaatgctcactagaagacttgccttgggagccccagagcaggatttgcttttatggcttaactgatacggttctcctggaaatagaagatatcataattaatattccatttaaaatagcacagaatgagctaatttaaaaagcaaaaggaaaagaggatatcctaatctctcagatcactagtatctcactactatagttaagtgcctgattaattttttaacctcttcccagattatccagggaagtactctgaagaggagagcaagagctcaacatcgggcatcacaggagacattggggatgagctacaggaggctcgagctcccactattgctcagctgctacaggagaaaactctctattccttctctgagtggccaaaggtaccccagagcttgcgtttcccaccctacccccaaaccattcccagctttgaattgctttttttaacccttttagaaatagttctgaacaagaaactcagaaatgtttaatacctttaaaagatattagttatgtagcatttgaacattaaagatacatgcgcttaactaattcgactgtaagatgaaggtgtcaaattgtcctcttatttatagtacgatggctttaatttgtattgtccagactatga

SEQ ID NO: 100978 - DNA, 1056 bp, Homo sapiens
gaggggtgtagacagacacattgtccctttctggagcactgattttatgttaaagagggaaagagaggagctaagctaagtccctcaagttatctagcctttttttttttttttttttttttttttttttttttttgagacagagtcttgctctgtcacccaggctggagtgcagtggcgcaatctcagctcactgcaacctgtgcctcctgggttcaacatcccaagctgggattacaggtgtgtgccaccacgtctgactgatttttgtatttttagtacagagtttcaccatgttggccaggctggtcttgaacttctggcttcaagcaatccacttgcctcagcctcccaaagtgctgggattacagacgtgagccactgcacccagcctcaggttatctagctttttatttttaaactcctcgtcttggttttagttattcagaactcttgggaagagtctgaacccaaattaaaatttacatactagctaagataaaaaccgagaagccaaattgaaagtagcttgatagagttgtaaccccagccaacccagaaggagccagtctacaactatgcctgatcctcctcatggcaggccacgaagcattgctgccatgtgttgaattataaaacccacattgctttttgaaccctgttgcgggtaaaaataaccaaattatcagtccttggaaacccaggcaatcaagtgagtacaaggtaaagataagtatggtttagaggagaaattatgttcctgaactggtgtcctttgatggcagcgtcagccttgctaagtcagagtagagggagcagtgaccttaataagctttggtgagcatcatgtgcacgcgtgggtgggagtccctttcactgatgcttttaaaagtgcttttgcagaccctggaagggatcctccacacatatgaggtgtgggacaggtaggccagagaggattagccctgctttcgagactagaaatctacagtcctgaaggagcagtaattaattggtacacctgtcagggccagcccccaggtctcctggcttttt

SEQ ID NO: 100979 - DNA, 2708 bp, Homo sapiens
tggcctcaagtgatcctcctagcctctgcctctcaaagtgctgggattacaggtgtgaactactactatactatgcctggcctagtacatgcttatttaaaggaaactaatactgttttcagaactggaatttttatgctcttctttcacaccctttgggtctgtccttgtttcataaaagccttccattctttttcagtttcctattttggcaagggctcacacacctgaaactgccatgctgaggagccagggagctaaactccaagaccaaagatgcaggggctcaggtgggcggggagtgtctgaggtcaccttcagtgataggctttatttccctttctctccaggtcccccagataccaccatctacgttgaacccatcactgaggaacgtgctgcaagaactctgtaccgcattgaactgttacggaaagtccgagagcaagtgctcaagtgccctcagctgcatgaacgcctccagctgtgcaggcccagcctctacctcccagtctggtgggagtgtgggaagcatgatcgagacctgctcatcggcactgccaaacatgggctgaaccgcactgactgttacatcatgaacgacccccagctgtccttcctggatgcctatagaaactatgcccagcataaaagatctggcacccaggcaccaggaaatctctgttgcctttaccagaccaactccaagttatatgaatctcttacatattctcaaatgagtaggacttcagagtcccttgaaaatgaacctgaaaatctagtgagagtagaaagcagagatgatcatctcagcctgcctgatgtgacatgtgaaaactttatttctaaagttcaggatgtcatttccatcaaccatgatgaaagtctgctgcctgagtccttagagagcatgatgtatggtaagaaggtgctcagccaagaaccaagctcttttcaggagagcccaagtaccaatactgaatctagaaaagatgttattaccatctcaataagcaaagatgggaactgccagtctggtggccctgaggcagaaatagcttctggccctacttttatgggtagcttagaagcaggaggagtagctcaagcaaacatcaaaaatggaaaacatttgttgatgtctatttcaaaggaaggggagctctgctgcagtgaggcaggacagagacctgaaaacattggccagctggaagccaagtgtttagcttccccttccttgaatccaggaaatgaaagtgggtttgtagatatgtgcagtcttagtgtctgtgactccaaaagaaacctgtcatcagatcagcaattaattgatttattggaaaacaaaagcttagaaagtaaattgattttgagtcagaaccacagtgatgaggaggaagaagaggaggaaaacgaggaggaaaacttagccatggcagtaggcatgggggaaaggccagaggtattgcatctcacggagcccactactaacatctcaagggaaaagaaccaaggcttccaagatgaaaccaagaaaggaagcttagaggtggcaaaccagactcctgggctacagagggctttccccgctccagcagcctgtcagtgccactgcaaacacatggagaggtggatgcatggcctcgagaatgatgaatttgaaatcgagaaacccaaggcttatatcccagatctgttcaaaagtaaaaccaatactatcgccatggagggtgaacccactgctattccatcacagccgtttaaagtgaagcatgagcttttaaaagaaccttggaaagaaagtgcagaggggcaaaacgttttccccacatatcctcttgaaggaagtgagctcaaatcagaagacatggattttgagaataaagatgattatgatagagacggaaactgccatagtcaaggtacagtatgtaggatcttgtggcattttggataaactagttcacacacgacggggggttgggttttaggggagagagtgcttcatatttttacagcttctgaaacagacctgcctaccctcaccaaaggtcataggccttggactgaaaattcgagtagcttagtaactgtggtcatgttgtagaaaattgaagatcatagacaatcatagcagtttggctgcctcactcatataatttgggcaggggcttgtgtgttttcattcaatagatgctatgtatggtgttaaggggaaatagtttgttcttcccctagataaggtgcttcaaactggctaaagtagaacagccttgggatgttaggaacttgcactttaatataggggcagttaatttttcaggaactgaacaaaaatacaaataaatttgatctttgttaaggtgagcaaaaaagccatttattcatgtcattgtcaaaactgtgtggcttaaggtcagtgcatttgatttagattcctttcagtaactcaacagaaataaaaagtttacaacaatgaagaaaatagatctgatcctatagggaaatcttatataagggtttaagctagaaggaatttcaaaatgttaagaatctaggtgaccctgagattctatgggctttgcaagaatagacatacagtgatcagggatcctgaggaacaacagcaacaaaatgattgttagctgtagttttaatttttttcagatccaagaaggcctattagggtgaacaaaaaaccaaaaaca

SEQ ID NO: 100980 - DNA, 1140 bp, Homo sapiens
ggtctggaacatcccttcaggattctctgcttctatattgccatacgggtaaaaaaaaataaggctagatatttaagcatatatagtattttaaaaatcttcatcatctacaggcagaagttaactaggtgattcctaaaattgatgaatcaagagatagcaagtgtatacctggtttagaaatagggaggtaaataccagaagaaagagctgaaagatttggaagtgattacctctttgggagttggataataggctgttttcattataagcccttcagcccagtttaacttaaataaaaataataaaagagacaaaccagctctgcctcctttcttgactttatgggctctcatagtaggctctcaataagcagttattggctttaaaaaaagaagaaagagctcactcttcctttctgattaaatctcaaggtggactaggagagaacaagcagacttctatagaacagtgtcttcctttggtgttgtttacgatcaagaaaagaaaacctttgactggacacagttccgcatcatttcccgtttggacaagaagtcggatgagagcctggaacagtatttttatagttttgtggccatgtgccggaatgtctgtcgtctacccacatggaaagatggcggtgagaaaactatcagtatattgtcagatgatacaaggaaagaacattctgattttcaaattgcagaattactttaggtatacctataaaaactagagtctacatgaggaatttaggtaaagatgagtggcttttagaaattcatgaacttctaattgggtccacctcataaaataaaatctctctcccaaaatgatgtaacttcagtgaaagttgaaattcagcttaaaacatcacagaaatattggaagactgccaaccactttctccaaagtataagggtttttttaaagtcatggttttttttaagtcatgttcagatttatcctactctgaactttgcaccttccttagattaagtcttaataactttaagtatttcctcacatgtcgacttgtaactatagaaagtaagtggctgtcatttaaatatcccctgatgcaatagagaacccttttgaaaaatgtcttcatggttggcacttgcaacagcttcc

SEQ ID NO: 100981 - DNA, 3357 bp, Homo sapiens
gagagcagtggatcatgggactccaaaccacgtgtgtcctcaagatggagaaattgcacattgtaaccaatcagtttgctgtgttgttgacattcttgtcagcactctggggcccttctctgtgagatgattcatacctctttgaagatgaacatttctttcaagttaatcatgtaagcagaaattgaggtagcacacattagactacatagttcagatgcagggcctctgcatgctcaggactgtcactgctacagcacctcacacacactcacattaaacggattattaactaaaagtctgacatctttttcacttgagctactaacaaactaggtcttcttcattctgtcatttctagagagaggaagtaccttcaagagaggacaggaacagaaaaacactatgaatgctcaaagctttccttacttgaaagttttgcctaaaactattcatgtttactaactgtaccaacagaaactactaggtggactggaagggaagctagcatttgctgtatgcctgcctcacaccaagctgggagcctgttgtcatggacttggggtatgatgatgcccatgtcagccaccactacatggcacgaaggaacatggtagctctggggcctgccacctgtgttgtgtagactgtagagcatttctcagctggaagtactacacttatacatttcagcattcaaaggatcttcacagatactgtggggatatttaaaaagtcctctctggcaggaaattatataaggcatagtaggttgtttttttaactgcctaaatagtagtataagataaaatggtatatttaactgccacttcaaaatggtacagtagatcagccctgggttttcactcttcattaacattagataacaggagacaattctggcccaggcaaaggaggttagctagtgttccccacttctgttataaatatgttttcactctccaagacaaattttcatctaagactctcttgtccttttttagacagcttgttagttgaaagtgttggctctcaaatcagattacctgtatttgaatcccagctctgccacttgccagctgtgtgaccttgggcaagttactgaacatttctagggcttgttttctgcatctgtaaaatgagcatagtaatggtttctatctcatgagacagtgctgataactaagtgagatgagccatgtaaaaggttttgtgcaatgcttaacacgtagttctccgtaatattagctgttaacgctgttctgcgtaagagagaaattcattcagaaaatgggctcctgttctttgcgtcgtatcaggggcccaaaagagcattttgaattttcactgttggcagtcatgggtgtctcctttcctaccatactagattactggtctaccatgttgtgtattccaggaagtagcaagtaaaggaccagatagtaaataccctgggctagaaggccatatatggcttctgttgcatattcttcctccctttttttcaccctttaaaaacgtaagaaccattcttagcttgagggccacacagaaagtctgcaggccgcagtttgctgacccttctttctgaccctgtgctctaaaatagcaaagtcttgaatcctgaggttgttctgtactgtcattcaggtcaaaagatgctagtcaaaatatagtaagttttagtgttgaaattagagtccagttgaaaaatagcacagtcacttctgttacccctcagattcccacctgaattacatatgaggagtttttaaagttccattcctgagaccaagaaggatttgcgaaggaattcattaaagctggtttgacacatacaccgacttgggcaagctcagtgcttgtgatattactccagattcacttagagctcaagtcatgattttaattttaaattcctggggttttgcgccatcaggtttcatgtctggagcagtagtgttttatgaaaatagtgtctgttgctgtgaagtaagctaaccataatgaacatgagcatgacactttttcacagcaaaagaacagaaatgcaggcacaacctttgtgaaatgaaatgacagtattaaattgcaagtgacgatggtaaggcaaatatttaaattcacaactaaaatagtacttgtaaaatgtaattgccagagagagcgtgccagttcatcattgctcaagccgattctctacaggcagaagcattccacatggttccaggaaaagaaaaaaaaaacttattttaaataaactgctttctggctcttttaagattgtacagaagtaagctttatcaggtcctatcttggtctgagttgttcatgggcaggggacagctcttatgcgtgatgcttactctttccgtttcaagactttctgagctggtttcttctaagctgcagttttgctgatgggatggctttatttatccctaggagagttccagtgatggaggtgatggcgtttttagcgaaaagaaggatgacagccgggcaggtgagactatgtccttctgaaggcataggaaagtaaggtcttagtttgttagttatcgtggagtttatatgtaattaataagtagttttttaaggaggctcttttaaaaagccaagtaagttgaccatcatcaaactcccctagagtcacacatggagcttcagcatggctctggcttcctctacctggcattaaaatttgaaagtgaagtaaatgttaatatcttcagttagaataaggtctgagaggtaaaaaggaattgtgatgacatcgggttttttttgttttttttgtttttttttttaaagaaaggttgtgggggttggtttagtttggtttggtttttgaattttctgaattcagacgtgagaggagctttggtaattggaaggtgcaggcaacaaaggatctgctcattcctgtgctttagagcaaagtcctcacataacttctgccaccacaaaaagacacttctgtgtttgagagataacagaattaattgaccacaacataagctgtatccaaggcaaaattgcagcccttccagtcatgccttgctcctgggccaattattaaaacagtaactactttgagtaaattattgagtcagctttgtttttatttaaacaaaaccaaaagacagtcactcctgttttagttctgtttgtaaatactaatatcctcactgatgtttgaagcccaggatggctccgacccagacaaatcgccctggccagtttcctccgccctcacagctcgtctcagacgtctggtcactgtttaccagcgctgcaaccgcaaggaactgtgccggcctgaaattctgggaccaggtaaccaaggatattggg

SEQ ID NO: 100982 - DNA, 2089 bp, Homo sapiens
agggctgggattacaggtgtgagccactgcacccaccctcaaagtcagtttttaaaagaatcatgaaaaacaggtaggcatcagcagtagttaagctcacaaaagagaagacattaggcagctgagctagcatcaagggtctgatggtaacaaggggaaaatgtccttgttaaccagtggcagcagagctcccttccaagccaaggagtgactttcgccaaatgtgattctgtgggaagattcatcctactgtgaccagggagttgcaacattaggcctcatttgatgtgcacagccttcagtttctagagtgtgttcttttatcagagtcacatgttcagatgactcttgatgggcaggaattacctttttctgaacttgcctgagtagacgtgaggctggagcctcatgctgcagtctcagttgaataaaggtccttgcctgtagaagtgataactgtttggtgatagtttctctcattctcagtgtctcttgaattctcccacaagggagggaaaaactaaggcttggaatgccttcagaagaagggatctattgtcagccctccttgtctgtggatgcagaactctcagatccagagggccaaccaagggacttgatcatctgccgatattggtatccctgaggatctgagaaccaatcctccatgggtacagacggctgacttggaagttccactttattcatggaggatacctgaaatttcagatagtaccaaaccctgtataaactgtattttctcctatataaacatacctatgataaagtttaatttataaattagggacagtaagggattaacaacaataataatagaacaattataacaatatactgtaataaaagtaatgtgaatgtgatctctctctctcgccctgtctctcccccaaaatatcttagtatttttggactgtggttgaccagggtaactgaaactgtggataagggggacctaggtagtatgtgatgcctttttttacttttatttagaggcaacacagataaagaagacaatgctgaggacaaagtagatggcctccagaaacaaacggtgagtcaaatgtgcagtattggtcatttacaccgtctttcatattaagaaagaaatccctatcttggtagtgatctgggggaacttgattgcattactacagttacattgcattttgcccaacattttattataaaaacttaaaatacacagactgcaattgcatttttattctaattaaactttttattttgagataactgtatatttcagaagcagtcacaaaatataatacagaaatcgcatataccttttatccagtttcccctcgtagtggcgtcttgcagtattgtagtacaatatcacaaccaggatactgatatggatagagtcaagatacaggacattctcatgaccacaaagattcatcctgttgctgtcttataaccacatcctcttccttctgccttcacccctctttaaattcctggcaaccactcatctgttctctattttttatgatttcgtcattttaagaatgttctgtaaatggaatcatacagtatgtaaactttggggattggctttttcatgcagaaaagttccctgggattcatctaggtggttgtctgtatcaacagttcattccttttcactgctgagtagtattcagtggtatggaagaaccagagtttgttcaaccattcatccactgaagggcatatgggttgtttccagtttttgactattaagtcctctgtaaatatttgcatatagatttttgtgtgaacatacattttcatttctctggaataaatgcccaggagtgtaattgctgggtcatatgatagttacatgttgtgttttttaagaaattgccaaattgttttccagagtggctgtaccattttacattcccattagcaatgcatgagagatccgctttctctgtattctccatccacaccaacatttggtgtggtcactattattttcttgagccattctggtaggtgtgtagcaataccttgttgtgattttaatttgcatttccctgatggctaaatgatgttgaag

SEQ ID NO: 100983 - DNA, 1853 bp, Homo sapiens
gctgggtcttcactactccagtctttcttggctagagccgacaccactttggtcactgggggggggccttgcctgcccacaccccgggtagaatgactgcagaaacaacagatggtgacaagcagcactgggggccagggagcacatcaacttgagcaagtcccagagaatcttctctgcttgtcctgtggtcatggagacagcaggtgtgctgggaatagcccttcgtgctggaggatgagacggggcatggttctatcccaaatgtgtcctgaggatacacttatgctttgtgaaaggagtagagaaaagaggactttcttcccagtagtcctctccatttctaggaaagcttagtgatcgaccgacctcgcgtgagaaagcagaccaaacactacaactcgtttgaggaagacgagctcatggagttttcagagttagacagcgactcagacgaaaggcccacgagatccaggcgcctcaatgacaaagccaggcgctacctccgagcggagtgcttccgggtagagaagaacctgctcatctttgggtgggtattggctctgcttagttttgttgttattgttgtttgttcccctctgtttttcagtccctgagatttgtctaggatgtctctccagtcacctttggaattatagggcaaagggggatctgttggagcaagagagaactgtgccttctgcccagaatccgtctcagtcaccgtatgctccgcaaccacaatgcagacatgccatgattttctcatatgcctgtcacaacaaatctctggtcctaatttgctgtctggtactgatttcctgcttcctcccaccccgcaaggatatacaaggagtccacacaacacatgttatcgccaaggcatgattcgtgcagggctttggctctggtagaaatcaaaggttcagctgccatgagctcatcattgcttttgaatagtgctgttggactctttttgattccaaatttattccctgctcccagtagtttggtccctccctttttaacattgtagtggccatatgaagctctcagtgtccaacgtccaggtcactttagtgatattcggtgtgctacagtcaggtggtcctcaaaggcctttcgggacaaagcccttgggatgattaacagacctacagagaacaaaaagcatgtatggctcttgtttctcctcctgtggggaggctgcctgcatggcctggtccattctccctccaacacctgtctgtatgtccactgtcagctggggccggtggaaggacatcctgactcatggccgattcaagtggcatctgaacgagaaggacatggagatgatttgccgtgccctcctggtgtactgtgtcaagcattataagggggacgagaagatcaagagtttcatttgggaactgatcacacctaccaaagatgggcaagcccagaccctccagaaccactcaggtgagaggtggcagggccatgcctaagaagcacgattcccatgcacttcatcccctcttcctctgcggggccgtattgctgtgctttgggggacttctctttctcgggtgtttttcagaatgttaccagtgggaaaagatgttgctttcgtttctgcctcagaatctcccagtgttacctgtgatattttgttgaagtacaactggaccctcttaaagtttcccacatctggtcctgcccactaacctgagtctcacacagactccccctctgaattagggatgcacagtgacttgccttttgcatttcaccatcctgtccctgtcccacctctgtctgtgccttttcttgtgctacattccttccctatccttggctaaggctcccct

SEQ ID NO: 100984 - DNA, 1209 bp, Homo sapiens
gtctctacacctcatactgcccagcctaataccttttccatagcagacatttggtaactgttgcactgaaagaaaaatctagaaaagttttaagtgttaactctttcataggaaactagacaccaagtgtcacattgccattgtcttccggggtttgccttcctgcttccaagcttaagctccaaaaaaaaatgatcccttcagttgaaattatgatttcctcacccaatttttaaaataaaaggtaaaaaaagaatagccttgagattttcaattcattttggaagctctgttaagggtttgattttgaatgcaaatagataatatacttaggtttctcttgaagtaacactggtgttttattagtttgtattgtgttcaagcacagtttattaattcttgtcttcttcacaggctagctttgtggcttcaggaaacagaacagatatttccttagatgatcctaacttttggcagaaatgggctaaaatagctgaactagacactgaagcaaagaatgaaaaggtacagcaaaataatattttattccatggaacattcacttatgtcatacatgacaataaattcctacacagctcaagtcattatttactcttgagtcttggttcttaaatggtatttgtaccatgcttaaaatatgcctggcacatagacatcactcaataaatcttaactgttgtcatttttaaatggccattcagtctgttgggcacctgggaaattagatgaaggcaattagaactggaactggatacacaggtcaagttcaggcctctgcctcaaaccaacattctatccctggcatgtgactattttatttgtatttcaacactttctgtgagagaaacttcacacataatagagggaaaaagcatgacaaaagtttgttggctttacctccattctttcagtgtctcatgttttcttaattctgaacatgagaaagagaatggacttgagagtgaaaccagagtatgccttcggatgaagcttttgacccccgctgagattagtagaagaggaggtggtcaggcccacactgtggggttacaaggtaacatttgtgggtataactggcaccagtgcccagcccactgtgaggcaccccttaaatgttgatttcccgtccttcatctctgaccctgtcacctcacttcaggatgagtgtcttctcaggtgagtattgaa

SEQ ID NO: 100985 - DNA, 1109 bp, Homo sapiens
agattggatgcttaaaccttctaaatgagttgtctttagtccagatgttccatatcctcttagctatgcatatgttgctaagtataatacttcaagttagtcatgcagagagtcatggaattccctcttgtgattgatataaagagaaccagattcttaattagaaccagaaaagggtgtttgggaccccatttcctgttttttttgagaagatcacatttatcatgggatcattttttttttagttgagaaatgacctcatttacaatactaatatacatatttatttaataatgaataaatcattgttcttctgcttgtttggtacatctggaggtttttaaagatacaagctctaactaaaatataaagatgtcaaaagtaccatcttcaatgatgcatagttatagtggcttgtgacatctgataataaccaacatcctgaagaatgttagggaccttggatcatgtgctgagctttatttcagagctgcctatagaggactgtctgcctgccctccccagagtatcgcatctgggatttcactagctgaagtttgttgcccacgtcctttgttctaacatgtagttcatggaggaactatgcactgaatcacaaaaaccagatttgaggctgtttttctcctatacattttccactttgtgagtagcctttggtgacctgtccaggtacagcagctctcaaaaatggaggtggaggacctactccggaaaggtgcttatggagccttaatggatgaagaagatgaaggctccaagttctgtgaagaagacatagaccagattctgcagaggcgaacgcacaccatcaccatccagtctgaggggaaagggtccacttttgccaaggtacagggccttctctccagagctgttgggggtgggagagaaaaaaaaatgtttattctctgaaacccattagcagggcttctgtttctctgaatgcaaatcctagaaattggctgcacatttagtctgcgtgactatctaaagatatagatccttagaggaaggaagtctgaatagggagtcagggactataccaagaaaataccactcctcacctttgagagctgatctttaacaga

SEQ ID NO: 100986 - DNA, 2093 bp, Homo sapiens
tcttaagtccttgacagttacaaagttctcggcttctttgtgatgctcacctgactgtgaggcatggcagctggaagaatagtggcacaggaaaccaaagttgaatggccagtttgaggacacctcggctggacatgcctgaagcgatatccaggaggatcagtggaagcatggggctggcaacagctcatggccagaggcaaacattttggaatgaccatgcttcacctaggtgaagtctacacattaccagttgaataggtgcaatgccatgggaaaagcaagaacgtgaatagtcaaacctagtggagaaggcaaagtcatctgaggtgactgatttatatgtgtagcaaccagggaagttgggtgggactgtccagaataagggtcttggatgaagggagaagctttggagtagctgttctcaatgtccactgctggggagctggcaagagatgaattaaggaatagcagtgaagtccaaactgaaattggatagtgtgaactttactagtgtgttgagtcagtttctgaacttcctctaatgctcagcctgaatgaagaaacgaagaagaccagcactgaggaagatccaaggtggaagatgcagggtgggagttcgtaaggagaatgcagcaaaaggttactgtgtgagagagaacatgtgtacaactcggaaggaatcatcctttttttttttttaaagtctagccagtctaggtagagatgaaggaattgagaaatgtagagcagttttaggacaggggactagaagagtggctattagttagtgggactggtgggctataaaaagatgtgatagagagaggaaggtccaaattctgtgtctcccacagagatggagcaaggttcttgcttgcttggtgtgatgaggaagagagcaagagggctttccaaaagcaagagggctggagactgtccacagaatgatgcactctccccacacaaacacacacattcccacgccccttggcatttgcccttgcacccacgtgctataaatatagaatatttactccagagagagtgtggaggctgggacgctgacatcattgtgttcctcttcccaaatcctcctgtcctcctcttgctttccagaaaatgaaggcacaggttcattaggatccaggatagaaactgggtactacttaggaataacaaaagagattaaagttagcactgagagatcttagcaatattactgttttatctggactattaaaaggaaaaccaatttttacgtccccttaatggggagatcttatctagagtcaggtaagtgccacaccctctctcaaaccttgaatatgtctgtattcgcatcaatgtgtgtacaaaattgaaggttatcagtttgccttttctcaccatcatttagaagacagaggctctaatttagtcctggcacatcagcagcagcaagtgttgtctaggtttcccataacacctaaggttaagaagtggcacaggacgataacagtagcctgagaaggaaagacaaaggaaaaactgggtttttgtcttctttcttcttaggagtaggccactgttgctgctacccctgaaggcaaaggcagacctcttgggaataacatgctatcatgctcccctcagagaccacaaaccttcctcttccattgttctgtgatacttctgcttcttattctctgggggactttttgcatctggaggcaagagatccttagggttgaagagggttcaagataacaacggtgggctgcacagttctgcgtccttcctgctgctaaggtccctgaaggcagaattcagaaagtgtgggagcagatgtcctggccaagagcacagccacaagataatgcagctgctgcatgtctgcaggattttggaagtcagttgggagtccagagtgaggagacaggccctttccacaatcgccagaagcaggactcaggaaactcccacactgctccgaggggaagaggtattggacccctgtgcctcttcctctgctgccaccacattgcttgcaccccctatttcttacctaattttatgttttcagaagacaggatctcgctatgttatccagg

SEQ ID NO: 100987 - DNA, 1253 bp, Homo sapiens
acttggtgagacttcccaggagagtggagcacccgcattctctcctgctgccactgcagagccctctgctgaaggcacagaccaaagagtgcacccagcatctcctcactggactgctggtctaggacctaagaattcacttcatttttcccaggatctgtaaagcagagtacaacctttatccttatattctgtccgaggaatagttttgttccattccttttcaggagcagaggagaaaattctagaagatttccgaaaaacccacagccctgatgcccctgactttcagctgcaggccatgattcaggcagcaggaaagcttgtgttgattgataaactactccctaagctgattgcaggtggccacaaagtactcatcttctcccagatggtgcgctgcctcgacatcctagaagattacctcatccagagaaggtgagacttgtgtcaaagctctgcattcaacaatgggacagttcctttcctttgatatttttttgatccattcaaaaattttgtttaaacacaaaacattcaaaaacggaggaaaggaatctccttttaaagatagactgaaattcagagttaaattttatgaccaaatggacccaagtttaactgtcaagagtaaatttcatgacctatgatgtacagtccttgctttgcttaaaaaaaaaattccacatatttatttatattcactttagttggaggaaataattcaaatagcattagaaagggctaagaaaataatgtatttacatttttgttgcttaataatggtgaaagaaatatatcctggaaatcatcactatatcaaattcctgaaagagcataaactggcaactcacagagaaagaatgtggggatattttatgtcctttctcagcaagccctcttaaggttttatgatgcactggctatggcatcccaatttattttcttgttcatactcttagaattccttgaatctaagttacattcctcatgcaagtaaaaagtctgtggtgctgtgtgggttatttggattctgtatggaaactacatttgttacctcatgtgtattactttagattttccgtcattgtgacacatcaatgatctgaagatgacaaatgagtttttaaaaattcattcttaatgataaaagactttcaagatcatagaaactggtagcctaggcattgctaagtctaaagaaaatcttgttttcatagcaaatctcgggtgtcttaacagatgttcttatt

SEQ ID NO: 100988 - DNA, 1863 bp, Homo sapiens
taattagcacatgctttttgtgagaacattcaaaatccactctcagcaatcttcagaaatactgtacattgttattaactgtagtcaccatgttgttcagtagatctcttgaacttattccacttgtctaactaaaattttgtatcctttgaacaatacctccctaccccgccccaccccccagtccctggtaaccactactctaatctctgctctatgagatgtctgtattttaaaacacagtaaataaacgttctggaaagcatctgtttgcaaaataaagcatgttcatcattgtctaaaatgtgcttttgtaagtaactcttctaaatcactctctgtaaatcactttatatttcttcaggaagcaatctcgcagcacacaacttgtttatgcagagtctaccccttttaaatttttgaacagccgtttctgacttgaaacgtgatttcttttgcactttcatcttcccttattttgttttaccatcagagttaatcttaccggtatcatgttttagctccaggttaactcaggtactttgactttgaatccctcagtctgtcattgtctcactgggagggggaacaagtcaccttgctggtgcagtcagttgcataaagatctgctgtccaggcctgtgcttttaggggaagaacagacaaattgtagcaaagaacaccatcagacttaaagtgcccctgatgtgacagattccatgatagagtagatgtcacctataacattagttctttacatactgctacacccaagcatgtatgctgctattgttacttaaaaggtataggaggaattgttttccagatcatctctacttcttactccattctctcagcgtctaagtttccttgtaatatatcactcatacctccgaacataatttaaaatactcttcaggtaattactgtgcatgtggtgtgtgtattagagaaagaatgacagagagacatgttttctccatcctagagaataggtactcttttatacctttctccctttttatcttctgagattgccactagattctcagtaattgcttgtgaattaaaatcatatcccttattccctttcagtactattataaactctccattttcaggggtcgatcataatctttcttttagtctactaccacagtactatgggtaaatgttcaagaaattagagtgaaggttggaataccccagtaatcgttaacttgggattgaggcaggtaactaggtctcatttccctggacaggtaaagaaactgcagtctatcctaaaaccaatgatgcttcggcggctgaaagatgatgtggaaaagaaccttgctcccaaacaagagacgatcattgaggtggaactgaccaatatccagaaaaagtactaccgtgccatcctcgagaagaacttttccttcctgaccaagggggcaaatcagcacaacatgcccaatctcatcaacaccatgatggagctgaggaagtgctgtaaccatccctacctgatcaatggtgagtcaggggcactaggaagtaactcaggactgccatgacctctgcgagaagctaatgataatcaaataactcatgtattgaattttcattatatgctaggatgtacgcattctcacctttttacagagtataaaactgagattcagagagcttgatgaatttgcctaagtggtatagctactaaggaccaagagccaaggtttgaacttaacttctgccaacaagctgcctcacagcatgtactctgccgggcagaagatggatatcactcaccagtttgctgccctttatttgttcaaagtctggcccacactttctacttggggacagggaaatgtgtta

SEQ ID NO: 100989 - DNA, 2134 bp, Homo sapiens
tttcctttgggcattcaaactatgcatggtttagatggactcctggctggggacttgtgaacaacacctatctgatttccttatcatgacagctaataaataaaaatgctcccttgctgtgccttccatattgcccatccttctcacctttgtgagggcagatgttgtctcgcttctgtttcattgatggtgtgaggccttctggctaactagctcgttaattcttatattctcttttctcacatgaggaaaagcagtgcttgtcttctcacctaggccccagcatctgtagtgctgcctcctgtagtccagcagatattagcagaattctatagccatggtgtaaagctttgactttggttgtgtcatcctcagggaaaccccctttcaggagtcttcaagttccacgtcgtcatcacaacatttgaaatgatcctagcagactgcccagagttgaagaagattcactggagctgtgtgataattgatgaagcccacagactgaagaataggaactgcaaacttctggagggtctaaagcttatggccctggtgagagttagcatctctttacataaacacaggttccttttgttcagcttggaggaaacactctttagccattctgcatgtaacttatttctgcctagtcgttttacattagattttcttttttggtctctataactgcaatagtataggaattaagattttttggttacaaactgggtcaacaatttgacctttgccacagattgatttccatagacttaggaggactcttaaataccatgaaatatatgacttggaaatgtaaggtgttttggctggtttccaggcccctaaatgaactggtaccaaagatgatgcccttttaacattactgccttggcacagtgcccagtatctggtggggaggcactcaataatatttagtgaatgagtgaatagttgctttaattaacatgaacgtgctgctggaatcagtgatgtgaaaggaaggttgattcgtttattgactgtacccctatgatggcatattatcttttcattaaagcagatcagaattgccccaaattgagcactcaatgccctggcttaattttccccacgaaaatgcactattttgatggctcaagcactgtccatcatgtatgtttaatttgcgcaggaacataaagtgcttctcactggaacacccttgcagaactctgtggaggagctcttcagtttgttaaattttctggagccatcacagtttccttcagagaccgctttcttggaggaatttggagatctgaaaacagaggagcaggtaattagggacccaaagaattgaggagacagtgtgatcgttatcttcatcaagaaaagagcaggatgctatggggccaggatttagcaagttgtcacgttcctggtaaaatgagcgttacctcctttattttatgtgtttgtgtatgttggggcgggtacgctgattattagcagttcttattgccccagaggatagatgggtccatacccaaaatatcttatgcgcccaaaatattttatgttggtgtatcgggcctccttgcttcactaatttcacatattgtgcgttcgctgattttgcttacagctctggtctcaggagcatggtgctttcttttgcttccctcatccttcatccttttcccttcaaaatctgcaacttgttcccaggcccatcttcttgcatacagcacaatacacaggtagtgaggaaaagaaggcagtcacatacctggagtagttgataagtccacttttgtccagatcaactgcatttctgcagttttcaaggtccagttccaagtctaccttgttggactcaaagctaataaaaaacaactgatagtaataaatactctactagggattatagaatctccactagggattatagaaataacccagacaaatgtacgtgccataagaggaacaaatagtagaggtggtccttcaaaggagagacaggttacatctatttgagaattagaaaagactctagggagagagtacaatttgaaaatgcatcttgagggatgggcagcttttaacaggtgtggagagaagaggtggtaaccactctgcatagaaaaaaaaaaac

SEQ ID NO: 100990 - DNA, 7775 bp, Homo sapiens
ttatcttcccactaattcagtgagatatgtatttttaactcctattttaatatatttggagactaggaggtattaattgacttgcctaaagtcaatagctggtagatattagaactaattttaagaccccatactcttagagctttctgaaaattgtatgcagcaacatgtaggtagttttgcaaagaaggtaaatctgaggaccaattttaggtatgttaaatgcagatctgaaattgcatctgaaaaacttctctgctcttgtagagttgtgtccagagcttagaagccaccactttaaattctagctttgcaaaatgcttgtgaccttttgaccactctgtggcctgatgggaggccttggtactcaaaggtgaacttttgaatgaagtagtacccattgtagtatttcttacagaattgttttcttggattctgtggttccagcaattttcttttttttttatctttgtccccaggagcctccagaagatgatgcaaacatcattgagaagatcctggcatctaagactgtccaggaggttggtggctcatgtttctagcttttatatcattagcacagattacatcttctgtgaagagatttttggctagagaacctagaatgaccattattggctggagtgagagctaggcaagaatattgtctggctagccaacacttatttttacccctgtagagcattttaggacataaaactcttaaaatatctagaatggctcaagctgatgatttcctccattgtgatcctagcaaaagccatatatcccttagttgctgtagcccaccacaatttagcagagggccaagaagaagagatggacaaaaagtcctaatagaggccaggttcattggctcatacctataatcccatcactttgagaggccaacatcggaggttcacttgagcccagtagttcaagaccaacctgggcaatatagtgagaccctttctctatttaaaatacacacacacacacacacacacacacacacacacacatacatacatacatacatacatacatacatacacacatacacacccatatgagtcctaatggaaacgtgggggtttttttcttcagacatctcagggccattgtaggaatctcctataggaaattcttggagtgctagagtatgttggtgctggtgagagcacggcttcatctttacttcaagaatttatgaaagtaaacttccttacttggagagtgactaccattggtgtttcagaagtgaagcgttagtggggtgccagagatgaatgtagtcacttccacaccaggctctggtcctgacatttctcattgtcctgggccagtttgggtttatcagctgagtgccgtcccagcctagaccttggaaggacatcaggaagatcagttttttaccttgcagctgtgtattccacctttggaaaacctgaccaataggtgtcaggaaaaggcctgggaaaatgaaaatatgccttaagaaatctttatggaaatcaggcagagatattgattacctgttttcttttggctcagtaagggtgatctgcctgggatctgggctgataactgcttgctgtttgttacaggttcacccaggagaacctccgttcgacttggagctgttctacgttaagtatagaaatttgtacgtctatttaaagtattctctgtatttgggttttatatgaataaaactttttttctcttgtgactttattatcttctacatcttcagagtcttgcctctaaggcatgacccacaggtcttggctgactcaagtttaccttaggcagtaacgctcaattatagctgcacacagaattacctggagagcttttttaaacctctaaagcctttgctccacccaagaccattggctcagactcagtggggcccaaggattgttgtgtttttaaaaactccttgggcaattctcatatgcaaccagggtagagaaccactctcctgtagcatatgctcttttcccctcttgtatattttcctttctgctacagacccactttcactaatgtgtgttaatgataacctgcccacagctgccctgcctctgttctcagccagtttctctagaagctgcagagagatcagttgcttggaattactccgttttgttttgttttctgttgttgcccttaaggggaaggtctttctaagcccaatctccagcagtttcacaataaaccattttactatttctgtgttaggtggtcaccgtgtttattgaacaccttaaagctcgatcatttgctagttatgtgcttgcctgacaatttgtatgtctttggatagttcctacttacattgtaaatgggccacaatggaagagctcgaaaaggatcctcgcatcgcacagaagatcaagcgatttaggaataaacaagcccagatgaagcacatttttacggaggtgaagcaatatttactgactcatttgactgctgcttttcttgcagcagtaaatactgtgtttacgtttctaagtccaagttaaattcctatacagatctgttgctcaagtcaaattgataaatgtgtgctgatttgcaacaaaactagtctagattcaagtcaaagaaaactatccaccaaagttaaggatcaaaccttataaactgacaactcataacggcgtgcatcttggtctgaatactaataaatagctagagtgagaggaatacgcacacaattcttttgtccctgctccctcaacccactgcaacccaaaaaggacatttcagaaggtcctaaagtttgaatgtaaaaaacaaaacaaatctaaaagtgagagaaagtaaacaaataaataattttatttatgtaaacttgggaatttctaagtattgtacctatagcaagaggaaggactgatggattttaatattaaacaaatctataatgctatatatcagaaaatgccacaaaccttaaccttaatgtgttattcttggaataaagactaaaccctgtaatagagcctacacagccctttgtgtctgttttctgatctattcccaaagtagtggtttttccttggccgagaatagaggaaactgtgctgggatatatagaaataatgcaacaagagttcatattcttgtgggaaggaaaggctcttgagaagattggaacacatgaaattaaggaggaataatactgacgagtagttcaacactgcctttggtcttgacctattcaacatatttgttagtaacttgggtaaatatttttgtgatacaaatagtaacttagttttgaatagagctttgtatccattatttccagctgctttatgaggtagctaaagcacacgtggaggaaactcaggctccaagagcctgcaacttcccacatgcgcagagatagactcctgatgaaatcctaactcctgaacacccaggagacgttctaaccagatccaatactgagagaataaatgtcaggatcagcctgggtttgcctggacagggtaggatgaataaatgtaggaataaatgtaatatcctacattgttcttggaatctttctggttctgaaatgaggaaaatgactgggtagcagttctagggagaaaacatattgccagttcaattaactacacatttactgcgtgtcaagagtaggacatggctgtttaaaaagtaaacgaatcctactaatcctagactgcaccaatagaacagtcctgctgtaccatgcccttttcattcctaaatgctatgttcatttgggtaccaggattcagtgagggactttgcaaaacctgagggcagctgcaagaggactgtcatggtgggaatggggcataggtggagagcggactgcacaatggtaagagcctgggctctgcagtcaaactgcccctcccagcccagcctcacacacacctgggtggcctcaggccatggcataagctctttcaaactcagtatcataggaaaaagcaggactcctgatagaatcagcctcacagaatacctgcaaggattagatgatagttttcttgccgttttaagctttattggagtataattgtcaaaaaattatatttaaggtgtacaacttgatgttttaacgtatgtttacattgtgaaataaccactatagtcaagctagtgagcatatccatcacctcacataagtagggggttttttttctttcttttttcccccctaagggtgagaacacttaagatttatcctcttagcaaatttcaaatatataatacagtagtttaactgtcatcaccatgctatgcattaggtctccagaacttattcatcctgcgtaactgaaattttataccctttgaccaatgtcttccccatttcccctccccttcatccctggcaaccaccatttactctctgcttctatgagtttgattattttatattccacatataagtgagatcatacaatatttgtctttgtgtgtcaggcttattttactttgtataacatcctccaggttcatccatgttgttgcaaatgatgggatttctttcttttttaaagctgaatgatattctattgtctaggtatatacaccccactttctttatccattcatcccttgatggacacttagcttgtttccgtaatcttgactattgtgaataataaaggacacaatgtttatagcagtgtttagctcataggcactactccataagtattagcttttcgtatcattaagatggaaacggtatatgaagaactgttgaacaaactgggttttttttttttaacccagatagggaggggattgctgaagagcctaaagagagaggaaagaatcctcttattgctgctgtaaaggaagcagttcatgccaatgagcaacagttataaggaaggaagttaagttataatttactaatgataaagatcatgatgctactcctaaagaggtagagataaagctgtttcgacagtgaatcaggtcttgaagggtagtaaatttcttagttgggaataattgaatctgagaggcttgccagggatgttgtaaaaagtatcctgcattgattagacgatgaaattagccccaaaagtgccttgcagcctaagtggcagtaagagctcttcagcactcctggaggagggcttcagcttctgggtaagaaagacctgggtgaacggtccagttaacatagctccgtcaacttggtcacattacttaatatctctgagtcagtttcctaatctgtaaggtaattatagtacctactccgtaaggtagttttggagcttaaatgaaagtacttagcattactctggacataccttaagtatttctatatgttgcttcttgttgttttgtagtaaactttttttgaagcatagtgtgcataaagataaaagtatacatctcaatgaatttttacaatgtaaacacatttgtgtaactactacctagatcagcaaatagaacattgtcagcacccaggaagcttccctcatgccccctgccagtgttaactattgttgttattaagaaaaagaaactgtaattcctagttgccaagggctgtgtttgaaataaggaccagtaaggaaaagggaacccttctgctgatttttgtacattgctataatgaccaacagggaattattacctggctagggtgtagccactaagatggttagatcctttaaatttagtcatggagagcaggatttggagacagtgaataaatgccgtgacttttattcttaagcaaaccctttctttttgtgtttgttgatagggcctagagtagggatcacttagagataacaccctaggtgttggatttgaggcaaggggacatacttcctaactgttctcctctgtttgtgttagcctgatgaagacttgttcaatccagactatgtagaagttgatcgcatcttggaggtggcccacaccaaggatgcagaaacaggggaggtgggtatttgcctctcctgaagcatcttcccttctttccacgtatttcacttgttttaacatgtgacccttgtcttagtggtattcctgtctagtcacgtagggtggtttttcagaggttggcagatactactgactcctttaacctaatagaacattaagtttctttcctgttttcccaccaggaggtaacacattacctggtgaagtggtgctcactaccatatgaagaaagcacgtgggagctagaggaagatgtagatcctgcaaaagttaaagaatttgaatctcttcaagttctccctgaaattaagcatgtggtaaagtagttttgtctctctctggcacttctcggaacatgtaattttatgaactttgcaatcatggaagtccacctggcttgttcctaggtggtttctgtggtattttacctttgttacttctcattgaaccctcaattcagtgttttccaccccagatcgaactttcccagcgcccttgtcacctttaggtctcaggtctattttgatgtatgtgacatttaagaagctttgatattggcttagatttcttggtgtgcggctgttgtatggagtcagtaaaataaaatttgtaagtaatggctggtgtgcaagagaagctcagtagtatctttcctgtttcttatctcttcatcagctacctcttttctttgattttcccttcttcactcaactggaatattattaagtggaagaactgtcctttatctgcagatccctgtgactcccacagagagaacataggtttttgataaacattattgaatttatttgtttttctgattctggattattaccactcaactgccaagatctcccagggcgcctgagaagtatatagattatccaacaattaaaaggaggggagttgggatcagagcttttatttatttttttattttgagatggagtcttggtctgttgctggagtgcagtggcacaatctcagctcactgcaacctccatctcccgagttcaagcaattctcctgccttggactcctgagtagctaggaatacaagcgtgtgccaccacgcctggctaatttttgtatgtttttagcagagatggtgtttcaccatgttaagctcgtcttgaactcctgacttcaggtgatccgcctgtcttggcctcccaaagtgctgggattactttggcgtgagccaccacacccagcccagagctttattaaggtgtaactaacttgaaaagagaatcagttgttaaagaatatggctataggctggaatgatcagtttctgtttaaaaaaacattgccatttttatatgaaaaactgttatccagttccttattaatattatttcttgcttttacatcactggaaggttgatactcggaacattaaacttaggtccctgtaggagtccattcaagagcagtgttttgtttttgttttctttggcatatgaaaggtagatagaggtgtctcgagatgcagaactgtgattagaaacttacatagttaatagtgttttgtttgcatggttgattattattctttcaaccctctcccataaatactgttttctgcttttaattcaacttgtcagtcatctattaagcatttgctgtaggttgattcttgtgtgagatatggtaagaaacaaggtacaggccctgccctcaggagctcacagtctaatggaagaagcatgtgtgtgcatggataaataaatacagcaccaggctaattgtggtgtgtggtgtaatgcagtgacggaccagatagaaag

SEQ ID NO: 100991 - DNA, 1042 bp, Homo sapiens
gcagaaaatacaatgaggacctggacttcaaagtggtggatgatgatggggaaacaattgctgttcttggagctggtcgaacatctgcactctcagcctctacactggcctggcaggcggaggtatggcctttgcatgaggttactgaccttggctggacagtcattttgacctagatgacagacgtgtttcttggcctttgctaaagcataagtcagatcattttaactgctgcttgtggccttcgattgacttcctgttgcattgggaatgacattcagactccttactgtgctcagcaggaccctccacgatcacactctcgccttgttttgccaaattcttcatttttttagataaacaatttttccctgtctcattactctccagccaaaagactggctgtcttttaatgccttgaactaacagttcttctctacccatagacctttgcctctgttgttccttctgcttgggatgctttacgtgactggtttatcagttttgcctaaaatgttatctccttagagaggttcttcctgatcttttatctaaagtagattcctgcccctcatcccaatgatattctgtttcagccccttgtgtacttccttaaagcacttaccacaacacaaattgcatttgaatgtgtctgatctctgattttgttttacttgtctctcattaaaatgtgaaagtcttggccgggcattgtggctcacacctgtaatcccagcacttttgggagtccgaggcaggcagatcacttgaggccaggagttcgagatcaacatgggcaacatggcaaaaccccatctctacaaaaaaaaaaattagctgggcatggtggtgcaggcctgtaatcccagctacttgggagattgaggcacaagaatcacttgaacccaggaagcagaggttgcagtgagccaagatcgcgtcattatactccagcctgggtgacagagcaagactgtgtcaaagaaaaaaaaaatgtaaaagtcttttgtataataaatcgctgttaagtggatgagatcaa

SEQ ID NO: 100992 - DNA, 2035 bp, Homo sapiens
taggattttcataattgtaagcttgtcaagggcagaggcagtgttctcttcatttttgagtgcctagtgttcactccaggtccagcgtgtactcaatagaggttggtgacagattagggagatgtctcttcctaagaaacttaaagggagattgtaatttgatgattcttagtatctgtgaagcagttgaacttcctagagaagacatttgtataaactgaaagtgaagtttttggagatgttcatattatttcttacatattaattgtagctataatagtcatgatggggtgtaataaagtgaattctgcattgatccatgtagatatttccatgtttctgtttatttcttggaagaaactcttgtagattccccattaaagcctgccctggtcctagaattccaggatgtgatttcatgacgttgatcacatgagaaatcttagttttaaaaactgcccaacagttttaattctgaatttctccttgtagcaaggagcaaggaccaaccccagtggagaaaaagaagaaaggaaaaaggaaaagtgaaactacagtggagagtttagagctggatcagggcctgacgaacccatctctgcggagtcctgaggagtccactgagtctacagacagccaggtacagctgtgaccgggaggcctggtggagattacggctcctggatgggatctggctgacactgatcgtgttgctcctctatgcctttctctagcacactccctagccctgggctgggcttttaccgttttggtgggtgagcaggtagactgtagtcttttgccctagcccgatcagtatactaatgatatcccagttttttagtggtatttgcctcattcctggaaggtagcaggatattaggctgcagagggagttgatgtggaaaatgaagttgtgagccaagctaggtaaggcctcttttgccatacaggtaatgcatttagtgctcagagtgccaggccagcccgtacagggatattttcataatcccagatgctgggaaagtcagaaatgtatccattatgccaacaagtaaggaaggtttggccaaacttggaaacaaggagttgcccatctaaaccagattcctgaaaatataccaaaatgtgcccgtgacagtgttagggattttctgagttgagaacctctcttgagcatgaagtctaatatttgaaagtgctttgtttcctctgatattcttagcaatttatctgagccactctgctgcaaggctcatttagaataagactgacgtactataccttccaggatcatctggaccttcatgggtttctcactgctcttccctgtaggaaaatgacagctagtaatgtcatagtattaataagcagcagtgtctggtgtcagagcagactcctcactgcctataaactggggctggtggctgttaagtgtctagattggcagaggagccaagcacgttgagttgatgggatttggcagggaattaggtgtttgtagaatggtgatctgtatgtggtgttggggagaggtttttatgtggaatccctcatataaagtaaaacatcatagaggtaacttagtgaagaagtgataggaacagaagagagacactcaggaggtatcttttagaagaaaagagaggtgggattttgcttttgcttttgttttttaagatttaaatatttgagagtgagctggctgataaatggttccctgaagtgattctactgttgagatatgattagtatgtagagatggactgtatgctgctctatttgtagaaagccactgggctgttttgttgttgattattaaaaggtacagcttcttaattagagatgaatccttagatcatcacactcaaggtgacttagggaccttgttttgtcacacttaagatgtctccctgcatttcaagaagtgttacgagattctcaaagtaaatccaaaaaattgatactaattagttttcaaactacatttttagaagtatgtggtaaggatggtgaatttaagcaaaaacaataa

SEQ ID NO: 100993 - DNA, 1035 bp, Homo sapiens
tttggtatattttcaggaatctggtttagatgggcaactccttgtttccaagtttggccaaaccttccttacttgttggcataatggatacatttctgactttcccagcatctgggattatgaaaatatccctgtacgggctggcctggcactctgagcactaaatgcattacctgtatggcaaaagaggccttacctagcttggctcacaacttcattttccacatcaactccctctgcagcctaatatcctgctaccttccaggaatgaggcaaataccactaaaaaactgggatatcattagtatactgatcgggctagggcaaaagactacagtctacctgctcacccaccaaaacggtaaaagcccagcccagggctagggagtgtgctagagaaaggcatagaggagcaacacgatcagtgtcagccagatcccatccaggagccgtaatctccaccaggcctcccggtcacagctgtacctggctgtctgtagactcagtggactcctcaggactccgcagagatgggttcgtcaggccctgatccagctctaaactctccactgtagtttcacttttcctttttcctttcttctttttctccactggggttggtccttgctccttgctacaaggagaaattcagaattaaaactgttgggcagtttttaaaactaagatttctcatgtgatcaacgtcatgaaatcacatcctggaattctaggaccagggcaggctttaatggggaatctacaagagtttcttccaagaaataaacagaaacatggaaatatctacatggatcaatgcagaattcactttattacaccccatcatgactattatagctacaattaatatgtaagaaataatatgaacatctccaaaaacttcactttcagtttatacaaatgtcttctctaggaagttcaactgcttcacagatactaagaatcatcaaattacaatctccctttaagtttcttaggaagagacatctccctaatctgtcaccaacctctattgag

SEQ ID NO: 100994 - DNA, 1495 bp, Homo sapiens
cagcataaagcaggaaaaggaagaaagaaaagaacaactgtcatcagaagaaataattcaaggaaaagaatgaacacattttaaattagcatcctcagattgaggttattttgtctgcaacacaagaatgggtcatgacagaggagcaatcagaaaagcaaagaattaatgaaaatttaaagtgtggttgcctccactaagagagttcaacgaaaatactgagtagggacagcaacaggggaggtatatgagatctgaattcatcaactttcctatcaggatgtcagtagccattgcttaatgttgataaataatgaactagaagcatgagcgtatttggggttagagaggcatcagtcaaaagtgatcctctctggggatttggtgtactgaggatgggttatactttttatttgaaactcttctatactttctgaatttttattttcagttacttttattacttttgataggactacttggtaaaactctgctttttcatcttaagaggaagtaatctttttgtttcctttttactaggacaatatcacaaacctctctaatctccattttgaaggtgttgatgatacggttaaagggactgacagggcagatttagttcacagtttatctacagcagattatatctgtaccaaaataattagggtctttttatattttttcttttaactagtatctttaaaaaatcaataccaactcagttttctatgtagactcagttaataccggtattatggaaaagctgaatcaagtgtgcaaatgagctttttcaaggtgatatccatgttttcagtattgtactcctgggaagaagatcaaagcctataggaaggtcagtgctggaagcttctctgaagcattgttgctggagtggagtagtggttcctggactggacttctgagactctacatgtctttggaggcagtcattgggatcatgagctattttcggtggctgtagtagtaacgcattctttccgtaaggctctgatggatattttataaggttttaattttaaaatgagaagatgaatcattttgaattaatgcatcttagtagataagagctttcaatacctggagtccacggggacagagccataaaagattcatagtagtacgatgtcgtgacatgtacccatatctttcctcgtactcagattcagcactcacttcctaactctcagttctagcaaagaaacctggaggttagaaactggagatatgcttgaagagaaagtttgagaaatcctagtgctttcatatgataatgaaatttcctatttggaaagcaaaaaaaaaaacaaaaaacaaaaaacacgttttttctaggacaaactacagaaagtaaagatgcacaaaatcttcttggctgatgaagccatgtggaagacaggataaaagctttgatggttataactaatagttgtcctacatgtatgatataactgattgggagtttcttgcatgtcat

SEQ ID NO: 100995 - DNA, 1045 bp, Homo sapiens
ttttcttcctgaaatagcctttagtaaaaagtcagcttcgtggcattaaggcacagccgagtgagcaggaaagatgatccatttcagttgtgtatgaagccttctgattcttttactctatatccagggagtgagtatctgaggagtaggtctgtagccagctctttaggttgccctttctcacatagggagccaagcattttgactgagctgaaggttgcttctttttttttttgagacagggtctcgctctgtcgcccaggctggagtgcagtggtgtgatctcggctcactgcaatctccacctcccgggttcaagcagttctgcttcagcctcccgagtagctgggacaccacacccagtttattttttgtatttttagtagagacggggttttgctatgttggccgggctggtcttgaactcctgtcctcaagtgatttgcttgcctggcctcttaaagtgctgggattacaggcatgagccatggtgcccagcctgaatgttgcttttaaaagctagggtcttgagttttggtgttcatgttgttggtgagggcagaggatgagctttggaatttccacacatatgagaatggttcatattctttcttgcaagtcaagaaattagtcaatgtgctggcccaagtggaggtctatctacctggatctctggtcctcagactttgctgtgcctagggaactacctggacagcttgttagaaaagtggattccccagagagaatgattaggtctggggtggaacccaggaatttgcagttcaaaattctcccaggtaattagagtgtggctgattcttagattatcctttgagaaacatgtttcccaggtgaaagatcacaggaaaagtggagcctgtgtaagtttttatatgtaacgtctgctaggaatgaaaaagcaaaaagaggaaaagaagtggttggtgtgatcagccccagtttcagtttttcatccccatttgtttggtttgtcagcccagagcagatttttctcccaaatccagcattttaccttttttcgctt

SEQ ID NO: 100996 - DNA, 1677 bp, Homo sapiens
tgtggttttcaggtatgtgtgacttgttttcctcaacaaaagttaagatatgtatatgtatatataccaagaataaatggatagagctcttctccttgaaaataagacctgtataaggtatcttataactcctattgttatataacagtaggtaatatatccattttataattgaatgaaagttcaaaaagttaagtaacttgtccaaggcacaaaactagtgagcaccattgttgggatttgactccaggttcacctgactgtaaaaccgacttttctctccatagccgtgtgtcttttatgttttgctaaggaagatcagaaatggacgtggggagatttcagtgtcagagaagttggtttttatttgtaggaaatggtccctcttctatagaatttcagtttgcatactccatggtatcctttcaaggactaaaatgtcttcaactttttcctttgtttgtgtttgcatttgagaggcaacaagcagattattgaacatgtctgttctaaacaggtgataggtagagtctagcaaattttccttttcaaggatgatattaatagtgatcagtattcatttattgcttaagagataaaagcctaaaattcttaaataggagaagtttcaattgaaactagtatttattcttttccctccaaattattattattattttttttagagatggggtctccccaatagctgggattacagatatatatcaccaaacctggcttaattctctaaattatttttgagtatgagtttagttcattcctttattgtgtaaaacttaagcaagaaagaaagctccttcaggaagccaagttaggctctgtcattttcctgactctgaaattaaaatttcatttggtataactcatatgtttatactatttttaaaattatagtgccttattccagagaggattggagccacttgcctaagaagacatacacagatgtacgtttatgtgtatacatacaaacatatacacatacctatgcatacatagctgtacatggctggtatagctggaggaggggatcagaaaggcaggggtcaggtcatgtagggtcatgaaatgttaataagggctttgggaatatattgttcccaaaattgttcattatattgaatataatgttttggccttagaaaagcaacatgccagtttctcagagaagctaagtttttaccatttgagaaagaaatttcttattagggaactgttatagttcattttatgttgctataacagaatacacagactggataatgtataatgaacagaaatttctttggcttaccattctggagactgggaagtccaacagtatggcactggaatctggggaggacctgtgtgcagctcctcatcctgtggccaaaggcagagagaggagcaagagaggatgaaatgttaacgagagagggctactctcaagagaatccactcctgtgataacaatattcatccattcatgagtccagagccacctgacctgatctcctcttattagaccccaacccccgacactgctgcattggacatgaggtttccaacacaggaattttgggggacaaattcagattatagcaagaactgttatgcagtagatctgtgctcaacaacagtttttgcatctaatgcttctaaatgcctgtgaat

SEQ ID NO: 100997 - DNA, 1684 bp, Homo sapiens
cttagtacttagcattatttagttgctagctgtgtagatgtaccccctatatcccatgtttatatgttctttgtgtctatattagctttcagccaaaaatgaaccacttttcttacctcctaatgagagaaagataaccttaattaatactgaccatgcagtttcttgccattccttttggactaaaaagaattaaaatgttaacatgcacagggtgtaagggaagtgacatcccaggtgtgatacagggggcagtgatttttggaacagcagtcgtgtagagtggcagaggagctgctatgaggaggatgcacagtcacgggaatcagtggtgcaggaagcctgagagagccgtcagtatgcacagatttccagatagatgaggactgactaggttcccctaggttccaagctctgagtgcaggaccattcctgatctgtttatctagttcattgtctagcacagtgcttgacacattgacaagtgcttaggaaatgctgagtaaatgagaccagaggagaccataatgacttacagagagaccagagtgcataggtacagattcactgtatagaccctatcaagacagcaaatgcattccttgtgcagggaattccgtatctgtcatcatatgcaaatattatatttctcattttgtttctaaattccttgtggagaactttatatttagaattttgaggaaacaccaaatacatgactcctatcttaaggaatttacatgtctaaaatctaagtgcaagggaaggttaattatatttatctatgtatctattattttagaccaagagcactcataaaaaaacacagactgatgtggatactaacaaaacataaagtaatgaggccatcacacctgtgttggtcaggcatgaaggaggtaattttaagaatgcattttaagtggtgtgtgttgcaacgtggagtttactatatggttcagttctttttcagaaggacagcttgttgggaccagatggatagtttcttaatccaaattaaaattttgcctcataatgttcactcccttctgtctggcagggaatttcatctttcatctaccacagaaacttgggtgggatctcaggaatgtaggttacagaaaatgcccataaaataccttacagacggccaagagagaggtagacaaaactcaggattctgcctaactaaaaccttaacaggatttgtttcttagtgaacctagtgagcatactctagtctccagtgtgtggatggagtagcagagtgactgttcagcctctgcaaataattttcatttccagattactttggaggaactgaagtggtactttgggataatagcatatataaagaaggaggatcagacatgagctagtgtggcaacttttttttattattattacagagaataataaggcataaagattgtgtttgagaatttagggtgattagaggagagttttatagccctaataagaagtcttggtttgtatctagaagacattagaaagccataggtgtctgagcccacttagccactggtttctgatgtttacaattttatcaactcctccttttttaaggaattcatgtttacattgtatgaggtctgaaacaaagtgatgagtatgcaaacattgtcataaattccattttgggggaataaggaggcatttaaca

SEQ ID NO: 100998 - DNA, 1094 bp, Homo sapiens
caggtagtttggtttttgcaagtggctaaaggttatttggtgctcagtctggtggctagattagatgatcatacagaacagcacaatttttagttaaaatcaaaggcctacctttgaatgatcctgatttagtatgctaacaacacgttggcacagctccacaagtgtaaaggccgtgtatgtcctgtttgccactctgtctccaaggcctagcacaataggaactaacagagagtgggaactcagtaaatatttgttgagcaaatccatgtattcaaactgggtaactctctttgtctgaagcatgaattggaagggtaatatgcttgtttctctttcttttacagttgtcaaatttaaaagttttgaatcactccccaatgtctgatgcctctgtcaattttgactacaaatctccatccccatttgactgcagcactgatcaagaagagaaaattgaagatgttgctagtcactgtctgcctcagaaggacctgtatactgctgaagaggaagctgctaccctttttcctaggaaaatgacatcccataatgggatggaggacagtggaggaggaggtactggagtgaagaagaaacggaagaaaaaggagccaggagaccaagagggtgcagcaaagggaagcaaggacagagagcccaagccaaagaggaaacgagaaccgaaagagccaaaggaacccagaaaggccaaggagccgaagaaggccaaggagcacaaggagccgaagcaaaaagatggggcaaagaaggcacggaagccccgggaggcctcgggcaccaaggaggccaaagagaagaggagctgcactgactctgcagccaggacgaagtccaggaaggccaggtacgttcctttctcccttctctgagcacttgcctatgccagtgcagaacgatttgcctttggcattagcccaagcccctaggcataaccctgctgcactcctgtgggcctaagcttcacatctcacctgtataggatggggagcaggggtaaccccttggtgctaatgcaaggggctgtccttggaggttgctgttttctcattgcatttctaaagtcgtggtat

SEQ ID NO: 100999 - DNA, 1058 bp, Homo sapiens
cttcctgaccccatgccaagagttgggtaagcagagcccttcattcttaggtcctctagaaaacataaagatgggaagagttttcttcagatatactgtgagaatctcaaagactttcagattattagaccttattttcttccctggagtgaatatgggtataatttattcactgaacaatttgttgagtttttcagcattaatttattaatactagttcagaaatatttgcgttctacttggggtcaggttcagtagtaactaaagcaatttctcaagaaatttctagcctggttacaaaccattaatgtaaccaggggatgaaatatgcctcggaagagccagagttttaccttgtggtggaagatcatgctctggaattggagagtatgggggccaagggaaggtcagccccaccaaagaaattgagagtgttctaaaaagaggcagcgtcttctgtggggagctaggtttcaggctttttgcttcagggtcctcaggaggaaagcttaggagggaagagagtaatataggtggttttgggaagttgaaagacgtggtgggaagggagaaaggaaaggcctagtgtgtggtgctgaattttgggtggtgaccaagggtgaactaggacaaagaataattcccaaaagaattggtcccagaaatcctctagggagagatgaggactcagtttactagtagtatggatcactaaatcatgatccataatttagaatagtgaaagaggaagaatagcaaagttgataatatggttgagtgaataatttacttttaagactttttggcctcatcctgcagagggtctgaagatcatctgggccaataactagcctagatgactaaagagcctcaccctagaatcatgtttcaaaaggacttaaaagggacctatccacctcttttctcctccctcctccaaaaaggaaaagaagtctgagcattaaatgctttcccctctttgaacatatcttaatatatttttttcattattcttactttatgttctgaaacatacactcgaggccagaataaagtca

SEQ ID NO: 101000 - DNA, 1683 bp, Homo sapiens
gattctggatattagccctttgtcagatgagtaggttgcgaaaattttctcccattttgtaggttgcctgttcactgtgatggtagtttcttttgctgtgcagaagctctttagtttaattagatcccatttgtcaattttggcttttgttgccattgcttttggtgttttagacatgaagtccttgcctatgcctatgtcctgcatggtattgcctaggttttcttctagcgtttttatggttttaggtctaacatttaagtctttaatccatcttgaattaatttttgtataaggtgtaaggagataagcatttatttaaatcaaaacattctttagtgattccaccaaaatgaattctggtttcttgtgagattttactggttcatgttaagacctttggtatgttagccagctgttatgtagcttcagttggatgggtttttgttttggacctcatggtaattttgatgaacagaacaggatttttcatttaaaagttaatattagataggatagagaagcaggttacagaagtgagcaactttcagaaagacttgatcctgctcctcttataaatactgatggtaggccatactgataactgaattgcaagaagttgcaaagaatgaaaatagaaaatgatgttcaagttaaagcaatatataggctccaggatggagaattcagtgcctaatagagaagaggctcatgttctggagtgaatttcagctttgatttccatagaacaggattgaaactctgaccttacgatttagttgtataattttgggtaagttcagccttgtcaaatgaacctttatggaaatttttcctttgtgcttcttaactagttgggcattccaccacaacactgttgatgccatccatgatgtcatgagggtggtggccatcaacattgcagacacagactgggcagtagtcagtccccaggagctctttaatagttccagagagttctctggctaaagattggtgctgcatctgtcgagcagtgttgacaatctcatcaaaagtgataattccactgtgtttaatgtttttctgtttctttctgtctattggtggttccttgagggctttgatgattagggcagaggcagaaggtaccacctcaatctgggcctgtctgttctgaatcgtcagtttcactgtaatccttagacccttccagtcactagttgccttggcaatgtcatcatcaacctttttgggagacagacccaggggtcttatcctgggagccagtgcagacatggcatcgacttcacccccggtgcacctcaggtatacgactctaatctcattggggtcaaacttcagcagcatggtggaggcagcttgtgtcagatgaatccgattcaggacgactgaaagaagttgcaccttggcctcctttgagctggaagacaaaagccagccttgtttttctgtcatttaaatggaagtaatcataacatgcctcacatcataagattaggattaagtggggtaattcgtcgagtacttggtatttagtttgtcagtggcaaggaaatctttcagtttaacaataaaagtaaccatcaaactttgtcttttaccatgattctgaggtgttagaagtagcagcaaataaaacatccaccttttaaaaaccctcattcctattaattcactttc

SEQ ID NO: 101001 - DNA, 1126 bp, Homo sapiens
aaaggaaaagcagatgtatttatcccttacacatttggatcatcctcactgccgtgtcctgcatccattggctggagctagacctcacgctcttaaactaatacccgatttgctaatagcctaaaactttcctaaataggtaagtgtggggaagaacaaagaaggagaggaagttgcttatgaaaggtttaaggaagcaataacatttccaaataaggaatgggcataggctatgagctggaacgtgcctgtgagcatgtccaacagttacttaggacagggcctgacaaagagttattagcccaaaccaaggaggcttgaagaaaggtagtctttaaaagaaactactacttctaacacttatgattcattctttaacaagaaggggaactttgaagaggaaactctttactttctacacgtatgtcttattgttaatacccttttttattagctggaattttcccccaaacttctttatttttgactttgtggcagtttgtgatggttaagaatgtcagttttctggggtctgataatttaaagaatagagataaaggagataaacttgtactaacataatttacctacaactgactccactgtaatgaagcttaggagataatttttttctaaattttaactgcgttggttcagagcacttaccatttatctggaatttatggattcttcaggtaaataactgtcctatcaaacactaacccttgcattgattcttagaagcaccatttactaactggacttgcctttccctgatttagccagttagtctctaccctcctccccttcaccttagcacccgatcatgcctgctttccaactacttacctccttggccgctgcactctttgcaaacagcagtaccttggtagacatgtctctctaggacagattccatggcattttgtggttcttttaatagaaaatgcctctaactcttagagggagaaaaatctaaattgacagacattaaaatgataaactgtaattgcggtcccaaggatgattggaatcatgtctttcatttttctgtttgcgtccaacatgccatgaacttacttagaattggaactatctcactttaatcttttttaaattgcaaatt

SEQ ID NO: 101002 - DNA, 1003 bp, Homo sapiens
attcttccattcaaagaatgcttattgcacacctgctaggagctcaatcctattccagactcagggagtatagcatgaacaagacaaagtttactttgtgtgtgtgtgtgtgtgtgtgtgtgtgtgtcaggaacaggcaataagcttaaaaccaaatagatacataggaagtccttactttaagcaaaacagcatttaaggaaactaattttttttctcatcaacattgtaatgaaataatgttgattagaggacctgccttaagttgtttcacttaaagtcgttgttccactgaaaggtgtagctttttccaagagtctggacattaagtaaggtattactgtaatataatatcagggagtaataagtacctggtggaggaaaatgaaattagaataagagagtaacagagtggtggtgggtgggaggtgggggtgctgttttctgtaggctggctagggaaggcattgctgctaaggtgatatttgaggagagtcctgaatgaaatgaggaaagagtaactgggaggtaatcaagagactgaggtgactgagaagggggagagagggtggatctcaaatacagatggaaaggttacttgtccccaggagatgaggcactgttgcagagtttttgaactggagagagaggagtaatttaaaaaaagaaaactttcaaaatgttctgattgaaacttggcaccctttttcttaataggagcatccttagatggtgagtgtaagaaggaatgggagcttttatattgtttgtttttacatcattaaaacatcttcttcgtcatttacgtcttcttcctgtgacactggagggatgaccataaggacaggtagcacaaatagctgcctatagctagtcttcaccatgtggcagacgccatagattgccatcccttttaattctcctgaggccctctgaggcacatgttgtcagcattttacaggggagaagacattcacatgtctcgtcgtcattacagcccaga

SEQ ID NO: 101003 - DNA, 1052 bp, Homo sapiens
acagggtcatctttgaaagaaaagagtaaccatttgtcatttgaatgcccttccattattggttagttgacatgagtttaggagactataaaaataaaatatcagagcacactcaaaaaagaattattgaatgttaaaaacatattagctataaagaaaaaagaaggcttgaaagagaaagttgaggaaacttctcagaaagtagaacatgaagagttttttttttgttttgttgtaaatgagacagaaaattagaggtacagccaagaaggtccatcattcaaatagtaacatgagttccattaaaagaaaacaatagggagggaattatgaagaaataataccagaggaattctcaaaactgaaaaatctgacagtttccagattgagaaagaatccaccaggtacctaacctcatgggtgaaaatagccccaaggcacatcattttgaaaagatgattctaaaagctttccaaaaaggaagagatgtcacatacaaatgggcagaaatcagaattgttcagattcttcaaaataagtggtggaaggaatagaacaatggagtagtgctctcaaaattccaaggagaaattgacctccagcctgtgatttgcaacccaccagtccatccagatagaatagaaacattttcagacatgaaggtcttaaaaacttacatctcatttttaggattttctagagcattactagatgttgtgcttcactaaaatgagagtgtaaacctagagaggagaaacctaggagtccaccatggagagagactgagggagtgagtctctgggaggatggtgaggagaagtcccaggaggcagattagagacaatgatgaaggactcctgatggaggactctacctataatgacccaagagaagaacattgagcttagattgaaaggagtttcaaggttttagaggagcattttaggagaagttagtgattcatagaaaaccatgcaaatttttaaatgaggtagttattatcttcagggaaaaaaatgacacaaagtttcagcaaagtatagttcatggct

SEQ ID NO: 101004 - DNA, 1042 bp, Homo sapiens
atgttgtgtgtataagtagtttgttcttttttataactctgtttttaaaatacccccaagagggagtttacattgggagttgtgagttttttgtgtcttatatgctgttttggaaaacgggaagagaaaatgtcatctagatcatttttagcgccccaaaacatgtttaagctattttgtagatggcttctcatttcaatgttaacagagtaactttttgtttttagcccatgtgtcagtctcatatgattggcttttgtaccagttctgtaaatgaagaaactgagacccagggagatcaaataagttgcccaaatcccacaacgcttgtgttcagaacccagatatcttcactcccaagtctacaggtactgctgttctaccacaaaagacattaaaatgtaatgagtgaaaagttcttgtgttactggtgagacctcttgaaactgaatatatagagtgttgtttgtaaaaccctttgtcttcccccataagattatgacttgaattttcagggctctgaagcttgaatgggcttggctgtcaagaaattggtttattcagtcctgtgttcacagctgtgttcattcctgatctgggtcaattgacattatgacatagggaccaacaacaacaaaaaagtacagtcagattttaccttacaatgtgatatatgatagctctagaagggtctggccacttgcttctactgttcttcttaatagtaattattatcaagctaattgatttttatgagcagattaggatttagaaatgatttttttctgaccaaggaagatgaactggagttggtatttctcctcttgaattgtgcgaatgtgcctcactcatcactgaaatcaaagagtttggccatgtgacctcagagatcccattcagttctgattgtgcgaatgtggcattgtttgaggtatttctggactatagaaagcttccttagtttatacctttatatcatctcaggtaaaacaggttataggaattatagcaacataggatactgcttcaagttaatagtaat

SEQ ID NO: 101005 - DNA, 1114 bp, Homo sapiens
acctttttcccagggttagggttcagatttaattggtaaaggtgtggttgtagcccattgggtggcagaggagttccctgcttgcctgggccagagttaatacacagttgctgggcaagcaagaaaccaaacctgatgggtaggcatgcagaagggagttgggtgccgctgtggctacaaggtgcagaggcatgcagagtccgcattgggaaggccctgttaaacaacgctttgggttccagatgagccaggcctggtagctgggcatgcagagggaagtggtacatggcatcctttttaggagggctgcaggaaacaactctctgggatacaagccagcagaggccatcaggaggctattgtgtgtgtgaggcctggagtccctgctgtccgtgtctacaggagcacaggaaggtggtcaccaggcctggtgtcactgagggaccatgtgctttgtgctttgtgcatgtggtaggcagaacactaccatatgtccccacatacttacactagaccttggagcaagagcaagaacagcaaaagcacagcgcttttgaacccaaaagacaagctcccttcttcctgcgttgtccctccagctgcctctgctgaccaggtttagcatcatgtgctctgtaaaggaggaattctggagagtccagtccattattacagagctagtactgaagggtgagtttggagttaagaggcaataaattgataactggcacagaagccaaatataagagtattgactaaataatagctaagtacaagaacacagattacataattccacttttataaggcacaggacaggtaaaactaatctacattgttagaagtcaggctagtggttacttttggggaaaagcagtattgaaaggagtatggatttgtagtgctaatgttctgtttctggatggggatgctggttacacagctgtgtgcagtttgtgaagagctgtgctttctattataatgtctattatatttcattaaaatttaaaatatggtgtaacctgattcaaaaagtaaaagctttaaaacaagatccagtctagaatagaggaaatataatccagggtatctcatccttttttttttaatgttt

SEQ ID NO: 101006 - DNA, 1064 bp, Homo sapiens
acctcaggtgatctgcccgccttggcctcccaaagtacctggattacacatgtgagccaccacgcctggcctgtgtttgaagtttcaggtggcctgtgccagtggtaaaacttaacagtaaaggcctcaagggattgattcgctacatatatagtggggatgagcttaaagacaacgtatttcttacttttacttattctgtttacaaattcaaatattgatgctgtatattattttggtaattattattacagggctaattttcttcatgtacagagaatttcttcaagtacctaacatgttttggtaaagatgtttgtgtcttcctgcaaaaacatttcctgaatcattttcctgacttctgtgcagcttttcctttttagtaaattttgcttgaagaaaaaaaaagaattaatttttcctctatattaaaagaagctttctttttcatctagagaataaataactcagtaaatagagatgatattactgtttcttcaaaataattcatttcccaaagttttttttcatggtatgtagttttagggaatgagtcatagaattatgggattttatggcatagcatctttagaaaaggattttttttattttggcttcactttatagttgaaaaagagttgattctttagtttcattaatgactgtcctgtatatcttctcatgttggttgttgagtgaggtgaccagctcctcggagggacaaaccatacaatgaaagggagaaatttgagaaatgattggatttggtgtagtggaaattcaagatgaatattatgttggacatattagcacaattctgggtgcgttaatggtgttttttgttttttgtttttctgttggggtcggttccagtgtggggctgaactgtcctctggaaggttgacttctcatgtctggtctgtgtgagtggatgggccctcctttggcaccagtctcttaagtatgcagttgcagccagttggtattcacttggtatttatgacatgaaccatagcaggtgcatatgtgaagaaagcttgaggtttcttttcacaaagttattg

SEQ ID NO: 101007 - DNA, 1023 bp, Homo sapiens
ccatcttctatacatgtagtagactgctgttttcttaagttttgaaaggaaattggtgatacacttgacctatgaatctatgatatagtcagttaatgttttaactacactgataccaagtatgaggtgataatagcctgacctaagttgggaatagtggaaatggagaagagattgctgtaaatgtactttaaaaagcaaaacaaaacaaaaacccaatttttttcttttattgtactaaagattatttctttgattgtataaaaatatatgagtgttggaaaagcttgaaaagtagaaagaggcaagctgttgaactcttagaaatatatatatcatgtttaaaaacatgttttagtggtcagtttctttgaataattttcctaagggtaaggaggttggaaaagttcagtttggtatcaagacatcttgtttatactttgataatagattttcattgcttagtggaaagcacacctccataggaatgtgcagagaatttctgctgacaaggaggtatgcttaaaacatctcacgtatagtctttagagaccactagtatcagatgtttttgtgttttacagatgtaggccttctgcagtttttcatgcctcatggacggtggccagacttaggactggttatgagttcctgtctcttgtttcttttagccttttaagattttttttttttttttttgagacagagtctcactctgtcgcccaggcaggagtacagtgttgtgatcttggcttactgcaacctctacctcctgggctcaagcacctctcctgcctcagcctcctcagtagctgggattacaggcgtgagccaccacgcccagctaatttttgtatttttagtagagatggggtttcccgccactgttggtcgggctggtctcgaactcctgacctcgtgatcagcccacctcggcgtcccaaagtgctgggattacaggcgtgagtcaccacacctggcacttttttttttttttttttttttttgagatggagtctcgtt

SEQ ID NO: 101008 - DNA, 1054 bp, Homo sapiens
cttggtgtgagatgaaggctggggtaagcccacaggtaaaactgctctggtggtcaaccaaggggcttgcctcataggaaggtgaaatgggcaccttctttttgtggtttgtggtgccagcatcccctcttctctttgccaggaagaaagagagagggagaggagggggtagcggaaaggaagctttgtctcattagacagtagagcctgaaattcttgtaattcatgttactctatttaactgagtttattcatgagaatctttgagagagtgactgtagggacatgggtatttgatcagtttgctctcattaatctgctaaccaaaaggagatagagcaccacggaaatgaaataggaaacaactaagttttcattaggaaagtggaagaggagagggactaaagaatgcagtgtagctttgctttgttgggttgtgttcatggccagagggaggccctgtgtggtgagggtaatcagctgtgcaagcaaggaagccagggtggagaggctcagagaagagatttggtgccggtgccaggtagggcaggaatatgacaggaccaaataaaactgagggatccctgtcccgtcccagagcagtgaaataattggagcaaacatttattgagtgctcacgatatgccaggcactgtatcatctcatttaatcctttaacaccacatgaaattttgggttctgttattaccttcattttaccaatgaggaaactgaggcacagggaggtaaagtaacttgtttggggttgcacagttacttgttctgacatttatataaatgcagggcattgaagatcctgccttgaagcgagtgaacccactgcttctgggaccatatctgctataccatagcttcaggagcatacctttcctggcagatcccataatctttgagtcatttagtctccaggttgctaccttgaagttcactcttagaggctggtgaccataatactaaaaataacactgtcctagagaatatttatagttttttcactccctcttcataagtacagactgtgccttatctagga

SEQ ID NO: 101009 - DNA, 1057 bp, Homo sapiens
aatgaaaacccttggaaaatggtgtggcccagcttcctgagccttcttccctgcttacctctttctgtgctccccgccacaggtggggaattggtcttcttagagaagatgggtggcagagttctaaagtggaacctcacatccagtgcagacgtgtttgttcaaatcttcctgagacttggagaggctttatctggacagttattttccgttttaggattaaggccatttgagtcacccacatgcttagttaagaaattgtgatagtattaatgagactaggaaatgattttcatagccaactctaagacatctgcaacctgaagagttaggaatcttctgctattccttgaggaccactgattttcatgaccagtcattatgtagttcctggggttttaatttttaaaaaactattaaggactcctctaatctttaactattcctcagtcatatcttattggtcttatgtccttctagttttatactccttcctgggcatgctattctttcttgttgtttcaacttttgatgactctagaatctatttttccatcccaaccctctcctgtgatccaaacctttatttccagccatacactcagcagctccacctgcctgtccaagtgcaaaactgaactcagcatctttttgtgtaaacctgggcactcgttggattgttaagcatgggatggagaatgagatgatattcaaccaggggcctaggaacatgaggatcacattctttagcagcccctgttctccctgacaccccctacctacccacccccacccttcctatacaaacacgcatgcgcacacatgcacacaggaataggtgaacccagggtaaggccttgctaaccctgtcatttccagctggatgtagaatcttgggagttaggcttcatgaaatgaattcttttttgttttgttttgttttgggactgagtcttgctcttttgcccaggctggagtgcagtggcacgatttcggctcactgcagcctctgcttcccctgggttcaagtgattctcctgcctcagcctctcaagta

SEQ ID NO: 101010 - DNA, 1066 bp, Homo sapiens
cattaaaattggaaggttccttaaaaatcacggatagggctgccagtgtagcaaaatttataatgcagcagtgtctgttttgtttatggcatgagttaatgctatatagtctctccttggtgttcattacagatcagcactgttttctcattaattctgttgtaagggtggttgtatactcacaaagcagtgagtggcggtaggttgtctgggcaggtgcttctgtttgacacaagtgtcactgattatggggcacaacattttgtaacttgctgctttggcttttttgtctgactttcttctaaggatgtcaagttctagatctctgggcatgtattttgtttttgtttttgttttatagaaactgggtctcttacgttgcccaggctagactcatgggctcaaatgatcctcctgcctcagcctcctgagtagctgggactacagacatgccactgcacccagctctctgggcatgtatttgaattcttgctgtagggttttaaagaagtggaaagcccagtgtgctgaaatttagatctgatagttggacagatcctaagcttaaaaggtttggaggttccttacttcaggtttgttctcatcactgccacttgtccttggaatgctgtatgagatgttactaaaatattgtgatttcataagctacacacaaaataaccacactctgtccatttttatctgcactttgtgtctgcagcatttcatgtagcagagctctccctgtgtgttcttgactgtgttgcatatttactcttgaactaagttttgttgttgcccttatgagtgtggttgtggcagatttaagtgttatcgggtcttacacaggtcaccatcattactagattctctgaaaccaaagctactttctatcttgtcgggattgcagaagagtagagttagaaggtacttctgaagacatctatccattttcattattcataatgggatggggtcctagtcatgtaaatatttgtgaggtcacagagctgatctgtggtcaagccttgattagaattcaattttcattttgctgtataggact

SEQ ID NO: 101011 - DNA, 1058 bp, Homo sapiens
ctgacttctttggaccttttttgtcctttagcagtctcagccttgatcacttggcctgggcttggggaagaactgcatccctctggcagcattcaggcattccctggggttatcccccaaattcttccctcgctgtgatcacatgatcacatggaagccattcgttgcccttgcccttgcagcctgatagagttaaaggttggagtgggagacatggaggctcttagagggtcctcagcctctctttttcacacatctgcctctgcagatgggactagaggggaggccatggcaaatgtgcctgacattttcttgctttgaatactgcttcttactaattctgctattgcttcattcaatatgttaggaggaaaagggtttttctttcttacattgaagaagaagaattaaaagaagccctccatttttttatattccccagacttttatgaaatgctttgcaacttccattagtgctaatttttagtggagttcttccttaaaataatgtgtagttgaacataaaagcttatttttagactgctaaaaattttacagagaacatacatataaaaccaggtgttattatataaaaaggattttatattaaagttctcagagccttattatttacttaataagtcaagcaaattgccaaaacaatattagagtaatgaaaaaattctgagagtaactctaggaggtggtcaaacttaaagttattctggagattttttttgttgggccagaccagaagttgaatagaagaaaaatcagtttattttgtttaataatagataataataattagattagggaaaatacctaagctttaggcagattgcgaagggcattgacttgattatttggtttgttccttccttaagtgtatatgagtaaagaaatatatctggactctatctactttgggtccaagaaaaactatcagtattctaagaaatactttgaaggattatgtctggtaagctaagtctagatcatagattttatttacggaaagaattttacataatttaacacagagactttattatagc

SEQ ID NO: 101012 - DNA, 1351 bp, Homo sapiens
agtcgtgtgggatctaataaggcagtataattcaattttgagctcgtaggaccctgttctccaaattagggtttatggaccattagtaatctggccaaggtttctggtgaatccttggcatctctgagcatctctctggggctgtgtgtgtgccttatttcccaccccctgaaaactcctcgtttctgctggcagatccacgaacacagaaaatacacattttaaatatttacagttttcaggatgtctgaaatattgcctgaaatttgattattgtttcccagatggtatgtaagagtaccatcccaatgggcccccaattttgatgtactttgtggaaatatgtttgtggcgtttggggaaaaaacaccggggcagaccactcggttttgctccctaggctgatgtgagctgtgtaacttattgggggtctgtcccattgatttcatggcacagtcgagtttgactgtcagccaaattggaaaatcaggttggcaacctcagagagagagtttttgtgaactttatggctctctggcaacagaaagaagatttgagatctgtgtttgataaaatgattaggcatgaatcctcaagtaacatgatttatgccaagcagagcaggtggtttcatataagcaatgcatctttataaccaaaggccttgggaaaatgcggagtggtaagattattaattttggagttatttttgttccagggcagatttcatagatgaattataagttcttttgaatttaaacatttttcttgattagtgggtgactaaaagctatcctgcacacatctttccccaccgttttgtttgctttggagtctctctaatagtaaccagaccatagtactgttcttggtgtagtctggccatgggcgaagtaaatctagatctgttgcgaaattgagttgtgcttcagtgtggtatcacagtcttcctggagtcacgttttttattctgcagctatttctttgcttttcacatttagctcttctgttacatttaatagcactgcaaactctttcaatatgatcatttttacaacttttaaatattctatatctttataatttttataatttattattcatgtagttggggaagttctctgaactcatcagtgtattagttaaggcaaaccacacaaaaattgaaagacaagttagaagtgaagtgggagaaatacgactaactgctgcatttctggaagaacctttggcagttatgtttttgtatttattgatttactttttgtatatttcaaataccaaagaaaacctgaagcagaatcatatctcattagaagccacatcttatttgtgattttgctgtgaaatt

SEQ ID NO: 101013 - DNA, 1121 bp, Homo sapiens
cgagggacccgcaggtcaggaaaagaagatcctgagtggccaagcgaacggagcagcctccacccgcgtcttctgccgctcagcccggctccctggtactcctggctcccaacgggcttcttcccaaggcccagcgcacccgggagttttccagccccggggaccctgcagcgccttggatagatctccgtgaaatcaggtgtcgagctatggtgcatttattttcgggcctgtcgcccctaccatccttgtagcatcctcaaggacagggcccagtgtttggcagagattcaactaattgttacactctcgaattcattcgttagcaggtaatctttgagtgcccactaaattccagacattgatataaaacgggatattgcggtcaacaagacaaagcccttgctttcatggaataggcgaaagactaaatacaaggggtaggtagtgataaatgctgtaaagaaaatagatggaagaagaagggaaattagaccagggtttaggaattaggaaattcctaaattatgaaaggaggtatggagagtttgccctgcctggctgaatactctgtatggcgtctcattactgccccctcccaccctaaccttggcagtcaccagccctcctcgcgccctgcttgcccatcgtgttttctaagcacccactaaaaaactgattggattctgactgtagaggctcattctacctcaaagcagaaatgatctgagtctgatgattctaagagcagtttgtgggatacatttaggataagcacattttgactgtgtcaggggccatgataatgatttagcagaggcttactaactccagagagagaatatttttagcttctttgaaatcccagttttctgatggctttcagcctgtggccctaactctcttctgagtaacactcttcacttcttggcagacacaagagatttctccagcttgaaaacagaggcagcagccccctgctgcctatctctctcatctgtgtgcatttctgtcatttgactcaaggctggccaagatgtcttatggtctttctttcttgtctttcttcctcccttaaacagatatttattaggcaccaactatgttccaggtattgttct

SEQ ID NO: 101014 - DNA, 1035 bp, Homo sapiens
accagagaaagtgcaaagaatagcttcacccattctctgtcctccaggaacctagttctggtatttagggccagtcagtgcccttggtgatatggcaatgggctgctcaccaggctgagaggttctgaaatcttggaagaggtgtattgtttgttgttgcaacaaatagcttgaggaaaactaaaaatggctaaaagagtacagaatgatgtggatgatgtttttattcagggtggtctgggaaggcctctctggggagatgacatctgagcagagtgagtccatagggtcttacaatccatttcattcttcattcttgattagttgtgtaaatatatctggtataaggtccctgaattccttcaaggaggctcagacctcctccctacccccaaatactaaaagagaccagttttttctcaaagcccaaaagaaataaatttcaaatactgctcaaaagaaactttagcccctgttaagtctgtcagttgccttatgctaagtttatagtcagggtcctctcctacgagtaggtgatgaaaaggggttggaaattcacccaagggaataagtacagaggaatggtaagaattgactctggaatgagagagcaacctcctagtgttcccactgaaataaggtggctactactactaacaactcacacttgttgagtatttacgtgtcgctgagtatttgcctgtgcctggtactgggcttgacctttccattctttagcctggcacatccctccccaacaattttagagaagtagagaggtaggctatcagctgagcagagcccagtggggtttagaaggcagagatggtgaaaatgggccgctggactgtaagcttcatgaggatagggactgtatttttttttcctcaggatttagcacagtgcaaggctattatcaatgtgcaataaatatttgttgaatgaatgaatggatgaatgaatgagtagtactagcgaaagcacagaggcaggagactaggcatgtgtagaattccatgtgtctggagtctggag

SEQ ID NO: 101015 - DNA, 1072 bp, Homo sapiens
ttatagtcatgtagttaataacaaggaccaaagaagatccatccaaactatgtactggcaacatgcctgaccagctttctcctttatcaagcatgaataataggaaaaacaaaacaagagaccttgaagatttttctgagacataaaaaggagaatactagattcagaagaaaaatgtcttgaaaaaatataaaatagttaataaaggcatttactaggatgcgtctttttgtgttctcagtaaatttgaacgctgagatacaagaaacgacagatgacatagtaagattaaaagagttgctaagatgcaagcagaaattgagataaagattgtaaatacctgtaaaatccaatagcttaataaaacttgtattgggattagaagcagtaaagaaaataaataatattgcagaaaatggagttggtgttaaggaagatgcagttaagaagatctcctggaatgtagagaaaaagcccagggaaagaaggtagttatcaatggggaggatatatggaggacagagaatggaaattctgggctgtagggacaaaagatggaagcagtgtcactgcgcccaggggcagggatcaccaagtagaaactggaaaaagagggagccttgtccagcccaagttggagtcacagaagggatgcagtcaaggcaaggaagagggggaaatacccttcttcttgctttccacactgcaatcttctgccagtctgtatctctggccaaacctatcctgaagggagcggatgagggaacctggaaaatgcagcctgtatgggtcagccctactgtgataccaaataagcaacggaaagggcagggatgggcatgagggcaaaaacaggtgaaggactggtctatacaacttagaagacactttttacaacaaaaactgcctgagtcaaaagttgatttgactgacacaaattaaatgtatcagttaaatacgtgaaggccaaacatgacagtaaatggattaaattcctccattaaaagaagatctgtcttagatttggtttagaatccaccaaagccaattatagctatttgtcaaagcttca

SEQ ID NO: 101016 - DNA, 1156 bp, Homo sapiens
gttctccaacagccagggctgactagttcccttgacctggagaaaatgacatcaaatagtaacatcactcaacacctggctgctaattgtatacctgcattctgtgcccttggtatgcactgttgtctgtcctgtgtcttccccttccaacctccccaacttttctttcttgcaggaaaatccaattactaatcctggtacacctactttgcttcactttctgcccattccttaagacagtgtcattaattcaggcctaaaggaaaggatgctggattagtagaatgtgaagtatgttttcaattcagtccaattatattccaattaatttatggtaatttttacaatagagagcatttatagtagagagtactatggaggaaagtgtgataaagagagtgtgtgggcagagccccgggtgataagacctggtaccatggtggaccaccgcaccatgcacgaggagctttaatataagtctttaaacctactcgaatagtggtcttagtcaaaatgaggccatattaacgtgtgggtcacagaccagcagcagcatcattatctgggagcttgttagaaatgcagaatcttgagccccactccagatttactgaatcagaatgtgcattttaaaaagatttctggctgccttgtatgcacgttacagtttgagaagccctgttgtacaaaacagtaaaaaagaaagggaatgatgccagctgggcattcgaggaagcttgggtagaagcaggcatcaagcagaattttgaaggatgtccagatatgggtaattttgagttgacataatatggatatagaaaaagttttctccaaaatctgtatctctaaactaaatgcattttccctttcctttttcatctctctcgtctcctcttctccctctctgcctctgctcctctccgcctctcaggaacagtataaatttgtatacgaggtggcactggaatatttaagctccttttagctcaatgggatggggaacctgccggagtccagaggctgctgtgaccaagcccccttttgtgtgaatggcagtaactgggctcaggagctctgaggtggcaccctgcctgactccaaggagaagactggtggccctgtgttccacggggggctctgcaccttctgaggggtc

SEQ ID NO: 101017 - DNA, 1050 bp, Homo sapiens
ggtaggcaaagtgttcataggcaatgaagagtgcatttcaggggagggaaacccacttgtttgtgacactaacagccccccttcagaacttgccctttggagccgcctcactcaaagtcatctactcactggttgacacagggtgtaaaagcaaccccagcttcagggcctcccctggggttggctttagccactgctccaactgcatcaccattcaacctttcctctgcccactccctttctttttcccttccctttccttccctccttctttcctcttcccttcctcctcttccccttctctcctcttcccttttatctacaggtgaagcttccccaatacatctcctgcttgtcaatctctctcagagtctgattgattttcagagaacccagcttgggactctcccattggcttttctggagacaagtgggtttcccaccactgaaatgcactcttcattgcttatgaacactctgcataccaactgattggggttattactttgttgcccactgataatacataaactctaaaatgtttttccttgggcgatcattcattcataggcatttgctgttcacctgtgcttgtgctggacctgagagccacagagatcttcacacatagctcctgcttgggggagctgaagatgtatcacagagaagaccgtagcaatacccttttgctgatccagccagaggagagaaccagggtcagaagtgcccagccacagtgcccacttagcaatatgtctccaaggcaggattgggtttacttccgaaagcactaccttcagcaagcatcccccaaatgggaaggactcttacagctagagctgtagcaaagatgggatcctgagatgcacaaactggaaaatgcctttctaagtgtttcaaaatagtgcttttaatggaaggaaatgctttagttaagcccctcaatgttgatgatgatgctaatgattgcattttgtttgtttttagggatttatctcttccaaagtgctttcccacttattacctagttgtctagttaagcttggaggt

SEQ ID NO: 101018 - DNA, 1102 bp, Homo sapiens
aagagtgctgttcaatagaattttctgcagttacagaaatgtcctatatgtgtgctgtgtggtatgactgccactgaacacatatggccattgagcaccagatatatggctagtacaactaggaaactgatgtttaaaatttttattttaattaatttaaatttcaggagccatatgtggctactgactgccattttggatggtaaaggtctacaggaaagacaatcagaaaaagaaaaggtgccaatgagcctgtgtttggccagcttgttcagaagtttccatgagagttcagtagagaggcagcccttggtagaatggtgagctcagaagctgggagggcttcctggaggcagtgttgcttaaattgagacctagggaatgaggaggagttagtgaagaagggaagagtgtaacctagaagaaagagcagcctatgcaaaagcgcacacagagaaggtacagggtgtgtttggggagccacaagtagctcagtgcgtggggacagagagatgaggagagaagcaaaggagcaggcagggtccaggtgaagaaggtcttcactctggatttagactttgttcagaagggagtgtggaacattgggaaggtgagtgcccaactgtttgtccttctctgagcaaacaggcccctagtccatgctgttctctccaccaagcatgccattctccacctctccaacatccggttcacactggccacatccaggaccatctccactcttgcagcagaatgcaccagctccttctgagttgccactctgtcatggtcatccctctgtcagtgccttgcgttgtcagcctctgctagactgtggcctccctgagggcagagatgggtcccatacggagctcctcactcagacctaagaccattatgctcttcctgccatagctgacttcccagttggatacactgaaacaggagtggctcctaaaatcagaccagtcttatccaattgtcccactgggtatactggaagcaggtacttattttctctgaaccgtaagttgcttgtcgataaatgggaatacctacatcacagattgttttgaaggtcgaataagctaaactgtgtaaa

SEQ ID NO: 101019 - DNA, 1056 bp, Homo sapiens
ggcttaaacgttcatttttcattggaggtttatcactgcttatgtatataagcagttgaatgactaaccccaaattcagaaaaatgggtgtttcttggggtaaagaaatgtatgaattagaagagtgcagcaaagtggaattcagagatatggataatgttgtttctcaaactgctggtgaagagtgttcttctgatgatcgttctttacactttatgtgtagcatatatatttcccagcacctggaaatgtaatagaatattaataacaaaaaattatctcatgcaagtttcaagtaaaagaggaaaccaatattaaaattgcaaaatatctagaaaataagaacacaaaataatacaaataggtataaaataatacatatcagacctgatgggatacaactaaaacagtgaacttctggacttaatgtctactctctcatgtttgttaatctgtgtgaattaagaagttaactcaataaattagaattttttcaacagaataaactgaaaaaagtagaagaaagaaaattgggtatccagaaattaacaaaattaagaaaaacaatggcttcttcaaggaagctaggggggtaattggcccagtgattttgcacctggaaaacacacacacacacacacacacacacacacacacacaccccatcaatagagaacatatgaaaaacacaataacaacattaggtcgggtatggtagctcacgcctgtaatcccagtactttgggaggctgaggtgggtggatcacctgaggtcaggagttcgagaccagcctggccaacatggtgaaaccctgtctccactaaaaatacaaaaatgagctgggtgtggtggtggatgcctgtaatctcagctactcaaaaggctgaggcaggagaatcccttgaacccaggaggcggaggttgtggtgagccaagatcatgccattgcactccagtctgggcaacaagagcgaaactctgtctcaaaaaacaaaacaaaacaacaaaaaacaaaaaacatcacaatgacaacattaaaacattgcagcctgatt

SEQ ID NO: 101020 - DNA, 1035 bp, Homo sapiens
catacatttctttaccccaagaaacacccatttttctgaatttggggttagtcattcaactgcttatatacataagcagtgataaacctccaatgaaaaatgaacgtttaagccttgatgtcaatggaatcatagtgaatgcattccgctctaatattcatttttctctgaacagtatgtgtggaattcatccattttgatactggtggctatagtttgctcactttcactgctgtgtagtagccccattgagcgtaaatatgacaatttacttctcattttttctatgatggtccatttagattgttatcaatttttagcttgtacaaacaaatttgctaggaatgttcttgggcataatccatgataaacatgggtttatttaggttagctcctccaggatggaatggctaaaatatacgatatattcatcttttgctttataataaaatgccaatgtttgcctgaagtggcttgaccaattgatcctgcatgtatcggcaccctcctgctccccatccttgctcatgtttgataatgtcacacttttaaacatttcttacatatgggatatgaagtcatatcacctagtacttttaatatctgtttctaagattttaatacaatttctcagttctttgtgatcatccaactttataaaatgcattttctttgttcacgcttttcttttcttttcaaatgcctttttaaaattgattcactgagattcatgatttactctagatacttatttgttgctggctttgtatgttgcaaatattttctgccagtgtgtggtttgtcttttcaattgatttgggggtgccttttgaagaagagaaattcaacgttttaacacatttgattaacattactatttgtataatctttaagaagactctacctcacagtcaaaaagtattctgtctatatttttctcttaatatgaaggtttaccttttataaataagacatttattcatcaaaaattgattctgtgcatagtgagtgataggatcccagcaatttttccaa

SEQ ID NO: 101021 - DNA, 1027 bp, Homo sapiens
atgactaaggcgaattcattctcagaatgctagcttattatgtagataaaatcttagaattcatatgagaatttgccaatgtttctataataagaaatattaaaatgtcaaattacaggctgtatttcgtattggaattcttatctactacaagtgaatcttggtacaaccactttggaaaaccagaagcgtatggcaggatctacaaaaactaagtatatgcttaaccattaattctacttctaagtacaaatgagcagacatgaacacctaagtatgtaaaaagatgagcccatgaatgttcatactagccatatcccccaaatgtaaactgtttaaaaatctaccaacattaatgtgcataagttatagtctagtcatgtaatataaacctatacagcaaagagaatgaacaagctgtagccatattcaacatgatgtatctcacaaaaacaagggggaaaagctagtcataaatgaatacattctctgtcattccataagtgtccaaaagatggacagctaatatgtggtaaaagggatgaacatagtggttatctttatgaggggaagtcactggttaagatggttctcatatcatggtgatgtgttcattctttttttttttaatttatttttttattatactttaagttttagggtacatgtgcacactgtgcaggttagttacatatgtatacatgtgccatgctggtgtgctgcacccactaactcgtcatctagccttaggtgtatctcccaatgctatccctcccccctccccccaccccacaacagtccccagagtgtgatattccccctcctgtgtccatgtgatctcattgttcaattcccacctatgagtgagaatatgcggtgtttggttttttgttcttgtgatagtttactgagaatgatgatttccaatttcatccatgtccctacaaaggacatgaactcatcattttttatggctgcatagtattccatggtgtatatgtgccacattttcttaatccagtctatc

SEQ ID NO: 101022 - DNA, 1075 bp, Homo sapiens
ataggaaagtcaaagcattttagctgaggaaagggaaaatcaatctctttccccagaaaggaagaaaagcctactatgcaaaaatcagtggtgagcaaggaaattggtaagcagaatgggaaatctaaataaacactgactatataaaaaatagtaaagttcaagttggtatatgtgtgtgtagaaaacatgatacaactaaactattggtcaaccataacatgtaaactgagagggagtttctatttaatgtattccaagatctttggattgctgtggaagtgatgtattgatactacttagacttcaactgagatgtgtgcaattttttttttagagatagggtctccctattttgcccaggttagaatgcagtgactattcacaggtgtgaacatagcacactacagccttcaactcctgagctcaagtgatcctcctgcctcaacctcctgaatagctagaactgtaggcacatgtcactgtgcctggctacaattttaactaaaagatgcagatatatatatattaatttctgaaacaggagagggaaaaaatggaattaaagagagggtaaaaaatgtttagaaatttaaacatgaagtaaaaatatagaataagttgaaaaactaatatcaaacttatcaataactacaatatatgtctacgtcattgtactaaacttaccaatcaaaggagacattgtcagattaagttgttgaaagaaaagaaaatgcaattggctggaaaatgacactggtgacttagtttttaaattttccaaattccctcacacaaacaaactgaaacagcaaaacaaaaccccatgaacaatatttacaaaacacctaggaggcaagttatccctataaattacaaataatgagtagagagggtcaaactattgacaatcaggttgtccaacaatgagacattcaaataaaatttctggactttaaaagaaaaatgaattctgtgttcattcaaggcaaaactaaatcacttgtcaaggaaagacgatcaaattattatgagactgacagctacaagatctgcatggtgtcaggactactca

SEQ ID NO: 101023 - DNA, 1027 bp, Homo sapiens
tgacacttggaattgtatgtaacatacacatgattcatcagagacccagacccaagatattccaggcagggcatcaggagtggaagggggacaaacatttccttaacttcagaaaagtaggtttgaaattaagagctttgtctttaacatgaaatattgaactattcatttatccattcattatccatttattagatgaatggataatgaatggatattcatttatccattcatctaaccacacatacttattgaacatctagtatacgccagacactgtgagcagtattgggacataaagacataaagtggacataaagacagggaaatctggtgctattagatggtatatggcagggctgttcggcctgtgaaagctacccaaataaatgaaatttgagctgagttctgaagggtgggtaagcatgaaaaggcaaaatgtgagagaaagatcttctaggcagaaggaactaaatatgcaaacacccgagagctggaagaagcataacatgttccaggaacaataagaaggccagtttggaaaatggttcaaatttagaagggccgacaggagccagatcatgggcctatgaggccatgctgaggatttcatccttggcctatgaacagtggaaaactgttgaaggattttaaacaagagagtggcatagttttgcattttaaaagattctatattctactaactagaacttggaatttattttttccttagaaataacttaataaatggtagttctatggagccagaataatgctattaacacaatgcatccagctaaactgcctattggaaagctggtcttggttgccaaataccacttacaacttggttcctataagaaaattcattccaaattccagacaacctaattacaaatgacattttcagggacagcctacaatctacttaggcttgtgaaaagcctccaacatttttccatatcaaaggttgttaagaaaggtgaggaacagacttctgattttgagatagcaaagacccttctgc

SEQ ID NO: 101024 - DNA, 1065 bp, Homo sapiens
tttgcagggtatgatgatagagtaacaaggcagatgttttaatcaatacaccaggattaatgccttaaaacgtctaatatgcataaatccataaaacataccccttatataaagagatatataatttgttgagggtcaacaatgtgcaagaattcttccagatgttttatgtgtttgattacctttcatctatgaaaaacaatgcatgaagaagctatcattaccccaatttatacaccaggcccctgaagcatagagaggttaagtacattacccagttatacacacagtaaggggagaatcgagtccaattccgatgaccacattctgtgccctgtatcttttcaaagaagcctcctttggtggcaatttacttgtggtaatgaggaggccatggctcaaatcagacttagacacactgagaaatgctttcaaaaccaagtgtatgatagatacatagtgcatcatgcttatttcctttcagtgttttctggaagggctttcagttttattccacagatgtaatctgggttttctctttttttccacaggtgtaatcttgagcaatttctaaaacttagatctacctataaaggatgcagcttagccccgcaatgcaataaatgtctgtgccaggagccaaagtggttcctttgtaccagtcggaatttgtgtctaggcaagagataccatgggttaatagggggtaacttggctttggatcaagaatgcaactaggtctgctattcactggttgtgtgttttgaggtgggatatctattctattggattcaactgatagaaactcaactaaaaaaaaaccctaatccaaagaataatttcatggttcatataatttaaaagctcaggggtggcatttgccttatgcctatcttcatttcctccctctctccctctctcccctttcccttcccactcacatcactgcttttctctttgttattttcatttgctagtgagtcccttcaagaaattggaacggtggtctggagatacttctagtctttaatggcaggctctcactgtccttcctaaagtcacata

SEQ ID NO: 101025 - DNA, 1055 bp, Homo sapiens
gcaattgttacagtccttaaatgtagcaaaggcagacctcatttagaggtgattgctgcatcctagggaccagcagcttttgctgccagacacaagttaaccacagggcgctggtgccaattcagaggcctcctagaccttctgttccccaggaggaagtagcccacagacaggaagagtcattataaaaagaggctgggggtggagagtggagggagcagtgtccctgtgtattctgcttccactgaggaggaatccaggaaagagagagtttcactaaagcccctgggattctagcagcacctagaagtgtttccttccagtggccacattgtgcttgaagcctcctgggtggggtgtgctttatgcgggagccctagtcactgccctcagaaggcttgcagtctgctaaaggacacagcacctccaattacatacaaagagaatccatattgaggaccacatatactagtattcacttaccttggggtcccagctacttgcagagagcattgtgaatgggttagcagtgggaattaaatgaaagggccgtctatagagatgtaccctgaggcaattttgctccctatgagaaattggcaatattcccccagaggacatttttggtcacattttggtcacaacctggcgagtgtgctactggcacacagtgagtagatgccaggaatgctttgaaatatccaacaacacacaagacaagatgaccctccatcacaaacagttgtttggcctcaaataccaatagaactgaggttgagaaatgctgctgtaggagaatgtagccactgtacaaaccatggaaaagcagggagagaatcactgcccaacctcgccatcctcctattctccaatcccatgcctgtacctcctattggctgaatataaccagaagttcgaaaccaagagcccattgaggcaacctgtagaagtcggcttccagaacatcagtcattgatacccttagaggttgagcgaaccagactcaacccagagttcccagtgagcctggtcctcctcagacaacaggatgggtg

SEQ ID NO: 101026 - DNA, 1025 bp, Homo sapiens
aacgaggggtgctgccatcagtacccttacagcctgatgggcgaggcagccacaatagaaggcactgttaagccatgggaggaagctgtggtcagtgagtgctcagatgttggaggccatctctgcctggagaccagggaagtgagactgcatttggctattttttttttccctatgtatggttccttttctacacttaaaaaaaagatagcaggaattggtttgaaaaactatgaaaataatgtacatgttgtattggaaaaatgcagaaaacagctaaaatagaacctcaagacatcccataataccaacgtctatctagcctctattaaaattttgtgtcttccctaacaagttttcttcttctcatctatattttacaaaacataagatgcccttgagtatactattttgtacactactcattttacaaaccaatactctcgcatttaaaaaacagctcttttgttgtgtcttgttataaaaggaatacacagctatttcaaaaagtttcacaccataaaaactacacagaaaataaagattgccatctattcccatacctgaagatactgtctgctaatagctgtatgttattttacaattttaggttcattttcacagttatatataaatataagtgtagatggacttaaacttgctatttcctcttaatacatcatagcactctttttacttaaataccttttgatcacttgtgtttttttttaacagctatacgataggccatgtgcatatatcataaattatttgaactcatttttatggatattggggttgctactatagtatatatattcatgatttcaaatagcagaatgatgaaaaggcttctgtgggcatatatatgttctagtccacttaattctttgggatatagtcctacaagtgagattactatggcaaagattgtaaacattttaagttttggtctatatatgctgttggcagaattataagatgatctctgatgatctgtgtctttctttaatcccctccctttg

SEQ ID NO: 101027 - DNA, 1067 bp, Homo sapiens
ctgacctcattcagcaggaggctgaatgatgcaactcacgaccaagggcccatgtcagcatgggtcttaggaggtgctaggttgtttagggtcctgttcattacgattttttgaaccaaagggagatttcctggaagtctgatgtgggagatccctgaagccattgatggaccaggcaagagcctcatgtgctccaagaggtgggtgaaatagctatggagccaggtggagcctagtggggctggatctgggcactgatggaggggttggggaagagaagcatgttggtttatttcatggcagtctgggctggctctcacccttgacagaaggaatgcccacagccaggaggggatggttccatctcaaggctcagggaaggaaggtgagtttggatagaaagttcagtcgctgtcattcctgaccatctcagcaatgagtcacacgtggaacacaaagataaacacatggagagggctatgcaggtggcgtgacgggcctgagagtggactgggatacagggaagtgggagaggtgtcaggcaaacctgacaacacatctttatgcctctttaccagctttgcaaccttgacaggctcaacctcttggagcctcactattgtgatctgtacattgggatggtagtgcctgcccttatggcagcgttctgaagatgaaatgagataacataaaagaagcacctccccacccagtaggatggccaccatgaaaaagacagataataacaagtgttggagagaatgtgaaaaaattggatcctcatacactgttgttgtgagtgtaacatggtcagcctctttgaaaagcagtttgggagttcctcaagaagttaaatgtacagttccatgctcagcaattccactgctaagtccatatccaagataaatgaagacatacatccacaggaaaccttgtacatgaatgctcatagcagtagtattcatgatcaccccaaaatagaaaccgcccacatgcccatcagctgatgatcggataaattaaatatagcatatccatacagtgaacactttttccacaataaaaag

SEQ ID NO: 101028 - DNA, 1059 bp, Homo sapiens
tgaaactgtaaaagaatgccagggcttgggcaacctccatgcagccataataaacaacccttccccaggatttctggattgttttaccatgtataagagtaatcaagttcgaggttactgtagcctaatattattcaaattgtcggtcaactctattaatttcataagtacaattttttagaaatatattcagcattaactcggtgactttccttaaaagccaaagaaagagtcctcacagtctagtagttaataattagttcttatgagttatatataactacactgtatgcaagtccttaagattccaatgtggacactcagcttgcagaattcttggtgacgatatcaagctggcagtttacagatactattcagcaggtgttttgaactccatctggatctcgttctaccaactagacctagaattccattagctgaaagttggatttttacttggtcttaaaacaaaaaataaaataaaatctaaggcttcaaaaaagagatgccacaaactgtatgtgtaattcagattctagcatttccaaatatgagaattattaccatggtatttgttcaaatgtaatcatctgagcatattactacacatatctgtgactcctattacaagcagttttagcaacaaaaataataacaatttttcaaggattataagttcatgtaattgcacatgggagaaaaatatggatgttaaagcctcttaaatgtggaaatgcagcacattgttgcctattatatttttcaggttcttgttcacgaatttcatcttaacctatattcttttttttcttcaattttgcccttttgtgcatagatttcaggaatataattaaccattgcatggaatttaaaatatttcttgatactggagttctctttgctatcaagtggttatttcaaattttatttacatagttattatttttcatctggggacacattcatttgttttcaatgtagttctaagtgtgactttccaaagtttatcatccatccattcatactgatttaaaataaaattaacttgttatgaaacct

SEQ ID NO: 101029 - DNA, 1041 bp, Homo sapiens
gttgtagtggaattagctgtaaccattcttaagtatctcagtggtgtatcgtggtagtatgtaacccaggtatttttgttgcttggaaatattccttgtaaggttattgaaccactatgctgaacagagatgccattttcttgattattttcaaaacaggcctttggtaaaattcctcattgaaacctgattatgaaacttactactttaaaaggacataatgatatgttactaaactgggtaataccttatctcagctttgcaatgcaatattcatccataaaaataattgatttgatcctgctgatgagacttctctctttccacagggtaaatgtaagagtttccagggtttttgatctttataaatgatattcaaagtactttagcagcccccgtggacttatttgctgatgatcatataatacattttgaaattcaatcgcaagatgatcatctcaataaagatttacagtctattgcaaactgttgccatgactgtgtaatggattttacatgttgaaaacacaataatctggctatcaatataaaaattatgagttggaatgcaattgtggtattttatttttaaaaaacgttggtgtttaagttacagctaaaatcttgaataattcacattttacaaaatgtgtcatcaagaagataatcttccttcctgcatcgccactgatggtggaatgttttttgcctcgtaattaatttttaagagaattccagggctggtatctatttgtaggtggtgtttattggtgttggtagtctgagattttcctccttttcctattctattattaatcacgctggaaatgtactcattattttacaaaacagaaagtgagagagtatgtagagtggaaggtataatttctgcccagaggaatttacaggctgggttaggattccaacaaaacagcaaaaaaaggtaaaacataaaggcaagcattgaaatagcatgcttcatggaggaaaaacagcgtcagcatggaaagagaaatggtcttagaatcatcttgggcggtg

SEQ ID NO: 101030 - DNA, 1049 bp, Homo sapiens
ctgccgttagaataatctggttgccccatttctgggtccttttggtactccatgggttaaattggttgtattctgctttcttacctgatggacatacgggcttcagttttcactgctctgcttaatcagttaccatttgtccaaccatttttcttcctccaaaatgtttgcatctctcaattgctgtcacttttttccccattctcttggtatatatgggtttgtttatgtctttttaattcctacactgtcattttggtgcatttggaagaaaatggaggttaatgcatgtgtttactttgtgatgtttaattgaaagttgaactcttctcaagtcgtttttctatatgtagattactatttatatacacacatgtgtatgcatatgctcatacgtttgctaaatgtatatatatattttacaaaattaggtgcaagctataagtcctgttacatggcttttttttctcatttagaattctatcattaacatttttatgtcattaaatattcttgaatgcttggacttttacatcaattaaattatatcatattgccgtattattacttatttaattacgtccttacacttgggtgttgaaattgctttcagtctttcagtacagtaatactgtcgtgagatttttcacctaaatatttgttatgatttctcattatgtcttctagattgggattattcaattggtggtgtgggcattttaatgtgatatgtgattcatattgtgttatatgattcacaacttgataatgtgatacgtattatcaaattgctcctcagaaaatcattgagacaactggtagtccaagcatcaggtaattactcatttactatttgctaatattaggaattatcactgtttcaaaatcttagcttatttgataagaaatgacactgcatcctattgacctggtttttccttattatatagccaaatatattttatgttttgtcctctgtgaattatctgttcataaacatttttatattttccatatatgtatattataagcttttttatggagaaagg

SEQ ID NO: 101031 - DNA, 1001 bp, Homo sapiens
ttatatctttgtccctaagaacctaaacatcatgaaaatatccatatcaaactggctgggcacggtggctcatgcctgtaatcccagcactttaggaggcccaggcgggtggatcacgaggtcaggagatagagacgattctggctaacacagtgaaaccccgtctctactaaaaaaatacaaaaaaaaaaaaattagccggccatggtgccaggtgcctgtagtcccagctgctcgggaggctgaggcaggagaatggtgtgaacctgggaggcggagcttgcagtgagccaagatcgtgccactgcactccagcctgggtgacagagcgagactccatctcaaaaaaaaaaaaaaattaaaaaaaaaaataaacaaactgagctcagatatgtgcattatatgtgcaaaaaatgattgatataattaacatgtaaagaggttttaaaaatcagtaaaaggaaaaataatccggcagacacacatcagtgttggtgagacctctggcaaccaggtggccatacactgttggtataagtacaagttggtacaatatttagggacaacaacttaaaaagtttctgagcagataaatgtacactttatgtcttcatgacttcatgaaattctgggtgtgtgacctatgacatggtgcttgacctcccagagtgtcagttattccgttcataacatgagaagataaatcaacttgcttcacaaagtggctgtgagggtcatttgggatgattggcccaggaaatcattggagttatgaaaccctgagaaaatggtgtaccttcttgattaatgtggggttgtcacattttgcttctcttccccacccccagccacttgaacgctatctactggagtcccttctcctgacgctgcagctcattgaggcacaaaggagagagtaagagccctaaacctttgtcagggtaagcagggctgcactgagggtgggtgctcagctgggctcagtaagtatttagtaccaa

SEQ ID NO: 101032 - DNA, 1021 bp, Homo sapiens
agaatatacagctgccagataaatgggaaaacctgtctgtgctaatatccacatagatgcttgccttgacactcagttttctgtgacatcatacctagattcaaaaagtattatattccaaatggtgtaatgggaagtgaaagtgatggagactggcatcgttcaactaaaaaagtgcttcttctgatgacaaacactgctgcatttgacgagttagaataaaggggttgtctgggaggcagaggttgcagtgagctgagactgcgccattgccctccagcctgagcaacgaaagcaaaacttcatctcaaaaaagaaaggaagaaagaaagaaagaataaagaggttctaaagtctatgtgaatggataataaaccactatgtcttttaacctaacatgtgtataccacttcctggacagtgttctaagggctttacatgtttttacatcgtttaatacttcaacaacactgtgagctggatgttattatcacccttattttaaagaggaggaaactgaggcccagaatgtcaactctctcaaaagtgagttacagtaaatggaggagctgagatttgaattcaggccgtctggatccagaatctgtgccctgaaccactctctatttttcaattaatattttatgaaacgtgattttaaaatgtatgtgtaattaaattgtatattagataccataagtggacttttgcctaattcaatcatctgtacacttaaaattgtatttattaaagttgcccgaaaactttttttttgaggagaggatgtcttctcactggaaaaatggaagaaatgctttacttttaatggagggttgatcctgtcagtttgttgaattgtctaagtctgtcagtgtctctgtaaatgcagatacagtgaacctgcatgttgttcggagtaaattctttgaaaaggaagcatcacaaaaacagtcgtgtgtcagcgacacatttaacaggaccacagagatgacgttcttcaagattcctctgtttcctgctg

SEQ ID NO: 101033 - DNA, 1326 bp, Homo sapiens
aacagcttttctcaatctaaagttaatgtcatcatttgtcatgaaaaattagaaatattggcatagaatttgctattaagactaagttgtctgataacctcatcattcaatcttgaaaaggtaccataaataatggctgttgtgggttgaattgtgtcctcagaagaagttattttgaagtcctaatccccagtaactcagaatgtgaccttatttggaaataatgtctttgaagatttaatcaacttaagatgaggtccttagggtggaccctgatacagtatgattggtatccttgtaaaaacaaaaaaaaaattaggcagggagacagaaaagacaatgtgtggagatgcaggaaagatgaaggattggagtgatacatcttcaagccagggaatgccaaatattgccagcaaaccacccaaagccaggggagagacatggaacagattctccctcttctccctcagaaggggtcaatcctgctgacacattgatttccagcttctagcttccagaactgtaagataatacctttctgtcgtttaagccacccagtctgtggcactttgttataacactcctcagaaatggatatagcataacatttattcagtgttcattctgtgtaaggtacctttttaagcactttgtatccatacagtcgttttaatttttacagcaattttgtaaagaagagatgattgtttctattttactgatggagagactaaggcacagagacattggcaaactttcccaaggccatccgtagtaagaggtaggataggcatttaaactcaggttgtctgtttcctgagctagtctctagcactagcattaattatgccatgttcagatccataataattacaacatgttgatactgatatatttaggcacatagatcagtggaacagaatagaaagctcagaaatagagccatgtatttataagcatttcatataggacatccgggagtagatggataattttaatgatgctgaaacaatagtgaaagtgttttaaaaagtaaaataaagttagattcttacactatgtcatgcattaaacttatttctagaggaagtcaatatttaaatgtattcataatttaacaaaaggatcaagaatgatacaggtgaatatttatttcttctgtagtatgatacgcaagtatctgatactctatgtaggcatttctaccagagtgggaaatgatttgtatttatactcaacaatgtacatgtaccaaaaataattaagaggttaaaagaaactagagaaatgtttataactgaaaatgtagataataagttaatgtgt

SEQ ID NO: 101034 - DNA, 1091 bp, Homo sapiens
cagtttggttcatcgatcaagccacctgctctcctcacccacgctgatcctgtccccattgcaaccaccccccttttcccattgcaatcattcccgttgataaaatctttccttactactgtacaaacttgcacatttttttgacactgtctctagtttagaaggaagggagacaaagaccaactttcatttgagagttcaaccgtttatgaggcatgctgcaatcaggggtcagacagtgcttgcccagatgaaaaggactggtggtactagcttcgagttttgtgtgtgtgtgttctgtcagatctccacagaaaagatgggcaaaaagctgaatctgggtgccctaaacacagcctgtctccctcttctagtttctttccactcctcaacaccagaagaggccctctcagctcatgccgcaccacctatgcaactcactaaacagtaaaacagattttgcatagcaaaggacatcagcttctcccacgtctcagggactaagggccaacaccaggaggcaaagcaggcaaatgaaagctcatttctctgctacaaaatgaaacacaaaacactcctggggaagagtccttctctgtaggcaccagggacacccatcacccctccagcctggggatcccccagagatggcataaagggacacccatttatttggtcgggcagctgggaattttaatggaacatcttaggaaacgttactacttggggctttgggctgggggagagctagatggactctttgtacttcctcttcttgaagctttgctctccttactccattgagtatggttgtgctctgtaatctgagcttcctttgaggactggaacacaggtctacagatggatgacaatgggattatgagacccagcctcaaagacatgagagtgatggctggtctgtggggctgccccagagatgccagctggaaaacgctaagagcaggtggccaagtccttaacaacttttccaaaaacaggggttctatgtgattccgacctggcaagcatagattcacatccataaaacattttgcagcacagactatgtgccaagcctgtgccaagtgttt

SEQ ID NO: 101035 - DNA, 1049 bp, Homo sapiens
gaggcaggaggatcatatgaggctacgagttcaagaccagcctgggcaacatagtaagaccctgtctttgcaaaataaaaaaaaagccaggcatggtggcctgtgcctgtagtcctagctacttgggaggctgaggcaggaggatcacttgagctgaggagtttaaggttacagtgagctatcagtgtaccactgcactccagcctggacagcagagcaagatcctattcctaaaaaaaaaaattaattaaatagaaataagtaaaaaaagtaaagggaattgtgcacaagggtagaagacttgaggcatttagggaacttgcttggtaccatcacattgcaagtgctcttagtggagttttgttgaatgaatgatatggagctgaatgtccaggggcccaaatcttctgaaacaaagacctgcagtggcagggatccagccccctcagctgatgatgatgttggcatcagaagagggacctaggagggcagttgggtggttttccatctcactgatgctgcaggctgctgtcaaaagttgtcagtgcttccaaagcagggctcatcttcctcatcatcagtaagcactccccaagtcctttccctgtcctcttccctcctttatcagaaactagtccggagagattatgcttaaacttttcccagatgactgctttcttggatgggaaccaagcatttgaatggcagccgcctacagccaggcgtcctaattgggggaccatttgcagccagatcaggcactgagatggggacacagaacttgcagtaatgggtcattccaatacccatttagtaatcaatagtggaggagaaatttcaagtacttaataaattgtttgctaacacattgtcatggcaactgctaatccttaggtttcaagaatgggttcttgagttgctttgtctgatccacgcttgcaggagccaaggacgcttgtattcctacaaacatcagaccaaatattattttgcagaattgatttaaggggaaaatgttctccgctattttgactctgagggctgtgaga

SEQ ID NO: 101036 - DNA, 1036 bp, Homo sapiens
aaggaggcagcatgtgggggtgggggaatacaaatgccacaaaggtattagggggctggtgaatggggttggtcactgttttcggttcgtagggctgtagtaacaaattaccatccatttggtggcttaaaacaacacaaatttgttctctcacagttctggggtccacagtctgaaatcaaggtgtcagcagggctgcacttccttggaggctctaggggacaatcagttccttgtctcttccaacttctggtggctgtcagcgttctttgtggccgcatcattgccctctctgccttgatctccacctggtctggccttcttttccacgtgtctgtgtcttttcctcttctgttttttataaggacactcgttactggatttagggcccaccttggtaaaccaggatgatctcatctcaataccttaaataattaaattaaataccttaaattaattacatctgctaagacccgttttccaaataaggtcagattcacacgttcaagagattaggagatggacttatcttctgggggccaccactcaacccactgcagctaccaaagggatggagcagttcctgttctcagggtgtctttaagtagctacaagaggaagggctgggctcttgcacaaatgtcacagcaaacttgaataaactcatcgtctgctaaagagtcatatcacctcccgaggtgcctttccaaagtctgatgagtagataataccagaccaaatgcctctcttaaagaagttgttgtaaaagcacaacaaatggaagttaaagtggaggaattctttagaaataaagtagaaatgcaagtgactgttatttgcggagaatctaattttctctgacagttccgcaggtacactgaaacaatctcttaaggaaaatgtattttctgaagaaatttctccttgatttttacgaacttttctctgcctgatgatcacgtacaatggaatgaactacagccttgctctatttttgtttttcctccttgtttgtgcccagctgccgttaataatg

SEQ ID NO: 101037 - DNA, 1057 bp, Homo sapiens
tgtactaaggggaatgctggagttggattccacaggatgctgcagaggggagtgggtgactcaggatgagtccaggtggaggaagatgccagaatgcttaggtctattttcatcaaacgctggtcgtcctaaaatggacaggtggaggctgcaggaagctggtttgctttggagacactgggaacacctcagtgagtcacagaggggctgggaacacctcagggtctgtgccctcccacctaatcgctcttgaaaatgattctggtacagaagaaaatctggcttgaggccgctcccatttcctgtggccttaggaaggtagtgtgtgtacaatgacatattcgttggcatagtgtcagagcttcatattaatgtcaaggattagttgaatatcatattaagatcctttttttcctgctgctctgttcatggaatgaatgatcgatagagatgaatgaaatgatccgcggtaacttggactcactacaccattgtactaattttatgtccctgttgtcttgccttttgaggctcctgtggttcacggtcataaatgtagaccttgtgttctgcttctcttaccctcattcatctggctccagccttgctggccacactgctgggctgctccttgaacagggaggcgtaccttcaccttggctgctgttgatacctgcatcaaccttcccctggctctggggggcgcactcctcatccccccgctagactttgaacatcttctcagtgaggctgagtctgaccattctatttacaattatggcccctcccctttacctctgatctacttttaggttttcttctctgtagtatttaccaccttcattctatataattttaaaaagtctgtatttttaaaaaagtgcattgtttttgatctgtttcccacccctacccccacaagagagtaagctctacaagagcaggggtcttggttctgttgggttctgttctgttctgttggccactgtatccccactttatttatttatttatttagcaacggagtctcactctgttgcccaggctggagtgcaat

SEQ ID NO: 101038 - DNA, 1064 bp, Homo sapiens
cacatatatgtgtgtgtatatatatacaatctgccataagaactaaaactcatttgggcctttcagtttatttacatatgaatacaattaaaatactcatgataaagaaaatattctcggtcctctttctttgctcacacactccttggaccagcatttcccagactggtaaaccaagacatatgacatgaacaacctgacttatcaccaaaactcaccaacattagcctaaaatattgcatcatgccacctttctggtaggattcagtacctctctgcttggtgattgccctgacatcgcttgtcacacagcgaaataaccaatttatgcgagtaagccctgttgagatatcctgactcaaatagaagagaaactgtctggacacaagcccaaaacacattgtcagctctccactcagtatagtcttctcagtgacagacttgagtcagtgcaatttcatccattaagtaacgggaatagtagaaaacttttgggatgttattctttggattataatttaaaatatgtgtggcaccggtatgtattcatctgctatgtatttatccactcccatttcattgatctctccctaggcacataagaccacctcatttctgagcttctcttgcagttctatcgagaccatgtgactggattccaatcaactgcatgacttgtaggccacttccaagccttaccataaactccactctaatgctccacactttttctcttcttccttccaggctgaactcagagaccaaatgtcaatatgacaagttagaaggaccccagagtcaccacttgtgaggtgccacaaaacctattttgaaatgtgacttgaattagaaatcacctttgtatgtatgtattaacccattaggactttttttttttcctgctccaaaggtgagtaccaaatgaaaaaatacaaaactcaggtgctactggaacctagaacaatacaattttttgttatacaggctgtctcataccttagagagccagatgccaggcacacatcccaaccaaaaagccactgaaatgttagagcttattggta

SEQ ID NO: 101039 - DNA, 1067 bp, Homo sapiens
gaatggatcagcaggaatgtgcatttgaagttttaataaatattgtcacatttcccaatagagggctgtaacaatatccattctccctaatcctgtaaaagttttccactccttaaactcttgatgatagtgaatatttaagctttgctaacttcaaatgtgaaaaaaaggtgtatcagtttaacttgaagttttgaatccatgagttttgtttgcgttgtttttcttgtttatttgctttggttgagtgctttccataaattacctgttcaaatcttttgttcatattttctgttgagttatttgactttttggttggttgataagcacacttcacattttaaggatattaaccttttatcatatagactgaagattcccaccccccgccattttacatttgcctttcaatcttgtttacgatgtcttttgcaattcgaaaactctcaattttaaaaaatgcaatcagtcaaccttttcttgtatgattttatgtcaccctcaaaatagtcttttcatccttcagatcatgggatacagtcctgtatttcttcttagatgttttatgtttttctttttgcatttaattacttaatccatttgtaatttattctgagtttggtgtaatctggagaatgtaatatttttttcaaatcatttagccaactctgaacgttgttttccaaaaaatgaacacagagttattgggttgcttggcctttatttcttattcctctgggtttgtgagaagtttgttcttaaatagataacatggtaaaggaaagggccctgggctggttcttcagaccttttggacccttagatgttctaagtttgaatcaagctgtgagcccgtgggcaaatccctcaacctctctgaactgcagttccttcagttgcagaataggaaaaatcatacctagggttaagttaaacagagagtatgatatccccgacacatccaggcacgttaggcagataccacctgtgacacttctctagttgctgtcctgagatggccacatggagggtgaattgccctttctaggggaatctgagccctccca

SEQ ID NO: 101040 - DNA, 1059 bp, Homo sapiens
gtaggagggaaggggaggatatgcagtaatgacatgcacagatctgctttgatctcaggcctgacgctctgcggggggctaagataagagattccaattcccctgtggactcttctggaactacagaggcattagctttcctctgtttatcaagtgaacataaacaggtacaaaaatggtttcccttctcccttctggattaattatatatatttcccccctcagattaattaggtttatttgccactgttttttttttttttttttaatgaaaagatttgggacagtgggtgaggggcatagagaaaatttagataatcaccgaggctcttttgctcccccaggacctcaaagcagcccttatcagcactattcaatagaattttgtgcaatggtggaaatattcttagacctgacctactcaatatgttacccactatagccactggccacatgtgaccactgagcacttgaaatgtagacagtgcacctgaggaactgatgtttaaattttgtttcactctgtgttgatgcaggtccaggaagaaagaacaaaattctggatcagctgcatacatgttatgtgcctcagacaagggactcaggtttctgtgctttagttttcttaagtgtaaaatgggagtgataatggggtggtatgggtgatagtgcctggtactcatagtcatgcgtggtgcctgtgatgatttctggccgttctgccccaaatctcaggtcacctattgcccagtcttcactgagctcccttccaagccaagttctgccttgactggggcagggaagaaggtcatggagaggctttgtggttggggagtacagttacctaatgcagaaacccctgagcagcaggatttcaaagtactgatcagactcagaccccaggtgtttttgagaacccatgaaagggcattggaggtcttcctcttcagagacagtcccttatattgtccttttggttggtcttccctgtggtgtggcccctgtatagagatattcataccttttgaagataaataccaaaatgtatggggagaatgt

SEQ ID NO: 101041 - DNA, 1690 bp, Homo sapiens
cagggagatcccataattagtctaatttctatagtcaaattgtgacacagcaggtccttgagcctaggtcttctagctcctatctcatttaggatatatgagcagggcagggatgaacaggcctcatgctgttaactaaagcatatttagagctgaaagaggatgccagttgcccccaggaaagcttatttgtcggagtgatttccccgggaaatacttgggcaggagaactgaaagcctcatgttaatggtatcatttagggtttaaacacaaagccagtctgcacttgtctgtctggtcacataggctcagcaggaattgagttgtatgcaaggaatggattctccaaagccttgggtctacctgtgtctgagatgtttggattgaagatgataatcaggttttatactttttttcctcttgtttatactcctttttactgtcttcttcttgggaaatacattggcaagatagtatttttcagatgttgaagtagagagatggctttgtgttttgagctttcaaagtaagtgtgtctacgtatgtatgcatgtatgtatgtatgtatgtatgtatgttttacatggccttttatgaattcaagagatcatacattagatatataaattgggtctgctttatccaaaggatatacactttttcttattaaaagcactgacagaatgctgcgactgtttgaatttgaatgttaatctccacaatctgctctaccaccatggacctggatctagaatggtggggctgagaggtgattggtgttcttttcttctgttcctgggattgaaggagagatggagaacagggtaacagcctctgaagcagaaccagctgctgaatattcatttcgttctcttgtttagctgtcaggttatctgtgttgaccgcttcatctgacacccctgctgctcttgggagtcaggccaagggtgttgtggggaagagcagggcagatgtgttacctgtgatggagggtggctgggcagaggcgagcaggtgtcttcgtgagggtcacttgcaggaagactgctgttggtcagccacctctctccccccacaggcccaaggacaggacagggcttctctccatgtcataaactttgttaatcctatttgcctctctgttgtggagcagatggcaaaaatacattagaaattcactatcgccagaaaaataaaagcagaaacattttttccccaggagaatttagaaaaataatggccaatattcttagacttctctatgagggccaccaacagcgatcatttctctccccttagcctctctcaaatatctgctgtttcccacccccttggcccactgcctggggccaagcccacatctgctcatgcttgcttagatgtctatcaaacatctttctaggtgggccccctgaacctctctctatattgccaaatccgggttgccatggggccatgtctaagattccatgactggttgtgccaccctgttgtgcacccccttccctggctccctaggacccatagttagcctgccagaaagggacttaataaccactggacccctgacagtctccccagccagggctcgtggactgtctatccaccaacccctggcaccagcctcttccatatatctgcatttctcaggcatggtccatcctcctgagcgaccccttcctctctttt

SEQ ID NO: 101042 - DNA, 1053 bp, Homo sapiens
atggtggatggagctgccactcatgggttgtaatcagctctgccagatttgtgtttagagaaaccacccgggtagctggtgcatggggtaggttggaggggaaagcccaggggcaagggaccaaagaggagtcagccgccatgatccagatatgagcactgatgctggcatccagaacagtggatctggggacagagtggagggggtggatgtgagatcacagaggatgggtgagtgatggggaagagagagaaggaacacaagaagagaactttcaggccaagggaatacatataaatggaattaagtcatacgtgttttggggctagtttctttcaattagcatattttcaaggctcacccgtgttgtagcctgtgttagtacttcactcctttttttttttatgtctgaggcatattccatcatatggatatgccatatccacctttgcctattgtgaacagtgctgctatgaacgtttcaggtacagtgttttgtttgaacatctttacattttcacatctttggggtctatacctaagaatgtaactgccaggttatctggtaattctatgttgaacttagcaaagaaatgccagaagagacaaatctgtggagatagaaagtgtgttagtgattacttaaagctgggagcatttggggagattgaaggatgcttagtaaaggatatggtttctttttgtggtgatgaaaatgctctataattggctgtggcaatggttgcatagatctgtgattacgccagaaactactgagttctacattttaagctggtgaatcatatggtatctgaattatatcttaataaacctatttttttaaaagggaaatagaatgacctcatcctatatgaagtttttcacaaagcattaataaacttgtagattcaaatgtaaacacacccattgaagttcagaattgtgcaattatttgcacactttttgttgcacaaacaagattgaaagctccctgagggcaggggccacacctagctttttgctgtgttcccaacccttgcatggtacatggca

SEQ ID NO: 101043 - DNA, 1460 bp, Homo sapiens
gcctcatcatttttaatgttaggcccaaggtaatatttaatgaggctgaaaagtatattaataaaattgcttgtagtaattagtgggaaattgtaatggtagggtgatggggagattttagaaatcaggagtgatcaagaccaatctcaaatgtcactatttattattttttgctttcaatcatcatgaacaacacctttgcatttttatctttgaaaataaattctttgattgggctcacgcatattgctattatttcatgctattttgtcctctaccaagtatcatagagagttagaactagatgggtctttagaaaaatctgtaaaccttcctgctgtctttgctgctccccccacccccactggaggcaaatggattatctatgattttgcctttatgtgtcttacctgaaaagaggtgctgtcagggactacagagtccacaagagcttctccaaacaagagatcagaaagaaaagatcagtgtgttcaggattccagaaaatagaaatgaaggaaaaagcctaaaagctcagatttgggaggtagagatcagggaccaaggttgtttttttttttttttttccccttctttttttggagacagggtttcactctgttgtacagactgaagtatagtggtacaatcttggcccactgccgccttgacgttctgggctcaaaccatcctccaacctcagcctcccaagtacctgggactatatgcagatgccaccatgcctggctaatttttgtattttttgtagagacgaagtttcgccgtgttgcccaggctggtcttgaactcctggattcaagccatctgcccacctcagcctccgaaagtgctgggattacaggtgtgagccattgtgcctggctgggaaccaaggttttaagatcaaggtcctaaaacctttgtaatgtctccattttgatgcttctattaactcttctctaccagtccctattttgtttctcaagtagattggaggtgaagcttctaaaatgaacaagactccaggaaggcaggacttcctattcttaccctggtttgggacttgagctgaggcttcttgtggtttctctattgttgctattgttttcaactctggagtttgattttgtcccttatgagactaggcgagtctgaggaaaaaaagcttaaggaggccaagatgttttcaatatctgagacaatagttatttgttggttgataaataggtgcctaagttattgagaaatatgtattaatttcttagaaatatgtattaacttcttcctccatttcttctgttcctttctccctcattttcattgggaaaatgtgcaaggcaggcttggtgctagttcatggggttatagcggtgagcagatacagctcctggtttttagcagtagttaattaaacagtcctcaaacactgtggagagcaatcgccagggtggtggccagct

SEQ ID NO: 101044 - DNA, 1052 bp, Homo sapiens
aaaactgcagcaccttctgaacagacaaaaggagccactgatcagtctgataattggagcatggagagatgtggagcacaatttcccttggttattcctggtttccatctcactgatgaccactttgttattttgcatgaagcgtttattgcttaatgacatattgttcacattacaataccatttctgagcaattagagcagttacagaggcctgggcctatggtgtggggccgtgttaaaatttggaatccatttgttcaatgtcattttccatgttggggcagattttctcttgccttccctctctcctttccttccatcctcttttctctctctctcttcctctctccttctttctttctctggctctctttctctcttctctccttccctctctctcttcattgttctctctccccactcactttctcttcctccctctttcttgccctctttcacccgatctctctcactactttcctcatatctctttgtctctctgtctcatttctctctctgtgtctgctctttttttcctcccctcttactttttttattatgtaagataaagcaactaccagggatctaagttgagaggcatatggcactaagaaaaggtcactgggcactctggaagccctgatggtttttgtacctgtcctgcttctctccagctgtgtgcacaagggcaaggcatggaaacctctgcacaccactgcctctgtaaagcgtgagtgatacttccttccttgcctgttccccttcttgtttttttgttcatctcacacatatatactgggtgctttctatgtactaagcactgggttaggcattgagtgggggaacaaaactgacttggctcctgacctccaggcatttatagtctagaaggaagacaaagaataaacaaataatcatgtgactaatggcaaaggtcctgtgagtagcccctgaactctctgcagttatcatattcatgttgcccaatctggaagtacaaggcatatttcccaactcagaacctggtggtccagggcctttgccatcact

SEQ ID NO: 101045 - DNA, 1469 bp, Homo sapiens
tggaagacatggtttctggaaatcttttgtctgagagaataaactggctggtagctattttttttaaggcctagacttttgcagatataggggtatatacagagctgacaaggtggactgggagtgatagagtcagggacaggagttccagtcctggttctcttgcttgctagatgtgcaacttgcaaattgctttaactctatggacacctttttttccccaactgtaaaatgagaggtctgcctactctgagctctttgactctgtaggaaaccagaagtcagcctggttcaaccagcgtgaatctatgaggcaacatcaccttgtcttccctcttagacctttcctggtctctttcatgtacatgtgagcctctcctttcagataacttgctctcacctcatgtgaggtcccaccttacctgaacctctggctggtgtacatcatctgattcattgtgctaaggtagcagatctcctttgcatagttctgggaaatttcattttcctaccaacagatctctgggtcatgtccttacaagctggctaactgccttctgtgagacactccctcccccactgggtcacatacagtggagaggtcaccaaaatccatttcctctttccttttaagctctagtgagaatactttactaggcccttttgtcattaggtatgggcctattttgagttctggccagtgaaatgtgagtgaaagttatgtacaaataccactttcaggcctggctcttgtaaatccttactacatgtgatttgcattctcctcccttgactacggaagactctgatgccacagagtttggtggaattataggatcctagatctgtgaatctatattggactgtggcatgaacgcagagaaaacgttcattgttttaagccaccaaaatatcaagatttttgctgtagcagttatcctgtgctgatgagtgcacctcttgtgtgcttggggcaggagatgcaaaggggaaggagatggtttcttcttttggagtttccttcagtttagagcatgaccctttaagagtgtgggttggaagagaggaagttttgaccatggatagaaggatcatcatcaccgatgagggcaagccatgtccacaacagaggaaagggcaaatgtaaagacaggaggggtcagggtaatataagctagcatccagaatcatgactaagtctagaaataagctctgttttctcaaccaagggttgggatttatcggcctgttggatcttgacactttccattaaccttttctttgggagacagtggaaaaagctgtactcagaacctcatgataagcaggtggtggataattgaagtgttaccagaggtggcttgagacatgtgggcttcctccttgacatcagccagctcctgtcagctcttgacttccagaagacttctttgaacttgatgtttgttgagaggaggggatgaggacac

SEQ ID NO: 101046 - DNA, 1060 bp, Homo sapiens
tgagctgtgcagcctgttttcagattgacaagtgggggacctaataagacctgccttgttgagaagattgagataatgcacatgaagcccttggcacaacccttaggagattatgcagtttgtagtgttgggtgtcatgattgccacaatcttacactctttttttcttgacccaaatctgtttattcatcaaattccactgaatgctaccattaattgagtggaggtgaaattaaaaagtgggctggggccagatcacattggtccttttagccatgcttgatattctgaaccttctttggcaatgaggaccaattcatgttttctgagcaggaactggtgtgatcccatttgtagtttagaaccagcactctggagacacttgggaggcaggacaagaagtcccattgggagctggttggaaatccagctgagatgcacagaagacctgagagaagggtatgacttgaggaggggagggaaagggagaggaaagaatggtgtttagaaatgctttaatagagacccagggacctttggttgtaggaggtaagggaaagagaggaatcaaagctctcctgaaagcctttaccttgggtgaccctgtgggcagcagcaccatcatgggataaggaccagaggacagtgggtagaggtgggggtaatgggtggtatggacttttgcttcctctttgctccaactagtaggtggcctctgagttccggagttgagaacatgttgcttggaatcttttttggggaactgagaaggctcttgggaatattttttctctcctccaattaaggaccacatatctacagtaaaaggtcagttgaagaccacatcaaagtaaaaagcaggctcattaggcttcttcttttcctgaagtatttttttttttggtttcatttggcttgcattaaaaataaaggaagagaagatcaaatcctattaaatatattgcatggtagtattttattttagtttcatgttgtacataattaaggcgacttaccgtgttccagatgaatcacagaatttagtgttagactccaggag

SEQ ID NO: 101047 - DNA, 1027 bp, Homo sapiens
taattctcagagtgggatggagtctcgtttgtcccctgtggggatccactgtgtgctacactcctggattgatttttctctcctttgctgttccactcttcccagtttgccatactgtcacttggaatcacttccccaaataaaccactttcccatgtgtccttgttgtatgctttgttttttgagaaaacccaggcaagacagggatgaatgtctctgcagtgagaaccgtaccccatcccagaactgtgatgagatgaatttgctttcttgatcactccatcagttgctagactcagggcatgttatgtttgattttgctggcctgtgaccttattgtacagcttcttatattctaattgtcatttgcttttcttgtgagtggaggaagcggatgtcttcttcaccgaatcatgaatatctcaccgttgttcaattgcacgctgtgaagtgctctcctaccttcctcctgggaccatgagctcatcatcatcttggggctgctcttcttgcggtcctggaattcttctctttctagaatccccaaccttcttttattcttgtattccttttcattttgtctcagtctattcctaattaatattttataaaataataggtatgtggaaaactttttgttcttaaaggctgaaaaaatctctttttcatcctcacattctgtatgtgtgtgtgtttgtgtgtatgtgtgtgtgagagagagagagagagaaagagaggggggagagagagagagagaaatagagagagagagagagagaaagagaggggggagagagagagagagaaatacagagagagagagagagagactctagaaagctagagtcaaaataattttctccttgacatttcaaagtacatccagtcgtcttctaacattcagtattgctaattagctcagtacttaaaatccccattccttcatggattacctgttttgtctgcacgccacttctctcaacacacatacattggaagatttcagggtttgttttttttttgagat

SEQ ID NO: 101048 - DNA, 1049 bp, Homo sapiens
atgcatggatattgattgagtccctactagatgtaggtaccatgtgaggtctgtgggagctcccaaggcaagtgtaccctggttcctgccctccaggtacccactgggctaatagaagagaagtcccaagaccagaaatgatgaccatgcgaggaagaatcaagggttacagggatacagagaggggtggcttctcctgtggctgttgcaggctgtgatggcagcatcagagagtgtcctggataaagagctgttaaagatgggcctgaaagactggcaggattggaggcacaagaatggagatgaggattttagacagaagcagagacccggaggtgctgtgggcaatgtggggctgggacgtgccatttgtaaaggtggaaattaggaggtagggatggaatacttgtgtgggcaaacttgtggatatctttgaagaggtggggctgtctgggggaagcaagttgtcctatcaatgtacctttctgacacctgcaagaagtaagctcagagcaaggaggaaaaaggccttgaagagcattagcccagagtacacagacttgtgtgtggggtccattcctcctcctaatttgctgtgtgtccttcagaaaattgcttccttactctggtccatgcttctttgatctgtggctaatgggacaccattcctgacttacttattacacagggtgctgtgacattcaaagcagatggtggatctgaaattattttgtgaactatgagattccacataatataggaaatcattattattcttttctgaacctggggtataggaggaagatttaatcgtattcccctgctcatgatataaaatacattattattatggtgagatatccagggtgtgtgtgtgtgtgtcttgggggtggaggtgagaatgctgtcacactgccatcacccgaggtagacatggcacaaagagggggtttggactggctgattcagggatcttttgcaagcctggcataaatcctgcatatgctagagtccagaccaatgtggtatactgcagggctgaaaatttg

SEQ ID NO: 101049 - DNA, 1132 bp, Homo sapiens
gatcattgcagttgggtggagctgggatttgaacccacatccacagactccagtccatgttcctgcccataatactatgctgattcccagcgtgtgagctaaaagtgatcaagagcttgctattgtggttttcattgcaaagagtcttttacatacatcatctcatggaatctccccccagcaaatcctgcgaggtctgtattttacttccgtattattgttaagaaaactgaggttcggagcacttgaattttcttatctttgtatgcttcagaggtgatgctatgtaaatcagctttcagcttggtaatgagcatgtgtttatgtggcattaaagcatcctgctaaaaaggaaaaggtagccacatgtttgtttctttgtaccagaaatttcttaaacgtgcctattatctgaacttttggaaaaattattcggataattggtggaaacttttgctttgcctgggaattttagtattgtattttttaacaccttagctactattaatgccatcccaacacacagccccacacatgtgcacaagagtgatagacacgtttatgtgtatttgcatgggaaatgtcatcttcataacgtagcctaggttctcccacctgggcaccttccctctttgcgctattatgcctgtctgggtgtcccccagtgcttttatattgttctgtcattgtctggttttgtgtctcttttccccattaggctgtgaggtccatcatggcagggcctggagatgagagccgtttatgtccctgacctctaacacagagctggaaatgaaagagacattttgtgatagttatggaatgaaaattctgtctggatacagccctagggcttgggggaatccttcaggttctatgtcaaggcctaatgttttgatgatacttgatcttgcctccttagtgactgttcttttaattcataaacagatttggctgttccctgagtttaaggcagcccctatactgactcggtgcagtgattttacattgtgtgtatatcctttctttctttcttttttttaaattgagacagagtcaccctgttgcccaggctggagtgtagtggcgcgatcttagctcactgcaacccctgcctcttgggttcaagtaa

SEQ ID NO: 101050 - DNA, 1037 bp, Homo sapiens
ataactccttggatgcagccatccaattattatggggtagtggggtctggtcttagaatttaagtgacttcattctagattagtgctgaaggcaatgcattgggtgaatgcatttcttattactttaaactagggacttaaagaggataaggttatttgcatcttttcgaagccttttttaaatttcagaccttaaaattttattttgattgtcccattgcgtggctcagagcagtgattttaacacccttaaaatggtatgtgtggtgagatgtttattttgcttttcacattattggcttcaaatacatcctccctctatcccccacgccaaccctgcctctgtgcgatgctagggaatttggagtgctttatttttgaagaggtccttataagaaaataagggcaactctgattcagaagacctttgaggggcagatttcttatctgtcctcaagcccccgcccccaaccctgtctcgagtcacatgtttcagttctctattgctgcataacaaatcgcccaaaacataatgacttaacaatgtattattatctctcatggtgctgtgggttgactggactcagctgggcacttccttctctgaggtctgtgatgagaatatggaaggatagcattgggattggcgtcttccaaaggctcaactgggctggcagttgatactgggcatcagcttggcacgcagctggaactatcaaccagattgtccacaagtagcttctccatgtggcttcagcttctcacagtatggcagctgagttctgagagggaacatcctcaaaactagagttccaagaggtggaaaacagaagatgccaggccagttaagaggtatgcctggagccagcacatgacttctgccatatcctactggtcaaagtggtcggaagacccacccatcctcaggtggatagagagactctaccacttgatgggagagtgtcaagatcaccttgtagaagaaatggagatgggagatattgttgcaaccatctttgaaaaatacactatgcaac

SEQ ID NO: 101051 - DNA, 1032 bp, Homo sapiens
tgtttgcatcagttatgaaaaagtcattcctataggtgtggtggcatgtttccttccctccctgccaaatccagcctcagcagtaaccccaagcctttgatctttccactgggagttttaagtctatccttggttcgtacttgagttttgcctcttgtttaagaaggacatcagaaggacagggcttctggtcctcccatacctcatccattggagattttttcaaagacagaagggtgcactgtcttggccatgtaggtgacccaggatactatttctgggcttttcaatgatgacagttctaaactctgtcacacagagatggtagaagagtagaggatctaataaaaatgtcatcaaattaaaaaccaagcaggatccaatgtgaactgttctataaataacttatgaaaagtgaaaagatgtttctgttagcaaagttaaaataattattaaaatccttcatcagattgcggctaattagattgagaattaaacagctttgtatgagtgtagagttaattaatagctcattacttttttaataagccaaattcatttggaaacagaagaaagacagcaaagttcatcatggatgagttgttagattgggattatttccccttcccttgatgagagaagtagttaattaaaagaaggagacacgtttatatcatgaatgagttacatgcaaaaccccaggaggtacgtttatatcatgaatgagttacatgcaaaaccccaggagatacgtttatatcatgaatgagttacatgcaaaaccccaggagatacgtttatatcatgaatgagttacatgcaaaaccccaggagacacgtttatatcatgaatgagttacatgcaaaaccccaggagatacgtttatatcatgaatgagttacacgcaaaaccccaggagatacgtttatatcatgaatgagttacatgcaaaaccccacgagatacgtttatatcacgaatgagttacatgcaaaaccccaacatccagggctggagaaagcagcaagtgt

SEQ ID NO: 101052 - DNA, 1068 bp, Homo sapiens
gcacctacagaaaaatggagattccacagtggcttgcgaggtttatttgaggacaaagtcatggtgataattgctgcagtttgctgagttcgcagtgctgtgcaaggggattttcagaggacttcctcaggctcctggtttgcagatgagaaaagcagagctcactgattgattgttagttgcccagggctattcaactgcttgtaatagagccctggacggggtgtctggacccaaaggctgtgctgtttctaagtcactccacggcagtgtttcatattcttggctgaaattggtaattgaattgacattttggttggcagttttttgttgtgggcgctgttctgtgtactgtgggatgtttagcagcattcctggtctctatacactagatgctggtaatacttttctcttcctcagctgtgacaacccaaaatgtctccagacattgccaagggtccactgagggacagaataacccctggttgagaaccatggctctgtggtatcatcgatggggtatcattaaaggaaaccagaatttttgactggggggcttgaacaaagtggagaactcccagagaacgtttcttgatgggctttggatttaaatgcctgtgtgttctctgaccttgatgaactatgctggacacacaggctcatgggaagaccttgctccccagctgaaggtctaaaccaggcttcatccatctgcttggtacctgctgtcttccaggcaccttctcagctcctgtggggccttctagggcaggaatattggaattgggcatcttttcccaagaaggaggaggccatgtccttctcagagtactggctacatgggataagtaattggggggaaagaagtataagagagagagctaatccagagaggagaggaccaccagtatgaatgccttcccacacatctatatatgcaatgaaatggcgcatgtaacccactgagcacactgcctggaatgtggataatgcttaataaatgctggctattattactgttattattaatactatttataactacagctctttttttggtaaaataaa

SEQ ID NO: 101053 - DNA, 1107 bp, Homo sapiens
atccttccttatttcaccaaatcttgttacattttcgtgtttgccttatgtctcccagtgactctctgcactgactctcagagcccttggcctctttttcagcatgacgaacagatttttgaaattttcttctggattctgtagattattttcagaggcatatacctgcagggtatcttcatgcagttctccaccccaattttttttcaatatgtaaaaaataagttcctttttttctttattcttctgtgaacaggattgaatctattcagaagtcatgtttattgagaaacgaggcaattgcattgttcgtgagtgtggtaggtgaatgttctcttgaatcctgtggctgttgtgtaggtcatgggtttggcctttaaacagttccccttgaattggtaccagggggtaccaataaatattggcttctttttatttctgctcctacctggtgcactttattctgggggtagggggtggggtaagggaaaagacaatatgttccagtgttttctacttttccccagtgtctgtctaattttctgggatttgcctccttccatctcaataaaagataacacttataaacccataaacccatgtggttcagtctctgaatgacggttgtgttttaggagcacaaacaaatgaagagggcattcacttatccactcacatcatcaagactatcaatgggaatccaaatatatattttcacaacattcttttctttttttcttcctgctcttacccacttgtatagtttttgttacgtagatcaacttagttgttttggcttaaattctttccttgtgtctcctgcctctttagttctaggtctctctgtgaattcttgattctgtgttacaaaatctcccgaaaagaactctttgggctgggcgcggtggctcacgcctgtaatcccagcactttgggaggccgaggcgggcggatcacgaggtcaggagatcgagaccatcccggctaaaacggtgaaaccccgtctctactaaaaatacaaaaaattagccgggcatagtggcgggcgcctgtagtcccagctacttgggaggctgaggcaggagaatggcgtgaacccgggaggcg

SEQ ID NO: 101054 - DNA, 1126 bp, Homo sapiens
aaacatttgcctggcaggaaaaacaccattctctgtttagagagaaggcattctaaaatttattccatgtgactctgccttctgaaacaggggagatcaagtggaattcagatgcctcaaggtcagaatcaggaaagacgaaagccccccaccgcctccaatacactgtcaatgaacttgcattctttaatgcagcatttccttaagggctgtgtgatatcttggtcactacactcagtggtctcttattgttgtactttgtaagatcttgtgtttgctttgaaggatctttctgtttctttcccaaccaacagtgtgtttctttgtaacagtccctttattctttgttagtttttattttatttgtttgtctacattgaataggaggtaaatgttcacatggagagctttgaaaactacagactggaagaggaaaattattacccacaattctaaccaccaggagaccatcaatgtgaatattttgactcatctctcttctgagtttctctctgtgtctcttttatatccaaacggggtcaccgcgtacatattgcatgatctgttcctttttttccccacatactatcatgaacatctgtcagaaacatgtttctacagcatgattttatgtgtgttcacgtttttgtaaacacttttcttaagaagtgttcaaacatatattaaaacacagagaatagactaacgacacccaggtacactctgaaccccacttcgacagttggcagcatcgtgcctttctagctgcatctcatttactctcactccccattgcttttctctggagtattttaaaacacaaaaaaccccagacataacccttcacttgcaaatcctccagaagatatacctaactcagtggttctcaactgggggcagttttgcactccctccccaggggacatttgatattatctggagacagtttgggtggttgcagctgggaatggtggcggtgggtgctactggcgtgaacaggttgaggccagggatgctggtacgtgccctacaaggcattggatagtcctctacgtcaaagaattgtctggccccaaatgtcaacagtgctgaggttaataaacccttagtctaacagatcaggatg

SEQ ID NO: 101055 - DNA, 1045 bp, Homo sapiens
ttaggaggaagaatgaataggaaggtgattatttgtgtgttttgggaagagagatcaaggatggtgcccagttgggaattgggtaggatccatcctccaatgcagtgtttgggtatatggggacaaggccacgagctcaggtttgcatgcattcagagtgtgagtgctcagggatgttgtggtcagggtgtctggtgagcagttgagtatttgagtctgaagcttggatagaggctgaaattttagaccttggagccattggcacaaagttgatcactgaatcgtggaagtggatggatatctgtgcattgagaagggccgagggcagcctggttgcactggaagtatggtgccccatcctggacccttgctctatgtagctgtggatggaagaaccagaacccaaaagtcccagcaggcagatgctcacttggcaatgggttccttggaaggtggagagtttcctgttaccagatgtagcagcaccttgtgaccctatagaaggcactcatgcgttaggtgggattgctgcttatgtgaactctagacaccatcctggtctggtcttgtttgctccagttgaatggccatttttgatggaagtgcccacatcaagcaaggtcccttggttgattctgctgtctgtctgcctctttctgtgtctacttgcttcccagatcagcttggattccatagatatcatatccaccattctcttttttggaatcccagtaccctttccttagatctctatctcaaccttaacacctggacaaacacagctctttctcttttcttcccttttatcaggtggctagatactgctagagaaaagtccctcagacctaaaaaatgtggcctctgtaaatgtgtggtgcccagccttacctgtgtaaacctcttcagtattacctaggtgctgtcatgctgggcttggcatttggtgggcacttggtaagtttttgttgaatgaatgaatgcacaagtgtgtaagttttagattttattcaagggccgagttagcaaccctgtgagccctttaggc

SEQ ID NO: 101056 - DNA, 1064 bp, Homo sapiens
tgtaggaagttgggtagagaaaaaaagtccaagaagaagaaccaagtagttattaaaatcgacttttctaatatatgctcattcgctgagagttacatccacgacttcatttctcatcaaaaactctcaaagagccaatttccagtagttcttatccctccttgcagctgaatatttgggggtattttaaagtgatatcataaaaaagattgaaaacgaagtcctataaatgatctttaatcaacagactctgttgctttatggaacagaaaacagtgaacaaaagactatgattttaattcaaggaaagagagctatttattttaagtatttctgcagaatggcagaagtaatttattcagttataattagacacattgtaaaatggacgattgtgaaaagagtgattcttgctggctttggagagctggagaaggctcttctgtgtgattctctgttatctggtcccagatcctggtgccagaaattaatctgtgagccagggctgaaccagataaaaatggaagctgaaagtgttcacattctctttttcatcctgaaaatgggctttccttctttctgtcttgataagaaactcctgcagcaagtatttaaattggagaattgcttgggtatgagatggtttaacagtatgtaatagaaaaatccttgagttcttcagtcaaggggaaattatgtgtgcatctgaagtgaattgtggcaacttaagaagcctatgccatttggggctgcattaatagagatataggaaacagatcagtgaaggtgattgatagttggaaattcttgctttctttcaacaagcttggagtagatgaaaggattacacatataggaaaccttcaataatctactttattctagtcaataaataaagaaataagtaaataaatacataaataaagtagattattgagggcttcctatgtgtcaggactagggagacattggtgaacaacatagacatgtttccttgttgatcagacattttggaaggagacagataaatgggcagaaaattacaaaacagcaggagataccat

SEQ ID NO: 101057 - DNA, 1171 bp, Homo sapiens
accagtgctacacctcagccttcagagtggttctgctatgggaaatttcttcctgaaaaatcaacccacatattctttactccctctataaaaatagctgggatggttttggggttaatgagcaatgacccactggatgggaacacctcttcttttaagaaactcaggaattatgtggagcataatttaagtctgtgatctcaggggagatttctcgtggaatcattcattcatcaggtattcacagagcacatgctgtgtgcatccattgctgtgctgggtgctggggttgcagagataacatatggtggatgagagacatacaacaacagtgctgagagaatcatggggcaagaactaggggagtctgaagaagaggggtccaggaggcctcaaaagttggggatggggttgaaaggagtagggagacattattgagatggatacttcttgccccagggatgcgatggagggttggtgagaaccgttccaggcagagtgacaaatgtgctaggacagtgacatgtgaacaattgaagcatatatttaatatgaggatatgcagattgattttgtggagttgggagtgaagggcaggtgtgagggtgtggccaagatgaggttaaacatggaggcagatccccccacccaaccagcccagggtatggaaatgtcaatgctctgtgtagattgcacgtgtacacttccatgacacctattgcagcttccacagacagagcccttgctttgcttgaagaggtcttgggtagatttaaagtctcatcatggctatagagttattcatgttttctaacctgataggaagaatctagatgggtcaaatggtgtgtgtggtgatttctgggtgagagtgccaggttctgtgatcctgctttggcttggagtagatgaaagaatttttcagccgaaggcaccttggaagtctgtctgcaaagagaggtcgatgaatgaagctgcccttgggagatgggttttgtagacagctagcagctctgggctctgttggcccatgatgaagaagggatgctcttgggaatagacagagaaacatgatgcagagctgttttgctccctgttctgtcttcttatgcttttcatcaaattctccaatatagacttgaaatgttagcaaacaagaggctgtgggatg

SEQ ID NO: 101058 - DNA, 1032 bp, Homo sapiens
ctggttcaccattttgctgagttccttctctgggttggtcactgtggattcaccagcaagggatacctgaaagatcatttctgtcctcaaggagctcaccgtctggtttggggagacagatgggcatgttggctatcaccatacggagatggtaggtgtaagacgctgctgcaaggagcagcctcacttggctggagccagggatggtttctggcaggaaatgatgcttggctatgagtagtgagatggggagcagacagaagagcagcctgagccaagctgctgtccagcgggtcatcatgaaaagccaaaccctttggtgtggttggaaccatgggtgactgactggtgtggctgaagggaaggggagccaggcagccccagaccagatcctggaagcttgactccttgctgcctccagagtgatggaccatggagaccgaccttccattctttgtcttcaaagaggtgatgttatgtgttggggcattgatcgttgtgtgctttagtggcccaggatgggaccgcacggagtagcctttgcttttgcagaaagctgtcagtaagtctttgcttgttgtgtggttattaccagaacatggactttgaagtcagatgctggttccactgagaaaagatttctgactctgggaaattgcttggccacctctgcctcagtttccttatttgtcaaaggggcatagttataagatccgcgttataaggttgttctgagcattaagtgagttaatgcatgtataaaacacgtagtaagcacacattcaatgctagctgtttgttactgccattgctgttatttaagttattattctccaatcccagctaatgctattttgtgaaaagtttaactcttgccatcgagagtcagttgtggaataaaattgaataagaggtagcagttttagtgtgtgtttttattttgttttactgaacaacctcctaaaatgtgcaccatacttgtttaattacatttccctgcttcttgcccgccagtttcgaaaacaggaatca

SEQ ID NO: 101059 - DNA, 1034 bp, Homo sapiens
attcctgatgtgaggcaagacaggccaggtgctgtcattatctctttctcctggactcagagatggcaatgacatggtttgattttcctctttgtcatttgcatcaaaggggaagatgtggcaattgatgatgtccctttgctggaagaaagggattgagactggtttactgtagtggttctttagaagaaatcaacctctaatctgttcttttaaattcatgaaagcttatgataatgcagcgagaggtgtgcagagacttgacaacatgtgactcctggattaggatgacttgagcaattcaaactgaaacgacaagttggaccctgtactagttaactgttgctgcgtgaccaattaccacaaagttagccacttaacacacatttattgtctcacagtttctgtgggtcagtagtctctgagcacagcttaactgagttctttgcttttaacatctgtcataaggctgtagtcaaggtgttggccaggggtgtgatctcatatgaaggctccatagggaaggatctgtttccaacctcatatagttgttggcagcattgagtttcttgcaggctgctggactaagcattttagctccttgagggggctgttggccagaagccaccctcagtttcttgccacatggacctttctaacatatgtgggcttgccccatttcctgagcaagggagacaatctgctatattcttgctacttctgtagcaggacagaagtcatcatcttatgtagcctaatcacataaatgatatcccgtcacctttaccatgctctgttgcttagaagctagtcactagtctagccacattcaaggggaagggattatataaggatgtgagtactgggaggtgaagatcattggggccattttagactatagctgtcacagaatcacatcttaactcccaccccacctctttttttttgcattattcagagccttgttacagaaggcttcacttctatggacataggatgggttgaaatttaactaagagactgaaattgggaga

SEQ ID NO: 101060 - DNA, 2089 bp, Homo sapiens
taaatgaatattcagtgatttctaggatactttcagcaattttaatcttgaatcgaagattctgtgttctgtcttgtataatagtagctgttttatcttaaatctgtcattcagaaatctcaattcatatttatattttctaaagaaagataataattaaagaaagaatacttaaagtaccctctgtgtgccacagaccttgatacctgcacatatgtcacacattatcccatttaatccacgtcaagaccctgtgaaattgcattactataaagaaatgcagtcttagtgaggttatgcacatactcagtcacgcagctgttaactggacaaacctggtttccacccagctatgttcatttccagaccagcattgtctcagtttcgaagctgcgaaagattcacaagaatcttctgaattgtgaagattgactatattgttgaagactagtttgcccttaaatatatctcatcttgggtcactcaacatgttggaaagagaagaggcattggagtcagagagagctgaattaaaatcccagctcttgccacttactgagtctgcatccttgggcaaattactgtgatgttttgagcccagattccccgctgtcaatgggaataattctaccagtctggcagggggttatgaagatttcagaggatgcatgtcaaatacctggtgagggatagtagcagtggtggttataatattattaccttttggagaattgttaactcacgcatgtgtcgtgataaatttcaatttgatgggtggattttagagttcacttctgttcattaggaaaaatttgtaatgtgacttgaacttatagccattgttggagatcttttcatcgccatctggatgggctctgaagccagacttgttgggattcttaatcatcatgcttactctctctatatccttgggaaaatcagttaacctctctgagctttaaatttctttatggaaattaatagtgcctagcaaatgggaataatagtgcctatctcattagatggttgtgagcataacatgaagtaacatatataaaatggtgaataaatagtgtggaaatgatgatcatgcttaaataggaatttcctctgtatatcaaataaggaatttcccccgtatatatatcgagtatatatacgggggaaattcctaatttaagagtggaatgcccatggtctcattgctgttgtgtattagacatgcagatacacatcaacaccggtgggtgggcaccaggtgagatcctagatagaaataggaaatggtaactatataccagacattgtgtaaatagaagacttgccttctaatgcactgcgtggaacctagaaagaagctaaagagcctctgagccaccaaagagatattaaacacacaaagctcttgttttttcctccagaggagagcccttagtctctccttcagtggccagcagctcttactttacctacaattctagcaagtttttatttgatttctaagctcagaaggtttagaaggagggagaaggctgcttcagggaggcatgcttgcagtgctgataaataaagatggtgatgacctcattactagagaagaggagggatattggtttacggtagtggttctttagaagaaatcaacctgtaacctatccttttaaatttatgaaagcttatgataatacagtgagaattgtgcagagagttgacagcatgtgactcttggattaggatgacttgagaaattcgaattgaaatgacagtttggaccctgtgttagttaactgttgctacatttataacccccagtgttgaattaggaggtataaatgtaaaaagcagtgatgaaagctcaatcaactcagtagttgcagctgctaggtatgagggccaagcatgcttttctccttggaagaccccaaaggtcccaccttattgctttactgaagatgtagtggcagtcatgacaatgataatgtcaggaggagaaaaaatagatgtgggctcccagtacgataaccgattattttatggataactttgagttataagaaaaggtgaaattgtttgccctaatcgcagtgac

SEQ ID NO: 101061 - DNA, 1369 bp, Homo sapiens
caccccacactgtggactttggacctctggggctcccgcaagcacagcagtttaggaaaacacttctggctggacagagttagttgagtttactttctccacaggacaaccaccttgtggatttaagacaggtgatcattattccagttttacaaataagagttcgaagccaaggcatcagatgggactgcttttgcatttgtaggatgcatcaggtgttgaatgccacagattttgctgcaagaatctctgattctgagatataagggcctgcataattttatctctgattttccaaaggcaccaaacaccttgcggttgactttttcattgtgtgccttaaaatgaagaacatgtagatcccctctaagtttccgctctgtgactgcagtgttaatgcttggtttctaacatgcccttttggtagttcttggctgaatcttccttccttatggaatcagatctggggcaggtgagtccatctgctctgtcatgaaccatgtggtggtgaagagtgcaggctctccggcggatcacctgaggtcgggagttcgagaccagccgtgaccaacatggagaaacccccgtctctactaaaaatacaaaattagccgtgtctggtggcgcatgcctgtaatcccagctactcaggaggttgaggcaggagaatcccttgaacccgggaggtggaggttgtggtgagcagagattgtgccattgcactccagcctgggcaacaagagtgaaactccatctcaaaaaaaaaaaaaaaaaaaagactgcagactctgatctcagactgtgggctcaagttaagcctgtgctaatttataagctgtatgtgtgacctgaacaagctacttaaaccctttgagcctcgattttatcatctgtgaaatgaggcaaattgtagtaacttgcttgtaggatggttgtgagaaattaatgaggtgaggtatgtcaaatgcttagcaaggagccaggctcatggaaagtgctccataaatactagccatccttggttatagtgctattgctgggagttcagtggaggcatcataaatgcaagaaaacataagagtgcgtggctggggtgaccaattgtcctcgtttgcccaggatggagatggttcctaggacataggaccttcagtgctcattgaaaacgcaggaatgtttgagacaaatcaggatgagtcggtcactctaatgctcatcccaggcccacaagctgtatttagagtgatcttgctgcacagcctgtgcaagggcttgcgaattgcatatacgatttgtatttgtgtagcaaaaaagattatctgatatttgacctgcattttatagctgttactttaggaagaaatagaag

SEQ ID NO: 101062 - DNA, 2075 bp, Homo sapiens
cacagtcagagcccagggtctcgctctgttgccaggctggagtgcagtggcacagtcagagcccagggtctcgctctgttgccaggctggagtgcagtggcacagtcagagcccagggtctcgctctgttgccaggctggagtgcagtggcacagtcagagcccagggtctcgctctgttgccaggctggagtgcagtggcacagtcagagcccagggtctcgctctgttgccaggctggagtgcagtggcacagtcagagcccggggtctcgctctgttgccaggttggagtgcagtggcacagtcagagcccggagtctcgctctgttgccaggttggagtgcagtggcacagtcagagcccggggtctcgctctgttgccaggctggagtgcagtggcacagtcagagcccggagtcttgttctgttgcccggctggagtgcagtggcacagtcacagctccaagagatgttcttgaaatttaagatttattaataaggtacagataataggaattttaaatatatgtacagtttgcttctgtcatcttttcaagacaaatttaggttttattttctatatggaaggccttatttccgagtttgtaaaggatttctcttgggaatcctaacacccctgcatcatgcagaagaagggaaatagagaactttatcacagacacagggagacatttgaacaggagtgcatggggcccgtggaggggaccttcttagccatcagttctattcccttgtcacacctccgtctctttctctttcctggcatctccatggaggagacttcctcgcatcccagagaaatagcagagattctttcataggacagcctttggccttaggtttgcctgaggcgtcagaaaggcacatttgactcaaagaataatgttgcgcagtcttttcaatgtttagagatgctgtgaacttgggcatcactttcccatctgtgaaatgtccagatgatttctatgtttcttaaagactaaacttctaggcctctgactttaggatttttattttatgttctgaaaaccaaatcattggatatctttgataaagattaaatatattaaaatatattttcccaatggatcagttttgttatttgacactactcatggtttggttgttcaaaaggaataagttttgaaatccccaggtccaggagataaagcaacctgtttccaggattgttcatttcaaacagtgactccattagaactgtccacattcgaatatgacagcagggattttcactttcctgggaggaaggtttctaaacccaaaagagtatacagaggagaagagcatttggctcaagttggaatgaaaagcagaaaatgcaagaaggggaaaaatcatatggtgaaatgatggatgatgggcgataataacagggactagattcaagagttatgaaaatcacaggtgcagcagggtctgctgaatatgaaggatctaaactgaaaatcggaggaataaatgcaggagatgaaatgactaccaaataggaagcactaacattattacatgctttaaatacttgtaatgggccagatacttttcaagggttttactaattatcactccttgagttttcataacactgttatgatgtaggtataatgatcatcaaaactgaggaacagagtggttaagtagcaagccctaggtcacacagctagtcagtgtgggaacttgacttgagccagaggaattcaaggctagattctgtgttcttgggcattactttatgttctctctgtctggcttactttgtgccatgtgctgtgcaaaattcatacttatggagaaaattaggtcctgtttgaaattactgggtggaaagcctttgttcagaattttcaatgagcatgtctttggggaaattctaagactgcatttaattctcataatgatcccatgaggcagacacagcaatcccatgtatcagataagataattggttttatggaggttcaagggcttggtcacaatcacactgtggtcgtctcattcagagtccaggttcttaatcaccatgtgatgtcgaatg

SEQ ID NO: 101063 - DNA, 1003 bp, Homo sapiens
tctttcaagcacaggatactcccctgactccgtgacagtgtgttgctgtggaaacaagagcaatgctgtgtaggcggtggtccttgataaatatttactgatgatggtgaagagatggtagagtctcacggcagctataatgggggggcgagggtgggcgcaggggaatttaactcaggaggcagcctggtttggagaaaagagtatgagctttggcatctgaagtcctcagtttaaatcccgcctctgcttctttctacctatgccggcttgggcaagtcatttaccttctcagctccccagcttctcatttgtaaagtgaggataattatagctgtctcgctggactttgtggtaaccaaataagatgcaatatgcagagtgaatggaagagtgcctggtacataataggcactttgtcccaagaggagccttgtctgttactgacctcagcacaggtgtatgtgcacaggccaaggcgggtggggcatcagtcttatgctaaatagtgaactggccatgagatggctgggtttggtgatgatttttagtttccttttttttttttgagatcagtcttactctgttgcccaggctggagtgcagtggtgcagtcttggctcaccgcaacctctgcctcctgggttcaagcaattctcctgcctccgcctcccaagtagctgggattatgagtgtgtgccaccatacctgactaatttttgtatttttatagagacggggtttcaccatgttggccagctggtcttgaactcctgacctcaggtgatgtgcctacctcggcctcccaaagtgctgggattgcaggtgtgagccaccatgcccacccagttttcctccttttcctcttttcaggggcttgattccctgcaactgcttttacaaagagattgccaatgaaatttgccaacagatgacactagtaaatctggccattcaagggtttaaatagggaatgttgacttttaggcatattttactctct

SEQ ID NO: 101064 - DNA, 1025 bp, Homo sapiens
tctggttgctttcatatcaggaatagaacttcttttcaatttttaaatgagtaatgtgtttattcagcagccttttgttaaaacatttagagaagtgtgaggagcgagcaccttttctttgtttgctctttagaatgcaggagaaagaaaagaaatcctggaatatggtttgggaagaaatctgtggttcttttgggtctacctgggcagggtggtttctgcaaacctgcgatatagcatatatttagcaagtgggtgcctttgtgccaggggctccttaaacgaatgggattagcttgtattggagaactggtgcattctaagcctcacacatttgtagaaatggggattttctgtatatatctgtcctctcctttccagtttaacggcaactagaccatctaaattagattttttttccccagggttcctcatgaacatctgtatttgtcaaaacaagaatactgtaaatgttgacttaaaaatggacttatcttattttattcctaaattcagaaattgttagtatttcaaatctagtataaatatgacaataacttgatttcctttaaagtattttatttaaaacttttggcaagtttggacaaatacattttaaaactaagtagtgtgttttccatgttcttttgatctgaaaattcccaatcttgaaagcaatttcaatttataaggttacatccataacatagttgggctaatatgttttgctgtaacatgttggtctcagtgtccaaaagtcggggcggaagcttgtcatcaaaaggcaatttcctttttccttactctaagacatatttcttgagccacgacggtttttggaaggaatgatagtaaaaatcaaacaaacaaaaaacctttagaaacagcctcttaacaatgtggcaaaacatgatttgggatgggggaagagagagacagttaaatgaataaggggataatgaattcatttactagtgggtttcagaatccacatattgagagcaaaaatgtatcttataggggac

SEQ ID NO: 101065 - DNA, 5731 bp, Homo sapiens
gctggactcggccgcccctgtggtgtgaggcgcgtgttcgggctcttgccgtccccgcacccgcaccgcggttactggcttgcggtccgccgttcgacaaccagcccttgggtccccgcccgccacggacatgccgcgcgtctacataggacgcctgagctacaacgtccgggagaaggacatccagcgctttttcagtggctatggccgcctcctcgaagtagacctcaaaaatgggtgagtcgggcctgggcgcccgcgcccagcgtcccaggcctggtggcggcgggaactctccaaggaaagaagcggccaaggccgcggcgccgcgtggcagggcctcaaagatggcgacggcgcggcgtcgcgggggcgcgcggtggggtacgggcgcgcgcacgtgcgcgtcctggctaacgactcccccgcggttgtccggccctcgcaccgcccctaggtacggcttcgtggagttcgaggactcccgcgacgccgacgacgccgtttacgagctgaacggcaaggagctctgcggcgagcgcgtgatcgtagagcacgcccggggcccgcgtcgcgatcgcgacggctacagctacggaagccgcagtgagtcccacccccgcgcgctccgcgcccttggggaccctgggggcgggggtgggtggggtggggcctcccagcccgggcaggcgcgagggccgggggtcgtttgacttgggtgtccccgagccccgctgccttcacgtctgcccggggcagccatgggacgccggagcgcggggattgggtttgggtgtttggttttgtttatttgccaagttgggaggtgggtggcttcttctggccccttgtcagcactgtcacgggttcttcccacagaggaagtaaggggtggctgtatttgttgtattctccttacttacctatcagtgcattagttagaggttcgggggcaggctcgggtggaggtggggtagggggcgcgggggacggggaaggggaggagcataaagtataggtcttaaagctatggaacttgatgggggccaaagaatgtactatttttaagtaatgtggtattgtaccacaaagtagatctaaataagctttatgctgtatttgaactaattggggcatgttattgggaggaggttggggggatttttggttatgttaaatgtttgatgtttaaattgttgcatgttgaattcaaactttttaacaagtccttgatgtttcaatttgaaagtgaccaatggggctgaggctgtgtccactgaggctaagatgactgcctttcctgattggccttggcttttccatacattgtgtgacccttgccctatgaccctttggctgaccttaccggaagccatgacgacagcagccttttgccattagacgcagggtgatggtgaggattccaagggttagacaaaactggttaatctgaactaggtgactgttaccttgcgtgttttgtggccaaaccaccaccaaaaacctcacactgtgatgtaagtacttagtgtaaaactagtaaacatttttgtaaaatgtagaaatgcatgtaatcagttaagttttatattttacaatgttctgtaaaataaaacttagcgaggtaaatcgaataaaggagcagtcactctctaacagattgtaggagaggtttagttggatttagtctatttgacttgcccttaatttaattttatggcaaatcacaaatgtgtcgaaggtttagcaatataatagcaaagtcctactccagtaaataaaagttgatatgtttgtactaactttcaaagacattatgcgtttttatcattacaaggcatctaattgttcccttcatgtgataaaggtggtggaggtggatacagcagtcggagaacatctggcagagacaaatacggaccacctgttcgtacagaatacaggcttattgtagaaaatctttctagtcggtgcagttggcaagatttaaaggtatgttttgtaattcaagatagaaatgatatgactaatgctttaaagtaaactccttttatattcttatttctgggaatttattatggtatatagatgttttaagatttccgagtctgaccaatcttgtctttcaggattttatgcgacaagcaggtgaagtaacctatgcggatgcccacaaggaacgaacaaatgagggtgtaattgagtttcgctcctactctgacatgaagcgtgctttggacaaactggatggcacagaaataaatggcagaaatattaggcttattgaagataagccacgcacaagccataggcgatcttactctggaagcagatccaggtaacttgttgaaggacactgtgggaaggaaacaatatttgccaataaaaagggagtaattgagtgatgtcaattgttgcctacttgaattaaagccagcttttagtttgttttggctgtgcatcattgcgttcttttctggatgttttgaacagtgtatttaatttcgtagtaaagaaaaacattattctttggcttatctatttttgccagatggcacggatgtatttaagttggattgggattaagacttcattgtttttctcctaataggtctcgatctagaagacggtcacgaagtaggagtcgcaggagcagccgcagtagatctcgaagtatctcaaaaagtcgctcccggtaaataacgttgtgttgagtcactgtgaatattaccgtacttgtttatggagtatgtgtacattctcactaagtattgagaaaatcggtctttccttgtccagttccaggtcgcggagcaaaggtcgatcacgttctcgatcaaaaggcaggaaatctagatcaaagagcaaatctaagcccaagtctgatcggggctcccattcacattctcgaagcagatctaaggatgagtatgagaaatctcgaagcaggtctcggtcccgatcccctaaagaaaatggaaagggtgatataaagtcaaaatccagatcaaggagccagtcccgttccaattcgccgctacctgttccaccctcaaaggcccgttctgtgtcccctccaccaaaaagagctacttcaagatcccgttctagatctcgctcaaagtcaagatcaaggtccaggtcgagttccagagattaactcagaactccttgtttgcacattattatggaacactttcctacttaggcagttactcttccatgtttatacttggcctcttctgcaagaggaatctcttgaaaacaggggcacacagaaatttgatttgtggccaaattggatgaaaaagatgaggctctaaggaaatggtggcatgaagaccctctcccttctttgtagaattaagataactttgattttatagcttttgagctaacgtaacttttgtaaagattaagctcatttagtgttgtttttttttttttttttttttttttttttttttttttagtatttcagcaggatctgctggcagggtttttttgttttatttgtttgcttatttttaaattaactgttttgagctttgaatacttaaggctttagagggagaacccaattttcaattatgttggctttttataaagcttgagttatgtaagatttaaataaaagtttgctaccaagatgattgccttattgaataggtcactattaaattcctttaaatgttgatatctgccatttgtggaaacaacgtaaattctacttaagtgtaaacaaggcaagcctcagaccagcaataaattactcagtttggataacattattttgtgcagttaatcaaatttgccaaagtctttatctgcccctttaacaagttgagtaaaaataaaaggtattttttagtcaatgtgttccatgattttgcttaaattaatacttttaagtaatggaacttttttcaaaggcaaatttaaactatttaagaaatagctcctaatacttgggatcttgtttagagaatccactttctggaagttctcagcataattagtgttgagagtggttcagttgtctttaatgtttgtcatgtggaaatggaagtagcctctttttgttctgaaattgagtttattcaaagtgtaaaagcacatactgcattttctgctgaaagatcattatgtttaacaggcacttaatctcagtaaagtcagttgccagttaagttccacccagtagtcagtcccctttgtagttagtgggattatttgataattggttagatcatacttgtaaattttaatgctttgtgtaattggtttgaaaaacagtgaaatgggtaaacgcaaaacttttgtactttattacgagtaaagtgtaatgagtactgtggaaaccaaatttgaatactgcaaatttgtaggagttactaggttagcaattagtccatacatccataagcctgatgagttgaaattgcagtttgagaagtgaattaaccttacatccctttgttcagataccttaaaagttactttatttaaaagcatttattaatcttagtctgaaatcaaaatatagattaattggctcagctttaatacctttctaggaggtgtcacaatgtagggtaccaagggttggattgtgatggggcatggtcgtacactgctcattgtgccacaggtgtgactggaaagcatgatattctagggttggtttgtagattcaaataatccagaaatatacctaataagattgagtgaaaaatttgagtcaaatatctagggcattcacagagtagctgtgagttcttggtaatgtgaaaaaggccttgtttttcagaaattcctgggtttcctgttaaaaaatcttaaagcccaaccttaggaatatagtgccccaaaaggcggatgcttcttccattatcttattttctttgatactttatttaattagatgtttataaagaaatgggtttatttttccagcataaacctcagaatttaaggaaagaaaatgatgtctgttgttatagttcattgttttgcctactcagcagaagtgatgactcttaaaaattggctttgaccaaagttctcttgttttcagggaaagaacataaaagctttttgaactacagcctttttaaaagagggatgggaggatattacagtaagaaattaggctttctaaaagtatgaaacatccttcaactgggctctcttgttaataggacatcatatggtaatagactggtttgactatattgttagctgccacagtaagcaggtcattgtataggtaaatgcctgcacccataattttctagtaatagccacgaccaatttattaacagtcagggcctatccttgcctgtagttctcagtcactggatgcacaaaatcactgtgtaacattggctcacttggtgagcatagggttgactgataaaatgtttaattcccttgctagcttgtgagaagaatgagttgatgacatgctccataccagtggctagatggagtattaaggtggagcagaaaagaagtgagaacatcttgattcccctttcttttacttgatggtgtttatgaacatgccgtagtgcctttatggccagtttgagtcctgcctactttgacttttacgttcccattcctgtgttaccaccttcctcccgatttgttcacctattttgtgctttaaatctcaataaaatacttactgagggaaaggcttgttttgagtttattgcatatgccc

SEQ ID NO: 101066 - DNA, 1022 bp, Homo sapiens
ggcagggcctgagggggcgtgggcggagcctgagtgtggctgcgatggggagggaggcctgaggcccatttggcccccgcagaggaccacccccagaatcctccagaagatcccaatcaggaccccccagaggatgatagcacctgtcagtgccaggcgtgcgggcctcaccaagccgcgggtccagatcttggttcctctaatgatggctgccctcagctgttccaggagcggtaaggggaggaggtcgcagccctacttgctctaccttcagcccccaaagcctcattcctgttcaggggttaggagaggggctgggtggtgcagggcgggtggttctttccctaaggctggcccttcctcaggtcagtcatagtggagaactcctcaggctctaccagcgcttctgagctcctcaaacccatgaagaagaggaagcgcagggaataccagagcccatcagaggaggagtcggagccagaggccatggtaggaagagggcagtggggaagggagggggaagctatagcctatgcctcaattcccactgtcccctccatcaatccagattatggagctgggccagagaagacacgcataatgactcactcatcatattttggggtcccatcctgagttaggtcctatacctggttaaagggaaatgaattaatcactctcttgattttccagagctcccatctcagtttagtgtcaaggttaagacatagtcaggtgaactagcacccaaagtacatgtgcaggcagctggaaaactccatcactggagtccagtgcctaggccaaaggccagggaacacccagggctctagctgcagaagctggaagggacagagcatgaattctactgggcgtgtaagagcatcacaaaggaagtttttgtgtactcagtttctctaccagataataaggagagttgtagtcaggctgtttaattaggatgtgcatgctcatgtgagtctgtgctcaagtgatagggggatgtctgctggagctgcact

SEQ ID NO: 101067 - DNA, 1071 bp, Homo sapiens
ctggcggcctagaagaaattctgcctgtttggggcagaacaccacatggccagagagccaggtaggggccaggatcagaccctagggcttcatcccaaaccatgaggagaagaagctgggatcaggcttgccttctacaggagaagcaagaagaaggaaaggacccagagggacaacccactgctagcaccccagagagtgaggagtggagcagcagccagcctggtacggtggcttgtgtgtatatatattcgtgtgaggtgtgtatatacctttggaggtgtgaggctgagaatgtgggttatgattgtgatggtaggttgtacatgcataaatgagcatgagttagtgtgtgtgaaagagagagagacagtgagagactattttgggtttgtgtattagtgtatgtattttcttgggagttatatgatgtgtttgtttatcctctattatccagtcatgactaggccccagtgccagggagatcttggctcaatttttgaagacttgagtaacttttactggcaccacatgtcattgcttctctttagtggtggggcaagcctgcactggtcattggtctaacattcctgtttggaaccctattctcactctttgattctaagaaaaatggagcagaggtcattcatatctccaaccttcaggccttctcaattaccatctccacattcccacatgacaactgtcaactgtagctaagtagcatacttgtaatcacatagatactgtgtagcagtttgtttaatgtctctcttctgccctcaaaaccatcaacacaaggacagtatctgtttttttttttcttttttaaaattttttaaattaaaagttttggagggtgaccgggtcttgctctgttgcccaggctggagtaaagtggtgcaaacacagctcactgaagccttgacctcctaggctcaagcagtcttccacttcaacctcctgagtagctgggaccacaggtgcatgccaccatgcatggctaattttttaaatttttgttatagagatggggatcttactttgttgctcaggctggtctcgaactcc

SEQ ID NO: 101068 - DNA, 1044 bp, Homo sapiens
ctaagcaccaactatgtgccaggtattgagctaggtgttagggattcaataggctgggtctctgcccttattaagtttggggtgggggccgggtgcggcatacacgcctgtaatcccagcactttgggaggccagaacgggtggatcacctgaagtcagaagttcgagaccagcctggccaacatggtgtaaaccctgtctctactaaaaataccaaaaattagctgggcatggtgttgggcacctgtaatcctggctacttagtaggctgaggcaggagaaccacttgaacctgggaggcggaggttgcagtgatctgagatcgtgccattgcactccaggcagggcaacaagagcaaaactccacctcaaaaacaaaaacaaaaaaagtttgggattgggggcaggcaaaaaacccaaacattatatacaattatcacaaggtatgacaagtgtcaggaagaaaatgaataatgagctgagatagacaataatgggagggggggcaaattaatagcggcatgatcagggagttctctctgaggaggtgacaattaagctgaggcttgacggatgagaaagaggcagccatgaagacagctgggcaaaggctccccagacacaaggcacagcatgtgcagaagtcctgctatgggaacaaggaggagagtggccagttttagggtgttttgagcagaggtctggcatgacctgatttaagtttttagaagattcctcgggcttctttgcggagagtggactgcactgcatctgctttttttttttttttttttttccgagacagagtcttgctctgttgccaggctggagtgcagtggtgcaatctcatctcactgcaacctcctcctcccgagttcaagcgattctcctgcctcagcctcccaagtagctgggactacaggcacccgccaccacgcccagctaatttttgtatttttagtagagacggggtttcaccaagttggccagatggtctcgatcttttgaccttgtgatccgcccaccttggcctcccaaagtgct

SEQ ID NO: 101069 - DNA, 1833 bp, Homo sapiens
catagattgcttttttcctttgtgtagtttgaaatcctgaagaaatatcttgacactggtggagatgtctttgtgatgctaggagaaggtggagaatccagatttgacaccaatattaactttttactagaagaatatggaatcatggttaataatggtaattagtattattattttcagtagaggcagtacttttctatctattatttgatatcatagccctctaggtccagtggcataatggaaaaagccctgggctgtgtgtgcgtgttttaatgttccattctcatcagcagtctgagcctcctaggcttgggctgcttccatttataaagcgagatggattggaaccaagttccagggtgcccttcaggtcaaaattggtatgagtctataatatcgaatttatttctaacctaaaatatacctccttctctttttccctcatagatgctgtggttagaaatgtatatcacaaatatttccatcctaaagaagctctagtttccagtggagtcttgaacaggtaagcatgttgaaagcagaaatatcttggcaaggcatcgtcgctcacacctgtaatcccagcactttgggaagccaaggtggatggatcattttgaggtcaggagttccaaaccagcctggccaacatggtgaaaccccatctccctgtctaaaaatacaaaaaaaattagccaggcattgtagcaggcgcctgtaatcccagctactcgggaggctgaggcaggagaatcacttgagcccgggaagcagaggttgcattgagctgagattgcaccattgtactctggcctggctgacagagcgagacttcatctcaaaaaaaaaataaagcagaaatatccttacacataactctcatttcttctacataaatcttccctcgtctcttctcatacattcttttcactgccctttcttctttcttgcctttttgttttgtgttattataatttattttactatattactactactcattcatcaaattatttttcttcatcttttgaaacttacttcacattcaatttattttttgtttatatatatatgtattttttgagacagagtcttgctctgttgctcaggctggaatgcagtggtgggaacacagttcactgcagccttgacctcccaggcttaagcaatcctcccaccttagcctcatacttgctgtactaatgaatgcagtgtgaaattctcaaattttttttgtttactagattttaatttttcttcttcaagggaaattagccgagctgcaggaaaggctgtgcctgggatcattgatgaggaaagcagtggaaacaatgcccagtgagtgtgttttctgatgccacatgaggaagatgtatcattttggagtcttctttttcaaaatgaaaagagcttttgtttctggttacaaaaataatcagaatttgaacagttcaagaggaaaaaagtagaagctctgcactgtaagtccatgctcctccccctgaaggtagtcttaatatagtatttaggcccagcatggtggctcacgcctgtaatcctagcacttttgggaggccgaggtgggtggcccacctgaggtcaggagttagagacaagtgtaaccaacatggcaaaatcccatctctactaaaaatacaaaaattagccaggcgtggtggtgtgcacctgtagtcccagctactcgggaggctgagacaggagaactgtttgaaccccggaggcggaagttgcagtgagccaagattacgccactgcactccagcctgggcaacagagcaagactccatctcaaaaaatatatagtatggt

SEQ ID NO: 101070 - DNA, 1210 bp, Homo sapiens
taatttttttgtatttttagtagagacagggtttcaccatgctggccaggctggtctcgaactcctgacctcgtgatccgctcaccttggcctcccaaagtgctgggattacaggcgtgagccttcacgctcggctgttttgttttgttttgtttgagatggagtctgttctgttgcccggggtggagtgcagtggcgcaatctctgttcactgcaacctccatctccccagttgaggtgattctcctgcctcagcctcccgagtagctgggattacaggcctgcatcaccacatctggctaatttttgtatttttagtagagatggggttttgccatgttggccaggctgatcttgaacacctgacctcaagtgatctacctgcttcagccttccaaattgctgggattacaggcatgagccaccacgcccagccaatacaatattgttttagtaaatgctatttttaattacccatatgcttctctatagtcatctttgttgcattcagggaatgataatttgatttcctactgttgcacctgttctttctaatgtaggaatactagatctgaggaataggaaagccagtaccagtccagttttattctgattaggagtgcttttattataaaagcagcacattagagagctctagggtttttcagtgttgaaatcctgtagtcacattactttaggaagaggtgagtgatcttaggaaatgtggaaacatgacagggcatacctgaaacacactaagtctgtactttgggaagggcagaagttaagaattaatctaactactactccaactgtcttaggtactgaagaagacctggaattttatgtcaggaagtgtggtgatattcttggagtaaccagtaaactaccaaaggaccaacaggatgccaaacatatccttgagcacgtcttcttccaagtggtggagttcaagaaattgaaccaggtacagagcctacaaggcacagtgtagtgggagcccctccagtactggtatcttccatggactgtgcttgccatgttttatgacgttgattcagcctgtaaatatttattaagcatctactaggtgaacaaaacagacaataaaccctgtacttatggaacctatatactagctggaggatgtagacaataagcagtaaacataagtgagtcacataggatgctagaaaatggtaagtgcttt

SEQ ID NO: 101071 - DNA, 1133 bp, Homo sapiens
ggggccatagcagtgaacaagatgattgcggttcttgctgtgcctctcagagctctgtgtagtgggagacagaagtgtattggcagttaccgtggtctaagtgccatccatgaagggaacccagagatgagggttttgatgtggctgctcagcagtgaatgatgggatgggaggtcaggtaggttcccagcagtactcactctggtggcatgctaggacagacacccgaggccaatataagaagtctggtgtggtctttgcaccagtgctttcaactctgtttgttactcatcatggtgggtggtgggcagtggtcacaagccctgccatggtagggcaaaaggatcaaaatttgatccttgggttggattcagccctaaagccagatattatgtatatgtcctaattaataaagattcagaatctctaaagtccaaagcactgaagagtttacatttcaggctttatactgaaatactaaaattctgtgtcttattctctcatccaggaacatgacatcgatacaagtgaaacagcattccagaacaatttctgaagaccatgcctcttgaagctttttctgcctcctgattctctctttgtaaactattttcaaattgtttttcaactccttatcaaaattgtttatacactctttcctccatgagctctggaaggtatatgcatcttctgtaatactcagataggtataagatttttcacaaaatccttatgtaagatacattccatttttaaaaattaaatgtatggttgcatctgtctttttataccctatgaaacagtcttgatttttttttctcaaccccagttctggatttgagtcttttatcaaagacataattaactctcaagcttgttgtaaatactgtacagctttctggaccggttgaaaggatacaacagtggctggacacggtggctcactcatgtaatcccagcactttgggaggccgaggcgggcggatcatttgaggtcaggagttcaagaccagcctggccaacatggtgaaacctgtctctactaaaaatacaaaagttagccaggtgtggtggcatgtgcctgtaatcccagctacttgggaggctgagacaggagaatcacttgaatctgg

SEQ ID NO: 101072 - DNA, 1465 bp, Homo sapiens
cctggccaacatgatgaaaacccatctctacaaaaatacaaaaaatagccaggcatgctggcgcattcctgtagtcctagctactcgagaggctgaggtgggagaatcatttgaatccgggaagtgggggttgcagtgagccaagatcacaccactgcactccagtctgggcaataaagcaagacttggtctaaaaaaaaaaaaaaagttaagtaatttgcctaagataccgcaactgaatggtggagctgggactcaaaccccaggaagtttggctgtggaggctgtgctttcaatgaagtgggcatgtccacattaattactttataaggggagtgggcgggagaaaccctgaattaagtgatgtggaagcttctagcacttaagatgtgagttagtcttccttctgtggtaagtgaagtttgcagcagctggtggctggactgtccccaggtggccagcagcttctggaagggggctctgaggcctgaacaggggctaaaaggctggggtttgatttggtttcttcagcgtcctgtctcagagctcatttatcttcctctcagcactgctcccaggaagtccagtgtgacttgatccttggtacttggtaaatgtcaatctaatatagaaaacctttgctaaatctcaaggaaagacagtctcactgtctgtcgcccaggctggagtgcagtggcgggatgacaagggcttgagcccctcgaactcctgggctcaagcaatcctcctgcctctgcttcccaagtagctgggattacaggcattcaccaccacagccaggtaatttcttaattttttgtaaagacagggtctcactctgatccccaggctggtctcaaacttttggactgaatcagttctcccacctcggcctcccaaactgctaggattactggcatgagccactaaatctgggctaatctctgggagtttaaacccaaggtaaacaattcaatgcaacaaacctttgcctggggcttcttatgtcaggtcttctactgggccctggagatactggtgtgcattgagaggccacctggacctcaggatgctcccagttcaaagggggaaatgcagaagtctacaggcagattgtgggcagtggaccccaaattaaataggaatcagccacgtgggaggggcaggaagtgttcctgccctgggtaatggctcaggcaaaggcaaagaggccgtttcttttggccagggctgggtggtggtctggaagatcagataaatgtgattgtggagtaaggaatttaccctgagggagaggaggatggttttaaattctggaaagagctcacgcctgcaatcccagcactttgggaggacaaagcggcaggatctcttgagcccaggagtttctagaccagtctaggcaacagcaacatagcaagacacccccttctcttaaaaaaaaaaaaaaaagcgcagtggctca

SEQ ID NO: 101073 - DNA, 1401 bp, Homo sapiens
gaacaacaaaaaataaagtctattaaggagggtctcttggaggcaggagaggaagcagggagaggcacaggtagggtgaggagccgctttagggtgcggctctagggacccagtagtggcttggactagcgtgggggattccgccctggcgctttccctggctggctctcccatgctcgcgcctcgctccccttcctcggtcttcgctatgtgggatactcctgggccgccccggactgacacgtgagccaggcctcggtcacatcccggcccgctccacaactccgaagtagcggccgccgcccctgtcctgcagccggccctggagggtctgggcaggtgccgccccgcaggccccgccccgccccgccccctggctccgcccctcactcaggcccctcccccggcgcccgcgcgccaggactgggcggcgccgacgcgcttggcgggagatagaaaagtgcttcaacccgcgccggcggcgactgcagttcctgcgagcgaggagcgcgggacctgctgacacgctgacgccttcgagcgcggcccggggcccggagcggccggagcagcccgggtcctgaccccggcccggctcccgctccgggctctgccggcgggcgggcgagcgcggcgcggtccgggccggggggatgtctcggcggacgcgctggtgagacgagccgggagggcttgggcccctccccctccctttaactcacccctcccccacccagatacccccgaccctccccaggctcccaccaagctggggtgtgtgtgtgtgttgggggtggggtgtttccgcggaaatgctgcgtcctgggccctctgaggcaggggcgcgcgtaaagctggggggctcttgggcgtccctcgcggctccccaggcctgttgggcctcggagctgggacgggcgggtctcttgggacccgggccaagccgtgcatgatgtcattttgtctcccgcctaattgcgggatgggggtgggccggccggtgtcagctggcagggccttcgccggcgagggaggcgacccctgggagcgagagggagtcttcaagtcccagccagtgggagaccgagcctgggaggcacttgttgcagcctagttttgggtcaacttggtgggtgggctttgctccttaacattccggggagcacagagtcccccaagccctctcccctggactgagaagggtgctgagttgggggctcttttgtctctcccacctgggttccgcgccccagcttggttcggtttgagacctctcttcctgttcccacgaggagttttgggcagctggggttgaaggtgcgggggagagagagagtccctggggcaaaggcaggaactgcggtctccattttacttatttccccagagacttaagtggca

SEQ ID NO: 101074 - DNA, 2433 bp, Homo sapiens
aggctggagtgcagtggcacaatctcggctcactgcagcctctgcctcccgggttcaaggaattctgtctcagcctcccaagtacctgggactatgggcacacgccgccacgcctggctaattttttggatttttagtagagatgggtttcactgtgttgctcaggcaatccgcctgccttggcctcacagagtgctaggattacaggcgtgagccaccgcgtctggcgtgttttattttgtgtagagatggaagggggcgggagtggcctcgcgttgtgtctcacctcactatgttacccaggctggtctcgaactcctggcttccagggattctcccccacttggcctcccaaagtgtcgggattacaggtgtgagccaccttgcctggcgccatcctgattttttgttcaggaagagttattccaggagtgactgcctctagaccaccccaggtcctgggctacttctcccatgaggggctcagtggaggaacccctcctgtgtgaaggatggcagctccacagccctcagcccatttcctggccacttgctgtaactctcctctgccctagtgccccacttcccgctttgtctctgactcacccctgtcctggagcagagcccagcacgttgaagggcaaaaggtagggtatgttggaccacaatgtggttgccaccactaactggactctgctttttcagctgggattaggatatgaggacttgcaggtgtctggagttaggaaggttcagagcctggctctatgaacttggcaggtggcctcacccctctgagcctcaatttccgcatctgttaagggggataatgagaatgtgggtgaagttgatggccagcacatatggtaaagtatatcatctcacagaaatgccccagctgtctgagatgctgaccctatcaaacagcattggaggctgggtgtggtagctcatgcctgtaatcccagcactttgggaggccaagagttcaagaccagcttgaccaatatggtgaaactcctcgtctctaccaaaaatacaaaaattagccgggcgtggtggtaggcgcctgtaagcgcggctattcgggaggctgaggcaggagaattcacttgaacccaggaggcagaggttgctgtgagtcgagatcatgccactgcacttcagcctgggtgacaaagcgagactctatctcaaaataaacaaacaaacaaacaaacagcattggagcaccagggagtgtccatgcagacatcatttcatccttgaaagaatatttgctgaccttctgttagaagccaggcctttgtgctggatgctggagaagcaaagatggtttctgtcacgagctgtctgggggcagttgattttaaagccaacttcattctgttattagtatcttctggatttttgccttctatattgaagtggtggaggacccatgaactgggtcaggaatgaattccagatccttctgtattgctgactgtagacaccgtccctcctttcctatttctgaaaatttttttcttttgaaattgggtcttgcctggcctaaaaaatttaattagtatttcttattgactaataggcagcagctttgcacattttttcatttatttgtatattcagtcagtccctgggcaaacatttcttaagcccttttggtgataaaccctgggatgccaaggtggagctgacctttgtagatgatgtggaggagacaggcagttgcagtgtaagggcccgagacaggagggtttcccatgtgctatggaagtataggagtgactctaggaagcaacggtgagctttggagaacaaggagaaggtaatgtggatagcacagtaagccttctttcatttgtttcatttccaaacaagacttgccttgtttggaaacctgtaagctttttccagtttacaaatgtctgacctagcaacttacctgaccaacgtgacctgatgcaggtcctgtcgggtggagttggggaaagattactaactttcctcaagcacctgacatctctggaggtggatcctatgatttcttttttttctttttttttttttttttgagacggagtctccctctgttgcccaggctgcagtgcagtggcacgatcttgactcactgcaacctctgcctcctgggttcaagcaattctcctgcctcagtttcccgagtagctaggactacaggtacatgccaccatgcccagctaatttttgtgggtttttatttatttattttttttgagatggagtctcgtctgtcgcccaggctggagtgcagtggcacaatctctgatctctgctcactgcaacctccgcctcctgggttcaagcagtttttctgcctcatcctctcgagtagctgggattacaggcgcatgccaccacacccagctaatttttttgtatttttagtag

SEQ ID NO: 101075 - DNA, 1303 bp, Homo sapiens
agaagaaagtagctcttaaccctatttcattaaaaaatttaaaaagaggtgaggtcgggtgtggtggctcatgcctatagtcccaacactttgggaggccgtggtgggaggattgcttgagcccaggagttcaaaaccaccctgggcaatatggtgagaccccgtctctacaaaaaatacaaaagttagccgggcgtggtggcatacccctgtagtcacagctacttaggaggctggggcgggacgatcatttgagtccaggagttcaaggctgcagtgagctacgatcatgccacactgaattccagcccagtgacagagtgagaccctgtctcaataaaaataagtgaagcagaagtgcctatgtcttaaaaagaagaaaaagtaagagcctctctcccccagacctttccctagggtgggctggccgctgcctacacgttctccattatgtaaaacatatggacacaccatccttgacccttggcctgctttccccatagcgaggatctggatgagctgcactaccaggacacagattcagatgtgccggagcagagggatagcaagtgcaaggtcaaatggacccatgaggaggtgagtgccatggggaagagagggttgatggcagctgggggctgtccagaggaactgagcctggagtgtatttgatgtctcatcagatgggatgaagaggaggagccggtgaaggaagggatgggtcctctgattgtcctcatgcctcttctcagagcattctgggggattctcaattttgaggactcagtgggtgggaaggggatgtgtgtcctagacctcagggcccattgtgtctcctgagcagctgccatgttctatgtcatggacattgattgtgctttttgccttttgactgctaggaggtttggccaaatctgtaactccccccaccctttttttttttttttttttgagacagagtttcgctcttgtcacccaggctagagggcaatggcataatctcagctcactgcaacctctgcctcctgggttcaagcgattctcctgcctcaggtgcgattacaggcgtgagccaccacatccagctaatttttttttttttttgagacagtctcgctttgtcacccaggctggagtatagtggcatgatcttggctcactgcaacctctgcctcccaggttccaagcaattctcctgcctcagcctcccgagtagctgggattgcaggcatgcgccaccatgcccagctaattttttttttttgtatttttagtagatacgggggcttcaccatgctggcca

SEQ ID NO: 101076 - DNA, 1876 bp, Homo sapiens
gtgagctgagatcgccccactgcaccccagcctgggcgacagagtgagacactgtctcaaaaaaatggcggtggctcacgcctataatcccagcactttgggaggccaagtcgggcggatcacctgaggtcgggagttcaagaccagccttatcaacatggagaaaccccgtctctactaaaaatacaaaattagccgggcatggtggtgcatgcctgtaatctcagctacttgggaggctgaggcaggagaatcacttgaacccggaaggcggaggttgtggtgagccaagatcgtgccattgcactccagcctgggcaacaagagcaaaacttcgtctcaaaaaaaataaataaaaaataaaaagtgaaaacataaaatctttaaaaaaaaaaatcaaagtgatatgtggttgctataaaaatttaaaccatacagaagtgaagtcaaatatttcttcaccaaaatctttgccaaaagaagcatccactcttcccagtttcttgtggcctgtgtgcacatgagaacgcgtgtgtctgttgtgtaggtggggcctggcctggctcttgtggctgcgtatgttgtggtttgtgtcctgagctaggaagcctgactgagggcaggtggggactcaggtctggctaggtcagcccgcgatgcctgctaccatggctcagcctgtgccctcccaatttccatggaagtgctggagggtcttgtggcagcctggggcctggctggtgtgggaaagtctgtttcccacctttagtttggactccgtgtgtgttgttcctcctcatccctctgctcttttctacttagcttattgggttgagccctggagagggaagcaggactctggcgcctttgtttacccccacttgatctctactctagaaagggtctctggtattcttggcctagatttattccaggcaataaatgagagggatgcggtcagatcctcaggtaggccctgtgggctacacaaagtcatcctgggtggcatcccctgcagctcgctcagtgttgcctgaggggatgtggtaggtggcacctctcagggccatggcaaggctcaggtggatgtgaagggctatggtgggggcgagagaggggccggtgcaagtggctacccagagacttttctctaaggtcatcgagctggttaagaagtatggcacaaagcagtggacactgattgccaagcacctgaagggccggctggggaagcagtgccgtgaacgctggcacaaccacctcaaccctgaggtgaagaagtcttgctggaccgaggaggaggaccgcatcatctgcgaggcccacaaggtgctgggcaaccgctgggccgagatcgccaagatgttgccagggaggtaagctgtcttcttgggggttgggacaggttcccgggaggccaggcccgtgtttctgatggaggagggttcctgggtgggtattgtggtcctgtgctcttgttctgtaacacccagcctcggctccagggctcccagaggcatgcatagtcaggaggaagggtggttccccagggaaggccctgtcttctgtcagcttaaaagaacagatggtgataagggaggcctcagcaagaaatcgggaaccctggagtctagttctcatcctgttcccagctcactgtgtcttcttggttagcctcttctcttcgacttcagtttcttctaacacagaataggcttgagatgtgggatagatgggctttctttaagaagaaaatgatcaaaaatcaggtagtactataatctgctaaaaggtgttttttgtttttctttttcttaaaaggtttaataatgaaaaacatcagtctttgtcaccactctgttaaatgactctacta

SEQ ID NO: 101077 - DNA, 1840 bp, Homo sapiens
acaggcgtgagccactgttcctggtcttatatatacattttttttttttttgaggtggaattttacttttgttcccaggctggagtgcaatggcatcatcttggctaaccacaacctctacctcctgggttcaagcgattctccttcctcagactcccaagtagctgggattacaggcatgtgccaccatgcctggctaattttgtatttttagtagagacagggtttctctgtgttggtcaggctggtctcgaactcccgatctcaggtgatctgctcgcctaggccgcccagagtgctgggatcacaggtgtggtgagccaccgcactcggcaatttttttttttttttaattaaaaaaaattttgttttttacctgaacctgacagtagctggtgccattttataatttttgccatagcctgaatgattcagttgcttatttcacagagcttcgtggaaatgctctgtaaattattagggctagagacttgtgagacttcatcttggaactgaaagagaccttagagttcatctagtggaagattcatttacaggagcaggaacttggcttagggaggttagtgatgtgcctgatggcaccccacccacagagctggggttcaaaggccccctgctgccccctgcaggacagacaatgctgtgaagaatcactggaactctaccatcaaaaggaaggtggacacaggaggcttcttgagcgagtccaaagactgcaagcccccagtgtacttgctgctggagctcgaggacaaggacggcctccagagtgcccagcccacggaaggccaggtgagacagctgctcagcctttggcttggtttgatttcacattcatctgacaccatctcattgaacaccttgtccacagctattggtcagtttctgccacagagtctaaaagtgggctctgtgcttctggggccttgtgagacttctgcacataactggcacttgtctgcctgcagatgaaggatagcagagcaagctgattatataaaactgtgaattagttaaggagatcctcagcctccatctctccttgctggtggccaccttcttacctgttgctcattttaattttttaaaactgaaagcatgtttgcaataaaaaaatcagaggtggctgggtgcgttggttcacacctgtaatcccagcaagttgagaggctgaagcgggcggattgctcaagcccaggagttggaggccagttcaggcaacatggtgaaaccttgtctctatctttttaattaaaaaaaattaaaaaatgtattgagttgtaatttacgtactctaataaacagttttgagttatgacaaagcatacagccatgtaaccactgtcacagtcaaggtatacaacagtcccatcaccccagaattccctcgtgctccttttcttagccttttttcggcccttagctccttgcactgtgatctgttttctgtctctataattttgacttttctagaaattaacaattaaaatcctatagtattacatttgcaggctgttttttttgagacagagttttgctctgatgcccaggctggagttgcagggtgtgatcttggctcactgtaacctctgcctcctgggatcaagcgatctcatgcctcagcaacctgagtagctgagattacaggcatgcaccaccacgcctgactaatttttgcatttttagtagagatggggtttcaccacgttggccaggctgggtttgaattcctagcctgaagagatccgcctgccttggcctcccaaagtgttgggattacagatgtgagccaccatgtctggcactacatttgcagttt

SEQ ID NO: 101078 - DNA, 1162 bp, Homo sapiens
gtccatgatgcagtctaagaccagacattgcatttagttgtcctatccctttagtcagcctttcttagtgtcatgatgttgacattttggaagtatatggtatggctaattattctgtagaatgtttctctatttgggttcatcacagtttccttcttagattcaggttgtgtggtttagctggaaactactatatagtctatatctcagcgaaatgcaaatggtgtattcttgtgtcttacagggaagtcttctgaccaactggccctccgtccctcctaccataaaggaggaggaaaacagtgaggaggaacttgcagcagccaccacatcgaaggaacaggagcccatcggtacagatctggacgcagtgcgaacaccagagcccttggaggaattcccgaagcgtgaggaccaggaaggctccccaccagaaacgagcctgccttacaagtgggtggtggaggcagctaacctcctcatccctgctgtgggttctagcctctctgaagccctggacttgatcgagtcggtatgttggtcacaacacttcacagtgagcacagaacacccccagcaggaagtgcttctctctcaggcccacatccttttgctcattccatcgccctgctaacagttactgacttgatgctgaatgcctagccctgacccaagggctggggacaccagggttgtcagcatgcagtccctatccttggggagctcccggtgtgtgcagcaggagtttgtggtggcatctgacctctatgtatggcacagggcggggtgggaaggctgcccagaggaggtggcactgaactgagtcctaaaggttgactggcaggtgacagcacaggacagcgtggtatttgtggcatcacacatggttgggtctccctgaagaggagcccaggaaatgccaagtcttggtgctggtcttggagtggtgagtgggttctggttactcagggtggggcagccattgagcccgtgttgtggttactgtgttggctgtgtggttgtgtcctttgaggagggcttcttggtgtgacaccccggctcctggctgcatcggccaggcctgctgtgtagagcgggttttgggaggtgaaagaccagaggcctggtcactagggtggggagttcagtatgggggtccgtg

SEQ ID NO: 101079 - DNA, 2557 bp, Homo sapiens
gctcagagaggtcaagtagtgtacccaaggttgcacagcaagtatacttggtggtcttgactgccatgctatgctcctgctactatcgcttggcaggcacagctcgcttgtattgagcacccactgattgccggagccagtgcttaatgagtaattacagtacctaacattggagtgcttgccgcgtgccaggcccatcacttgctacctaatgtgtaggctcttagttggtctttaacagcctgtgaggtgggtagtggactcatcaacagtgagagcaccccacgctcagagaggttaggagacttggccaggttcacacagccggtgacctccaggaacaggagttaaaccttgctgtccggctcagagctcaggctctttccacaatgaccttcagcgcctgttgggggagttactgcgtgtgtggaaatcccatcttccctcctctgctccgtccacttcagtggtccttgtaggatgtacttctggtctaccagacactgtcggtgctgggtcctccctgaattggggtgtgggcctgaggtcggtcctgccccccagctggcctccacccttaggagtgaactaccccagggaaccagaactcggctttagtgtctgggtccactcagaagccagaacccaaagaccaaagtggaagcctctgtgtccagaagccttttggtttgtgttgtgatttattgggtaaaggagggaaaacctgtagtgactcacgggcttgttctagaagctgagtgagtaactttgggaagaccgaatccccttagctcagcttccttggtatgaaagggaaagtaatgcttccctagcagaattgtggggattggaaataacttttgtgagctgccccaaggaggcatcaatgatgagtgacatcccattcactgctctatatttcgttctataaaaatatctgcaggctgggtactgtggttcatgtctgtaatcccagcactttgggaggctgaggtgagaggatcacgtgagcccaggaatttgagaccagcctgggtaacacagtgaaacacagtctctataaaaaatattttaaaaaattagctgaagccgggtgcagtggctcacacctgtcatcccagcacttttggaggccaaggtggtcagatcacctgaggtcaggagttcgagaccagcctggccaatatgggtgtggtggcacacgcctgtagtcccagctactcaggaggctgaggcaggagaattgcttgaacccggaaggcggaggttgcagtgagccgaggttgcaccactgcactacagcctgggcgacagagcaagtctctgtctcaaaaaaaagtaaaaaataaaaaattagccgagaatggtggtacatgtctgtagtcccaactactcgggaggctgaggcgggaggatcacttgaacccaggagttcaagcctgcagtgagctgtgattgtgctactgtactccagcgtaggcaacagagtgaaaccctgtctctttaaagaaaagaagaatctatgaaaatatagatgtatagtcatagaaaactttgaggaaatgcatgaaatattaatgattggtcctgggctgtgggatcatacttgacacttaaatatttcccgtaatgaatgagtcctcttgtattaagagcatagtaattgcaattcctaacctccctccctggacaggaccctgatgcttggtgtgacctgagtaaatttgacctccctgaggaaccatctgcagaggacagtatcaacaacagcctagtgcagctgcaagcgtcacatcagcagcaagtcctgccaccccgccagccttccgccctggtgcccagtgtgaccgagtaccgcctggatggccacaccatctcagacctgagccggagcagccggggcgagctgatccccatctcccccagcactgaagtcgggggctctggcattggcacaccgccctctgtgctcaagcggcagaggaagaggcgtgtggctctgtcccctgtcactgagaatagcaccagtctgtccttcctggattcctgtaacagcctcacgcccaagagcacacctgttaagaccctgcccttctcgccctcccaggtgcgtggaccccactctggctgcttattgggtcggtacagacacctagtgttcagtgctggggcaagggtgagcaaaacgagacctggctctgccctcatgcagcttatgctctggtaggaagaccaggtaactaaaaaagactcagaaaatgtgataatcaggatgaaagagaaggcttatggtgctgcatatgtgtatctagtctgggcaagtccaggaagactgccaggaggagaaggaggatgctggtaactgggtaatgaaggagaggaagagaactgtcgtgtttgttcagtccacgtatggaacctatttcacagcagacttaccagcactggggagcaaagatgaagatgatgggttgtctccagcactggctggccctgcctggtcctgggaagacctgggatagccagtgctggggatgggcttgtaatgaattaacca

SEQ ID NO: 101080 - DNA, 1152 bp, Homo sapiens
ctcagtgcaagactcaaaacctctctaagcgttggttttcttatctgtaaaagggggatagtaatagtgcctatgtctcaggatttgtggtaactaattgaaattatttgtgtgaagtgcttagcactggcaagagaaggtgccctctaaatgataaccccaccgccaccagcacactacaactgtcacatgccttttgccttcacaggtcagttcagagctagttttatttcttctgagaaggagccactctcccacagttggcttcctgtgccttaactgcgtcgtcagcactcgagtagagatggcaaaagctaggattagggtgacggaagcccagaggtctgtgtgaacctgcttggtgggctcctggcatcgatctgtcccagtccttgttctcgggtgtctgatgggtcaagaggggacctcagtatcagagcagacgttttgggggagaggctcaaggatctctccccatgatcccctgaggtctcagggatactcatgcaggtcatcattttgtcttgttccctctctcttctttggcagtttctgaacttctggaacaaacaggacacattggagctggagagcccctcgctgacatccaccccagtgtgcagccagaaggtggtggtcaccacaccactgcaccgggacaagacacccctgcaccagaaacatgctgcgtgagtgctgcagtgcccccaaccttcgccgtcctctccctcagcaacaccagaccatgggccttgggaccactggtggaacagtggggagggggcacccttggaataacactgaagactgttttaagaaagccctctcctttctggccaccacgatttatcatttttatcgatatagttttgggctccacctttgcttttcctcatttgtattttttaatttgatagtttccttttttgtgatcctcctgcctcagcctcctgagtagctgggactccaggtgcatgccaccatgctcagctaattaaaaaaatatttatttatttatttatttatttatttatttatttatttattttgagatggagtcttgctctgttgcccaggctggagtgcaatggcgcgatcttggctcactgcaagctccgcctcccaggttcatgccattctcctgcctcagcc

SEQ ID NO: 101081 - DNA, 3989 bp, Homo sapiens
aggctctccagggagagctgggcaggatgggatcttcctgggttcccaccttgctccgtgccccctctcactgttcctgaagtgtggccacggactgccttgttttctggaaagtcccaagtctggaccatgactgagcagcattctcggctatctgccacctgtctggggctcctggcccctcttagactcccctctcccttctgtttcccccgagcccctgacttggacctgcagggtggggagagggatgggacgagaacctgtgctggggccaaaggtcgcactgggggaaggtggagccagggcagcagagtgcctggcgtcggcccctatcctgtcactagttcccccgttctggcccctggcaggtttgtaaccccagatcagaagtactccatggacaacactccccacacgccaaccccgttcaagaacgccctggagaagtacggacccctgaagcccctggtacgtggtgtggtcgctgccgtggatctctgcacagtgggatcccttcggttcatccaaccatgttcagtccacaggacccttccctctgaggtctcatttgattctttctcctgagaagatgcagagatcctgataatataaatggggaagctgaggctgctctttgtcacttcctccgactgctcctgagcacctgagtttgcaagcacgcgccggctggtgctagagacatggtggtatcccgtgacactcagcctcaggatgggggagactgatgtgaaatacaaataacttaaacactttcaggcaaagataagcactgggcctagttcagagaagtggcaaattgctactctggcctgtctctgaccaactcccagttctctacagagcacgggaaagcccctcggggacgtctttcctgcagtgtgcaggctgcccttctcccctgctcttcccagttgatgggatggttgtgttttctctatgaaaaaaggagttggcaccttgggctttctgaaacacacaggtgttttagaaatcagtggagggtgagagaaaggcatggttgtggaggcactggactgtgaacaaggtctgcagcgggtccccctgctgtctctctccactgcatggagcctcctatgaagcccaaggtggctgggggctgaggctcccttgggcctgccatggaactgattctgagtcaagcagactttccacggaccatgctacatgagccgaggtgaggcactagttagtgctcctttcctgttgcagtggagatttggctcctctgtactaaaatatctgcatgctctccaaacaggtgtgagggcaaatcacatgaccttggcagctgtaattaaagtttgtgggggcttttcggatgacttatgaggagtggctgtgattcgcacctttcactcttagtagcactcgccctcccctgttctctgttgcctgaagctggagaggtccttggaaccccgaggcctgagaaagggaaatgggtttgagagcccccattagtgtggaacaaagggttgagtgagcctgggctttgagctgtcggggtcctaattcagcagctgtgtgactgtgtgccaggctgttgatctctgagcttctgtttctacctgcttaaaatgacggttactgcacagggctgtgtgagggttacagtgcgtctctgggctgctcccagccatggcaggcccctgggaatcaaggtcatcagctgcttgtccaaggcagcagttagtggttgtgaatggtgcgtgtgagatctgcatcctggcgtcaggcctccttcctgccttacccaggacagcccagttgcagctgggttggtcccacagtcccacacacacacagcccgagtgtggtgcctcacgtgggctgccccgtgcctacccacagccacagaccccgcacctggaggaggacttgaaggaggtgctgcgttctgaggctggcatcgaactcatcatcgaggacgacatcaggcccgagaagcagaagaggaagcctggggtgagtagggtaggggtgggagagcctgggcagggggaattggagccgtggcatgggggaggcgtctggggacaggttgtagaaagtgaggcgctggggagaatgggggcgtagcatatcccctttgccccctttcgcacggtggttgttgaggaaactgacaagataaggacagtgtctctgggaccctcctctgctctgctttgaaggattcacttacttatccagcattgtgttcggaccctgctcaagttgggctgggctggatgtggtggatggagcagcaattacgacccagactggatctccccttagtgttcagggggcagagacagatgctagacagacacaccatgactgaattcacagggtaccaagggccgcagaaagggaggttccaaaggaatcttttgggtggaggcgaggcggtcgggatgagccagccaggccaggcagtgcctggctgagtgtcaagctgcatgagctgggggtgggggagtgggttcaggtgaggtggagtctgcaggggctcctgggcaggggggcagggaagggactgtcccaagcctccgttctatgccagcctccctcccactgcgtcgttagctttcatgacagtgcgcgatcccttcgagtctcctagtgctcctttttcccagactgctctcctcaagggagagctgggaacggtgggatgtacagggtgttaggtaaggaggggaggtgggcggtcagcctgggcgggacttgcccgagctggcaccccatgtgcacgtggagagaacttggcctctggcctccagggtcctccctggcctctccttggtggggatggttgtgagccatggcagcccctgctgagtgcactgttgggtagagtggggatgtgactctcagagccgctccctggtatcggagcaggccctggacctgcttctgtgaggtgcacggttaggaatggggcgttccttgattgtattaggcattgtagaggggcttgtcctgaggggtttgtgttcccatattactggcctgtgggtgctattttaggtgttactggggtgattctctgctgggcctgtttgaggggctgtgtctggtccattcggggtgagaacaggtcacttcgtggtggaggttcatgctgtgttcctgctcactgtcgcagcacctggcaggatagggtctaccttgggtacagagtctaatggggccatggggcctaactttcccagccaccccattcttctgacagcagattcccactagctgggccttgctccaagtctgcactgcagcagggcctggttttgtgaccatccatggccatgaccatccaggtgctgaccatggggaatccagacactcaccctaacccccttctatctgccaacccctagctgcggcggagccccatcaagaaagtccggaagtctctggctcttgacattgtggatgaggatgtgaagctgatgatgtccacactgcccaagtctctatccttggtaaggcttctgctccttggaactgttgagttttggagaggaccctcaaggtggagttagtgtagtgactctccaactgggcttctggaaccctgggctctgcagggaggggctatcagggagggtgggtccgggcacccactcatggcttcagtcagcagctctgcttgtctctcacagaaggttttgtttggcagagttgcgcggctaggacatgttttaaaaacatgcatctgggtctcctgcgctctcccagagagggtcagtgatgtgtctttttttttctttttttttttttgaattggaatttcgctcttgttgcccaggctggagtgcaatggtgccatctcggctcactgcaacctccgtctcccgagttcaagttgttctcctgcctcagcctcccaagtagctgggattacaggcatgcatcaccacgcccggctaattttgtatctttagtagagacggggt

SEQ ID NO: 101082 - DNA, 3072 bp, Homo sapiens
ttcttccctctcacagcttctcgcaaaatggtgactccttgacttggttttggtttcagccgacaactgccccttcaaactcttccagcctcaccctgtcaggtatcaaagaagacaacagcttgctcaaccagggcttcttgcaggccaagcccgagaaggcagcagtggcccagaagccccgaagccacttcacgacacctgcccctgtgagtgctgtggccatctctgggggtcctgcagtgcccgccttcttagctcagggctgagtgctggccatccctgggggtcctgcagtgcccgccttcttagctcagggcctttgcataggctgttcctctgcctgggtgcttttcctgctacttcccgtggctgcatttgcttaacttactcttctgatttcagtctcaatgctgcttccttaggggtaagccttctctgaccctacattctgtagagatacccccattctgccattctctcttttgtggcctgggtttcacttgtaactaagtcattatccctgtatttggtttgcttagtacatgtctgtcctcaagcaggggctggcttcaggctgctgacccgtctcactgctccttctcacccgcctcctggctgtggcttctcctcgaggctggtgctgcacggggcgggcagtgcatggccatgtctccttgtccagcgtcctacttacagttgaggaagcccacagccaggaagtgacttgtccagggtcacagggaatgtggagagagaataagaaggctctggcttctaggggagggaggcttataactctacccttccctggccaggatcaccagggtctgttgggaacacatagtccctgcctggatggtaaccctcttgcctcctcccagatgtccagtgcctggaagacggtggcctgcggggggaccagggaccagcttttcatgcaggagaaagcccggcagctcctgggccgcctgaagcccagccacacatctcggaccctcatcttgtcctgaggtgttgagggtgtcacgagcccattctcatgtttacaggggttgtgggggcagagggggtctgtgaatctgagagtcattcaggtgacctcctgcagggagccttctgccaccagcccctccccagactctcaggtggaggcaacagggccatgtgctgccctgttgccgagcccagctgtgggcggctcctggtgctaacaacaaagttccacttccaggtctgcctggttccctccccaaggccacagggagctccgtcagcttctcccaagcccacgtcaggcctggcctcatctcagaccctgcttaggatgggggatgtggccaggggtgctcctgtgctcaccctctcttggtgcatttttttggaagaataaaattgcctctctctttgtgctggtctggactctgcctctctactgggccctgctcatggttccctggtgacctaggggcctcttctgggatatagggacctgaatgctcatcctcagaggccagccttatcggcacagcccaggcctgagcccttgaccctgtttccacagaggggcacaatgagatgagagcaatttctctcgtctctgcacccagtgggcatctctgcaaagctctgagtattaatagccatggggttgggcgggggtgggcagagactgggggcggaggaggacgatgggttggtgcagtagggccttgcctggcccttgccttgggtggctcacctgcccattaacaagcccctgcctcaagctgagcgtggcccccaggtcagaccagtaagcaaggaagaggggtgaaggcagctgggcagaaccctctagccccattggccaaggctgagcaggaggccaggatgggccagagcctctgcccttgtggccctaaatccctagggttgtggctacagagcacagtgcttggcaggtggttgggaagagtcactggggattgaagaggggaagatgccaagtctgagaatgtctaaatgaggaattgatgttttcagcagcaggcttcatgggacaggcacatgaacatccctgtgggcagaggttgagcagacttggggcaggtcctcacctggggcaagagatgcggccaactctagagggatggggactgagttaattagggtgccagagttcagatgtgtctggcctcagacacacccctttctccctgctgagctcccgcctacagtccccctactcctgtccattcacatgcaggcatgccgtgcttggtcctggcagtgtcccagttcttgatctaaagccgaggaggggcgggggctctgtgcttcccaccctgcaccccgcaccccgcagcccatgtggctgggctgcatgcacctgcaggttccatggatgaaccacacctaactcacgccctgagcttttgtgatttgtcagcatggagcctatcccctccccaacttcttccccaaggtctgtcactggccgctccctacagtccttggtcacccaaggtggatgacctgtgccccacggtgaggatggaggctgcattaccttgtctcctatagctcacaccaagactcggtggaacaactttgtcaaactcaaatgcagtgcgctgcaggctaatgatgaaaattcctgggccctctgagtcaggtacctggggtggagcctgcaaaaagggatttttaacaaaccaccagtgggttattcacatgcagggcgttgactggctacactctgagctgacgcctgtgaggctccaggggcttgtaccccatgccctctcttgcctgaggtcttgctcattcccagggactgccctcaggccctttcctgtcctggagggaggaggctgtaaagaacagagtggctgcaggtaacagcaagcttaacataccatcctcactgagctctgtgtgctgtgggcttgttctttggttcatgcattaaataaatactaggccgggtatggtggctcacgcctgtaatcccaacactttgggaggccgaggaggccaaattgcttgagtctaggagtttgagataagcttgggcagcatcatgaaacc

SEQ ID NO: 101083 - DNA, 1358 bp, Homo sapiens
actcaagcgatcctctcgcctcagctcccagagtaacaggctacagctgtgattcaacacacctggctcatttctaactcttttgctgctgcaaataatgctgcagtgaataagctagtacttagctcattttccacatgtgtgattatatttacagaatgaagcctggaagtggaattgctcaatcaaagcctgtatgcattgataatgtttatagctattgtcaaattgccctctgtggaggttgtaccaactgacattctcaccaatgttatgaaagtgcccattttgccctacctttgccagcagagtattttaagccttttgatatttatcaatctgccaggttaaaaaaagaggtagcccagggtagtttactttgcatgtcttttattctgatgcattgcacgttcttccatgcattgatgaggcgtgtgctccttcctcagctggcagtttactgtcctggtctgaggatcttctggggactggtctctcttgctgactctttcgtgtcattttcacaaacaaccttttgaggaaaaaaagtcttaaggacaaacacatgctggcaattagcgccatcgacattccagatatcggggctgggaaggcagggtgagacctgctgggtgtcatcgttctgctctgaactaggaggactgactttcagagggttctcggtgtcctcttcttccacagcgctcctgttgacacaaacagcctcatgttcctccagatttttgatggggaccacgtggcaggcgttgtatttgcaggtggccatctttttggctttcttggggttctttctcctgcacgatgccaggtggtactggaatctgctgagtgggattcggtggtgaggatcataagggcaaatttcaaaggcttctggctccatgagaaattcttgaagcagggtatctcactgctagagtctaacggaaatgcttcttgtggagaagcccttttgtaagaaggatggagttgtcctctgcccagttttggcccttgggattctgtaggtgacggtcttaacttgtggtctgttctctaggactgtgagtggtggattagaagagagatgaggagctgccaaaagcagctacacagagaacagagttagcaaatggcacccgagacagaactatagcagatgcaagagccaaaaacccacagccgcttgactcacggatatactatgatgtcaagctgcagtcaccggtggtcacaatgggcagcctaagtcatcaggaagaggctattgtgcactgcttgggaggggtggatggctttgggaatgctgccatctaaaattgctcatggatgtatgttgtgacttaagtcttttaact

SEQ ID NO: 101084 - DNA, 1004 bp, Homo sapiens
gccaaaggagcttgctgcccaatgcactagaagccaatactatgacactgggtttttgagaaacaaaaagctttttaagtcgactaacaaggagacaggagtccggctcaaatctgtctccctgtgctggctttcagtcatttcattaaaaaaggttgagggggtagattctgggattagcggatgattggtggaaggaaaggggaggtctggaaagtcctcgggcacgcgcagttctctctctatgctaccacatgtgcaaatttgcggggagtgttcatgtggaacaggcagtgtttcctgtttccagaccaggcaaggtggctcacaaatggctctacgatccagagaaagtcagcagggagggttgtgatttgttattatgaaaaattaacaaattacatccaaaatgtgtttaactcctattccctttgaaaaggatctttgggtacctaattgacatattttaagagacatattggctagttagacatcaattgacatcctcattaaatatcaattaacacatatcctaacgtaatatttaattagcttgctgtagctattcttttaaaagtcaattaaatgcttggcatattcttacaagccgactccattgatagcaattatggatgaattcctgtcataagtcatttttagtggatagcagggcaaactgattctgaatatacacatcaggtctttcaagaagaatttaaaaatcaatcattagatatctaatgaaccctcttctctgctgattgtgaataaaaggcatgttcggctcttggactgtagtttagtgcattttcacatgattgttggaactctaggtcaaacagaacagacacctgcctccagggagagtcgtgcttcatttgaaaagaaaattgtggtaaaataaacataacataaaatgtagcatcttaaccttttaaaaatgtatagttcagtagagttaagtacatttgcattgtacaaccagtctccagaaccgttttaat

SEQ ID NO: 101085 - DNA, 1140 bp, Homo sapiens
tagaacagggtatggcatgtgttagtgcttttattactactactactactattattgttacatgctgaaaagttgagactttatgtttaattatgacgattgggtcaaaaacccaagcttctgcgctctggatccagttttctttcttctgctcaaagcttatgacttcagctaattttagtccaattgactctgaacacgggagttacgtgattttgccaggctggaggactgagcagtaagtacctggtatcacattctctgggcctgtgatacatgttccttgcagagataagcttgaaggaacttaacttccatatttatttatttatttgcataatagaatatcttttctgttgatcagtttgtctatctttatgccaatgtcatgctgccttggttactgtagctttatattgtcataaaatcagagtaaattcttcaactttgctcttcctgttcaaaattggattattctggatcatttccattttaaaaccagcttcttcagcctgggcaacagagtgagaccctgtctcaaaaacaaaaacaaaacaaaacaaacaaagaaaagaaaaccagcctcttgatttctgaaaaaggcctgctgggattttgatgaagactgtattaaatctatagatcagtttgagagaatggacatcttattagcagtgaggcttccaacccgtgaacatggtatatatccctatttgtttaggttttctttaatttcacgcagcaatgttttagagaattcaatgtcttacacatcttttgttaattttatccctagatattttattttctgtgctattgtaaacggcatttaacattttattttttcaattgttcactgctagtttatagaaatacaactatttttgtatattgactttgaattcttttaccttgctcagttaatttcttagttctagtggatctttttgtttttgtttttcaggtgaaaaggaatctcttttaacttaaaatagtttgactgttattgaaaatcaagtgtagaggccctgagagaatctgatattactaaaggaagacatgtgatatttaagcaactgagacttagagtaggcagatctgggttcaaatcccagctgtgccggttcttaaccatatgaa

SEQ ID NO: 101086 - DNA, 1016 bp, Homo sapiens
agttcttacatacacttcaaggcgagcagatcaaagaaaaatcccccttatttagaaatgttcctgggggatgaagaaaccataattacttgagactggcagcagtgggtatatggtaaaagcctttgtaaaacagtgcatttttcagatttgtttaaggtttgctagccaaggaaagtaaaatgtgattttgtaactgcactaaacatttgtcatgctgtagttgccagcccagaatattagaagttacaagactgatttaaaccgtctctgatttaatgcaagatatattgtgtctataaaggtttctcttgttattgttaagccagagatctaaggtttagattcaatttgaataaactagctggcctgccctctattgtttgagagagttattaaccatcactaaataagcccctgctggtgctattcatcctaagacatgttacatgcagtttcaagtaagcagcttggaatgggctgcttcagttggagggagggggtgtaatatttgaaacgagtgtgtgtcttcaccatctccagcattttaaatatatggcggttttttttttttttttttgttatcagttgtaatacaggtctcatacctcagtttcagatgttatagatggttacctctttgagctgccctgtcaccccagcaaccctaaaagagaattttgtacattctgtatcccacagatttggtcagccatttcaaaattccctccagtttggtaaaaaaaaaatctgtcttcggtttcagctggatgatgaatccttgtttttcaggtggctccaaaaagaatgttgcatgtgttcagaccatcctgagcagagccaccaaatttagtgacagtgtctagccatgttagcaataatgttaacagaagcttttgtttaaattacaaaatacatttatactatttactaaaactgcgctggctgtggttgattcatgataatgggatgtgggcttcaacaaataggtgatttgtacttgggggagaggggaa

SEQ ID NO: 101087 - DNA, 1345 bp, Homo sapiens
tctcaatctcctgacctcgtgatccacctgcctcggcctcccaaagtgctgggattacaggcgtgagccaccgcgcctggctatttaaatattttataaatagttatcttacatagtgtgtccagtaattcccagtatctgaaaacctcaggggttgtaaatattgttagttttttggttttgattgattggctgttaccaatgatagaaatgaatcagaaatctatttaatagtaatggcataatggtcatttgtaacgttagcctcacagtggttctgaagctgctatattcaggtttagggcacaatatttaggcttcacaggatcggtttcagttgtatgtttgaggtgcttccctcagacccactggtcaaaggctcccaagcttagagttggaacagggcaggtgttctgtcccaaatgtttggcccaggtgattcagttaaaaaataccattatctcacctcgttctatagcttgctaataagatgatgttgaagttgttgagacacaaagacttaggcagcatgaaaatggaggaaggtgcatctcttgcaggaaatttatgagcttagactcataaagctgagggaaggtaaatttcctactgtcataaagaatctgtttaggacagctccatatcccaacatcttcttgtatattttttttcctctttaggtctacaaggaagtcttcacgaggagcagtgagaactcagcgtcgtcgacgttctaagtctcctgtccttcatcctccaaagtttatacattgcagtacaatagcgtcttcttccagcagtcaactcaagcacaaaagccagactgactcacctgatggcagcagtgggctgggaatttcatcccctaaagagttcagtgcaggagaaagctctacttctctcgatgctaatcacacaggggcagtcgttgagcctttgagaacttctgttccaaggctcccatcagagagtaagaaggaagactcctctgacgctacccaagtcccccaagcaagtctcaaagccagtgatctctctgactttcaatcagtttccaagctaaaccagggcaagccatgcacatgcataggcaaggaatgccagtgtaagagatggcatgatatggaagtgtattccttttcaggcctgcagagtgtccctcccttggctccagaacgaagatccacacttgaggactactctcagtcgctgcacgccagaactctgtctggctctccccgatcctgttctgagcaagctcgagtcttcgtggatgatgtgaccattgaggacctgtcaggctacatggagtattacttgtatattcccaagaaaatgtcccaca

SEQ ID NO: 101088 - DNA, 1050 bp, Homo sapiens
ttacttgctaaaagtcacattggtaggacgttgcagagccaggatttgaacctagatagcctgtctccagaacctctgctcttttttttttttttttttttttttgagacggattctggccctgtcgcccaggctggagtgcagtggcgcaatctcagctcactgcaagctccgcctcccgggttcacgccattctcctgcctcagcctcccgagtagctgggactacaggcggccacaaccacacctggctgattttttgtatttttagtagagacggggtttcactgtgttagccaggatggtcttgatctcctgacctggtgatccacccacctcggcctcccaaagtgctgggattacaggcgagagccactgcgtctggcccagaacctctgctcttaaccatcctttatgtggtaccttgaaggcgataggaagaaatgcatgcagtacctagcacaaagtgaaaactagatgttagttgttgttacagccacctgcctattgctagtactatttttgggctatcaaatgagaagatttatgctgatagatttgcacagtagatgttataggtgctcatatttgcttccatgttacttcaaaaacatatctttcctcctgatggttttctaatatggtcaacttgccagttcatatcagtactttgataaattgtcttgggaaacagaagcaaagcagagaagcagagagttccagattgtggctgcagtgtatcctttgtgatttcttatataggaataatttttttatatcaggaaaatactaggaatgtgtacccacaattatacatacaaatctcttagtgtgtaattttgtataagtaactcttgatacacggacttctttcctgatgttttaagaagttgaaatgtaaaataaagccaggccgggcatgatggctcatgcttgtaattccagcactttgggaggccaaggtgagcacatcacttgagctcaggagtttgagaccagcctcggcaacatggtgaaacccgtctgcaaaaaaacaaagaattagctaggc

SEQ ID NO: 101089 - DNA, 2455 bp, Homo sapiens
tcttaggtcttctcaggggcctggaagtgtagacctaggcttgggattcaaggaggtcttggttaaaacggcaagatgtaaataagattgtgacgcatccattttgttgaaagaaaaaaccaggaatttggccttttgatggaggaacttagaagaactttgtaatttttgtaaggttgtggaaaatccgaggcaaagttaaattgcctggtgtgatttgactttaacttcgaataggctttttaaagtttcatctctttggagattgttcaacttcacgagttcactgcagtgaaaacgccaagactgtctcccacaaatttaatattaatgaagaaaggcaagccaattatatctgttgtccggagttagttgtacagccctttctttgaatggggatctggggatgcagaggagcataatgagccttttataattacaaacatgctcttctctagctcttaaggttatgcctaacgctcatttgctcttggctaaaataactgagaaaaaaagtgagtagtaaaaaaatgctggaagtctgaaaatggtttagacagaacttcattcctgaagttttagtctgtagccagattttaattctggcctgttttggtttttagatgatagatcttttagtgtgtcaacaggaatgtaaagtttgtattaacatctagggtgatcacctgccatgctattaagtcagcatggtataattaaaagttacatatgtaggttcagagcctcttagcacagtgttacattgtaagctcttggagggcaggaatgagattctagtccttacggaaatggagtttgggcttctatccctagcattcattctagtgccatgcacgtggtaggaattctgtaaatatttgtgaaagaaatgaatttctgcctgtagggttcagcagtgtatacttaaatgtgatgtgtacgtaaatgctgactgatttccagagagggctaaagaggacttggggggcggtctgcgggttggggagattggctcagatgatttatgaactcggtaagagctgaacattgactaacggatcataaggtaattgaggaacattgtaagtcaaacttcaatttagttctaccagcaggaaggatttgtttacaacctgcaatagtactcttttagatgatgtgaagctttgaaaatattgaaataagtgattgctcacctctccccccaggtatataggaattgattgtgtatttgggggatcctaccctaaactgagaattagagactagtgaagcatgggattgtgtggataatgtttcttcatgtttatgtacttaaataaaccagcaaaatatacgtcgagaatgtatctaaattatttttttgtcctaagaagttgaggtgcaggctggctgaatttttttttttttttttagtagctgaattcttttgagactgttttcagtgttccccagagagctctgcctaaaataccttaacttccgcaaataagtaaagtgaaaagtcctgattccttgcctctttattttgcgctggtactacaataatataatggttactttatatcaaacattatgacaccttgacctttggaatattagaggtctcacaataacttcggagccaccttgagaaacgagcagatatgaatcagagaggacccaagggccgttggagaggcactgctccctctgagaatgcccaagaggggtgggggcgggggggggcgggtaaaggcttagaaataaagaggtgaagtgaaccttttgcttcaaatattctctatttctattttttttgtggtacttttcttctgattctctctgatatgttcatagatgctggtttgcttaatttgtattcaaaatttggtactaataaccctgagtgaaaaaataatttggagactagattcaagggtttattaacagacttctctgttgtgtttcttgttgctttggttggttcttcatctacctttctctgtttaaatataaaaatcaggtggaaaatatggaggactttgattaatcaaactagttaagagatcatttagtggtgcgtctacacaatagtcatttctgttttttttctttactttcaacctttctttaggctaaagagaagtttgtttgttttcttttctttttccactcatgtgcacaatgaagtttttagggggttgcaagtgtatagttcatttattttctttcttgtttaacaattaattacactattccaggctatgaagaaaaacacaaatggaagtatcaaccttactggtagagtgcatttctaattctgctttcacagtggtaacgtcttgttctctaaaacgtgtcttcctgtgaacatagctgtctgggtcaggactgctctagagaaatgctatcatgtgtcatgaaagttatacttaactagggttaggccagacaaatactcagtgtcatttta

SEQ ID NO: 101090 - DNA, 1065 bp, Homo sapiens
cagaaactctggccaagcgctcagccggggattgtctgccataaagacccccgcaccctgtcctcgcccccgccccgtggaattcctctgcataggtgactccacgtagaggaccgagcgcaaggagatcccggggcggtggaggcagaggactactgtgaagaatgacgcctactcactcacctaacagagaggaggaagcaggcacgccccaaaagcgggtcgggagcaaatccacgccactgggaggaggcaaaccgaagaataacaggaaattacgtaaggcgcacgtgcttctgaggggggcgggtgcggggcgttggagaggcgcggccgccgccctgcgtctgcgcagtcgtcggctgccgcgctgccgagtcactggggtgggaggagcataagcagggggaggggtgcatgccggagtgcgcaggcgcaacgcgactcccgaggcgcgggccgcccccttggctggtttggatccgggtcagtcgggtgccgagatttgggagagacgctctgaactgactgccccgcatcaccggagcgtcccagctgcgaggaggtaagtgccctgacgtgacggggaggggccgcagcactgcgtctcagcttccactgccggtctggccgcgggcggttttccccgggcccgcccgccttgggtcgcgtcgtctcccgacgcctcctgcctgggccgggcctgggcctctccgcgcccccttatctgccgcggcctgtgcctgctggagctccgagctccacgctctctccccttcccgccttcccgtcctcccgcggtcccccgccccgtctcgctcctccgccgtctcccgcccagcggcagcttccccttttcgccctccttggccgccctttgccccttccagtcctttctctctcgcctcggagccccattctctttggctacctcttcggccccactcctttcttctcccgcatcccttgtgcctcgctccgactccagcctctcgttctgaccccaggaatctcccgaggagcgcaacttcacagctggagaccccgggcgggcagtgcccctgg

SEQ ID NO: 101091 - DNA, 1072 bp, Homo sapiens
caggaggctgaggcaggagaattgcttggacctaggaggtggaggttgcagtgagctgagatcgcaccactgcactccagcctgggtgacagagcagactccacctcaaaaaagaaaaaacaaaacaaaacagtatttcccactggtcagttttgcataggcatctatttcaggcagggtttttttcttttttttgagatggagttttgctcttgttgcccaggctggggtgcaatggcccgatctcggctcaccgcaacctccacctcccaggttcaagcgattctcctgcctcagcctcccgagtagctgggattacaggcatgcgtcaccacaccaggctaattttgtatttttagtagagatggggtttctccatgttggtcaggctggtctcaaactcctgaccgcaggtgatccacctgcctcggcctcccaaagtgctgggattacaggcatgagccaccgcgcccggctcaggcagggttctttataaaaacagcctgatgcctgaaggacactctctggttgtaatatttgtttcatccatgaagtgtttaaatattgcaactgacttgcgattagccaccaaaacaggcccttttagatgcagtgcctctccgaccaagtattggatgattcatacgtaatggactatgatcattttctgtccatgttttctattactatatgctggtttttttggagcaataagattactttttttctgttctattttgagcgaatcctttacagtttttgataagaactgtgacatttgttctttgttgataaaactcctgaaaataactcacaaggccagtgctgcactctggcacatgtaggttgttttgagggtttgttggttggttggttggctggttgattggttggttggtttagaacactaatgtacttgttatgaaccaaactctggtcttacagtcttaaattccacctcatggggctgttttctctgttagcaatgaaacctgggccaggtgtagtggctcacacctataatcctggcactttgggaggctgaggtgggaggattactggatcccaggag

SEQ ID NO: 101092 - DNA, 1131 bp, Homo sapiens
cgagccggcccgctgtcgcctcgcccagagaagccggtgctagctgccgtggtggacgagtcattggaggggaggtcctcctcctagccgtgacagcagcatctgcacgcgtgtcacgcctgggaggccccggggtagctggtgtcactagcagttagtgtttgcagacccactttgggcagcatgagcttgactgggcaggtggtgacaagcggggtcgtgtgtgtctctgtatatgtaggggtgtggaatggggtggggatgaaccagcccctgtcaccactcccccgcctccccttggagttaggagctgacccctgccctgtttgggagatgccatctcacctctgtcctgcctgcctgtggcagaccccgcgcagaccccaccctgcgtcagatcagatccctccagcgcgtgacagaatccctttacgacctgtggaagagcctcgccccagcctgtgacaggcagagcccccgcctgtgagatactcacagagggctggaaccccctagtctgtgccctttcccctggatctccttggatcatctcagccactcagaatgcatggcagtggcccagaaaagcaatcccagctgggcgctttgagacatctccttaactccacccatccactcctttgcttgcttacttgcttttttcaaaactcccggttagtaagtttattgcacaaaaactctgttgcggtcataaagggaaactctgaaagataaaactgctcccttgatgtgagcctaagtgttttccagaataagtgtctctggcgtgtcctgaaagtcagcccaactttggttatctgcttaaaaccctggttcctttcacaggcagcttcctcaaatgcctgacgggtcttggctctggcaagatcttccttatcagtcccagtgaagattttagtgacaggcctgggggtggtgcctgagaatccattggaacctagaaaaaagtccttctgtccttggtccaccttccttcctcacccaccctgagaggctgggctaagaatagatcatgagagtggtagtggccccaagtctctgtcctgggtttaggtcagccacctttcgtgaacgctggggaggcggacaaggcagctgctgcttcctctg

SEQ ID NO: 101093 - DNA, 1352 bp, Homo sapiens
aagcatttccaaaacagggcctggaatagtgagggaaacggaaggggtggagatcccaaatcccctccgtcagtaccagccacccaccgttgtattaaaaacgcccagcatggactgagttcttaccaggtgccaggtcccgtgctaagcatgtcatatgtattcacttaactaaccttacagagatgcaatggagtagaggctcttccatttaacaaaggagtaaacagactcagagaagccacatcacttgtaaatggtcccacggagatggaatttgcaggtctgtgattgtggaattctggagtgttagctccgcaaattcactacttcactcagccctcaccacaaacccccacccagtaaggtgctgccacccgcagtaaggatatgaaaaaactgaggctgggggtggtggacatgacttgtaagatgtttctagaaagctctgctgtgacaaccagtaactgttttttaaaagcccagtccaactctctgggctcggacctagttcgcggtgacatggccaaacctaccaagaaagtcgggatcgtcggtaaatacgggacccgctatggggcctccctctggaaaatggtgaagaaagttgaaatcagccagcaggccaagtacacttgctctttctgtggcaaaaccaagatgaagagatgagctgcggggatctggcactgtggttcccgcgtgaagacagtggctggcggtgcctggacatacaataccacctccgctatcacggtaaagtccgccatcagaagcctgaaggagttgaaagaccagtagacgctcctctactctttgagacatcactggcctgtaataaatgggttaatttacgtaacaacaacaacaacaaaaaagagcccagtccaaacccacagctgctaaaatttggccatggctacccaaaacccccacatttactattacccctatacccaccacattctcctaggatgggaagaggaagcaaagagttctttggtgaccatctccctggaagggtggaatggggtcatgggggctcttccatgagaggggccactatatgtagagaataatgtgtggccattatgagggggcccagtggtctcatgtgggcatggacatctagaggctgagagaaacgggctgcctggctgaactggtgaaggagccagtgtgggcgtgctaaggtaagccacattcccaggactttcggagtacaggctgctggctggagtgtttcccatgggccagtgttggcagagagcacctacaaggggtcctcttgggtcctgtcccctagagcctcctggaggggcagaggtgtggcagcagcaagaagcttgagt

SEQ ID NO: 101094 - DNA, 1053 bp, Homo sapiens
tttagcctccaaagagagtttggggaatgagtaaaggcggaggaaagtgcatggaggtgtccactccccatcaaacttcccttcaagagggcgtttatatgaatgagcgaaagagggctattagtgtgttctcattccctggcttacttggggagaacattgcatcttactttccatttttctctcagctctggtctgatggaaaatgttgaggctaggaatggagtagaacattccaaagtttaataacgcttttggtgtcatggaagagaacaggcctaagaatcagaaatcttgagttctggcagcccctggtcattgtgttgaaatgctccccaaagagcatttttttttaaattttttgtagagacaaggtctcactatgttgcccaggctggtctcaaactcctggcctcaagcaatccttctccctcaccctcccaaagtgcggggattacaggtatgagctgctgcgcctggcaggggagtatttctaaatgctcttttagtggcagggagcccccattcgtaaaccaccatgacaaagaaatgtaaggtatcctaatcactgccatgaaatgctaagatcaaaaaacaaatccaaagtgaatcctgtcagtggcttcacaaaatagaggaaaggaaggaaaggttggaggaggcacagaggaggcacctttccaggtgtctgcccagtccgcacccttgcactgatacctgtacctcaacctattcacaaagagggctcagagagggccctggcagtcatgcttgtatcctatggccaggggcagattcttaggccccaccagatgctccccactagaaattgggaatctgcattgaggaacttaatttggtggtcaggcaaacctgagagctgagagggtgccagatttaactacgtgcacaggagcgggacagccatacacagaaaaagtgtgaagaagatatgcaaaaggcagaaatgtgtggctgaaggatacacagaccgtcaggcagagacagggagaacggctgtcttggctcctggtggcattctggttcttggtt

SEQ ID NO: 101095 - DNA, 1060 bp, Homo sapiens
actggaaaaacctaagaaataggcctctccaggtcccttctggtctttgagataattctctaggagagctgtggccatgcctgcattaaaacaaatgcgactggccaggaatgcagtgtagaattgaaacatcagggctgagtgattcattcctctttacccagtttttgttttgttttgtttatctgtcttccctcttggggaagcctccacccagttctcccatccaggccagtgggttctgaaccccctccttccctccttcagccatcccacttgccctgcttgggccttttcagcagtgtgtgtcacatcatcatcagatggaaccagaagcagccaggagtgctttttggcacttccagctcagccagtaccgtagaggatccagggttactatccatggtgaaaagaactttctctagaattggtattaatgaggttaagtaacttaatttccaccaacaacttatccagacatttaaaaaggcaatagagataaacagcttagtaacaacagattggccttcaaatttcagagtattgttttctccctaactgagctgtctgcttgactggttagtctaataaatgcacggagaaggtgcacacacaacacagtacttttcactatttaacaccatgatcatgtggaatacattagaaaggaaataggtcaaaaaccatcatgtgaaccgtctaatttgatgtttgggctaaggctaaaatcttcacagggaggttctaaagtgctgaaatgcagaacattcaggctgactggttcacccacaccagagagagaaactcaagtggggctgggagggcaggggggcccagaagtgacccaggaataacctgcccttgtgttcatttccagagaccaaaaaaaaaaaaattttttttttttttttttttttttgaggcagagtcttgctctgtcgcccaggctggagtgcagtggtgcgatcttggctcactgccacttctgcctcctgggttcacgtgattcttctgcctcagcctcccgagtagctgggactacaggagcccgccaccacgc

SEQ ID NO: 101096 - DNA, 1725 bp, Homo sapiens
ggactacaggcacccaccaccacgcctggctaattttttttgtatttttagtagagacagggtttcaccatgttagccaggatggtctcgatctcctgacctcgtgatccacctgccgcggcctcccaaagttctaggattactggcatgagccaccgtgcctggccagcaattagaattttaacactggcagttatgaataatatgaaggagaggtagatttctgagtgattctggtttaaccagctgggtggatggtggttccacgtattcaggtggcaaacaggaaaaacatgtgttcgaagaagaatggaggtaggtggtctcttaagaatggttaagaggcttgggagtcagactgcttgggtttgcatcccagctttgccgttttctggctatcaaacttgtcagctattatttgttgagtacgtactatttgatttatgaccacaggcagctgagcctcagtgttggtgcctagtgtacaagattgttaaagaataaagttattttgcaaagtgtaacccatttttagcactgacatagcactgacagtagctgctgatctcattatgggctaaaataagacaatattcaaaggtcagagatatctagccagaatctgatggaggctggatttcagattttgttacagaattagacagaggaacacagaggggacaggctcagttagggtggaggtgtggggtagggaagcaggacttgatataaattattggaatcattgtcttttaaaccagtggtttatgtcagggtatagcgtttcaagggatttgagggtcagatggggaaatgtagccccttattttgccagtgtgaagcagataccctgcttttctttacagtagcggagtcagcttaagagctttaaaggtcctaaacttcaaaaacattacagtgccccatcctccgccttaatgtaattcaaaatacaaacaatactaaactgtaaaataaatgtaacaaagtccaataaagtttttatttttttctcatgatgataactgatattaatttgaagtaacaaatgctctttaaaagtcgggaggcagtgtccctgctttgcttggtcctaccttaagaagtagtgaagtctgcctcttagtaggaaaaccagtagtctaatcaagactcaagtgaattatacatgtgaatgctgaattatatacaagcatgagtaagacagcattctgaataaggccaggatcatcatttaaagcaggggagtattttgagtcatcagatctcagggtggcctttcattccagatgagtacctttatgtttcatcactatgaaagggcttgcctagccttggggaatgcgggttggggccctggctttcagatcagggacatgctctaggaactcatcaaaggcaatagcagtggctgccacttttacctcgttaaagccgggagaaagcttctaggtccatgctggactcctttattttctaggttggtcttgcgggttatctggttgggaagtaaaactttctcttggtaatcaaagaaactgcctgccaaagagtagccatggacctggttctcagtatagaggttttgttctttttctttttggctagccaagtgaggaatggagaaggaacaaagaaatctgtaactggttcttttttctttttttagacagagttttgctctgttgcccaggctggagtgcagtggtgccatcttggctcact

SEQ ID NO: 101097 - DNA, 2733 bp, Homo sapiens
tgatatgtgcagtggcagaaggaagcctaggaagctgtgggaagtcggaggagtgtcttgtaacctagccagtgaggggtgatgtcagggaaggccttccagaggacatgacagcaagtcagagaagtgaaggatgagtaagttagttggaaggaggttggcacgtggtaccttccaatcatagaagcggcacttgtgaagtcacggaaacagacacagagagcatagtgtgttttatgaaactcctaagcaattaagccatcacatcaagtagtaactgatgacagtgacgtcagtcttatgatgacaggcagcagttcagaactttaagcaggatcttcagaaagctttcagtctccaaagtaggaacagctcagcagtaagtgtcttgtatacaggccagtggcagcagttcattgtcatggcccctttctgatttgtcttccttgggatcactttccagcatccgcacttccactaatagccaagtagacaagctgaccctgtcagggagtgacagcgtcatccttggtgatacaactaccagtggtgccagtgatgaagaagatggacagcctcggcgggctgtggacaacgagaaagagggagtgcagtatagctactccttattccacctcatgctctgcttggcttccttgtacatcatgatgaccctgaccagctggtacaggtaggagacacagacaaaacagacagaagaccataaaacccttggatggcctataaaatctcatccattgtcctgacctcagaacccttgctcttacccatataatgaagttgggttaaatactcttgactttatcccctctagcatttaaaacccattggaattctttgcaatgcaaatcattgggagctcttacagagttgagttaattgagagagaaaatcatgacataaagcaatctgacccatctttgttcactaattttctgtgtatagagatggccatgtcagagcattctggttcccgtaataatgtactaaggaaggaaagtttcagggaggctatctcaatctagacctttgccagtaactaggaacatttaaagaactttgccctgatagggtctttcatgctggcaagaagaaaagtcatttgagaggcagagtcaatgagctgtttagttcttggtcataagaactaaaaatagcagcttcctctggtccccttcaaccctactggggggtagtgccagccaagtttcactggagaatttcttggccttggctggggggctgcaggaggctgatagaagtcaggtagaccaggcttttctacctgactctctcttgttttcttagccctgatgcaaagtttcagagcatgaccagcaagtggccagctgtgtgggtcaagatcagctccagctgggtctgcctcctgctttacgtctggacccttgtggctccacttgtcctcaccagtcgggacttcagctgaacctctgagtgccaaggacaccactggaactcacaaaggtctccttcaccgaaaacccatataccttttaagtttgtttcaactaaaatattaagtgaatgctttgcaagtttgactgtatgcaggtttatatcagaaggtgagattgaataatgcttgatgcagaatcgaaacttctcatttatctgtatattatgtttacttctaaggatatagcacaaagggaacattttttgtttaaagtgaactacagctgtgctgtgaagagagttctttataaagcctgtaggttcttttaactttggtttaaaatgtaagataggaaaatgttggatatttgaggccatgcttaatatatttatattgcagtatcctttaaaagcaaaaaaaaaaaaatgcatttatattacagttttcctctatgaaagtccttacttatatgatacaagcactgtgttttgtgcttaaactcttcagcggggtagcatcaaagttcttggggaaggatcgtatatgtgggtcccttccctagaagaatggttgctgatatggctactgcttctacatcttgagttttttaatttactttttttacactgtagcattgagactgcttgattcaagtctggtgctttgccagatgtattaatttccataaatgctttgtgagtttggttaaaatgaagattcacttgggaaaacactgcagctttagtctgtgttactatcttgttatgagtatgtaaaagtaaaatgcatgtgaatttatcatatttgcactatgaaggtatttggttaaaatacaaagacttttaagattttaaggccctttcttccaacagcttttatagttagcagccattctttattttctggatagccaggttttatcacgcttctagtcaggatgctcctattccttctaaaaattacggtctgactagtgagcaaagtcttgaatttattcaaaagtcctaaataccttctctaggtaagacacttggtagatgagagacggaaggcattgtcaagaaccattttcatgagaggtggtgtgcaaaaaggtagaataaaagagttctttcaacaaagatttactgtctattctgtactagaccctgtaggttttggggtacagtgttaaacatgatagaggctctgccgtcttggactttaatagcttagagaagagagcaaatgagctgacaggtggttataatgtgaattagtgctgtggtttaggaattggagagaactcaaaggag

SEQ ID NO: 101098 - DNA, 2044 bp, Homo sapiens
caccactgcactccagccggggtgacaaaagcgagactccgtctcagaaaaaaaagaaaaaaaaaccgtttaaaaaaattcatggagttatagatatgaaatatgaaaattctatctagacatcacctttccttttaaaagtgagaaaacagaagtctcaaagaagtgataggcctctcccagctactaattagttgcagagctgatcttagatcttttcactacaccaagggagtggaaaatcaaagtccttgtgtgatgcacaggaatttctaggattgtgaaatgcgttgagaaccagtagtacttgcttggtctttctgggttcttttgcgagctaactgaacagaaggttacttgtcacctttcaactctcaagaagaatccgaaagttctcagttactgatagttgaattaactccagagaagtgcactgcattttggaaagtcagcccttggcagtccctgtgccactgttttccttttgattccataggaacaccagcctcgctccggcctcttgcagtcctccctcatcaccctctacactatgtacctcacctggtcagccatgtccaatgaacctggtaagggaatgtcaataacacattcatttgataaaaagaaagtaggaaatcagcctttacatagttggtacaaaaactagagctagagcaaatgtgaaacaagcaaacaaaacttaaacgtacagtgttcactgtaggtttgtaggtatttacctttcacattttagtccccacatctattgatagctatttataactgacagtctaaagggtcagagtcctttagatggtctaggctttacctaacctaggctgagtcaaactagttaagagctgtggtcaagggctttggccctttgttgtgactgaattttagtttgatgtcacaggctgtagaagaaacagctgtaggaaatctccttttgtagttattataggattgtttctcagtaggatattctatgggcttcttttaaaggaaaacaatgcagaccccccttccaccaatgataacttatattttgttcttaagtaactatgtaaaaaccaaaatagagataaacttctgtgcttaaaaccttgacacttaaagaattaaaaagatttgtcaaactacaaaaccaataaaatcaataatgatgtttatgaaatttgacagattctgttgttgttttctttttttttcctaattctgtcattgattgtgaccaaacgtgttactactgactgctaagtttcagattttttaagtaaagcattcccatgtttcacatcatgactgaatgatatgtagggaactcctcaagttctttcttggaacaagatgagctgtaaccaaggataatacaaattttctcattttcagatcgttcctgcaatcccaacctgatgagctttattacacgcataactgcaccaaccctggctcctggaaattcaactgctgtggtccctacccctactccaccatcaaagagtgggtctttactggattcagataattttattggactgtttgtctttgttctctgcctcttgtattctaggtaagttaaaaggtacttagaacaagattttcatggaggttgataataaagtgaagaagctgttttgctttcaaaaagcagcatgagaaatttaaaaacttcactctctttaatgaaaagttctttacttgcttcagttacagagctgtgtacatatatatttttttgagacagtgtcttgctctgtcacctaggctggagtgcagtggcaggatctcagctcactgcaatctccacctcctgggttcaagcagttcttctgcctcaggctcccaagtagctgagattacaggcacctgccactatgcctggctaatttttgtatttttagtagagacagtgtttcaccatgttggctaggctggtctcgaactcctgacctcaggtgatcctcctttctcagcctcccaaagtgctgggattacaggtgtgagccaccatgcccagcctgtagtaagttttgaaattagg

SEQ ID NO: 101099 - DNA, 1661 bp, Homo sapiens
acatgcaaaattcattgagataagtagaaactagttttcttaatctgggctttgacttgaatacaagttagctgagctcatcattcttgcagttggtctgagtgtactgtatgtgctgtttcatgttttctaattttcagagctacacagctaattgttttgtttgttgtttgagatggggttttgttctgttgtccaggctggagtgcagtggcaccatctcggctcactgcaacctctatgtcttgggctcaagcaatccccctgcctcagcttcccaagtagctggggctacagccttatgccaccatgcctggctgatttttgtattttttgtagagacagggtttggccatgttgcctgggctggtctggaactcaggctcaagcaatccagccaccttggcctcccaaagtgctgggattacaggcatgagccaccatgttcagccaacacagctaattgttgatttttagtgtgaatggaaaagaccattactttagatattaaaaaatagcaaatgagccacttttccagttcagggacagtcttattgtttgtgatgggaaatggatttagatagccaatggctgcagaggaaaaaactgtcataaaaagataccagtgtgtgtattctgttttcctctaacaccatcctggcatggagcttgctgtgaactgggtcattttgagggtaaaggaatcatttaggttcctaagaaaagctcacaatacacattaattaacatataggtagcagtaaactctagctggaatgatcaaatgtctggtaatcaacccatgaaatcaaatcaggtaattcaggaagtgaattcagttgcttggtggattttggaatttaacatcaagccaattgaatacaatcttgatactttaaccttgagacctctgtaattttactgtaaattaccccagaaaagtgacataatgtctcctcatttttatatggagtggaagaaaattggccttcattattagtttattatagttgtggtcattcatattggtttccctttctccagctttactgtctttcacaagcgccttttatatcctgtcaatcatctgtgtcgggctgctctatacatattacaccaaaccagatggctgcacagaaaacaagttcttcatcagtattaacctgatcctttgcgttgtggcttctattatatcgatccacccaaaaattcaggtatgattgtttactacttctttctcctgtgaaaggtttttaattctaagcttaaaatctaggtaccctttcttatgaatttatgtctaagtttatccacttgaacatttttccatattataaagtcttcataattctatttcatgcctatatcataattaaatgaatttcactatcattaaaaaaaaacccaggtaacttgaaaatttatagtgcttttttttttttttttttttttttttgagatggagtctcgctctgtcaaccaggctggagtgcagtggcacaatctcggctcactgcaacctctgcctcctgggttcaagcagttctctgcctcagcctcccgagtagctgggatcacaggcagccaccaccgggcctggccagtttttgtatttttggtagagatagggtttcaccatcttggccaggctgaactcttga

SEQ ID NO: 101100 - DNA, 1114 bp, Homo sapiens
attaatatgtggatttaggtcaggaggcattcactgcacctctcagattttctggaaccatatgttaatcttttggcaatatcttaatagtttgtgttctcacttgatggaatacaaagctaatcagagagcctgtcaaaataaggacttacaactcttgtgctcccctatctctgtcttaacctacttcctaagcatggcatcaggtgacatctttagatttctactgtgatttaaaagaaaagacttatagtatcatttggaactcaggtcccaggcttcccttggcacaagctaaaacatattttaaaaggtctgaaacccagtagaaagcttttaagaatgccgttgagtttggaatcttgctgtactgctggagacagaatgtctttaccacctctgtcttgttttaattgaaatccgttcagaatgttggatcttctgaaatgttactctatggtagagaataactttgttctcttggttcttgtagtctggtttgttgttggcatgataggggccgccctcttcatcctcattcagctggtgctgctggtagattttgctcattcttggaatgaatcatgggtaaatcgaatggaagaaggaaacccaaggttgtggtatgctggtaggtatctctactcacctatgttagccatactgctacattaagcacggtgtacaataaaaatcatcattatagtcccagcagctatagtcctcagggacagaagtccaaggtgggagaatggcttgaatccaggagttcaagaccagtctaggcagcatattgagactccatctttacattagaaaaaaaaaatttgccaggcatggtggcatatacctatagtcctagctactcagcacgctaaggcaggagaatctctggaatccaggagttcaaggctgcagtaagctatcatcatgccactgtactgcagcctgggtgacagagcaagaccctgtctctaaaaataataataacattaaataaaaggaaaaaaatccacaatttccagaatttggctctgaattatatgcatcactggaagaaagtagcacagataatataaattgttcgattttcccaatttatgtattttgagag

SEQ ID NO: 101101 - DNA, 2202 bp, Homo sapiens
tgatccacccgcctcggcctcccaaagtgctgggattacaggcgtgagccaccacgcccggcatgttgctttatgttgtaatatcagctttggtaacttggattcgcagtaagcagcaagtggagttaggtttatatttttctcatattttaaaacaaatgatgctctcagaatataattaacatttattgaactgttaatgcattttaggtagtgttgagtgctcatttaatacagcagagtctgagggaggaaaattccattattgagctcattttacaaatggtcaaatggggttagagtacgtaacttgctggggtaaaaagcggcagaaataatatttactccagagcccgtacttttaaccacttcctcccagccatgattctctgagttaaaactataaagcctgatttgcctcgctttctcttctgcgacatctgtgtcataaaggagtatactgaaggcggtctcaggtgaccatggtgtgctcattccaggttccatgcctctgcagcggtgcctcatgtttgctgtgtagttgctgtcctaacagtaagaattccacggtgactcgcctcatttatgctttcattctcctcctgagcactgtcgtatcctatatcatgcagagaaaagagatggaaacttacttgaagaaggtaagaagtaacagtgcccttaaggtattggttatttttatttttatattctgcaaaattctagttttatttcgtcgttgttaatcaagttggttgtaatttggagattttttacttatatgggggtgtggtcaaaacacagaaatatgaggacattagtccttttccagaaatacagaatgaacatctgggctccagtcgaacaactgagagaaaacattaaaagggtggctccaaaacattttctttccttatgtgttaaaggtcgaagcatctaaactggactagttcttcacctttggaaggactcagtcgtagctggaaaatctcacaggaaagtggcacacagcctcttcatcctaaaagggcaaagaagagagaccatatttttttgaaactaagactcactctgttgcccaggctggagtgcagtgacatgatcttggctcactgcaacctccgcctccctggttcaagcaattctcctgcctcagcctcccgagtagctgggattataagcatgcaccaccatgcccgggtaattttttgtatttttagtagagatagggttttcaccatgctggccagggtggtctcgaactcctgacctcgtgatccacccacctcggtcccccaaaatactgggattacagatgtgagccaccgtgcccagccgagagagcatttttatttttaaaatgcatgttatttatactgtttggtaacaagattgtaaatgaattggaagacaaagagaaaaattccatagtcagtcttgcagttgttgaagtagttaattttctaaatccaggctttcctgcagtgggttagagtctctgtctaaatgtagatattctcgtaacattgaaattgcttttttccagattcctggattttgtgaagggggatttaaaatccatgaggctgatataaatgcagataaagattgtgatgtgctggttggttataaagctgtgtatcggatcagctttgccatggccatctttttctttgtcttttctctgctcatgttcaaagtaaaaacaagtaaagatctccgagcggcagtacacaatgggtatgttagatttatgattaactggttacattatggtgtggctcttccttcccttcagcagttaatatagccattctgatgaaatcaatggaatatgtaaatgagtggctcagatgcatttctgatctattatgcatgtgaaattgttttaatgtcattttcagttagattgctgtaacatggaggggatagggggtcttgtctttttattttcttctattaaattcctttgcttcatgttcttagatttttattgaacacctgttaaatagttgaagcactatgctagatactacgtacacacacacttttttctttctgttgtttaaagataaacatgtacctgataaatttaaacagtgtacaaaagtcagtgaatatatatgtgctactgatttacatattctattgcttctgactcctgaccaccttttacctatgtttctaattctctcctttttt

SEQ ID NO: 101102 - DNA, 1074 bp, Homo sapiens
agttcgcagattaaaaaataaatccttcagagaagccttccaagactactgcccagctaaattactttccccttacaataggaggcactaaatacacctttattgaaagcctattcccccatactacttcatcgtattcattacattggggcacggtgcatttatgttgtcagatctcctattaactagagaataaattctgagcgtactgtgcctctctgtacacttctgtaacttccagatctttgcacaatgaatacaaatgatgtaaggaatgacaccttcacagttcctgcaaccccaggatggtttagccccaccttccccctcagccaatgacaggcgcccccctctgccgctccggtcgcggacggtgggcggggccacgccgtgacgcatccgtgcgtctgtggaaggctgcgtttccggcctgagaaaccgtcatgtttctggggagtcacctcagctggcagttaccaccgtgttagaaagcagcctcaggaccggccacctccatcactggcgtcaccatgggggctgtgctgggtgtcttctccctcgccagctgggtgagttcggggtcccgagtcctcgccggacctgcggtttgcggggaaaggcctcgagaccagagctgcacgggccttggctccagaggctctcgggatgtcagcaggccctgggctacagagggtctccggggccccagacgcaaatccgcgataccctcaggtccagcttaggcggctcgccctccgggttcctcggggaacggaagaggctaggccgccattgtttacaattcggatggctccgccctgcgaggcttcctgactaggttcctctggagctggagagggaccaaggaatgacagctcccagcgaggggctccggttcctcccgaagcacctcttaaggtgccatcatttagttctaggtggctcaagtaatatttttatcccctagcacgggatttgccaaaactacagagtgtgtggcaaagctggggttttagcggaggcttgtctgcagttcaggtgcaagggaaagaagcccttgtggattgttattca

SEQ ID NO: 101103 - DNA, 1126 bp, Homo sapiens
actggaacttaaagatcaatattgaaagagatccatccagagaggttgacaaaaaaaaaaaggctgagattattcagggctactgcattgcatactcttggaagaatgagccatgcacttagtctacactaaaagaaatggctagagaaacaggaacaggagagaaaccagcaaagtatagtaatgaaggccaaagggagaggttggttggcctttgtagatgttgctgagatgtcgagtaatacaagttaaaaattaaaatgtgtccttttgggtaaataaatatggaggtcggttgggacctcattgagcagatttggtgaaatggttggggcggaatctataatatcagcagctttcaaaggttcaatataatatatcagtgggatgagttaagagtgggatgtgagaaagacaaagtgtaggcagctcagagaagtttggctgcgaagggaggtagagagaaggctgaggagcgattggggaataggtgaagtttttttgagcatgagagagattaaatgctgttggcaaagagccagtggagagagagaaaggctgagaagacacaggatatgaaagggagaattgatagtataactttcctgagaaggtgggagtggaggagctccacagtacagatccttcaataggagtctgatgcctgttactttttggagacgtgggaagccaggttattcctgaaaggagtgcaccagtgtaatgcaacaaaaataaataaaggtataagtgtggaaggaaagtcacaattttcattgtcggcagatagcaggcatttattgaactagtattgtgttaagtacttttcatgcaccattcttttttttttttttgggacagggtatcactctgtcgcccatgctggagtgtagtggtgcaatcttggctcactgcagcctctgcctcctgtgctcaagcgatccacctgcctcagccccccaagtagctgggaatacaggtgcgagccaccacactcagctaatttttgtatttttagtagagatgaggttttgccatgttgaccaggctggtctcgaactccagacctcaagtgatccacccgcatcggcctcccaagatgctaggattacaggcatgagccact

SEQ ID NO: 101104 - DNA, 1119 bp, Homo sapiens
ggagagcttcagctaccctgacttgagatgaccaagggtcacatgttcaccctctttagttatcccacgtttggctcccacccctatgcaacctgatgtacagtttcataaacatgcctctgctctgatgagtagcgctgatctaagaagattcctggcaactattaaaaagccctggggccccatggctgttgactgaagtagatttaggaagcacagaagttcttttttcagggcagaggcacgcatggctcatttctttctttggaactaagtagagtggcactggttgtcagaactgctgcaggctgcctgtgccagcaactcatctgctctgtgccaggcaggcaggctgctgacatttcaagagtccctttgaggactccagcaacatgctgtcattagagcaactgaggacagtccatagtttattagtatatttcctttggaaaaaatgtctccccctctctctctctttaaaattcctgctttagctgcattgctgcattcatgtgcagtgactcttatgtcaaatgcctatgaggagattatgactaatttaacattttgttgttgagaggacataaggaatggtagaaggagtactagattaaggatcaggagcctggattcttgcgcaagttacgtaacttttcctagctttgatttcttcatttgtcaagtaaagatagtcatgtccctcctgtttcttggggttgatgagaaaatttatgtaaaggtactttctggactataccgaacaaatggaatgcaaaggagaagtagggtaatggaaggagcttggtgtttgagtctcacaggcctcgcccacactgtgacctcaagcaagtggctaatgtctctcagcctcaaccttttcatctgtaaaatgggaacatctatacttgccttgcaggagtgttagaaggattagaaataacatatgtaaagcactgacaaatggcaaacaatagttgaatagcaataattgttattattacacttaatgtggatatattcactctgggtgatttaggattctaaacctaaggaagtattcagtttatagatgtagagattagcaaaaggccctgctagtaactgatagtagcaactgat

SEQ ID NO: 101105 - DNA, 1008 bp, Homo sapiens
gtgtatgtgtgtgtggttttttttttgagacagattatcattctgtcacccaggctggaatgctgtggcatgatctcatctcactgcaacctctgcctcccaggttcaagcaattctcctgcctcagcctcccgagtagctgggagcctcctgagtagctgggactacaggtgtgcaccaccacgcccagctaatttttttgtgttttttttagtagagacagggtttcaccatgttggccaggctggtctcgaactcctgacctcaagtgacctgctcgcctcagcctcccaaagtgctgggattacaagcgtcagccaccgtgcttgaccaagaacattgttttaagtgtaagtgtggttccttctctggggccttacaccaggattgtggtgagacgatgtattgttctcctttcttttttcctgttcttctgtattttcttatctttttacaataagcaattatgattataattggaagaaaacaaaatctacttttattcgtaaatctcaatcaatatacttctcaattaattgtctagaaaaagcatggaccttctaactgcatggcacagtgaataagtgagttggaaatggtatgacagctgaaacctgcctttgatgggtgatgagcgattgcactgtacagcagctgtgtggactagaaagtgggtagtggtggccagaatttctttattcatatactccttcaacagatatccgtcagttgctagctgatatagtttggatgtctaactatattggtggatagctgttggatgtcatgttgaaatgtgaaccccagtgttggaagtgggccctggtgggaggtgtgtgggttatgcgtacagatctctcatgaatggcgtgatcccctccctgctgtaatgagtgagttcttgttcggttagttcaagtgagaactggttattttttaattaaaaaaaattattttggccgggcatggtggctcatgcctgtaatcccagcactttgggaggccaag

SEQ ID NO: 101106 - DNA, 1998 bp, Homo sapiens
tagccaggatggtcttgatctagaactactaatttcatatctttcctccccactccacctctcttctgagctccagcctcctagttccatgtacctagcctacctctccccttggagggctcacaggcatctcaaagttaccgaataggccaaacaggactttatgccctcaaatattcctcctttgttcttccatatgtcagcaaaccacacttctgtccacctacttattcacaccagaaacctaaattacctgtcaatccaacactacttcttgttggttcgatttccaagttatatctagaatccttcccactgcccccctcctccacccaccatcttggcacctgaacttcacaggagcctcctaacttgccccttcccagcactgctgtgcccggccgccacagtcacctttgaaaatgcacggctgctacttcatggccttgcctaaagcccctcaggaaccaagttccagatgtggtctggctcctgcctacctcagcagtgtccttggtgtcattgtccctcttctgccatgctcccgcctgctggctctttctgtccttccaagccctcatgcctccctccctcagagccttcacacatgctgttcccctctctgtagtgctcttcccctcactcttcatctgcatgacgcctcgtcctccttggttctcagctaaaatgtcactttgtgacccccagccttgatcaggtcccagtgatcactccagcaccctgcattctcccttgaagccttgagcaccaaggccatgacttaggtacgaggtgactttatgccacctgtagtagatggtaagctctgtgaggccagggaccatggccagtttgttcatggtggtatctgtgccagtgcctggcgcatggtattaataaatgtgtgtacatgtttgtcaataattttatttaaagaaaagtctgagcccatgttctttaaaatgttgatggtggttgtctgggtgtggaattatgagtgacttgttttgttctttgtacttttctgtgctttttgctttgttttcaataagaggcaataactgtcattttgacagaagccactgtgctggggaactggagctgtcctctctgcagaatgcatctggacttacctctgcccccttgccttctgtccccacaggcctgaggagcgatgcgacaggcatgatggaggtcgagtcctcctactcggacttcatctcctgtgaccggacaggccgtcggaatgcggtccctgacatccagggagactcagaggctgtgagcgtgaggaagctggctggagacatgggcgagctggcactcgagggggcaggttagagccagcaggtccttggcactactgcatgccagaggccctctgccgggccccgggctagcctccaagtcctagactgcccatactttcttagagaagaaaccacatttaagtcaggcctgccccatggtcagtggcagagtccagcaatctctaggttggaagatgtttgagtctcaggccccaaggactcctctggacaggcatccgggactcttcctgtccccctgccccctagcccaggtccctccacttctcgctatccccacagctatacctggctctggccactcacagctctcacctggctgactttagcggccggcttccctgggctccctacacccatctccgcccttcctgttcagctctatgcagcagccagcagaccccatttaaaccattctgtccatcatgcttctgccaaaaaaaaaaaatcccccagtggcttcactgagtgaagctaagcttgtcacattgccctggggcagtcctgctgtaggccgggccctgcccaagtctcacccggtgccactcctctccctgacaccctccagctacatctacctttggtctgtttctcagtcaagcctctccaaggggccttctctgagtgctagatcagccttccccaatcacatgaccctcatcactctctg

SEQ ID NO: 101107 - DNA, 1082 bp, Homo sapiens
aagaaggctggacgagagaccttctgtcccctcccagagggggaaccctggcactggcccagcagcctcttctctgagctccatgtcccagataaaccaggccagactgagaaggctccccagaggcctctgtggcctccactccgggaaagccctctgcccacacccacaggcttcacattcccaccaccttcgcaccgtgcccaggtacactttcaagacactgtaaccacaagatgttatttattgagctggcgccgggacttgggcggggcctgccctacagtgagcagcccacacaggaacgctcctctcgcgagcggcccgggcagggaccctgtcccaacaccaacacctcctctccagcccaatcttctgggtccagacctgcttgtcccttttttagaaaacacttttaaactttttaaaaattttaaaccttttttcagcagatatggagagagctgacaatcaattcacattttttaagccattttagctaaactgtcattgtgcatctctgaggttccctcatggagctccacagatccatttttagggaagggattttggctcaaaacgatctgaccacctctgccctgtccaccaggataagtgacacctaggacccaggaaataaatgccgatgatttgtgtgactggtttaagattatttctccttaaccttgcaaaaacaggggttgggccttattttccccaagtccacaattagccggacttgccccaggcttctagaacatacgattctgagaagatgctggcgttctgcagaggccagcaccctccaaggccagtgtctgatgagccctcttccatctcatctgctctcaccccaactgccagcttcaggaacccaaaaggaagctttactccttaaaacctagagttaggaggggctgagagttcagggaatgtttgagcaacaaccagagaagccttatttcttctggaaggaggacagcctctggacccctcttggcccacagcattgggatctctggcctggcattcacagccacccttaggctcaggccctgctgctgagcaggctgacccagctc

SEQ ID NO: 101108 - DNA, 1132 bp, Homo sapiens
tttctggggagagggttgacagctttcactggattctttaaaggcactcaacccaagcaaaggatcaaaaacctggtcctaggtcaggacgtcaacacaaagatgtcttctctgtggaaagtgtctaggttgggcttgtcttggactgttgaggcagactcactccctctctccaaagattccaggccccggactggacctgtagataccatactcccaaacccgagtcaaggccagtatggctcacacccactcaccagccttttaaactcctcttcagtaaagcccatgtcccgtttggtcatctggtaatcagtgtccagggtggacttgaagatgagcgggtcatctgtgttgagcgagtagttagcctggtcatttttgagcctgcagaagagggaggaggagagaatcagcctccttttactcttacataaatagtcagaacacattgacgttcacccgcctttgatcctcacagcagcctcaaacagatctgaaagatctgatccttgtgcagagggggaaataaattcagaacttaggtgacttgttcaagtctatgtaaccagaaagtccagaatccagcccatcctgaagaccagagctgggcaaaggcagcagaggggccagacatgggaaccaggcagaatggcagccggtgggggcgtgggggtgggagccaagaaagcaacatccccctccggctgccaccctctccagccttcccctctgcaccctaccctgcttgttcctcagtcccactgggagctggctactccaacataccatggaagctgttcttggcacgatccctgaccaccatcttgttgtatctaatggatctttcctagctctgaccataatcgacttgcatagcagaatttcacactgttgactgtttcttgaaaccttttccctggatttctgtgacaccacacttttgactttcctcctacttgtctcttttgctggtcccttaaataccattgtccttctgggttctatcctaggcccttcttgctccaccacctcctggggccactgcttctccttcagccaccatatctgtgcagatgactcctggatctttttccagcccatggtatacccacatgcctccaagaacctc

SEQ ID NO: 101109 - DNA, 1030 bp, Homo sapiens
aggcaggagaatcgcttgaacccgggaggcagaggttgcagtgagcccagatcacaccactgcactccagcctggccgacaagcacgaaacttcatctcaaaaagaggaaaaaagaaagaggagtggagggtcaccaggcctccctctttaaaaccaataaacaaaaagccactgcctttgagatgtgtaatttaaaaccataaataattaaaaataaaaactgggtgacagagccgggagaggaaaggtgggttagggtatgtgaaccaaattctcacatttcagagatataatagagctaagctcttagaatatataatattatcgtatttataatatattgatacatattaatatatttagtaatttattattatttgggcttactaaaaaaggaactcaaaactgaacgaggcaaagtggctgctctggaatgtgggccgggggtgggctagagatggagaaaagacagttacctcccaccgtcccactataaatcttcaattttagagatttttgttgttgctgtgttgctttttgaaaattatcacatgaatgtgactttctaaaaaaggcaactgaaaagaggaggattgatttcataaatgctgctgccacccacaagaggtagtcacgtgttatgggtcaggtgcacggcatctgcaacagccccgccatcccctttttgctgtgtgactctgagaaagttgcttaacttctctgtgtctcagtttctccagctgtaaaatggggacaataagagcatccacttcatagcgttgtgagaactacttgagtttgttcaagttaagcagctgtagcagtgcctggcacatggtactatatcagaggtagccgttattatccctgtgatggaatatgatatatccatttaaatacataggaaaacaccagtgagttcaccttatggataaaagcaggataagaaggtgtatttccaactcgatctcaactaagtgtgtccctatgcacgtatacaggtatatctacacatacacatgcatacac

SEQ ID NO: 101110 - DNA, 1061 bp, Homo sapiens
accatccccagctggtggccctgtgcctgggccctgggctgatggaagatggtccgtgcccaggcccttggctgcaggcaacactttagcttgggtccaccatgcagaacaccaatattaacacgctgcctggtctgtctggatcccgaggtatggcagaggtgcaagacctagtcccctttcctctaactcactgcctaggaggctggccaaggtgtccagggtcctctagcccactccctgcctacacacacagcctatatcaaacatgcacacgggcgagctttctctccgacttcccctgggcaagagatgggacaagcagtcccttaatattgaggctgcagcaggtgctgggctggactggccatttttctgggggtaggatgaagagaaggcacacagagattctggatctcctgctgccttttctggagtttgtaaaattgttcctgaatacaagcctatgcgtgatcttgtgtgtcaggcctgtgttttctgagaaagccctcccattatccggggcagaattcaggggcagagttctctgtgaacctcacaaggtgaaatcacatggtcttaaagaaagccagaagacaggccttcaagtgatccaagaaacccaattcatattaataataattaacttttttatttatttatttttttgagatggagttttgctcttgttgcccaggctggagctggagtacaatagcacgatctcgactcactgcagcctcccgggttcaagtgattctcctgcctcaagactcctgagtagctgggattataggcgcatgccaccatgctcggctttttttttttttttaaatatatttttagtagagatggggtttagccatgatggtcaggctggtctcgaactcctgacctcaagtgatccgcccgccgcctcggcctcccaaagtgctgggattacaggcgtgagctactgcgcccagccaataattaacattgcttgagcgcctgctatgtgctaggcactagcactttatacagaccagtgcttcccagcgtttttgaccagagaagagcag

SEQ ID NO: 101111 - DNA, 1126 bp, Homo sapiens
acatgccagctttgtaattatgggcaggttcattaacccctgagcttcagctttcccttctgaaaatgaagacaatacttaccttcactggtggttgtgaagattacatgaaatgatgagtgctgagcacctctcataggctctggttcaactcgataaatggaaattcctgtctttatgtgggaagatgattctttgagggtggaatttcaggcaccagcaagccagtgggaaggaattgtggtttgaaaacaaccacagatagggatgcttcgtagttctaaaatctcccttgtgagccccacctctgccctaggcaggcccagtcctctgtgctcagtcagcaccacggacagttcctgcacacgccagttctttgctgtggacttaatcgcattttagaggccttcagttgcaagtcacaactttatataccaccaagggagctaaaacatgtcagaatttaactctgacatgccactggttgccattcacatcttaattttggagatgttgaaaaaatgcttgtcttagaatcgatgaaataatgagtttactagaggtggtatcagtgagcagttgaccattgacctttagagaggttaatagtaatagccagtatttattgaatgtcaactgtattacaggccttttcccctccttcctgtcctgttctgggtgctgtttgccctgtatacacattctcttaacaaagattacatttggggaatataaatgtgagccagatatacagtaaatcaacaggctttccaccatctttttcctcaaaatcttccaatctttagcctcacttcttcagaacattgcttcctgctgaatgatagtctaacgtgttaacctttccagttcacaccgtggttaatccacctaaaaggcatttcaaatgcataccctgtaacccagcagctgcactcctaggtatgtgccctgaagaactgcacagaaatggtcaccaaaagacacatacaagaatgtttttggcagagctatttgtaatatctcattactggaggctacccacccagatgctcatcagcaatagaatagatgaaaattattttgatatattcacacaatgtactacaataagtcatgagaatgaatg

SEQ ID NO: 101112 - DNA, 1287 bp, Homo sapiens
aagaaacctgggtttgagatctcatttctgccagtttgccaactgaccctgggcaagtcattcccctctttgaactttgatttcctcattagatgaacaggttcacagctataagcaggaggtaacctacaggtggtttaatgatactgcacatatcaaagacacatggcaaggctctgactggggagtgcgggaagggtctcaaaccaaggctgacctctgcctttgctgaggagacaatgtgtgtgcagggaacagctttaaattagggctcgtctgtaaaatgggcatgatgacacttgccctgctctcctagtttaggttttcccagaacagagcctgacacaaggaatcaagtacaagtattagggcaaaccacctgaaactgccattttattagtggaagcagtctaatagaattttgtatgcttcatatggttcacaaaggtgatggatgaaaccccaggatgggagtgagaaagtgaggcagagaaagaagtcaggagactgtgtattatcaggcaggttaacccaagcaagggcaactggagtttagtcttgctggggacttctggggagacagtgtagcacagaactcagcaagctgcttctgtaaagggccagacagtagatattttagtctttgcaggattacagtctctgttgtaactgctcaatcatgaagttgtagtgagaaagcagccccagacaatatgtaaatgaaagggtgagctgtgttctaataaaactttatttacaaaaataggcagcaagatggatttagtccgaggcccatagtttgcagactcctggggtagaacacgcgctttagttatcccacccaggaaagagggagctcaggtatttatacagcagttcccatcagtaattggttaagagctgctagggaagatcagagagttggttattgcctgtttatttccagcctgccatgggtggtagccctcaggcagagaaatgcaggtgctggcaataggagactgggctaggacaaggggttaggacatgaggaatgacagcattgctcactccagctcagaggaatggcttgtttgactatttggagaatgtactagaaaggcacaggatgaacacaggaaacaagtgttgtatagagccagattagttgacttcatatttacagctcttccaagcatttgttccttccaggcaaaacccagcttcttcatatttgacagtcttgtttgagttttctccctccatgcctcacttaggccatttcctcagctggggtgcctgatgtct

SEQ ID NO: 101113 - DNA, 1144 bp, Homo sapiens
tcgggaaccaaaagagaaaggtgaagcacttataagaatatgaaaattgtctgcatttctcattctgtcagttcatgtgaagccagacacagatgcagtttgtagacctggacactgcagcttttgcattttcatttggaaatgtgtataagtatttgttcttggtgaatttcttcttgactgcttccagtgtaccctatttcttacttagggatatctcatttgtttgagccctcatttttcttggatccctgtccttggcaacacacggtgtgtgagtgtaaaacctgtcaatcttattggacctaagttagaaatttaagtgtggctttcaaaatggaaggctaataatcctgtagcaactgcagaattattttcctggcctgtccttccaatgagataagaaaccattcacctatcttgcagatgaagtctttatgagaaatgaggtgatttggcctagactatacacctagtttttttcaaactgaatatcctcattcatcagtagcaaatatttatggattgccagcccctggagtatgacgcctaccctgtaatcttttgtacatttcacatcttgcagtgcttgttatattgaagccattttagaattggagcgctatagatcagggaggcagcctctataaaaccaggctgagcaaattcccatgatgctggttctctaggcagagtctccagagatttgggccgctacaaaaagtgcattttgcccattcggctgtggatagagaagcaggaagagcactggacttggagtcaggtaaatttggttgaaatcttgcctgcaatattttctagctttctgaatcttcagcatgttaatctctggttcttggttttcttatttccagggttatcattaagccttttttataaactgtaaattgttaaatataagcttttggtttgttttttaatcagagttcactattaatggctttttctctccagttaacatctgatgacactaaaccctgctttgtacacatgttgctttcaaaaaatggtatattattataggactttattttgcatataggcaaatccagtctttctgaatcattttctcgtctatatagcacaaatggtaatgcagcttttgatatatttttgttgcgac

SEQ ID NO: 101114 - DNA, 1083 bp, Homo sapiens
ggcctgtagggatgataattgctagcatgcatcaggaagcaagcttgtgaacaatccagtttttctagtacttgcttcatactagggagaaagtcatcagttactttggcatagaattttaggttcttcatctaatagaatttgattgtgaccattaatttttgtttatcttacgacttcatcagtagatgttcagatttttctcattttgttggcagggaggaaatgaggaaatatatctacgtaaatagagagaaacttctaaattaaaacatcctgttgtgctacctgctctttcggtgtcaacaaactgagttttcctttaaatgctggtaccttagagaatgaactaaaatttccttgtagagatacttttaagttccttgtttctacatttttctagggaaagatgacaattcactagttaaggggcaagaaattatggttacataatagcaacctttaagctttagaatccttttgatctctatgtgaatatgatcttagcagtcatctgtattgcatgatggagaaactaacggttggagctggattctgagggaatttttctaaggggaatacttgaggaaacagactaaaagtgctttctgtctcatgatatgtgtgctgaaggccaatcatcttactgctttctcaactaaaagattttctaatagaggtgtggttatatgtatctgatacttgtaatgagatgtaaatgatcagtggcctcaagtcattcctagcagattgtaggttagttaactttttttttttttttaaattctggccagttctttattatgtaagtttttcccgtactggttagtttattttattgttttccctaaaagaaccaacaggaggttatttctgaatggccttgaccaggacaagaagattgaaggctacaataaagtagatatgagtcctgtctattattattatttgccctcagctaagagctttcctttaaaatttgtttgacattttggtaagtctttggcatgtttttatgctgtttttaactccttgattttgtttttatttttaaagctagataacattagcttaataggccag

SEQ ID NO: 101115 - DNA, 1886 bp, Homo sapiens
ctcctcggcctcccagagtgctgggattacaggcgtgagccaccacgcccagcccagatttgcctgtattatggatgagaaaacaaattcacagaggtcacatagcctgtggacttggtgtgcggtactggtaaatcagactgataggcttcattatgtcagtgggccccaaactgtagaaattattcataaggtcaaccaattgggctgtctttatggatcagaattaacatagtgtcttttggattgattacttaagccaagaagtcaatttattgtcatatctaccattaagtcacatgtgtaaccttgcgcctgtcacttaacaccctcagtaagtttaatcatggctaattggacataattagcaatgatatgcaacagctgatgtgaaagagggaagggattttgaaataatagaaatgcagtttctctccaaattcagtgttcactggacttagtgctaatgactttgtattacagatatgctgtgttttgtttcctaacaaagaacctgcaaatgtttgaatggaattaaatttattacaggactctaaattttatatgtagaatggcacacagacagttttatagtgggtgttttttagtgagtagttttctctgagagccaggagtgtttaactttttctgggtaacacccactaaccacctggtcccactgactttctcagtcccttctgcagtagcttggcatctgatttttcttcagcagagagactccagaactaaaacttctgctgtacagtgctgtggatgctctatctggaatggtacatctgtgaatgctgttcagaatatgtgatcagttccttaccccattgaaacattcgagcctagatttttcagattttcttgtcagttttcttccttattctcatttctttatctgctttggcctttgatttttatctcatctagaaaaacatacatgcactttattaataacatctctttttaagtcacgacctagctacctttaaacctatttcctctagttctgtctggttggctttctaaggagaggcattgtaacccttaaacgtgtgctgtttttttttttaattgatgtgtaatagatatacatgtgctcttttcttgtgtttctaccactagagtttaagctctctgaggggaggactacactgctttcttttaaattcctctcaatgaataatccaaagagttcttagaaatttggtagtttttcattttgttagttatttcaacacacattggattatatgtgttacatttttgtgaggtagcttaagaataaaaaataagaatggcttatgagcctttactctaaccagcactatatgggcattttatgttcattatcttatttgatagctattaatgtctctttttaacactgagaaaacagattcaggtaagttataatgtggaaatgtagaaaaatcacctactttctctttagaagctcagatgtgtatgtaaggcttgctaaaagcagaccccaccgtatattttatatgtatagagcttgggtaattcctgacatataataatggagtcttcatctgaaatttctaacaaattattaaattcaaagcttattattttcgaatcgagcatgttctttgccttgaaaacaaaacatagctgaaagccagtgcttctaaaggccacagctgtcattttcaaccctttctgtctttgcactgcctttatttaaaaaaaaatggattagcagtaggtagtcttctttttcttttctttctttcttttttgattcttctcctaggatatctgctctagccactgggaaataacttctcagtattttgaccctgactagaaagatgtcccttggggaaggaattgggatagaggggctaggc

SEQ ID NO: 101116 - DNA, 1033 bp, Homo sapiens
agcttaaatttgatggagtagccaaaagggagtcattggaagttactgagtaaggacaaaggcaagactagaggtaatttaggaagagtaattttttgtttgttttgagacagggtgtctgtcacccaggctggagtgcagtgatgcagtcatggctcagtgcatccctggcctcctagcctcaagcgattctcccatctcagcctcccaagtagctgggaccacaggcatgagccaccacacctggctaatattttattttttgtagagacaaggtcttactatgttgcccaggctggtcttgaactcctggtctcaagcgatgctccagctttggcctccaaaagcactgggattatagattgatctgccatgcctgactggaagagtgaattactctttgaatttcagagggcacagaaattcaagaaactaggtacaaatgtaatgaagatttaatatgcttgtgaggctaataggtgctttgaattatttgagaaaagggagaactctaccaactctgcagttttatgcttacatttcaggatcagtttgttcattcagcagatatttgttcctaccaattatgtacaggatgctgtgggagatatgtccaaaggagcttatggtgtaggaagggaaataggagacactatgtaagtaattttagtactgaagaaacgtggtaagacattgacaggtatcagcgaaatgctttgtgagaatatattcattagagcaatgccgtcccataggaatagaatataagccacatgtaatttaaatttttctggtagctgcatttaaaaatttttttaaagtgaaattgattctatctgtttttacttaacccattatgaacaaaatatgatttcaatatgtggcactagccacattttaagtgaatagccacatgtagctatggctatggcttaaacagcttaagaaaggcttcatggaagggatggtatctgagccacactgtgaagaatcttgtatgcagagtaaatttgggaaaagccattccaggtag

SEQ ID NO: 101117 - DNA, 1280 bp, Homo sapiens
tggtctcgaactcctgacctcgtgaattgccctcctcggcctcccagagtgctgggattacaggtgtgagccactgcacccggctagtaagcataaacttctaaagaaatagttattaagcagtctgtatgtgccaggcaggtgaattaggctaatggaagaaaacaaaagctctagagccagatagatgtgagctggagttctggctctccaccatctatttgcatgttgctctgggcatatcacttgccttccctgaccctccatttcttcacccataagaaggggaaagttgttgttatgaacatacctactctgggactgttgggaagattactggaccaaaataatataaaggccttagcaaagtacttaaccctagaggtgtttgatatatcatcaatattgttgatggcatttggaatgagatgtttcacatttagtatgctgctttccagatgggttggaagaagattcacacacgtttcctaggccccgaaacctgacatttgctctttctttttctcttgctcttgttctagggaatgacaatggataaaagtgagctggtacagaaagccaaactcgctgagcaggctgagcgatatgatgatatggctgcagccatgaaggcagtcacagaacaggggcatgaactctccaacgaagagagaaatctgctctctgttgcctacaagaatgtggtaggcgcccgccgctcttcctggcgtgtcatctccagcattgagcagaaaacagagaggaatgagaagaagcagcagatgggcaaagagtaccgtgagaagatagaggcagaactgcaggacatctgcaatgatgttctggtaagaggccagtgcttctgttttgaacagtggtttctaaatagtattaatttaatgtataaatgcagactctcaaaacagcttatgagagagaggtgtctgaatatactggaaagctgccaggtatttacaactaatttttaagcatatgatataatttgtgtcacctattgcctgatcagaggttgtacatcacttctgagatactttcctctcctatcaaaaagacctgtgaaaaacagtgacattttttcagcctccctccatcttttaaaattgaggccagatagacaggattttaatagatacagctacagataggctattgtgtatattagtcagagtagtgatgtcatcgccagtaggggagggagatgaaaaagctgagctgcctttcagcctctccccagtcatgccttcacactgtaaagtcct

SEQ ID NO: 101118 - DNA, 2324 bp, Homo sapiens
ctaacaaatgtataattgaatggcagagacactgacacttcatttgataggtcattgctcctgcccagtttgggactgagaaaataatttgatagttggtccaatgtgtgatacctatgaaagaaccgagcctttaatattttcatctttatgttacagccactgtgtcgaactcccagcaggcttaccaggaagcatttgaaattagtaagaaagaaatgcagcctacacacccaattcgtcttggtctggcactaaatttctcagtcttttactatgagattctaaactctcctgaaaaggcctgtagcctggcaaaaacggtgagaaagaccctttgtgatatctaaccatagcaaaacagtgcttgtgttattaacttcattttattcctgaacatactcattgtcttggactttttttgaaagattttctgggggtgggagtgtatcttttatgagataaatacagatctgttacttttttaattcattctcaataccttctgctgactttgtttgattactgttttttgcgggtggttgtagaaagttccaggtgaatgtagttagttgtttcttaccaagctttgggccttggttatacattgtcattctcatgccaagatttgaggttatagttgtataaaagaaatacacagcacattcttgttgtgtgttggattaccttccatattcttcctttggccttctctacatattttttatagtccctcaacatgcacacaactttttaaaaacatttttattcgggaaaggtgccttaaagttccgtcacttaaatcagatttagtgatgtgagtttccagacattttgagttttagtttaaataaataaataattttaaatagaagattgctagaaaagtctttggtaattaaaaaatcacacgcgtttgcccagaatgactgtgctagggttagcagtaatactgcttagttattaggtacagcaaagttcttaccttggagtttctgtcattgttggttggtgctttgtaaatatgccttatacttctgctggaaacagctaacagacagggtaataatagcctaggttcccccaaagtactgtacaagaagataagttatattcacctagcgggaaaaaaagtgggctaaactagctccagagaacttgtgaattctttgctaaaggctctttgttttaggcatttgatgaagcaattgctgaattggatacgctgaatgaagagtcttataaagacagcactctgatcatgcagttacttagggacaatctcactgtaagtactacttccacagggtttatagtctctttcctattcacctacttaataattcactgttatcttcaagaggggatttgtaccattaaatgtagttacagttttaagttgttaaatttgttataaatgactgctgaagttttgacctttgcaatcatccctgtctgcagtgacacaggaataattttaaactgtcgagtgagataagattatacatactgggccacttacctagggaacttttagtagccctgctttgattatacttcctttctcttgcagctgtggacatcggaaaaccagggagacgaaggagacgctggggagggagagaactaatgtttctcgtgctttgtgatctgttcagtgtcactctgtaccctcaacatatatcccttgtgcgataaaaaaaaaaaaaaaaaaaaaaagagaatcgtacgtcgactttcgatttttcacagcctcagcctaggaaaaatggttcatgggataaacagctggtatttgtatctaaaactcagattggtcacataaatgccacggcattccgaagttttgattttgattaacattgacaggattactgtgtgtttaattttttaaaaactgaacactgtgattatggggttttgtaatttagcagaactcttactggtagaaaaaatagacctgaattatgtgtaactttttggaaggtttaatctgatatcaaaataatcattgaaatacaattccattgtaaagttgtacagaaagttatagagattatattgtgatgctggaacttggagtgagacacacatcatttggcatttgagttgaatggtaattcacagtaatgctgccgttgttcgggacttaaagacacttgacctgtttgggctgttgccacttaaaagttcatgaccacaaatgtccacagtgtcttcctctgaggaaactcgaatcctgaaatggaaattctttgtggcagataactggcttatgacaccttgaaaagttcaagtgctcatataacacaccacactgaacc

SEQ ID NO: 101119 - DNA, 1391 bp, Homo sapiens
ttcctacagcaatatgttcactatgttaccaatttgcaacttgtgcttcaatagtggaatctactttcattgttaacactgagctaaagaaaaaaagccgtgtgttttatgaatgaccttatctgtttcctggataatacctttaagaataatgtcctgagtcaggcgtggtggtgcgtgcatctagtcccaactatttgggaggctgaggcaggaggatcgcttgagcccaggagtttaaagctgcagtgccctgtggttgcacctgtgaataactgcactccagcctgggcaacatagcgagacctcatctccaaaaaagaaaacaaaaaacaaaaaaaggaatgatgttctgtagagatggcctttcacttgaggagtactcagttttcaggttcttcctagctcggggcttttaaattttgaaatctaaacattctttcccaccatcctttttgactgttgaccttggttttctcttctaagtttctgtccctctgcttccttactttttttcctttttgaattctatctttatctgtcttttgttcactttttaatgctatatatgggcaggggtgagagacattactgagcaccttggtgagcaagcctggctttaaagattggagaagagcttctggcaccagaaccctgtcttcctccagttctcaacacggtgttgctcttcagtcataccggaatctgaatcaaaaaagtatttttaaatatccatgatttctccctgtattgaggctagccctgatcatgctttttgtgcctgtcaccaggtctcccaagtgcactcatccaggtcagtgctcagatgtgtttaaggagaccctatattcagggaagttgcgtgaacactgcagtggggagaattgagaatagtcaggcctatcagtctcacagaatcacccctctacctttgatattccacttagctgtagagtccatctgtttgtccatctgctgaaatgagaaaagaaaaatttatgcactgatttaaaacaaaccaaaaaaaaagaaaaaaacaaaaaaaaaaatccctcctttctagctgaacaaaaatgtgcagttaatacttggcgcttgaaaatgcagtagtgaatgtggaaccaagcctgtctgtatatctggtagctcttttcttgctttgttttttcttaccagtattctgcctaacgtttgcttctgtgatggttatattgcctagcaagcacacccgtggttgtgaaaatagtatagcaaaaaagaaaaatccccggttattgatgtactagatttgtgtatgtcttttaaacagttctagtttcaccttacacagaataatcaggaaaagtgtaaaaattcaaaagtgaaataaaaattttatcagttagttgcct

SEQ ID NO: 101120 - DNA, 1057 bp, Homo sapiens
ggggaatagctgtggtgaggctgggaccagtgcagatgtgtgagaactgcaggggaatttgggatgtgggggctacagcttgcatgtgatgggcacgctgagggatgggggtacctgggtgctgagggagacggggagcaggaggctgggctggtggggctccccatgccccttgtacctgcgtcagttccctgatctccccaaggcagttggggcttggaggagaaggggacatccagcagtttcccttccatcccagggtgtgaacttgtatgtgaagaatctggacgactccattgatgacgacaaactgaggaaagagttctctccctatggagtaattaccagtgcgaaggtgaggactgggggcacctccgggggacagcgttcccctccatcctctcaccaccatccccccacaaccccacccctccaccctctcgcccagcagccttcagggggttggtgccggctaccccttctggggctctgctgaccccgttggagcttgtagccatctgcagccttgtctgggctggaggggaagagggtagaaatatagtcccagtcacacagctggacttggggctcactgtcaccttggcatttattgagtgcctactgtatgccagattccagaaattcatatcttagtatttccattgacttttgttgtctggcctctgccagtgacattaccctcctgggcctccgttttcccatctggaaagtgagagggctggacttcgtcattcttcatttgttcttccctatttctggagcaccaattgtgtgcccaaccctgttaggcccctgagatgtggcaactggcccatcagcagctctatgagctttagcagatgttgtcttatagataaggacactgggctcactggatggctttccgaccctggcttctcattacaaccccctgggcaattcttaaatacacacacctcagtcaggcatagaatgtggatccccggggtagggcctgggctttttattttttttttttaaagctcccagaggctgggcaatatggctcacgcctgta

SEQ ID NO: 101121 - DNA, 1056 bp, Homo sapiens
aacacaacataagcttcctcatccccatcactcatctttgaaatttaacatcattcagtcttttccagagatgctttgaggaataaaacttctgcttctcataggttaatgtttctaggagagggacacacagctatcaatgtgactgtcttaatggtcatgatggaattctaccccgactcccagagaaggtaaaacaccgttacgtgggaatgacagggcagagagcagatcatgcagggtctcctaggctgtgtaaagtagtccttattctaatgatgggaagctactgcaggatttatgcaaggatgagacattagagaggcattttgaaagaagccttaggactgcatggtggaggacagactgcgggagggccagggtaaatgcagttaactggcagaaggcagtgagcgcaggggttgagcttagctcaaattagtggatttattccactaggtagtggtagtggatttggatctggtaggaggtcatgttggtggattttctctggaagaggggaggagagaaagtggtgtggcagcagggctggggaaaccctctgattttggcttttgcaacagaatggtggggccatttatggagacagaacactggaagagagaatcagagaataagaccgggcacggtggctcatgcctgtaaaccccacccgaggcgggtggatcacctgacgtcaggagttcgagatcagcctgaccaatatggtgaaacctcatctctactaaaaatacaaaaattagctgggtgtggtggagtgcacctgtagtcccagctactctggaggctgaggcaaaagaactgcttgaacccaggaggtggaggttgcagtgagcagaggtcacgtcactgcactccagcctgggtgacagagcgagactccgtctcaaaaaaaaaagaaccaaggaatgaaaaagaaagaaacttagttaaatcataagcttgaatttagacatgagtgttaccaagataaccaggagctgatggcaggtaggcggtggaatgtaagagaggtgactcaggtgctcttaagag

SEQ ID NO: 101122 - DNA, 1171 bp, Homo sapiens
ccccatgtcagcattatatcattagagttcagtagttgttgggtttttttttcccccttaaagtagataattttttaatctgtcaagggaaaagtttcaggaaaccttttctttgcttgaaagagctcagtataggagagcgcagtacagcatgatagaactagatgagatcaggatctggagtcccatgaacgaacgcccgcctatttgaatcctgggtctgccccttaatactggcggtacctggcccaagttcctttacccttctgagccagcatgtttcatccatgaaaagggctaggattgttgtgaggatttaagaagacataaagtaaccagcacagagtaggtgttcagcaaattggagatcacttctcaaactactgcgtggcatgtgggtggcccataagacgtgactgaaacctctgaaatggtctttcccttcagagcactctgctatttggtcctgaagcagtacacagaagcagtgaaggactgcacagaagccctcaagctggatggaaagaacgtgaaggcattctacagacgggctcaagcccacaaagcactcaaggtaaaaaaaaatcctggccaaaaggtcccaacatagctacagagatttatgccagtgtcaccatttacagggtgtagccaagctgagacaatatctgcagcttttccttctcatcctgggcccaggataactcagagcaggcctgtgggctggggtttgaaaacactttgctgcctcagcagctatccccaccccagtccgggaaccttcccccacactcctgtcttttcttctattaggactataaatccagctttgcagacatcagcaacctcctacagattgagcctaggaatggtcctgcacagaagttgcggcaggaagtgaagcagaacctacactaaaaacccaacagggcaactggaacccctgcctgaccttacccagagaagccatgggccacctgctctgtgcccgctcctgaaacccagcatgccccaagtgagctctgaagccccctcctcaatcccttgatggcctcccaccctgtaagaggctttgcttgttcaaattaaactcagtgtagtcaaacacagacatggttgttgcaccagaaaggtccccactagagctaagcgtgaagctgaagctctgtcc

SEQ ID NO: 101123 - DNA, 1108 bp, Homo sapiens
gtggtggcctcagagtagttggcttcttccctgtcagttcaaggctccaagagcgagtgtttccagagaccaaggtggaagctgcaaggcctattatgacctaaccttggaagtcacatcgtgtcccttcctctgtcctctgttggtcagagcagtcacagagcctgcccgaattcaaagagagagagcagatacacctccgcctctcagtggaggattgccaaagaatttgtgcctgtcttttaagttgttacaagaagatttttctctccgttaatttatgaattccatgcaatcacaaaggactagtagaattttcttctttaaattcatgataagtcagaaaaaaatgagaacaacgacatgagagaatctggtgtataataaagtctggggcaaagagagattatttaataagaggtgttgggttggccaggttagagttaaacttgaatcctaccttgcttcttattttaaagtaagttctgagtggatcacagtttggaatgtaaaaagcgaaaccattaagttctagaagaacacatggattaactatcttgcagtggggaaggtattcttatgtgaagggaaaaaaatgttacagaagtcgttaaaggaaaagttagagaagtttgatttcaaaagattaaaaacccttattaaagatgttcagctttacccacaactaagcagctaaggcagtgagatagtgttttattccatattggcatacatgaaaatttaagacccaaagttggtacagttgtaggaaaataggctctgtcaataactattcagcttttttggaaagcattttggcagtaacaatcagattttatttctttttttgttttgttttgtttaagagatggggtctccctatgttgcccaggctggtctcaaactcctgggctcaagtgaccttcccaccttggcctcccaaagtgctgggattataagcatgagccactgcacctggccagtcaggttttaaaatgcatgtatctttggatacagcagtcccttgcacaaggatgttcatcatggcatcacttatttacaaactggaaacaatgaaaaatacctcttgataggaaattggtaaaat

SEQ ID NO: 101124 - DNA, 1227 bp, Homo sapiens
tgctccatggtttttttcctcttctgaatttgtatctagtgccttctgctggggatgtggagaaagccagagttctgaaggaagaaggcaatgagcttgtaaagaagggaaaccataagaaagctattgagaagtacagtgaaagcctcttgtgtagtaacctggaatctgccacgtacagcaacaggtatctcctatacagctgctggcctggggcatttcaggacatttgttccatagtcttctcttggactgcaatgggcccttcatccctagcatttagtcaagtatgttatggctgaaaacatgcatccacgttgtgagctagccatgaccagtggcattcattctctcaaaagggtagaaactgagggatgccaaatggtagcctgggctttgttggcccctgtccccagaattttcataagcatgcaatgtaactaaaagcagtgtgcctgctctgcaaacacaaccctaacacaagtctcttagcctgtccaccccaccacgctacgctgctccctacccttctccaagaccctcctgttagaaattctggcaccatttctgtctgagagtactggcccagaagccaaaatgtgaagtaaccattgcctggcatgagagcaggaaggatgggtacagtctagcctgaaaggttagacttgtgggcctgtagaaagtcctgcaccaggagctgccgtcagtgaccactgactgagaacctgggagccagggtgcggtcccttcactgtgtaggagtgattgttctccaacaatgctcgtataggtggtctttctgttttagtgtttagaaaattgaggctcagagaaggaagggttttgctttaaactcagccagccagtaaatgttggcacaagaattggaatctgacttcaacaagatcttcctgttacttttactctcagaagcttgaaacattcagcaagagaccatatcaaaaccaaatgcttagtataaaacattataaaatgttagaaatctgtttatccttccctaccagcatacacatatcactctctagttcaaaaatcttggatctaatatagacacattgttccttattccaaactcttgagataaaatgtgttttccagccacggtggctcaatgcctgtaatcccaacactttgggaggctgaggctccgggaggatcacttgaggtcaggagtttgagaccagcctggccaacacggcaaaaccc

SEQ ID NO: 101125 - DNA, 1066 bp, Homo sapiens
tctattctggtcttcatggtcacaggccattccctgaagtacacaccataaccggcggatgagattttgtgattaggtcaccctgaggcacctgccccacctccagaactagagggtgatgcttcccaggagcatgtacactgtgtgaatccctggagaagcatgaagaagagaaaggagatccaagcagccaaaaacaggagattcctcacctcaactgtatgaaatgaagaggccatttgtcaggcactaggaagctcttttaatgctccaggggaatggtcccagcccagcaagctagggattcaggctagaggtgcagaagggatcagagatggagccctgccatgtgtaagtgacctataggtgttaggggaggacaagagttactcaccttctacaggagaatgcctctctggtcatgggtagcattcactctggtttgtgggagcctggtaagtgttccccactcttctctaggatgaaaatgtgcggtgctaatgaacctgatggcatcagtgccattgatttcattctttcaatcagtgcacctaccattgatttcattctttaaatcagtgcacctaccattgatttcattctttcagggtcactgagccatgtgttccaagccatgtgtatgctaagcagtgtgacacagaggacagtcttggccctcagggaactctccctcagttgagggactgagacatgtaaacagtgtcttaaaacacaaggaggaggaacatgtgctttagagtcttagtgtttgaggacttcaggatagaaactgacttaagtgcatgagggagtcggggaaagactcagaaggggtggcaatggaggtggagccttgagctggaccttgaagaaggtcatcaggtgggaaggaaggagaatccttggcagagacagtggagagagttggagaatgaaagtgcatggggggaacagtaggaataaggatgactgcagagtggtgtgttgcagggtgccagtgaagctgaagccctacttcaagagaaacctgtgtgcatgtgcacagggagatgtacccacaaatgtt

SEQ ID NO: 101126 - DNA, 1973 bp, Homo sapiens
gaaacagggcattgatgtcccaagggaaggagtatttcaagaaagatggagacatcattagtgtcaggtgttccaaggagcttacattaaaggtttggcaatgaagtcaccggtggctctgatggaagctggtcagtgggatcaggagccagagggcaatgctttcagaaagtcaggcttgaagagaagctggggagtatacctgtgatggcaaggggtgtccagtatggttttattaggtgaggaaagagttaaagggacttaaatgctgacggttggagttagtagagaggaaggatgaagatgtgggagagggaggtgctgcctgggtgtggtccctgaaagaggcaagaggagatgggatccagagcttaggtgggtggattggtcccattgtctcttctgttgtgacaggagagaaataggaaggattgggcacccaggcaggtaggtttgtatttggggtatgaggaagtttgctctaaaaaaggggaagggccagggaacaggtttgaggagagcagaggtttgaaatagcttggccgccaggaaaacagcctagccagagacatcttggaatttgtagtgatacagtctgtggtttttattcttgtaatataggaaacatggttgtaggagcagaaaaagtatacagttagcattattcactcattcaacacataactgattgggccttggtggttgctaggtgacataccaggtgctggagatcagttgacagaatgaacttggtctctgggtggcattttaagctgaaatctaaagaataagttggagttagccgggcctggaaggtggcaatctttttccaaaatgaaaatggttgttctgggtagaggaaaaagcatgtgcaaagtcttgaacagaaggatcagaagagaatgtggctcacagtgaagggggacaggaaggggtggggaccagatctcacatgccacattagcctagggaattgggaacccctgaggagttgtaagatttgagaatgacataagctttgcattttttaaaaagcctgagcattaaacaaatgtcaggtgcttgcatggttgtgtacttgattcattgataaaatatgaaacaaaatgtatgattctttcttggagaaactatagtctttttggatcatggtttaagtatccttaacaagcaacagatcaccactttaaaggtaacatagtttgaccaagctcaaggaatgtcatggggactgatctgagatggtgtttatgggttcctgtattgcacgtgttggaggagctaaagaggtggttccgaccagggggagggtggcagctctggctcttctgaaaaggcctacctcccatgggtgtgtgaaaggagaaatatcttcttgacccagctggaaacctccctgcaatcctgccttcttttccagaatgaccagagctctcatggactcgcttgggcctgagtggcgcctgaagctgccctcaatccccttggtgcctgtttcagctcagaagaggtggaattccttgccttcggagaaccacaaagagatggctaaaagcaaatccaaagaaaccacagctacaaagaacagaggtgagctgtgactccctgcccagagtcttgcaatctcccactatccattttctttagagtagtcctgcaaaaattggcattgtttagctgagttataaaaataatcttaggaacaaagtataaaacaaaatacaagtcttcacctcttagagactgttttctcagctgtatagtgagggtgatgataaagtcttcctcacaaccatgaggactgaatgacataagacatgtaaaactcccagcctggcacataggcatgcagtgtgagttcccttctctttcctctggtagcacttgggatgtagtacttaggatgtttttggttgcaaaaacagaaagctcaacatggtaaacatagtatagggaatttattggctcataaa

SEQ ID NO: 101127 - DNA, 1025 bp, Homo sapiens
taatattcttttatcatcattaaactctcacatttacctgaaatgtgttctcagatctgatgtcctctgacattgctttagattcctgccctggtgatagccaggagagcaggaggggtgtgagcatactcacagagcctgtgctgaattaatttgtgccatgccttgtgccagatttccctctttgagtgttcacaaccaatctgtggggtacggttaccatgtgtcccaggccagaacttggttgctgagggttggggcagtaaagtgatttacctgggtcacatagttagcagcagaggtggaattcagacaccaccccatctgactccaaagcttgtttgttattcccactagaccacaactgtaaaaaaacatagtagcatgaaagccatgaggcttttgttcttgattttgggggaactgaaactatgaaaattgatgcatgtgcacacacatttaacaaaattcatgtttctctgccttctttctcctcctcacttcagtctacgttgaaaaatccctgttctgaggtttggcgtttttagccatgtctctcggccagaaattacttcctgtacgctgagtgctccagataaccctgcctggaagaaactgtagggaaaccctggtggctcagcagccagccagttgacatttttgcctcctattctagagcactggccttggttcccttcagcattaagcccctgctgcggcgagcatctgcttatgaggctctggagaagtaccctatggcctatgttgactataagactgtgctgcagattgatgataatgtgacgtcagccgtagaaggcatcaacaggtgagctccattcccagcaggtggtctccacggcaactccctgtccttcttgattggctgcgggccattgccttgtctgtcttctgaggggatccctttggctacacttaaaaaactcccgatgggcatgtaggggaagctgagaaaggaaaatctgcttttttatttagcaggttttcagggagtcaattactaa

SEQ ID NO: 101128 - DNA, 1017 bp, Homo sapiens
tgctagttttgcaagtatgacagcttctaatggaatggaaatatttttatgtgctctgcatagacttaaaaagttttatgttactttcacattgaaacagttcatgagcatctatttggcagttagagtattgtactttgacatagtaggtggcactgctattttgattttttttttcaccaagacagtgtgaagatacagatgtgttgggaaatatgaaagacagtttactcagtattatttcactgacagctgcccaggattccaatgaaaatgttatctgtataaagtgatgatggtatctcatttgaccatcacaaatgagataccatcacatcttgtaaggtagtttgtattattgtcattttacagatgagaaaattcaggtacaacaaggttaataaggtgtaaatgatagctaaatgtagtgttggtaggactcaaatccagcttctttactttcaaaatctagtggatctgtagcctccaaattgactagatacacaaactttattttgatattaagctgttaagggaagatggagtaggaagcaaagagtgtgtgtgctgtgtttacctgatactaatattaaacaggcttagattttaattagtttccataatattttaagtattattgtaagtaagaggagcaaggacagaaagatcttgtggtactagagtgaatacaataaaacaaagactgccacttccatattgtaccccagtatagatggggagacaacgtaagctttgttttcagacacacccgggttcaaatcctggactgataacacaactggtttcaaatcctggactgataacttatgtgaccttgggcaaatcataaacccctttgaacctttttacatttacctgtaaaatagggatagtcatctcatcttcattttttgtaggaatgaattgagatggtgtacagtctctagcagatagcaggcatgcagtgcatggcagctactatattaccatctcataagaatacattcattacagttt

SEQ ID NO: 101129 - DNA, 1028 bp, Homo sapiens
ctgagagtacctacgtatttatttttgaggaactaagatttgtcaaatgttgtaagcaggaagtcagaccaaaagacaaccacagaaaaccacgtggtttgctctgaaattccatgacaacatgggttggtcactgatagagcaggcttccccagcactatttagattagagacaaacacaaagttaggggcaatgccagctctagggagctgaagatgggtgagaaattctctcagttgaagctgcattcattcttctgaaggctttttggtcagcagatcaacttagtacctgctgtttgcaaaacttctacattagggtttaggtggggctacctaccaaaaaattagtccagaagcctttcagtctcacagacttgggaatgtagtcctttcttttttctctcccttctttttttttcccttctatttttgtgattactgtctactagataaaatccccatttttcttgattggattgaccagatgaaggtggcagttttccatttgctcctttttcagatacattttggaagttctttccatttggcaaattgggactttgtcactttcgatagactgtgcgggagctgtgttccaaacagagtatggaaatgtctttaattaaagaagagatattttcaagcgtctactctgtgctaagcactgtaaggaatacagtgaaatacagagcagagtccttgtgctttgggagtttatagactaattggacaggctaagtatatatatatgtagaggagaatctagccaacagtgcaagtctatagagaacatattccagtagtaaatacttgatagtaatggcctacagtatttaactcctgtcagtactgtattacagggagagtaaatgtgttgatatttaccttagacacttttttcattaatatttaatgtgtgtgtgtgttttgctgtccttgtcactggcatgtttcctaaggtttgaagaggaaattgtaagagttctgagttaatgaagccaatttggttttaacatcagttgtta

SEQ ID NO: 101130 - DNA, 1260 bp, Homo sapiens
gcttattcttctcccagtgcttcctaaaacacttttaaattttactctttgcccctcttttactcaatttaactttttattttagagagagaatgctcaggtctgggacttggcttttcatatccttttggggaatctgggatccatacttaacatgtagcttttacatttatagacttcttcacaaccctgagattccaaagatgttcacatgagtttcttagatctatgtcacaaaactctattaagaagagtagaggaagaattcctttagggttagatacactgcttattatcacgtggataaatttgtcttctttgcttaagtaacagcgctttcatttctggaaggtgagtttaggacctgaataagtgttaaatctcgaaatattttcactaagacaggtagtagttattcagaaaactcaaagtcttttgtcaaattagccccaatttgagattgtatccttttacaggaagaggatgaaatggattctggcacgatggttcgagcagtgggtgatgagatgggcactgtccgagtagccagcaccatgactgatggagccaatactatgattgagcacgatgacacgttgccatcacaactgggcaccatggtgatcaatgcagaggatgaggaagaggaaggaactatgaaaagtaaggctctgagtaaattcactgacttcttagaccaagcatacatatttcagagaagacagattctcatggttcatgcaggcttagccttgggttctttcttttgtcacaaccaaaggagtagaaaacttggaagtttgcgatggggacaggaggtttggtgagggggaaagctggcctgtggagtcaaagtcaagaaagcatcaacagtgagaaagaattttgcttttgaaccagagcagccattttctcattgaatgttgttattattttccttccttaccttgatctttggaggcaagcacatgcattgtttgatgcataattcctgtgaaggtgtaatgacattctgagttatttactgtacatacatcttcagtttattttcatgacagtttgggtctaacccaagtttaccaatactgtcagtcaatgaaagatgactgtacaagttgaaaagttctatccagtttcttctagtttaaactcatctctgcttctgtccgtatctggctgatccttttttgcctgtgactaggcctaacatcttgtgttcagctcctatcttagagtgaaattcttgtgtcattcagtgct

SEQ ID NO: 101131 - DNA, 1145 bp, Homo sapiens
atgagggaaatacatttttcaagagagggcagtagcataatggtaatgaagaacataggaaagtgaatcacaaacaatatactttggtccttaagcctaagaggcagataaatctttcttcatcagttagtggaatatattatttctctgttgctctaagcttgctgttctgaccttcttttgttcagcaagaaaatggagatacatttttaaatatcaatttaagtggatctataaagaaaaagcagatgattcttttcaaatgtttatgctctataaatatcaatttggaatcagtatttgtttataatgaatatttaataccaaccaagaagcatttattaaatagtcactatgtgtcattaacatgtagagtatgaaaaccaaatgaggcattcactgctttcagtaacttatatattaaaaggggaagatgacatttgtcattatcattatctaatacttatggcatgtgtactgttctaattgttctaattccttatgtgtatagagcattactctaggcgcttcaaataatagtatttgataatgatgcgacgtaggagaaaggacttctacatatgaaggtaataatatactaagacaaatgctaggtaagtggtacaggaaagcgttaaaggatttgtgaaaaggaaggcaatgactcagatatgcaggaaggctggggaaggatgttacaggcaggtgcaaagtcagaaaggtagaaatgtgttttcattattcaggttggccgaagcagatgtgggtgttgactggattttggaagactttgaatttgaaagtaaggagtttgaacctgattctcttgttaatagggtatctgaagacactttgactaggaaagtgataaaatggagtttcaaaagactgtaaaaggtgagaccaattaggaaattcttgcaagaaccaagatgtggaccattctcacctgtgaacattttttatctttttagatgtgctgccactattgctctagttagtaatcctttgaattttggatttagctctctttgaatttatatatttcagttcaccagaattaaaacagctagagcaccattgcccagaaattaagtccattcatatagaggcagttactgaaactgcttaactggaagagttat

SEQ ID NO: 101132 - DNA, 1012 bp, Homo sapiens
tctagttgtagcatgttttagatgagaggcatccagtatcataatcctactagagataagaacttcttcttttgaatagttattaataactgagcataaatatgttttcatatgctactgccaagtcataaaatcacggaatttttcaaagctgcagggaacattagatataatctggccctgtgtcttctttttgcagattgggaacctgtggttttaccaagatcgtgtagtcagaaccagaatctaaatctttgaactgcaggatagggattactttccatttttttttattgtggtaaaatatacataacataaaatttgaggagaggaatttttccgttcttctgtctccaaaatcaactttagctttttggcaatctgataaatgtaacattttaactaatcattttgctataattaaatttctaatacatatgtgcattttacttacagcttatatctgaatatgtggttagataaaaaaaattctctttttatttcactttagtttttggaacttcgaattctaataaatgtcaggtataatcaggtccctggtattgatatcagaaggtaaaagcaaatacattttagatagactttcttatttgtggattttcattgttgaaagagacaaagaacagttggtgttttaactccaaaaattagaaatttttaagtgggttggtaagaaagaagaactcaaatatgaggcaagcagatgttctcactttttcatctgaacagtgacagaaatagacaaataattatattctcacttaacagacatttctttgatttttatgacatggtttagaattagaccacagaaatgttatctttagtgtttcatcatccttggtttaaagattcaatttcttaagtccacctgtattgcaactgaaagtaattaatgaagaaccatagaaatatattgttttattgttggatataatacattttaaaaaagaatgacgcccttatggtttttgtaaattccattggagaa

SEQ ID NO: 101133 - DNA, 1112 bp, Homo sapiens
atttagaaagagggaccccagggaaatttctgaatgtattttaggggaaatcttaactcctctggaattccatgagaattttttgggcaaggatttgtgcattttttgtagtttcactagattcttgaaggagtcctttatctaacagaaatatccactgatccagagattgtagcccatctggagatatgtctatttattaaacttacctaaaatttagaatgtttcttttcatttttcatttttctttgttttcaggaagggatgagaccatgcagcctgcgaaaccatcctttcttgaatattttgaacaaaaagaaaaggaaaaccagatcaacagctttggcaagagtgtacctggtccactgaaaaattcttcagattggaaaataccacaggatggagactacgagtttgtaagtagtgttggaagtaaatggttatgtcttcaggggaagttatttgaaatatcacacattagtgcccaagcattttcttgtgcattttgagtctcctaaaccatccctgacagtgtctactgagctgaaggacagtattttgactgatgtttgggcagttctctggtccctgattagtggcatctttttcgctttcgaagtccatattcagtttttatttttgtccagttagaaattgttcatggtgagagaagtattcaatcatcaaatgaaattgcaactgtctttaatagtttatttggggttttgattttatatttaagaattagattggagggcaattgacactgttttgtggtgtccttgttgttttgctaactattctcctaattttaaccctgctgaaaggattattctcagtttttttcagaggatgaatgtataattattccagtttcatatgaaaaactggatgtgttttcctttctctactgtggaacattttccctcaaccatagacacttattaatgttcataggcatttaaggagtagagcaataaaaattttgggaaaaagtaagctaaggagtctgcattttcttcttgactattactagaaaagatttttctcttcaggagctttttatttttacattctaaaattctgaagtttgatcctccatctgtcataat

SEQ ID NO: 101134 - DNA, 1027 bp, Homo sapiens
tctagaggagagatttttaggcagcaggaatagcagatgcaaagatcctgaggcagggacttggctggtatgtttacagaacaacgaagaaacagtctgttttggaatggcatcaataggatgtgcagcaggaaatgatatcagagatataatggagagcgagataatgcagggctttttgtgtaataaaaaggactttagcttttactcttgagtggaatgaaagaccattggaagggatgacttgaccttatttatatttaaaaggtattattctagttgctgtattaatacattataggagaactgtagcgtttctgaacacaggtgcagtgtttttatttactattcaaaggtggcaaattatggggcacatctgctactattctcctcttctaggcctttggcacccatctgttccactgaatcagggttcagcttcagaatccttcttaacacagcacaccaggctgccactgctaatcatagtagacttacgaaatttgaattattgtgcgtctgttccatgttgcctgtatagttgtcttcaacatgtgtataaggactgatttctcagtttagccagtcttcaggcaaagatgtttaactactgggtaccaaatcacatcattattgtgatagaatgcttgagaatcctcaaatctgtagtacttctaagcttagtttccttgtttttaaatgttttagaagttagcgattttggctaggcgcagtggctcacgcctgtaatcccagcactttgggaggccaaggccggtcaatcaccttaggtcaggagttcgaggctagcctgaccaacacagagaaaccccgtctctactaacaatacaaaaaaatcagccagtgtggtggtgcatgcctgtaatcccagctactcgggaggctgaggcaggagaatcgcttgaacccaggaggtggaggttgtggtgagccgagatcatgccattgcactccagcctgggcaacaagagtgaaactccgtctcaaaaaaaaaaaaaaaaaaaag

SEQ ID NO: 101135 - DNA, 1662 bp, Homo sapiens
gctaacatgtttccctcacagttgcttttttttttttttgagatggagtctcactctgttgctcaggctggagtgcagtggtgacatgatctcagctcactgcaacctctgccgcccgggttcaagcacttctctgcctcagcctcctgagtatctgggattataggtgcctgccaccacacccagctaatttttgtatttttagtagagacagggtttcaccatcttggccaggctgatcttgaacacctgaccttgtgatccactctctttggcctcccaaagtgctgggagtacaggcgtgagccaccgggcccagcctccttcacaatctcttacagactttctgatttctaggcagatagtatttaattatgaaaaaagataattctgtttcctcctatgaagagaattgctgctttccaatgacctttttgcccaaaatggcaaataggaagtaatttaatcaggagtagccgaattttgtactgacaaaacttcatattttcatctgaaactgaatatttgtctcatttctaaaagtgaattgcctgtttgccaagttgagaaacccctccaaaaatttctaatagtgtttaagatacatagtgattaaaatataaaaggtgcttaaaaatgcaatagtctctaaaattgatatttcatattctattagcagatcacttttttggaaaaaaatgtaatattttgtgagaattcagaccttcccattttgccattcataaagccacaaacagctgtaaacttaaatccaatttggctcatgaatcttccaaaaacacactgtaatattttagtttaagatgacccaggctgggtgcagtggctcatacctgtaatcccagcactttgggaggctgaggtggaaggtttgcttgagctcaggagttcgagaccagcctggcacatagtgagaccccatctctattacaaaaataaaaaaaagatggcccaagtgccaacagtggtgaacaaaacagaccaggcccatgttctcatggagtttacagtgaaggaaatagacattaagccagtaccctagtaggtatcagttcaggtaataatagcgaattttttttttttttaaagcacagttaagagatattgtgagaaaaggcctgtggagagacaggacattcagctgagacatcagtgaagaggggaagcaagtcacaggaaggtaggggaaataagtacagagactgtgaggcaagacatagactatgtgtaaggaaggaaaggagtccattgtggctggagccgagtgacacatgggatagcagtttaaatgtaaatgcatcagtaatcacagtaaatgtgagtgcactaaaatctcctattagaagagaaagagtctggataaaaataacagtcaaattccggctaaatgctgtttataagagatgtaacggaaagaaaatacaaccgaaaagtttaaaacagaggaatggaaaaagatacactaggcaaatactcactaaaagaaagtgggtgaaacaatattgatatcaaatgaggccaagcatggtggctcatgcctgtaatcccagcactttgggaggccgaggcaggcggaccacgtgaggtcaggagtttgagaccagcctggccaacatggtgaaaccccatccctactaaaag

SEQ ID NO: 101136 - DNA, 1034 bp, Homo sapiens
cctgtttttttttctcacacgaactcttgacaattcagtaatccttattcctgggacatgaaatgttgagaagacaaaggagatttatgcaagttttcccactccatccaaagaaagggtctctattagagctcttgaaagtgatatttgcttatgtagcccagtgcctctgaaagaaaaaacatgatgcagaacttttctcattatctaaggtgtgttcctggtgtcatttccctctcccaacaggaccacttttacctaatacaaatctggatcctccactactcaagtgaaatacaacgcaattagcatcttttgtctttgataacacacctactccaagcaccagtaatgctggaatggaaagcatgtttcatttcctttcttcatttctctgttggagtttgatgctgatattactgagatttctaatggacagtgtagggaggagaaggctgattgatggtaatttattgtactgctactgagaaaaaaacacaactcagggtattggttgttcgatacatccagattttttgactgaaaatgttagattttactttttcttttttaaaaatttccaacttttaagttcaggggcacatgtgcaggatgtgctggttttttacataggtaaatgtgtgccatgttggtttatggcacagatcatgccatcacttaggtattaagcccagcatccattagctattcttcctgatgctctccctcctcccaagcccccaccctctgacaggccccagtgtgtgttgttccccaccatgtgtccatgtgttcttatcattcagctcccacttataagtgagaacatgcagcatttttttttctgttccgtgttagtttgctaaggataatcacctccagctccatccatatccctgtgaaggacatgatctccttcctttttatggctgcataatattccatggtatatatataccacatgttctttatccagtctatcattgatgaacatttaggttgttcattacagcactattcacaatagcaaagat

SEQ ID NO: 101137 - DNA, 1387 bp, Homo sapiens
ttgtttggcaatgcttacagtgtttctgtgaggtagcagggtggggtttcttatcctcttatagtttgaggaactggagcccagagacattttacaaaggcatctttcctacttggtgccagaatcaggtctggaacccagacccctaagtggcttcctgtctgcgttaattcataagtgtgtgtgttttctcacatgaaaacaaaaacaaaaactatgcttacatattaaatacccaatgttataaaccaggaaaaagaatcttctttcaaataacatgtgatagggactacagtaaccaggaagaatgatttcaggtttattgcatcttcctgggaatttcgtgacattagaggagtatttattattaactcacagtgttttttttcatgcttattgagaacacaatgcagattgacaagctttgtatttcattaattgtttatgcaaacaattcttattggagcaatttaatttgtactttcttttgctgttctttcttatttactttctaattatgggttgtacagtaattttgctattgtcagaaagtgtcttttttttttgtttgttcgtttgtttttttgagaaggagtctcgctctgtcgcccaggctggagtgcagtggcccaatctcggctcactgcaacctctgcctcccgggttcaaatgattctcctgcctcagcctgctgagtagctgacattacaggtgcatgccaccatgcctggctaatttttgtatttttagtagagatggggtttcaccatgttggccgggccagtcacaaactcctgacctcaggtgatccgcctgcctccgcctcccaaagtgctgggattataggcctgagccaccgcacctagccagaaaatgtcattctaactaaaaaggcattattattttaagaacatttttggttttcgccaggtgcaatcccagccctttgggaggccaaggcaggaggattgcttgaggtcaggagttcatgactagcttgggctacatagcaataccctgtatctacaaaaaaaaaaaaaagaaaaattggctaagtgtggtggtgcgtacctgtagtcccagctactcaggaggctgaggcagaaggatcgtttgagcccaggaagttgaggctgcagcaagccatgactgtggcactgcactgtagcctgggtaacagaatgagaccctatctcaaaactaaaaggaaaaaaaaaaaaaagcaaatataacctctgaaaacaaaggtatctattgtggaggaatcttaatggatacaggaaatatttgatatattttctggttatatctctgtcacagtgtgcttgtcagtctcattcaggcacttgttcctgaatttttcttctcttctactctgttatctatt

SEQ ID NO: 101138 - DNA, 1122 bp, Homo sapiens
gtgatgaagtatcagctggagcttgccagtggcactctgggccaattatgcagccgactttgaaaaatggtatgattcagaatgtcagagttgctaaggtgatttatgaagaaatcagttcccatcagccttcattattcatagagatgctgggaatcaggactttgcagtgacctggcccagaggaaataaaccaggtgggtatgatttagggtttctcacatagagttcaatagaggtgcctctgtgtatgtggtatgtgtcctgtaccgtgttgtgagctcatcttagagcaacagcagctattatttacattacatacttcctccatttcccaaaaaaggatataaggtggtagccttcacttacccactttctttctggtggatgcatgacattatgttatataccttaccaatacctccaaacctcacaaccgctgttgtagaacgaataatgtcctccattgaaaaatgagaaaattgaggcacatattagatgatttatgcaaaggcatccaactaccaagggcagaactcgtatagaacccggtccatctgacttaacaccagtgctcttgcccctaacctgagctgcttctctgacaggtgtattgccctttatattcatgttgcccagcagtgttcctggcctagcgtagctgccaataaaattgattgatttgatttgaatcatattcagcaccctggagtcactgcacgtcagcagcagcaccatgtgtgtagtaggcacttggtgcctactacaaaaggcacaaaagcagcaaagtagatagcatacccattttacagatgagaaaacggaatctcagagaggacaagtaacttgcctaaagtcacccgttaccactagtggcatttctgaatgtgagggccatctgatgtatctaatatcagctaaattcataattcttccagtcttccacatttttcacaaacacactcccatttccagaaacccttcatgtttcttccagttgcttgttgtctcttctaattccttgttgtatcacttaaattattttcccactcttatcctcagtgacctcatctctaaaaggaggataatgatgatacctaccttacagatggattaaataaa

SEQ ID NO: 101139 - DNA, 1077 bp, Homo sapiens
aacagaagttcttttttgtttgaataaacagtttaaatggacatgcctttagagataacttagccaggactggagccctgcttcttatcagacattacaaaacacagacattctcattaagtgaacagagatttcctttgatttcaaaagaatgttaaggggaattacttttaagtttaaaagctccttgagggcagaacgcacttcttattctacactgactcttcttagcacccatccagaaccttgttgcatatgatgatgccccatgtaagcttgcttcattggtttcagtggcttttgttcttagttgactagaaatgaaggataatttattcatttcttcaaccagtattacgtttagcatagtaaacaagacaaggtcaatcccttacagaacttatatcctagtaagagagacaagtaaaagaaaataaataaaaataattacaaggtacataattgttttgaagaaaacaagagtctgagatagaggataatggagaggaggcagtctttctagataagatggtcagaaaaggcttgcctgcatcctctgaggagttgacatctaaactaaaacctgtaggttaaggaagaacagggcatgaaccatgcaggcagaagattcattaactctgtaggccactgaggctggaaaaagtatggcctgtttgaggatctgaaataaagtgtagctgtagggtcctgagcaaaagagggagtaatagattatgaagttggaggggaggcaggggccagccatatgaggcccatgtagccactcatgagttggattttattctcagtgcaataggaaagaaacctaagggtgaggtgattggattcatttctgtgtttttaattatgtttgttgctgtgagatgatggcagcctggaccaaggtagatggagatggaaaaaagtggttgggtttgagttataccaatatttcagggacaaaattgataggactgctaaaggattggatgttggcaggaggcgggggtgagggaaaaggaaggatcagggatgattttgagcaaatggaagaatgatgataccattcctgagatg

SEQ ID NO: 101140 - DNA, 2862 bp, Homo sapiens
cctgtgtcagtcttggttaattgttccagggaaccttgctaacagaaacttgctcttgccttggctcttcagtagatgacctggctgtaaagagattccctggacgagccagatcattcagtttcagcgagtccttgagctccacaacatctaccagatatagcagacaagcacccatggaggcaggtttcgggcctgaagcagatcagagggctttgcaaaagacagcatagagccatcttcctgcaactttacctctttccctcagatggggagccatgactgggttgcacctcaggatactgtaatttgactccataattgcttttgctcctgaaacctgggaatcaatggaaaggcagggaatgtgcctcttctgtggccagattctgttatttgcaattaaagcaagtttttaaaaaatgcaagaggcagttgttagtcttcagggcttggcaactgaaatagctatgtggcggatacggaaaacagaggacaatttgaggatcttgctggaataataaatgacagctaccatttgttgagcacctattatatatcaggcactgagctgggtaggctctaaacttcacaataaccctgtgacttaactactttatctccattttgtagttgaagaaataagttcagagagaaagattccttcccaaggtcatgcagctagtaaatgatagaatcaggattcatagcatcactatagggggtcaatatttacacaaaaaaggaaagtcacaagcctgtttaaaatgaagtgaccaccttttcttgcatagactaaataactcgaactggcatttttaggttggaaagacagctgaattagtagttaagtctgatagccaagtaagttttaaaaaccaaagcatccaggatgcacacccctgcaccatttgctgtgcgaattaatagttctgtctctctctctctttcttttttctttttattctttgagatggattttcgctcttgtcgcccaggctggagtacaatggcacgatcttggctcactgcaacctccgcctcccgggttcaagcgattcttctgctgggattacagcatatgccaccatgcccagattatttttttgtatttgtagtagagacggggtttcaccatgtcagtcaggctggtcttgaactcctgacctcaggtgatccacccgcctcagcctcccacactgctgggattacaggcatgagccaccgctcctggcctctctttcttttttaaacaaagaactttgcacttggccagagaggaggagaaagcccattttctcccttcctaagctagatccaaataaaagaaagttcagttttcccccataactattcttgggtcatgaactttgatctggagtttgttttgtttcaggaatgtgtgcacccagcttgctgatccaacaaagtctattgcttaccagtctagcttgatgaagccttttggccagaagtcaatttgttttggatcagagaaatttcctgacaaggtatatttgttttctagtgacagaaaggcaaaggaacaagtcctagttgttgttgttgttgttgaatactaaatttaagatatgtcagcttgctttcaatgagccttgggcttctgttattgcttgagcatttggaactcgagcttccagagaaatttgaggtcctcgcttgttctctgccttcaagaaacaatgacctgattctgtctttaaaaaaaaaaatctcagaattctttttttgtttgtgtttttttttttttttgagacagagtctcactctgttgcccaggctggagtgcagtggcgccatctcggctcactgcaacctccgcctcccaggttcaagcaattctcctgcctcagcctcccaggtagctgccactacaggtgctgcaccaccacgcccggctaatttttgtatttttagtagagacagggtttcaccatattagccaggtgggtcttgaactcctgaccttgtgatccacccgcctcggcctcccaaagtgctgggattacaggcgtgagccaccttgcctggccaaaaatctcagaattctttaagactgttttaattgctccatcagtaattttgaagcactttcctttttttttttttttcccctttttgtccctttccccaagccaccaattggatggatgaatgtttgacggggaagaggaagggtaggaggatgcatggatgagtggatgagtggatcgatggatgtattgataaatagatagaaccagtcatctgaagcaacttaagaattgtagccttgactccttgagactgtagatttcgatccaggaaacatttatttagcacctgccagatgccagaaatttataccatttaaaactcagtaagtcttttaaatatcaggaaggagagaagcgacatcatgatacatcctatgggtattaaaaagccaatagaatattatgaataattttatgctaataaatttaacaacttcaacatcataaacaaattccttgaaaaataaaaagtaccaaaattcattcaagaagaaatagataccagcctgagcaacatggcaaaatcccatctctacaaaacatcaaaaaaaaaaaaaattagtcgggcatggtggtgcacacctgtaatcccagcttgtcaggaggctgaagtgggaggatcacctgagcccagggaggtcaaggatgcagtgagccatggtctcaccactgcactctagcctgggtgacagaatgagaccccgtctcaaaaaaaaagaagaagtagataatctgaatagccctatatctatagaaacttaatagtgctgggagatataggtattattatcctcattttacagat

SEQ ID NO: 101141 - DNA, 1034 bp, Homo sapiens
gccgccgcctctggctgaccatggagaacccgggctactcgctgccgagcaagctcttcagctgcgtctccatcagcgtggtgctcgcctccatcgccgccatgtgcatccacagcctgcccgagtaccaggcccgcgaggcggcggccgccgtggctgcggtggccgcgggccgcagcccggaaggcgtgcgcgacgacccggtgctgcgacgcctcgagtacttctgcatcgcctggttcagcttcgaggtgtcgtcgcgcctcctgctggcgcccagtacgcgcaacttcttctgccacccgctcaacctcatcgacattgtgtctgtgctgcccttctatctcacgctgctggctggtgtggcactgggcgaccagggcggcaaggagttcggccacctgggcaaggtggtgcaggtgttccgcctcatgcgcatcttccgcgtactcaagttggcgcgccattccaccgggctgcgctcgctgggagccacgctcaaggtacggcctctgaggccaggttggagctggggtgggcgggtgtagccatccggcaggttagcaggtgaacttacaagcctgccgagtccaggcttaacgttcaactgagatgccgtcctttgtgccaggcacagggctgcacaccaggtgtacgtttcacatgcagtgtgactatcccaacagccctgtgaagaagggcttaccgttatctctttttcctggggagaaaactggggcatagctttgcttgtctttctttttcaaaacgaagaaaaaagacaaagatcacttttgatatatctatcaaacatcaaattatatatatcacaaagatgcgcaaagcaggatgctaactggctttctgctagagcctttcttctggcactatcagggggctctgataaccataggtcactcttaataggtaaagtctaggaatagccccaggagctaacacttactgagcactaaatctgtgccaatttcacatccattatcaatttagtccttaggagaacttcctcaggaaga

SEQ ID NO: 101142 - DNA, 3079 bp, Homo sapiens
cgcctgtaatcccagcactttgggaggccgagatgggcaaggtcaggagttcaagaccagcctggccaacatagtgaaaccctatctctactaaaaatacaaaaattagccgggcatggtggcacgtgcctataatcccagctactcaggaggctgaggcaggagaattgcttgaacctgggaggtggaggttgcagtaagccgagatcacgccactgcactcagctcgggcaacagagtgagacttcgtctcaaaaagaaaaaggagtggccttaccactagccctgtggtcttcagtgacttaaaatgccaacgacccacttcttataactggggtcatgaggtcaacttaaataaggcatcagcttgcctggcacaggcagtggtgatggtgaggatgtctggttgtaagagaactgacagtgggggaaagaggggttcatccttaggtcctgatgaggagctctcacccccgcctcttctctctcctcctctccagctctgattgtgggtggcatcgtgggcatcctctttgccgtcttcctgatcctactgctcatgtaccgtatgaagaagaaggatgaaggcagctatgacctgggcaagaaacccatctacaagaaagcccccaccaatgagttctacgcgtgaagcttgcttgtgggcactggcttggactttagcggggagggaagccaggggattttgaagggtggacattagggtagggtgaggtcaacctaatactgacttgtcagtatctccagctctgattacctttgaagtgttcagaagagacattgtcttctactgttctgccaggttcttcttgagctttgggcctcagttgccctggcagaaaaatggattcaacttggcctttctgaaggcaagactgggattggatcacttcttaaacttccagttaagaatctaggtccgccctcaagcccatactgaccatgcctcatccagagctcctctgaagccagggggctaacggatgttgtgtggagtcctggctggaggtcctcccccagtggccttcctcccttcctttcacagccggtctctctgccaggaaatgggggaaggaactagaaccacctgcaccttgagatgtttctgtaaatgggtacttgtgatcacactacgggaatctctgtggtatatacctggggccattctaggctctttcaagtgacttttggaaatcaaccttttttatttgggggggaggatggggaaaagagctgagagtttatgctgaaatggatttatagaatatttgtaaatctatttttagtgtttgttcgtttttttaactgttcattcctttgtgcagagtgtatatctctgcctgggcaagagtgtggaggtgccgaggtgtcttcattctctcgcacatttccacagcacctgctaagtttgtatttaatggtttttgtttttgtttttgtttgtttcttgaaaatgagagaagagccggagagatgatttttattaattttttttttttttttttttttttactatttatagctttagatagggcctcccttcccctcttctttctttgttctctttcattaaaccccttccccagttttttttttatactttaaaccccgctcctcatggccttggccctttctgaagctgcttcctcttataaaatagcttttgccgaaacatagtttttttttagcagatcccaaaatataatgaaggggatggtgggatatttgtgtctgtgttcttataatatattattattcttccttggttctagaaaaatagataaatatatttttttcaggaaatagtgtggtgtttccagtttgatgttgctgggtggttgagtgagtgaattttcatgtggctgggtgggtttttgcctttttctcttgccctgttcctggtgccttctgatggggctggaatagttgaggtggatggttctaccctttctgccttctgtttgggacccagctggtgttctttggtttgctttcttcaggctctagggctgtgctatccaatacagtaaccacatgcggctgtttaaagttaagccaattaaaatcacataagattaaaaattccttcctcagttgcactaaccacgtttctagaggcgtcactgtatgtagttcatggctactgtactgacagcgagagcatgtccatctgttggacagcactattctagagaactaaactggcttaacgagtcacagcctcagctgtgctgggacgacccttgtctccctgggtaggggggggggaatgggggagggctgatgaggccccagctggggcctgttgtctgggaccctccctctcctgagaggggaggcctggtggcttagcctgggcaggtcgtgtctcctcctgaccccagtggctgcggtgaggggaaccaccctcccttgctgcaccagtggccattagctcccgtcaccactgcaacccagggtcccagctggctgggtcctcttctgcccccagtgcccttccccttgggctgtgttggagtgagcacctcctctgtaggcacctctcacactgttgtctgttactgattttttttgataaaaagataataaaacctggtactttctaaactgcttgcctctgtcattttcgttcataacaagtcatcctttttgggctctgtatccccttgatctcagtggagcatgaagaaactccccggaccaaatcccctacggggtgccagacatgccgggggtgggcagagggtgggggcagagaggtaagaaggcaggaaggggcctagagaagagggaagacttcagaacatgcaccctgatggcctatgcagcatatcacccctacttcaaggttttgtttaggtggcactgtgtttaaatagcaaacacaaaaatctttgcgtcagttgccatccatagaaatcaggaggtttctcataaaaatccagatttctcacttttcttgggaaaaagaaataaaaaaaattggcaactgtcagcctgcatggcaacaagagagctgctgagcggcaggcacccatctagatgtgggctctccgca

SEQ ID NO: 101143 - DNA, 1186 bp, Homo sapiens
agtccatagagtaaagtgaaagcaagtttattaagacagtaaaggaataaaagaatggctacttcataggcagaggagctgcagcaagcatcttttacacgtagtctctgaagagctccttacaatagagtttccagggcaaaactgccaccttaaagggcaagcgatgtctaaggttttgccaaattgcttccagagtggttgctctagaataaccagtggccagcagtgcaggagagcacctgcttccctgttcccttgggtgcattcatttttcatttgggacagatatactaaaaaagttggggataaggattttggcagcataattgtggagacagtgttgccaattcctgctccaggaccatatggttcagctgaatatggcagaaccagattctctgcctggctgaatgtccctgtcccctgccctgagtctcttccaaaatacgctgagtgtctcttctcctttccgcccatccaggtgcctctagataaccatatccctgagagggcagggtctgggagccaagtccccaccgaacccaagaaactagaggagaatgaggttatccccaagagaatctcacccgttgaagagagtgaggatgtgtccaacaaggtgtcaatgtccagcactgtgcagggcagcaacatctttgagagaacggaggtcctggcaggtaagtccccatgctgcttataagatgccttgaaggtggaatggggctcagcgggggagagcacctgcaggcagggatgcctccagccatgaggctccttggtgccccttccttttgcctattcaggttgccctagaacattgaaagactacaccttccttatggggtggctctgactgtgcagcctggtggagggagaggaaaaagcacctatcaaagtcttctggaaaataggcattgagtcattcttctgccttaagtctttctcatttattttgcaaaggactttcactgtataagtttggcatctgggagttaatcattaaaagttaatttcccttgtaagtctggaggctccttcgaattgggttagcttcccctccccctactctatcacttggcagccttgtgaccttggctgagaagctttcgaacttgatgagcctcagtttccttatctgtaaaatgggtacagtgataccttctggggttgatataatgag

SEQ ID NO: 101144 - DNA, 1001 bp, Homo sapiens
tttaagcattgtaatggaaagatgttaatgatatattgttacgagcccattattgggaaaaatgtatttaggaatacgtatggagggaatttatttatttatttttttgagacggagtcttgttctgtcgcccaggctggagtgcggtggtaccatcttggcccactgcaacctctgccaaccgggttcaagtgattctcctgcctcagcctcccaagtagctgggattacaggcgcgtgccatcacccgtggataatttttgtattttcagcagagacggggtttcactatgttggccaggctggtctcgatctcctgacctcaagtgatctgcccgccttggcctcccaaaatgctgggattacaggcgtgagccaccgcgcctggccttgaaattctacatttctaaccagctctcaggtgttgctattggtttttggatccacactttgcagagcaagggtttagagctgatgaagcctctgcccagctgccagctcacacattcctgtgaaagagccagggggtgggtctgaggagccccattttacagatgagatgactgaagtaggggtggggaagctcgcttgctggacattgagcatttggaagctggttgtaaggtggagctcccaccagtcctggctgaaggggtcattttcctggggtaatggacctcactcacacagctattctgaccttacagatgacttggaagactccatgatcggccctgaagttgtccatcccttggtaagtagctacatgcttctgcctcttccactttgctcctctatagcagacctattgggagaggcagaaaatacagcccccataggcagaataagtgaggggtcttaccccactatgcgggaaggctttttaaaaatctggccctggggtgggcatggtggctcaggcctgtaatcccagcactttgggaggcttgaggtcaggagttcaagaccagcctgggcaacacgatgaaacctgtctctac

SEQ ID NO: 101145 - DNA, 1051 bp, Homo sapiens
gcaacggcgtgatcctggcttattgcaacctccgcctcccgggttcaagcaattctcctgtctcagcctcccgagtagctgggactacaggcgtaagccaccacgcccagctgatttttgtatttttagtagagacggggtttcaccatgttggccaggctggtcttgaactcctgacctcaagtgatctgcctgcctccgcctcccaaagtgttgggattacaggtgtgagccactgtgcccagcctcatgtactatttttatttgcccagaatggaaagagacttgcctaaggacacgcggtgagttagaggtagagtgggatccaggacgcaggtctccaggccctggcctggtctctttctagtttctgaatgcccacttcactagcttttgggcatcagctgtcatggagcactggggatgttggctgatgtgtctcctttctttatcttagatccgagagactgaggtcatcgacccccaggacctcctagaaggccgatacttctccggagccctaccagacgatgaggatgtagtggggcccgggcaggaatctgatgactttgagctgtctggctctggagatctgggtacggaaggtgtgctgggcaggcgtaggcacaaagctggagggagtggtggcttcaccagccaggagggtgaccatgccttgagacttggatttttgtgggacttttcctagagtgcccttcttccttctcaaaaaaaggggaaacaaaagtaatggattaacctattccatccctgagagcccctggggacaagctgtttgctgctttgaagtcattggtagctctgggttttctgagctccagcctgaacgtgtcctcataagctcttctcttttctgcagggcatggtgggggtggggtgagggtaggatgggtggcaggacagggtgggagtggggaaggaggacccatagagtgttttcctttttttgaaaggaaaagttccagcctgggccacatggtgagaacttgtctctacaaaaacacaaaaattagctggatgtggtggcatg

SEQ ID NO: 101146 - DNA, 1029 bp, Homo sapiens
cagacaccctcctttgtcaatggcagtctcagctgagtgaaggactgcctggggtgtccgaaacagagacctgacctctttctatcctgagttatgtagcgaacgctctgtgtgaccttgggcaagtccctgccctgttccgggctcagattcaagttgtgtgaaacgggaggacaggagctccttgggtcctggcattctgtgattctaagcagacccccagctcctgcagttatggcgtctggagaagatgggaatgtctttcagcgggaggggcatggtgtattgaacttaatgaaaaaccccaactctcctggcaaatactaggcactttagtgtttgaattaattagtagaataatgaactttgctcagagctgctgttctctgggcaaacagaagcctgagcccagaagctggaggaagggtgatgggcatccaaatgtttcctgtgctcttgagggtacattgttcccactcggtggagctacaggatgggagcagggtaactgatgtactgtagggctgcccgggacctttgacactttcttttggcaagcggtttggtgggagtggacctgagactctgtcctgatcagctgtgtctccacagggtagtggctgagtgatgattatgggtactggagtggatggtctgtgagggtagggattgtgcctctcggtgtctgcatggtgctggcagcagagtagatctgtgggagatgtttggaaggcaagactgaatccaggagtacactcctgagtcatcaggtctgggcagcgccctgacctgaggctgtcttagggtgtgcgtgaggcagccctgtctgtcccggcccagactgactcagctgggaaaagtatcctggactgggcaagaccagaaccaggagcccactccctgtcctgtgtgaatcagctgccactgcatcacagagccctggagtgtagcatcccagggccctgtgcatggagactcctggctctgaagtcaggcagccctgcgtatgcaatcctcgctcttccatct

SEQ ID NO: 101147 - DNA, 1076 bp, Homo sapiens
cttcagactagactagtttcttttttggaaactgagtataaaaatgaagggttaaggatgaacaggtgcccacaaagagggctgaactgggaataaatcttggtttcagccttggttttgctgctgacttggctgcaagatcttcacgccccactttcgctcatagccttcatttctctaatgtaaaacggaggtaattcctaacagccagtgggcatgctaatcccatgggttgttttgaaatacctcttagcactttcacatactgaaagagaggctggatgcataaacaaccttccatggctcctgggggcagtgaggggtgggaaaaggtctctcagcctgagacaagtctcctgatggaactacagcccctgttgaggactttgacctggtcaacagctggccaaagtgtaccattctttctttctcccggctagattgacccccctacttaacagggctcccttggagcctggggcaggctggtgaccccgtgtacatatgtgttcatgcgtgtgtttatgtgtttgtggttaaatgtccaggtcagtgaagcctgggttctggcccagtgtggctacttcctgcttgtgtggccttggacaagtgactttacttttctgagcccttgtttccatctctgcaaaaagggactattaaaaggacctagacaggctgtgtgcttggttaaggcctgtcacttgggttcttgggggatttgccacaggagatggaggtaggagcacagggaccctgcccttaggtataggcacttgggcagccatgaggagccttcctcctgctctgccaaaccaaagccacaggcacgggctatgtgcgggggcttgaattccagcaccagcagcccggcagctcctgattcccgagtcatgaagtcatctctgagcagcacttaacctctctggctttccacccccacgggtgccaagcgttcagcattctccccactccccgggagagagtgattcctggccactgccttccttgtggcctgaccccgctcccttccgggaatccagcattctccctctgtgggggtggaagagggtgca

SEQ ID NO: 101148 - DNA, 1529 bp, Homo sapiens
atccttcctccctcccccacttcccagccttgttcttgcctcctgcttcccccaacccccaccttcagcccagaccttcctattcagcggcccccaccccttcaggctgcatctcacccctccccctgtcctccaggcccgggagctcggctgctccagttttctctggcacagtagaagaggctgctggtcaggtgacacctggggtaatggaaaggggaggcagggagaggctggtatgtgtggaaacagtgacttggtgaagcccagcagtcagtggccaggcctgcggggactggcggtgtcactctagcctctgggcgtgggggcagatgtggcacatggctggcccggctacccagagtggggatactccttgccttggagaagccctgccggagccgtctgtgggacagactgacctggtctggaggatggcttccttgggggtcggtgagggaggctgggaagaggcaggaagccagcacccagggctgatctaatcagctgagataaggctgcagcgtgggctctctactctgctctgagaacacaggaggtttgtttacatcccgagagcctccctagccctcggatccagcagggatttcggatctgctgcctagattacaagctccaacttcaatgcacctctgtctctgaggccctgagggagccagccccctcctggctgtctccaccggtaatcggagcaatgcccagcttggttactgggctgggacagagggaggcttgtctctttgagacctgtcttttacagattggaaaactgaggctcagagaagggaattgtccacgatcatccagggagttagtaacaagggtgctgggtcagctcctggcagggagacatccagaggctcctgaacccttcccccatttctagctggcaccctaggatcctggagttcttgctgtgggaatgggctgccctgaggcttggtgaaaagctggttgcaggcagtgccaggcctggctctctcctgagtgattgtgttcagagtaacccgaccttgaaggcgacatttgaaccctcactccacccccacccccagacctggtttaaccattcaggcaccagagcaccagaccatggattggtgtgtagtttctttttaccttctagatttttatttatttattttgtccctggggacccaggtccccaagtagaatttcaggtgtttctggtcactgtcatttgcaccttcggggaaaataaaaatggtctttacctctgtctgcttaggacaggtggtcaaagctgtgtgaccttgggcaggtctctgactatctctgtatctttttttcacagtctgaagggacctgattggttgttgaaaagtctctgggctcagaagcaaaatgataacctattatagattatattcctttacagtttgcaaagcaccatctccctgtccccaggctagcttccttccagcaacagaactgcctctgcaagttttcccaggcctctgatcctttgagcactgatcccactggcc

SEQ ID NO: 101149 - DNA, 1489 bp, Homo sapiens
tagagtactttttatatgacagatctggtgcattttgtcctcacaaaaagacctgtcacatggggattctattatgcccacttcccaaatgtgagaggtaaaatggtactactttgggttagtagagggcatccaggaccccaggatctctgactagtagccctcccattgtgggtggtgttcccccgactgttccatcattccccttaccacccccatattttggaagggaacccaggctcagtacccagctgtcctctcctctgtttggctgggcttgctatactaaaccagttcttcctgtccagctgggagcattccctgatctgccttcctgccactccctctcaggccaattaaaggcagccttgttttgggagtcccctccacccaaaggtgttcctacccaggggcacagcctactgacttggccccgggcccaggcggttgtggggaagtgtcccccacctatcacctatcaagtgtactttagcttaaggacatttctggtcttctacagcgtcctcttcttgattacatgggagtaggggtgggggcggaagcctaggggcttctaggacccttgagtgaacagtgagagctcttgggacttcttgagcccagggagttatcaaacacccacgaaaatatttgggccatgatttggagggttccatgaggttggggggaggcctctttccccgctgggctgacatcccccaccttaaaatgaaaggtttgaacagggtagcctccagagtcctttccatctctcaatttgattaataacttaagtacctactattcaaaagaggtctctctcttgaaggaattaacttgagggaattaacatactccaccaaatgctgaatccctccctctctccccccgcacactgagggcaggaactctgctctatttgtttttgtgaaatacctgtcccctagtttgtactcaggaaatgcttgtatgaatgaataaattcgtgcatgtaactttattctaaatggttcattactgttatttattgctagtatgagtatctcccagtactgcgaggtaccattttctctatttttacaggaaattgatgctcggaacaatgcagtggcttcctaaggtcagaaccaggtccttctgatagggcaaggtgtctggtttgagtgtcctcagaatattccagatgaggaaatttgctgggtttgaaggtagataccttaggtcctacttctgcgttgctgggtgaccttgagcaaacatgccctgtctctgggtctcagtgtccccaactctaaaataaggaggctggaccattgccttccaagggtccttcctgcccagagagcccattgatgaggggaggggccctttgctggcctccttggtgaagagtctaaacaaatcccagtctcagaagagaagttggggtggcggggggacattcagctcctgccatccccagctcctagaaacagagggcttttccaag

SEQ ID NO: 101150 - DNA, 1026 bp, Homo sapiens
aaatggggttagccgcagtgatctctggggacctgcctggcagtgggtcaaataaataaagggagttggacctcccggagggtaggactaggggttgagtaggagccggcgggctcgggcagggcgggtcccttggggtttccaactccgcgggcgggcgcagtgccccgcaggcctcgcttccactggggaattccgggcggggtgcgggcggcggggcgggggcgggccggggcggggccggtaggccgcctataagatgggtggcgcgcccgcccggggccactcgccgcagcctgcgcgccttctccagtccgcggtgccatggcccccgcccgtctgttcgcgctgctgctgttcttcgtaggcggagtcgccgagtcggtgggtgcttggaggttcccgggctgggggcgaagcgggggcgcaggccggtgcctcctttgttcgtcggagcgtgggatgggggggggcagatcgggggtacgctacccccaaccggacaccgaggcccgggaaactttgttggaaactttgctccggggtcacgggccagcctccgggatggcttcacgcgccgtgcgcccctcgcctgttgctcttcccgcctccccgggcctcagccccgccgcgggctacgggctcgttagtgactaagccggtgtcaactcttcaactcccacaccctcgtcccttccctggtgaccctggggcaggcttggagcgctgaatcccctcctcgctctcggggcgcccagagcagacagctttaggatccgagatggccctgggggtcggggggctgcgtgtactcggaagggggagggttttagggttgtgcgaggccctctttcacacaccaaggagaactgagccctaacctcagttctggccccagctctgtcattgacttgtgacttagggcaaagtcctgcccttctgaatctcttcccaatactgcaccaagggtctgagggaatggggcaagaggggacactgcgttagggtttctagaaagttggggac

SEQ ID NO: 101151 - DNA, 1133 bp, Homo sapiens
cttgtacctggttcaggaggttcaggcagaggttgcacccactacgcctgcgcaacctcagccccgcccctccgctgctttccccggaaacgtttctttcctacgcagccgctcctgccgccgtggtcgctggagctttgcctctctaggccggcagcgcctctcctccatggtcctgtctgtcagcgctgttttgggagcccgccggtgaggccgggccacgctcagacacttcgatcgtcgagtctgtcactggtgagtagaccccagaggagctcgtgtacgggcgggggccgcgcaggcggaatgggctggatttcccctcactctgagaatgggtctgtctgccccgccttccccctgactcttggaatgggctcaccccttggttccagtccctcctcccgggcggggcgacgttgccatggagacaggccgctggctgaggcccggctcgtgtccctgcagggcatggcgggtcagttccgcagctacgtgtgggacccgctgctgatcctgtcgcagatcgtcctcatgcagaccgtgtattacggctcgctgggcctgtggctggcgctggtggacgggctagtgcgaagcagcccctcgctggaccagatgttcgacgccgaggtagggtccccggactggggcgggtggggtctcggcctccccgagtaggctttgtggtccatcactactgtgctgtagacgtggctgggtcaccttctttctttgtagccctgggaaagggatttcacctttctgagcctcagctgcctcatccataaaatggaatgacagcagaggctgattagtacaaagaaaagggcctggatgttaatacaataaacacgtctgtgttccaggcaactctgatacatttcctttctgatactctgggaaagtgacttgatttctctgagctaggttctcaggtgccacatcggagagaggggtggataaaagagcattcgtgcgggtacagtggaaactgcctggactttggggtcagacaggcgtccgtttaagatccacttactagctgtgtgacctggggcaaatgtcacctctgtgaacttgttttcctgtcttcaaaaccatgagactagttgcagagaggtcgtggactg

SEQ ID NO: 101152 - DNA, 1022 bp, Homo sapiens
cctgagttctagcctagggatcagcaaacctttcctttaagggtgaagtagtaaggattttaggtcacaattattcagctctgccattgtagcacagaaggctgctatagacaaatatataagtgaataggtgtggctgtgtttcaataaaaccttatgtacaggagcagatgccaggcctatggagccatagtcagctgaacgctgttctagactttactcttgttgtttattactttgggcaacttaacttgtctgagtttttacgtcctcctttgtaaaatgagaataatccctttccacctgctgtgagaaacaaatgaaatcccataatggatgtctatgaaagcacctattggaaataggctgccgtacagatgtagggaggtattatcttctgtgctctgggaagaatgcttgttccttaggaggcttgctgagatcctggggctctgccaagtcacttctccagtatatttccatttgtgattccccctcagatcctgggcttttccacccctccaggccggctctccatgatgtccttcatcctcaacgccctcacctggtgagtatcaccagttttgctatccagcttttgggctcttagtgctgggactaacttcctaagtttgaacatgagacaggctggcacttgtttctggggagtggtggagtaaagtgggtgacagaggccagttctgggaccagctgtataatgggcctccttccattgctgttttgacttacctggaaagctcttatgtcactatgtttgtgctgcctgcaagacaacttccatctcagataacttccctgatgtggagtgagctgagaaaggattcgaccgagaggcaggagaactgggttctgttcttggtttgtgtgccattggccaagttacttgccatgggcctcaggctcctcttttgtccatgagggtttggactcagtgatgtctaaggtcacacgtaatcattgcctgtctcttaagaggcagtttagcatagtggtcaaggtgt

SEQ ID NO: 101153 - DNA, 1031 bp, Homo sapiens
agttgaaaatcaggctattttatataaaaatccagatttctggcttctcttgaataatggaatgactgactgattccaggccaaccttctagcatgataagatttgcctagatgcaagtagctactgcccccctttagctagaacatgtatgcttcagggtgtcatgatccccaccaattcctaggatcccctagtgacaattgccatcgatcatcaagctcatactcagtcagcttcactcttgacattacccgccaggttcttctaggcgtctggtatcataacccttgcttcacacttatctcgtcacttctgaccactatgctgccgtcctaattgtccctaccctcccaaataacctaaggccaggacaacccagtgacaactcactgctgtcctctccccacagtgccctgggcttgctgtacttcatccggcgaggaaagcagtgtctggatttcactgtcactgtccatttctttcacctcctgggctgctggttctacagctcccgtttcccctcggcgctgacctggtggctggtccaagccgtgtgcattgcactcatggctgtcatcggggagtacctgtgcatgcggacggagctcaaggagatacccctcaactcagcccctaaatccaatgtctagaatcaggccctttggacatcctgctgacacttgggccccttaacaccttgggctgctcagaccctccagatgaggtccagcccagatctgagaggaaccctggaaatgtgaagtctctgttggtttgggagagatagtgagggcctgtcaaagaaggcaggtagcagtcagcatgacagctgcaagaatgacctctgtctgttgaagccttggtatctgagaggtcaggaaggggacctctttgagggtaataacagaattggaaccatgccactcttgagccacaatacctgtcaccagcctgttgttttaagagagaaaaaaaatcaaggatatctgattggagcaaaccacttctttagtcatctgtcttacccccc

SEQ ID NO: 101154 - DNA, 1154 bp, Homo sapiens
tcattacccaggctggaatgcagtggcccaatctcagcttactgcaacctctgcttcctgggttcaagcaatgctcatacttcagcctcccaagtagctggaattacaggttggcaccatcatgcttggctaatttttgtatttttcatagagacggggtttcatcatgttggccaggctggtctcgaactcttggcctctcaagtgatccacccgcctcagcctcccaaagtgctgggattacaggcatgagccactgtgcccagcattggccagagattttcagatgatcttaggaatgtgggaaatctatttccaaaggataaaggaaggtacctagataagagagtactagcccactactgagttggcatatctcttaactctccaggtgtctgaagttgacctccctttttcccacccaccacctgaactctggccattcagagagaaaagtggagactcctacatagctgatggtcagaatagtttataacccttaaaggaggacaggaaaggaaaaagggatgtctggctcagagggtacttctaacccctcgctctaggcagccctgtccatatcagtgccaaatgagagccacgatggcagccagcagacatcagggggtacaatgggaagctccaggactcccagcatcctggagggtacacagctcaaacagtctcccctggacaggaatccccttggactccttcctcagcaactcccaggtcagagtagcttccttctgccagccccagaaggcagtcagtgcacaggtatgcaacacctccttgtaccggcagcccagggaccacggagtctcagaggtagggccctggggacctagggcagaggagtagggatggaatcaaggtacaagagaactcctctgtggagagattaaaaaccactgtcttaaggttttctgttgtaaagtaataaagggtggtagaaatagcattgaggcaggagggagtagagggagctgagggttttaatccctgccctgccgctacctgggcaagtcacagtcataggtccaattctggaaggctttagagagctgcagtggagtgcaaagtcctggagtcccattactagctgtgagatcttgggtaagctatgttacctcccttacctagatttcctc

SEQ ID NO: 101155 - DNA, 1040 bp, Homo sapiens
agacaattattaggctaccgtcccccctatccattttacagaacagggacatttttcttctgagcctgtgttttcaaatgttgggggataggcttgccagtcctctaggtaccactaccaagtattgagctcctatctggcatgtactgcaaagtgatttatgtgtattcttactcagtccaataaggtaagcactactatttcccccattttgcagacaaagaaacagaggattgggagtaaacaactttttccccattacaaagttggtaagaagctaggcctgtctgcctcatctgcttttcacgttccagttatgtttatgtgtgatccagacaattgtgagacggacagtcttagggatctaaatgccatattagcaaaaggttgtgaatgtaaacgtacgtttggcttgttaacaagcagctagttccataaaggtgagtagttaggtagctgctgataagtgagaaatggagccgggactgactggccacagggctttattatgatggccgtggtgtggcgtgggaaaaggccaaacatttgttcaatgccccacaaactggcttctcctacatcaagcttgatttgcttaaacccccctgaaacagacattagtatcactattttataaacatgaaataggctcagagaggtcatgtgacttctaaaaagtcactcaatataaaatcagattcaaacacttcaattttttcccagttaactgttaagcagccatttctagggtggcctcctccccaaatctgtgttactgggcccagaggaggagctttaggttgaaatggttaaacaaagagagggtggtagtggggagaccctggttgtggaattgtgggaggcaggtggccagaggcctaagtgccggggcaggtgggatgaggtggaaggatgtactgctgggattccctcactcccagacctgccccttgctgccctggccatgctgggtccccgccttcgtatacagccctcccatatattcagtggcgttcccagtgggcaactggggcccaact

SEQ ID NO: 101156 - DNA, 1041 bp, Homo sapiens
actccagcctgggcgacagagtgaggcactggaggaatcctcctgaactcctccatgtgcctcttcatttggctgagcatggtttgaccaatcctaggctgggagttttgtcatcttggtctggggacagaactgggagaccattttaactctcctgacctcccttcacccttcaccttttccttttctcccatgctggaaagcccctttccttggcatggtggattctttgttaaggtcccctctagggactcacccccagggtctagtcccaagtctgaccttggaaaccctgctgttcttgggcctcttctttgctgatggactcatgctggggctgtgagacctcagagatgaatggagcaacaccagtgccaggcaccaaccctgttcctctcagttcagccagcactcaggctgggcatcagatggtggtgctggctctgtaccacctgcagctgtgacatcactgaaatgtgacagtagcagggctgggtctccaaggagtgtatgtggcagaggtgaggggtagagggtgagaaagaaatatagacaataggcgacagacagctgtgtgcattgtcacaacctccctgtggggtaagaggattatcccctctttttaaatgaggaagccagggttcaaagaggttgaataatctactcaaggccacactagatctagcccagctagatcatagtgggctggaaacctaaccaaggtctgatagtcaacccatgaaaccagggattcccaaaccatgctcatccattcagtcatgtcgcctgttttgactgggcgcctgctacatgccaggtgctttttcttttctttctctttttttgttttttgttttttgagacagagtctcactctgtcgccaggctggagtgcagtggtgagatcttggctccctgcaacctccgcctcctgggttcaagcgattttcctgcctcagcctcccaagtagctgagactacaggcacccgccaccacgtccggctaatttttgtatttttagtagagatggggtttcacca

SEQ ID NO: 101157 - DNA, 2385 bp, Homo sapiens
catctcccaggagggacctagtaagatgcttggatggtcagaaccgtgactgcacagaggagactgtgcttaaggagggcaggaaaggcttcgtggaggggaggtaagcactggagccggatcatgaaggtaggcagaaagaagttagcaaaggcttgcaaggaaggaagaatcacctgagcagagacccatggggatgcagagatgtccagaggagagtgaggaagaaggggctgagtaggatgagacccagcaagtgggctggctgggggcagcaatgttccagctccatcaactggcccgtctaatagttaagaatacagcctcctcctatcataggtttagcagccagctgtggactttgaaagagggagcagaggtagccccaggacagtgagtggatttgtgtctctatccagtgtggataaatcttggaaggagctcagtaatgtcctctcagggatcttctgcgcctctctcaacttcatcgactccaccaacacagtcactcccactgcctccttcaaacccctgggtctggccaatggtgagataacccctacagccctttccttcttcctcttacctcctgcccaaacctttgcctccttttccctcagtttcctgcttcctcagcctgggctagatcctaagtcccctgtgtgtgcaggcccccaatactgtgccatctctgcatgccttttcccaaggagagaagggagtcctactcccagttgggactgtccagactgtggtgctagaggtggtgtggggagcaggagggtcattcccatctctggaatgtggatcccgaggggtcagagcccaaggcccaccccagacagacctctgtctccctcagacactgaccactactttctgcgctatgctgtgctgccgcgggaggtggtctgcaccgaaaacctcaccccctggaagaagctcttgccctgtagttccaaggtgaggccgcagagcctggcagccgggggcggggggtgtatagagaacctgcgccccatgccaagtgctccatacagggcttctcttatctctttccatctcctccaggcaggcctctctgtgctgctgaaggcagatcgcttgttccacaccagctaccactcccaggcagtgcatatccgccctgtttgcagagtaagtcatggggagtagaggaagctgccatccaggggctcagagaaggtacatgtaaagcatgtggtcagtgtctggctcaggctgagtgagtactgagtggtagatgtgatgacggttattcagggcattggccaagcaccaagaaaacagtggttgcctagcaagcactgaataaatatttgtcatggaaaatagtggttcagaacaatagctatgcgggtgcaattgctagctcagtcacttgccagctggcgtaaccttgggtgaatcatttcattcccctgagcttggtttcccaccctgccacatgacattgatagtagaatccactcctagggttgttgtgatagtttatcaaactgatgcacatacagctgtcagcacggggtctggcacgaggtcaagtgctcaggagtgggtggtagcaaatcgatggatgtgaagatacatagatgagggattgagtctgagtaggagtctttttgggggctgtgtggtgagagtgataccccctcactgctgccatctggcccttgtgatagaatgcacgctgtactagcatctcctgggagctgaggcagaccctgtcagttgtatttgatgccttcatcacggggcagggaaagaaaggtaagttaccttggcaactcatctgtacccacccatgccagccctgccttatctatgtggactaggcctaggcctggcccctgctcagccctgcgctctgtttctcagactggtccctcttccggatgttctcccgaaccctcacggagccctgccccctggcttcagagagccgagtctatgtggacatcaccacctacaaccaggtaacaaggtctccagccacacacacaaacacaccgctggtccccaggaccagcctaccctctctgcttgcttcttagccctgcctttgtgtccccaggacaacgagacattagaggtgcacccacccccgaccactacatatcaggacgtcatcctaggcactcggaagacctatgccatctatgacttgcttgacaccgccatgatcaacaactctcgaaacctcaacatccagctcaagtggaagagacccccagagaatggtgagtgggtggttggttggactgctgggttgcaacggctacagagaaaagactcacaatcccacgtctttgccgttagatgattgggttgtatttagaccagatttccagagtcatatgctgc

SEQ ID NO: 101158 - DNA, 1549 bp, Homo sapiens
attggatgagatgatgtgaaaaatggagttagttcatgcatttgcttaatcaaccaaatacttttgaattcatactaagtgccaggcatagagtgttgaataagacagaggacactgcactcaagaaatataagtctactagctagggcaggtgtcagttaattaattacagttgtgttcagttcccttaccaagggaaagagcagaatatcctgagaggacctggattgggttcgaagggggcacggtgttcgtcacgtaagcacttcaatactagcaacctattgtcatcatcgcttgttggctggggaagacagggatgattccagaacccagattgcccagtttcagtggcagggctgttccccatctactcactggcttgggactctgaacatggcctgggcaggtggggtggggagtgattcttacctttggcagctgttaactgttgatatttctttacacagaggcccccccagtgcccttcctgcatgcccagcggtacgtgagtggctatgggctgcagaagggggagctgagcacactgctgtacaacacccacccataccgggccttcccggtgctgctgctggacaccgtaccctggtatctgcggctgtatgtgcacaccctcaccatcacctccaagggcaaggagaacaaaccaagtgaggacctgagtcctgaaccaggcccccagcccgccctctcatgtcctctccaggtcccccaaactctcatttcccagggtagttcctgaagtacctctgaaaagctacacaggcataaagagtaaggaatagtttctcaaaactggaacgggagcctcactgtgccaggttcagaagtaatttataaaacagcaataattaaaacacataatactggtgattcttaataggactgtacaaggacagtagcttcctttttcacttacttttgcctcctttctggagcattgggttttgtgatgattcatagactctttaaggtagggaaagggtttggcaacgttaggcttttgaagctaggaagatagcagagctggagtagatggtgttttgcttccttgggaggggtaaagaggtacagttaattaaatttttttatttctatttttattaaaatttatttttattttctattatttttctaaggagaagataatattagtgcttcctattaggtgccaggcatagcactaaagcacttgcctttctttggtgtagggggagactagtagtaaagtaaaagacctctgaggaagaggttgtaccatatcccaaacggccaaacttaaaaacctttcagtactttagttgattcctatattttcaaacatacggtgaatagtttcacttattttcagcaccattatttgtaccaccttcaaaatctctatttcagacatcctaactgcatattctataggtttttctgttattattcttttaaatcttctcctttggaaaatttcaaacccaaacccaaacagaatagtgtaataatcccctgtacacaccctgcagccttttttttttttttt

SEQ ID NO: 101159 - DNA, 1015 bp, Homo sapiens
tcctaccctatgcctgcaaccccctccacaaaaaacaaaaaaccctacctcctcccacctggccggaaatttcttctcctgatctgctccccctgtcctccccatccccatctgattgtgattcccagaactccccgggttgtttgggagtgtttctgaaagcataatccatggccatggaaatgaatcatcctacttcttgggggcattgagagtcagtccacatcagcaagggtagagtggagaggtgggagggctctgggtggtgggtctctaactgtagtgtgcatcagagtcactgggggcacttgtgaaaataatgtatgttcctggggtccagatcctactaattcagttggtctgggtgtggcccagactttgactttttagcaggcttctcaggagctcctgctgtgctctgtcctcagaccacccccaggctttgaagccaggctcattggattgaagcccgccccgcccacctcccttgctggttacataaccctggatttctgtaaaacaagcctttaggcggttgcctcccactgccctcatcttctgtcttttcctctggcacacttggcatcaactgtgtgttatttgcagttccccccacctcctaccccactcagttctcccatcatagtggtttggcctagaatgccctattccaccaaccatgcacacctctcaactgcctggttccctcataaaaccagatgaggctggccgggcacggtgtctcatgcctgtaatcccagcactttgggaagccaaggtgggcagatcacaaggtcaagagatcgagaccatcctggccaacatggtgaaaccccgtctctactaaaaatacaaaaaaaaattagctgggcatagtggcgcgcgcctgtagtcccagctactcggtaggctgaggcaggagaatcgcttgaacctgggaggcagaggttgcagtgagccaagattgcgccactgtactccagcctggtgacagagtgagactctgtctcaaaca

SEQ ID NO: 101160 - DNA, 1741 bp, Homo sapiens
atgtgctctgtatcactaccctagccctccatcaagagggatctgccctctcatctggctgaccccaaatcgaaccctttaacccgcatgctctactgcctccctgcgggccctgccttatcctcctcaaccgcccactggggacactctggagaaacctcggagtcttggaatagaaacccaggagccctgagccttggccctcaggccccaggagggaggtcaggagggaggcgtggacaagggtccggccgtagctggtcccgtcctggaagctgcttaagttcctggttcccaccggggccaagagtgatacctgatcctgggggattgtgaaatgacctcatgtggcagcccgcccgcggtgcccgcaaagccctccaccctccccttccccgctcggctccacccctaccccacgccccctcccgcgcgcgcggttaaatccccgcacctgagcatcggctcacacctgcaccccgcccgggcatagcaccatgcctgcttgtcgcctaggcccgctagccgccgccctcctcctcagcctgctgctgttcggcttcaccctagtctcaggtgagtggggcggggagaggcccggcgcctagaggggccgagccacgagcgccaggatggagccaggcggaggcgtagcctctggaggctggggaagtgggaattccgggggcggaagtggcggggacccttggagcctagggtgtggggtccaatgtgctggaggtggagagaccactgatggctgcaatttgggaggattctgtgctgaacgcggacactccgtggctgcagtgggctgggggtgggggctgctctgcctcgacctcggaagctccgagacgctcagctgtgcggcgtcccctagggctgagatctgagggccccgacgccaagggttagggagctctcgtactcccaggggtcagggactcctggtctggaagaaggagtctctgggggctgtaaggggactcctagggccagagactgagaattccttggggttaaggtttggagcaggaggtgggcatcctctggggctggcgctacgccccaccctcgactgtcccgggcctcccctcccaggcacaggagcagagaagactggcgtgtgccccgagctccaggctgaccagaactgcacgcaagagtgcgtctcggacagcgaatgcgccgacaacctcaagtgctgcagcgcgggctgtgccaccttctgctctctgcccaatggtaaccccacggcggccgagcgggaacggggcggggccgcgctgggctgggaggaggtgggagggcccgggttccgggaacaggggcgcccccggacccggggacccccgggaaagtcaaggcggttgaaaccagatccgtcagtcctctccctcgcacggcccaggggtagacaaaggcgtcgttgaaacgcagccaagggggggtccccacccctagctgggattcgagtctctggtgcatgacgggcttccgggcacgcacagccgggacattgttccccgcggcctggggacccggggccgcagtttccttctcgaaccggccgaagcctgccctgcgggaaagcccggagcctggggcgctcacctctcctcttggagtccctccctgggggcctcccccagccctggggaaagactgggagagcctggcctggcaagattttccccaattcctctgtccaggcggaaaggaactttacagatttagg

SEQ ID NO: 101161 - DNA, 1140 bp, Homo sapiens
ccaaggtcacaccgccatcccatggctgctggagtcatagtgagggttcagcttttgcctttcaggccaactggctgagtgattcgaagaaagtgaggaatcctccctggacactgtatcgcccttcgtcgtctttcagtcaatctcttccactctaaggattgagtgagcgcgagctggggactctctcaaaggtgcttgctggagctgcagtctccaccaggctatcagaacagggggtggcttaaacagcatggaatctcagctttccgttctccagaggaaaatgctgaggattagaggcagggataggacctggagagaaccaaggtactgtaatgatgttctttatccagaatacagcccctgtgacttttcctctctgttatttccttgaagatgccagcacaggctgggaaggtttgtaatacggtgacccaagacaccgatcagcagggaggtggtaagtggagggggactggcagcccaccaagggcagcttcaaggtcatgagtcccctcctctgggccagggagaggaggaccagaaggagagaggaagatttggagagaaagcaggcagcagccagatgagagaggtggaggagcaaaggagggagtctttgctgtttgatggatgaagaatttgttcccttatctcagatggacagactgaggcaggaagagggacaaggtcagatggcctcctgagccagggaggcagcctggaggtttgaatcctagttctgccattttctagttatgtgatcctgagcatgttgtttacctctctgagcctctgctctaagatgggaataattccaaactctataggattggcatgaggactaaatgaaataatgcatctaaagtgtctattagtgagaagatactccatacacagtggcttgttttgatcataaatggttccctatttatttccagggcagcccaatattacaggttcctactcctttcaagagaatgaatttctttgtattaggaagtcaagactgttggcaacttaacaacatttttttttgtatttatgctttaagttctggggtacacgtgcagaacgtgcaggtttgttacataggtatacatgtgccatggtggtttgcttcacccatcaacccgt

SEQ ID NO: 101162 - DNA, 1051 bp, Homo sapiens
cttggttcaaatgttagctctgacacttacctaaccttctcacctccctgagtcacagttatctcgcttataaaatgtagctaaataagatctaattgatcagataatcccattttaacctaaagaagaaggcatggcagaacttcctaatagtagaaggattcttggggagagaaatggccatgacccctcaggaaggccacagtggacatctgggaccacagtatacccaggtgcctgctagggatggtctgaccacagtatacccaggtacctgctagggatggtctgaaggagaagagtatgtctagaacctgtagaaaatgcaagcagagcccccagaaggtgaggctttgctgtgtgggtgtgtgggatggggtggggtcaaggagctggtctaggatttaagctgcaggtactcctgcctagtctaatggatattgttgttgatggtattgttataattttcttcctccagctccagccaccaccaggctgagcagtgaggagagaaagtttctgcctggccctgcatctggttccagcccacctgccctcccctttttcgggactctgtattccctcttgggctgaccacagcttctccctttcccaaccaataaagtaaccactttcagcacgttctgtctctgtctcccctgacttgggttgaggtgggtgggcaagtgttaagggtgtgaccagatcatccaggcatgaagtccagagaaggatcatctggtaggtgttagcattctcctggtggatccctgcatcaaccctatgaatctggtcattattcctccaggaggatggatgagaaaaacgaggctcagacaggtggtggggtgcttccaaagtcactcagattcattgctgggggtgctgataagcagcagcatgcaccaggtgccagacacggtgctgggaggtttgcttatgagatcctctgggtcctcaaaacaatccccagagcagttaacaacatacccctgtcatagacctggactccatgaggttacttgccagtggccacacagaaagatggcaa

SEQ ID NO: 101163 - DNA, 1096 bp, Homo sapiens
ccccttccttgcacaatttacaaaaattaactcaagatggattaaagacttaaattttaaacccaaaaccataaaaatcctgaaagacaacctaggcaatgccattcatgctattttcctactgctatgcaattaaaaacatatgcataaattaaaatttaaattatttactgtgaccatgagactccaggaatcaaattttttcttatgaattaatttttaaaatccatttgttatttcaatgatataataataatgaacatgtaaataaacacattgtaaaaattgagaaacacaattttattgataaatacaaatctataggaattcatcttttaatatgtaagtgtacagggacaaaaagttttaagtatgacatttggttctttgaacttctagtaagttgccaaatatcacatgatactcataatcaaaaattattttaaccctccctctcctaaagggagaaggatggcaggttgaagatgaaatccactgaagaggtaagacctgggtctttagcaccctgtgtgccaggccagaagtggccctgtgaaaggtcatctgcagaccccctgaaaatcaagcaggattggatttggaaattctcaataaaggaagagttaaaggctgatgtgactataaagagatgatgctaagtagctgatagatcctgtagttcaacttgatacctacatagaagctggattcatctgataccagagaagtaaaatttcaaggccaaaaccagatctgagtcttactgtttcagtctggtcctcttcagtgctgtaaattctagatatacaatggatgatgactgcatatttctttcatggactattttcagcatctggagacctcactatcctattatgtctttgtgtgaagacatgttgttttgtaattatcgagagtgtcacattgaactctctggttatgcatgggtcaccatctgctctcacatcttctgtgatcagcatggcagtggtgacttttgtggttcacctgctatctgtcctgcctgcaacagtacactttctggaaggctagatattgtccgcactgaattcaggaatataaagctatggtattg

SEQ ID NO: 101164 - DNA, 6717 bp, Homo sapiens
tgggttcaagcagttctctgccccagcctcccaagtagctgggattacaggcatccgccaccacgcccagctaattttttgtatttttagtagagacggggtttcaccgtgttagccaggatggtctcgatctcctgacctcgtgatccgcccacctcggcctcgcaaagtgctgggattacaggtgtgagccaccgcgcccgtcctgattttttgcactatttacacctcaatctgttgggcacccccacgattatatccgtaagagggggaataaagggaggaggtcaagcctgaaatgtgaatctaaatctggctgatcccaaagccctgctcataatcacttttcccttctgtatgaagctaggataaagacttattttatattcagtttccttcaggttgatgcacattaacaggactctgaccttgtcctctgttgtgctcccctagttcttccagaaggcagcactgaacgtgcgagacaatgttggggaggaggtggacgcagagcagctgatccaggaagcctgtcggagctgcctggagcaggtgagaccaaaggggacaagagatgcaggcacaaggtttagctctcgagcctctgataagaaatgcgatcttaagccggacgtggtggctcacacatgtaatcccagcactgtgggaggccaaggtgggcagatcactcaaggccaggagtttgagaccagcttgggcaacgtggctaaaccccatctctacaaacaatacgaaaattagctgggcatggtggtgcacgcctataatcctagctgcttgggagccataggcacgagaatcgcttgaacctgggagacagaggttgcggtgagccgagatggcaccactacactccagcctgggtgaaagagcaagattctgtctcaaaaacaaacaaaaaaagaaatgtgatcttgtcatcagtggtattttggggaatgcccagcaagccacatattgagataggcttgaggctgttgctgacagggaaaggaagggaagtagctactatatgtcaggtaccaggataaatgcattatttttttttatgtctcagaagaaactatgtacagaagatatcttttaattactattttatagatgaagaaattgtgacttagcaaactcatagaagcagagagtagaatggcagtagctggaggggagaagtggggggatgttaatcaaagggtacaaacttttagttataagatgaacaagttctgggcaatctgatgtacagcatgatgactatagtttatctctattgtttacttgaaatttgctaagaccatagatcttaagtgtccacacacaaaatggtagtggtggatgtgttgattgatttcattgtggtaatcatttcactatgtatatctatgtcaattcatcacattgtacaccttgaatatataccatttctgtttatcaattatacatcaatagagctagaaaaaaatttttaaaagcaaagcaaaaaaaaaaaaagaaatggcttaagacacataataattagaatagctaagatctgtctcacccctgcaggtgcgtggtggatcaagttatcatggccccatttggtatcatggggatgagcaccctgctgcctccctgcctctctggtgtggtcaggaagcatgacatcaggtctataaatgactgttcccaagatagtagagaacctgtttacatgtgtcagctgctgttattaggaggaattgttgccatcaccattttatagggagacatcaggaaaggtcgccaatagtcgctggctcactttctcacctcctattcattctcttcactttgttttcgcttcagtccccactacttcactggaacccctcttgtcggggtcgctagtaacttccgtgttgtcaaaccctctggtccctaactgtcctcaacttactcagcttctcagtgacatctgtcacaatggatcatttcgcgtttcttggaatgctcctctgttggctagagtgccttgactttgctccaacctcattgcctactcttctctctcaccccccgcctctaactgttggtgccttcccaagttcagtcctcaaaccccttctctttcatggctcactgttttcataggtgttttcatctagtcctgtggcttggaagccaattcagccgctcataattcacacatttatatctcagtccagagttacattcaccgttacccagttccaatccactcttctcacagcagccagactgatctccgtaaagatgaattagatcatgtcactccccattttaaaaacccttcagtgactttcctgttgcagggagaataaagtcttaatgccttaccatgatcctgctgggaaaactggctagccatatgtagaaagccgaaactggatcccttccttacaccttatacaaaaattaattcaagatggattaaagacttaaatgttagacctaaaaccataaaaaccctagaagaaaacctaggcaataccattcaggacataggcatgggcaaggacttcatgactaaaacaccaaaaggaatggcaacaaaagccaaaattgacaaatgggatctaattaaactaaagagcttctgcacagcaaaagaaatgaccatcagagtgaacaggcaacctacagaatgggagaaaatttttgcaatctactcatctgacaaagggctaatacccagaatctacaatgaactctaacaaatttacaagaaaaaaacaagcaaccccatcaacaagtggccaaaggacatgaacagacactcctcaaaagaagacatttatgcagccaaaagacacatgaaaaaatgctcatcatcactggccatcagagaaatgcaaatcaaaaccacaatgagataccatcttacaccagttagaatggtgatcattaaaaagtcaggaaacaacaggtgctggagaggatgtggagaaataggaacacttttacactgttggtgggaccgtaaactagttcaaccattgtggaagtcagtgtggcgattcctcagggatctagaactagaaataccatttgacccagccatcccattactgggtatatacccaaaggaatataaatcatgctgctataaagacacatgcacacatatgtttattgtggcactattcacaatagcaaagacttggaaccaacccaaatgtccaacaatgatagactggattaagaaaatgtggcacatatataccatggaatactatgcagccataaaaagtgatgagttcatgtcctttttagggacatggatgaagctggaaaccatcattctcagcaaactatcacaaggacaaaaaaccaaacaccgcatgttctcactcatgggtgggaattgaacaatgagaacacatggacacaggaaagggaacatcagacaccggggcctgtcgtggggttgggggaggggggagggatagcattaggagatatacctaatgttaaatgacgagttactgggtgcagcacaccaacaaggcacatgtatacatatgtaacaaacctgcatgttgtgcacatgtaccctaaaacttaaagtataatttaaaaaaaaatgccttaccatgacccacagagcctaccctcgactggcttctgcctgcttctttaacttcatttcatctcacctcttttttattgactatactctggctgttctgaactcctttctgctcctccagcacaagcttaggccatttcacttgctgttcttagtacctggggtactctacccttaactctataaagccggctccttcttttcttcagatcttagtttaaatatcagagaggtcttcccctcgcactcctacctctgctaaaatcttgagctttacaagagttgaggcctaatcttgttcaccactgtattcccagccctggaatatgactcttagtatgtgtacagagtttgctgaattattgagtaaatgaaggaacaaacaaatgataaatgaacaaacaagcttcctgctctaatagaacttaacagcctacttaagcagacaggtgtgaattagattaccaacaaatgtgtgcataattacacattgagacttgatcacccttcactggaaagggacaaagtttggaggagaagagcatgaatccaattatggattagcagctttgagccatccaagcatagacatggggcagactatttggtatataagtctagagctcagaggataaccttttgtctacagttgaattatggaatcgtggtttatagatgttaattgaagctgtgagaataggtgagagcagatagaatatgtaatgagagaggatagggaaaagaaccagattgagaaggaaaagccagcaaagaaggctaagaaagaacggccagagaagtagaaggaacacaggaagtgtggccacaggagcctgtagaaaagagtgtttccagaagggggagccctcagcactgtcaaatgccactggcagaggtcgggtgaacccaattctccacctgctgcaccatctcccctctgcccattccatccttttctttgtcaaatgagccaggtgttcccacctttgagcttctgcactcctccctgctgctgaaacacttctgcccagctttttttacagcctccttcacatctcaactcagaggccaccttctgagcaaggccttccctggccattcccgcaaagtagcccttcccctctggtggttctctgtcacatctgcctgggtttttttctttttttctcacagcatctatcatgatccacagttaccttgtttgtttctgtgcttattatccagatcacccacaaactataagctccacaagagcttgtcctagttactgctgtgtccacagcacttaggtcccaggtactcagtatttattaaaagaaaaacagcaggccaggcgcactggctcacgcctgtaatcccaacactttgggaggctgaggcgggcagatcacgaggtcagaagtgtgagactagcctagccaacgtgataaaaccccatctctactaaaaataccaaaaaaaaaaaaaaaaaaaattagctgggtgtggttgcacgcctgtaatcccagctactcaggaggcagaggcaggagaattgcttgaacctgggaggcggagattgcagacagccgagatcgcaccactgtactccagtctgggcaacagagcaagattccatgtcaaaaaaaaaaagaaaaaagaaaaacagcagcttactgaggagtatgtgttatactaatgtatttagtttgaaaaaacatacagtatgtatttacatgggaaaagcaaggaagaatttacattgaaacattaatagtagtttatgtaatgagattccaggtttttcttattttgcttttttacattttttaatttttccagccatgatcattaattcaagtttttttaaaaatagatatctatttctatgcatataaatatatatatgtgtgtggctgggcgtggtggctcatgcctgtaatcgcagcactttgggaggccaaggcaggtggatcacctgaggttaagagttcgagaccagcctggccaacatggtgaaaccccgtttctaataaaaatacaaaaattagctgggcatggtggtgggcacctgtaatctcagctgcctgggaggctgaggcaggagaatcgcttgaacccaggaggcggaggttgcagtgagctgagatagcaccactgcactccagcctgggcgacaagagtgaaactccatctcaatttaaaaaaaaaaaaaaaatatatatatatatatatatatatatatatatatatatatatatatatatatatatatatatttggaagtgggccgatcacttgaggtcaggagttcaagaccagcctgtccaacatggtgaaatcccgtctcttccaaaaatacaaaaattagctgggtatggtggcgcacccctgtagtcccagctactttggaggctgaggcatgagaatcacttgaacccaggagatggaggttgcagagagccaagatggtgctgctgcactccagcctgagcaacagagcaagactctgtctccaaaaaaaaaaaaggaagtaggtagggtgtgcttacccaccaaaatagtgactggtaacacttggtctttttcccttcaggctaaactgctcttttcagatggagaaaaagtaatacccagattgacccatgagcttccaggaataaaggtcagagtcactgtgttctcgggtattggagcgggaggtccttcaggctgggaggcaagtgaaatatgtgggcccagggaggttccatgtacttccatttgtaggaccaggcccacacagcatcatgctggatgggcttctttggcctgggtcagagcggggctggagagctgtagtccagggctgtcttctgcaactccagaagacctgcagctcccaggcactggccttccactgactcccttcccttttcttttagcgtggccgtcaggcagaagaagaatgtgcccatcgaggaagcccccttcctaaaaaggtaaaccatttccttgttttgttttctggctgaaaaaaggcttgtcaggccgggtgtggtggctcacacctgtaatcccaacactttgggaggccaagcggggaggatcacttgagctcaggagttttgagaccagtctgggtaacatag

SEQ ID NO: 101165 - DNA, 2013 bp, Homo sapiens
ctcccaaagtgctgggattacaggtgtgagctcacgcacctggcccaaactctaatttacagacaaccaaatatggtagtggttaagagctcaggctttggtgaggacagacctggatttgaatcctgactcaccatttctagctgaataactgtgggcaagtcactcagcctttctcaacctctgattgtttcaaatttgtgaaataaggatggcaatacttattttttaagataatataagtgtgggatttaaaactgtgtttggcacccagtaagcatgcaagcaaagtagctgttattactgaggcacagaggtgttgagtaaatcatgaaagggaaaggtgaatggcagaggcacaactagaacccagatgtcctgactccaagatcagtgtttgttctaagcttctctgtgctgagtggagttcccagtctactcccaatgcaatggcctgctttcctcccagcagtcacctaccttaaagaggtgtgggtgcttgatgtagattcttcctctggtgccccccatccccagggctctgaaaagtaaaagccaagtggtcaagattccagaaagtgtagtcctactagtgaactcctgagctgtttcctcaatcagtgccaaagctcttaaacttacttgttggctcgagatcccaacacaaaggtggtagattcattcaggcgagctgggtcccactgtgcaaaaaatagagaagctcgtgagggtgaagtttaatctgatgggtaggacagaaacactcctccccctacccttttctaacccttccccttgtctattatttaatcaacagttgacccaagacactgagtactcacaatatgctaggccctgtctgtgctagatactggggataaagagatgaataagatacagtctctgttttctaggatgccaccaacatatgtacagataattacaccattgtgcgatgaggcaaggacacaagtgagtgcagggtctgagggctgccgaggggagggtccagccaggaaggcttccttagagaggcatttcccaagttaattctgaaagggtgagcacaagttggggtaaagggggtcaggaacaagggcattccagacagggggcagcatgagcaaagacaggtgagaggcagcttggcctgctggagaaactactagtaattctgtgctgctaacagagagagtacaaattagggagtggcagctgatggggctggagagagaaacacagaggagttggaggtcttaggaggttatgttcaggggactgcattttatttcttctgtaggcaatggggaatcgctgaaggcctctaaacagggagtgagagtcagatttcctttaaagatagcttagtcttctagcaatgtggataatggatttgaaggggcaagactacaggcagggagagcagtttagaggccgctgtgataaagcagttggaaagctgctaagggcctgagctagggcagcagtaaggatgaacagaaggaaataggaactgcaatatatttaagaggaagaattgtccaggactcgactgggtgtagggaggtaaggaagaggaggaggaggcaaagatgattaagataacgaatgtaaagaagggctgtgaggaaagattctaatttcatgtttggatatgctgagtctgaaatgcctatgaaacttccagcagagtggtcaagcagatagtaggataaacaagttttaaagtagaaagaggcatgggatggacaaagaggtatgggagttttagaacatggtggtccctgaaaccataagagtatatgttttagattatccagagagttactttagatggagaagtgggccaaggagagaattctggggaacaaccatttatataagtcactgctgaggaagaactcaggagagagagggaggcaacagaggctaatggttgagagcacagactctggtgtcagcgggtcttgggtttgagactcagctcgatcacttacgagttatgtgactttg

SEQ ID NO: 101166 - DNA, 1004 bp, Homo sapiens
gggtaggggcgctgccagactccttccctggtgggcctagatgaagacgctcaaggaccctcgtgacttggccgagacaggggaagggagaagttgagtcgggcaaggaagagatgctaaagcctggggaattaagaacatgccagaatcatcccgagggagtctggaattagggagggtgaggactcgctaggatcgtcctgtggatctggtgagtataccctgagctgagcctgaccttggtgatgtggggagcctccatgacggctccccctgagattcaggtgggagaagatgcaccgtctggaggcctggcccatccagactcccaggtaaccccgaatactcttttttcaggctacagcaggagctgatgaccctcatggtgagtgattaagtgcccagaaccccagccttccatccaattttcagtagcctccttttttccgtcagcttttttgctagacataggggtaatgtaatttgctccctcctgggaaagaagttcatacaccccacctacaccatttcttccagcagtccctcctcccaattccatccccccacacgaagttatctcgaacacttccctgaagtcatacaagaccctccctatccagtgtgtccctacttcctagccccaaccaagctttacccacacccaactccccgcccttcttggtatttctagcctatgaatttggttgctttattttggatcagagtgatgagattaaggggaggctgggcgcggtagctcacaccttataatcccaacactttggggggctaaggtgggcggatcacttgaggtcaggagttcgagaccagcctggccaacattgcaaaaccctgtctctactaaaaatacaaaaattatccaggcatggtggtgcatgcctgtaatttcagctactcgggaggctgaggcacaagaatcatttgaaccgtggagacagaggttgcggtgagccgagcgcaccactgcactctagcctgggcga

SEQ ID NO: 101167 - DNA, 1142 bp, Homo sapiens
gtgcagggagaatgccgggctgggaaaccagcccctcctccacctcctccgacctttgcatccctggtccagctgcctcttgcccaccttaattcatcctgggccaggcacagtggctcatgcctgtaatcctagcacttggggaggccgaggtgggtggatcacatgaggtcaggagtttgagaccagcctggccaacatggtgaaaccccgtctctactaaatacaaaaaaaattaaccgggtatggtggtaggcacctgtagtcccagctactcaggaggctgaggcaagagaatcacttgaatctaggaagcagaggttgcagtgagcagacatcatgctattgcactccagcttggtcaacagagtgagactccatctcaaaaataataaatagtaaagattaactcatcctgtctccatcactcactgagacctgcctgttctcttccagcttttaagaagtacctgcaagaaacctactcaaagcaggtcaccagccaggagccctgacccaggctgcccagcctgtccttgtgtcgtctttttaatttttccttagatggtctgtcctttttgtgatttctgtataggactctttatcttgagctgtggtatttttgttttgtttttgtcttttaaattaagcctcggttgagcccttgtatattaaataaatgcatttttgtccttttttagacaagttgttgcgttgtaatttcactagggttggaggtactcagggtaggcagaggtggaacttaaggatgtggggccaagcaatggggtgacaaagatttattcccttgtaccttattttatgactctgcatctgtttcttcatctataaaatgagtgtcacaataatgcctcctgtctatggagtcggtgatgtgtaccagcaatgttagtgaatgttggagctccctcagctgtgttgcagatgaggctgagccagaccttaggctgaaacctactcctatagctgtagaaggaacaagcgtgtgtgttgggggggggatcccaacacacagccacccatgttctgtcctgaagaagaatgcttaggtcaccctaagcaggtccagggcctggggagacagccaggaaaaaagccccttccctggcaggactcaggtc

SEQ ID NO: 101168 - DNA, 1067 bp, Homo sapiens
gagctccttggaagcctcaccctgtcctcactgccagcctcaatccaaagcctctgacccagatggcctggcttggatatgacgtggaaacccctgcagaaatctcactttcatgtcaaggcctccatcacattcggccccccatgaggggccttttctccaatgactgaatcctaagaaggaagctgacagcctccgactctgccagttctctgaggggcgggatgatgtgtcttttatctcttctttgtggttccagtgcctgatctgtggcctgacatgcagcaagtactcaataactttgtgttgcattattatttatttgagaacaaacattttattgagcaactattaaagtaccgggcaccattaggagctgcagaaaactggaaaatagtgctggaatggtgctagccctttacaaagccctttcacacccctgatatctcatccctgaaaagctacagagaaaagatgaaggcacgctaattgacgtgcctaaggtcactggggggtggggggggttcccgacttggccttcaattgacaagtgagaaggccttgggcttaacttgttgtctcctctcttttgctcaaaactggggtcacaggctgcgcgcggtggctcacgcctgtaatcccatcactttgggaagctgaggcaggcagatcgcctaaggtagggggttcgagaccagcctgaccaacatggagaaacctcatctctactaaaaatacaaaattagccgggcgttgtggtgcatgcctgtaatcccagctactcgggaggctgagggagaagaatcgcttgaaccccggaggtgggggttgcggttgtggcgagctgagatcgtgccattacactgcagcctaggcaacaagagcaaaactccgtctcaaaacaaaacaaaacaaacaaacaaaaaaaactggggtcaggccgggcatggtggctcacgcctgtaatcccagcactttgggaagccgaggtgggcggatcacctgatgtgaggagttcaagaccagcctggccaacatggtaaaacctcgtctctactaaaaataca

SEQ ID NO: 101169 - DNA, 1037 bp, Homo sapiens
ctcgggaggctgaggcaggagaattgcttgaacccaagaggcggaggttgtggtgagccgagattgcaccattgtactccagcctgggcaacaagagcaaaactctgtctcaaaaaaaaaaaaaaaaaaaaaccaaaaacaaaaattagctgggcgtagtggtatgtgcctgtaatcctagctactcagaaggctgaggcatgagaatcacttgaacctaggaggcggagggtgcagtgagccgagattgtgccactgcattccagcctgggtgacagagtgagagtctgtctcaaaaacaaaaccccaaaaaaccaaaaaacaataaaaactaaattggaatcccatgggtctccctcaccctttggcaccctgcctgcctgggggaggccttatttagcttggcccagccctgctgagctttccttgggaatgtctatatataggggaagggggcagcccagttgccactgtccatctgcattccttggtgtccagcccccctttcctggccccagagcctgctatcggttgtcttggtgctctttctgtccacgtagccactgtctacaagccttgcctactccccagtgcccagcctgcaccttgtggattctcaggttgggctccctctggacttggtctgcccacccctttactccccagatgaccagatttcttcactgagctctaggaaggggccagctgtccttttaccacttaaagaaccttcccctgcctactccttacttcaaaaaaagtgaatccaaacaccctttccctggagaaggtaactttcagagaaggatctttgctttcaatgattatttctcctccaaatgcacatcctcctctcctccatccctccatacatttttccatctggacaggtgccccaaggactgtctgtcccaacttccctccagtcaggattaataataagaatcatcaacatgggtgggcatggtgcctcatgactgtaattctagcactttgggaaaccaaggtggaaggatcccctgagcctaggagttcga

SEQ ID NO: 101170 - DNA, 1042 bp, Homo sapiens
cacctcttggctgtgtgaccttgagagagtcttaacccccctctgagccaagttttcccttgtgtcaagtgggagaactcactctcatctcagaattgctgcaggcattaaatgtacagggcttgggatccgaatggaaatgatgtattaacgatattttgagggtggagctattaatttagcccctactgtctgccaggcacggtgtttggctcctcggtgcctctctgtccctcagtttccatttctgtaaaaagggggtaagtcctgcctcacactgggaggatgagtgaggccacgtcagtggttgatgtcgaccctggccctaggcccattgatatgactggtcatgtgtctgcagaacggagccccccacctgatgggcagtggggcagtcagctcctggcgcggcagctgcaggatttctggaagaagtcccggaacaccttggcaccccagcggctgctcttcgaagtgaccagcgctaacgttgtcaaggacccgccctccaagtacgtggtgagtgagggtctagaacccctgggctgtgagtccagaagtatggctaggagcaagtagggaagaccccaacttcctgaggggtctatgtagttataaatggttaccttgtttacaaatggggaaactgaggtcagaaaggggatgtaacttgagcaaatcctcacacaagacttagtttccttgagactgactgaagtggggattaaggaccttcctcttaacctggttttgagactaagagaactggtgtgtgcacttccccacccagcccacaaggtttttgcaaattgtagcaagatgtgagatacagagagacagatgttatctgggtcaaacttgagatccaagttgcatgggctggtagttaaggaaataggctttcgatccagaccaatcttgactcccacttatttccagttgtttgactctgggtgagttgtttaaccttggtcatcttccgtttcctcattatagcaatggggaaaatgcagaagattacagcaggagttaaatgagacaa

SEQ ID NO: 101171 - DNA, 1015 bp, Homo sapiens
ctgtcaactggggttcctgtgggaggagttacccctcaatgacggtccataataagctcatgaaggggcatttggagcagccacgacactcagtgcacccttgtgtggggcagccctgccctgggccagaccctttgcaagaagtccacttggaggttgggcatggtgatgtgcgcctgtaatcccagctgctcaggaggctgaggcgggaggatcccttgaacccaggcgcttgagaccagcctggcaacttagtgagactctgtttcaggaaaaaaaaaaaaagtgtatttggctgttctgaagcaggccatcatcacccttcacctcacccacaggtggctctcgggggctggtccatgggcggctgtggcgtcaggatggagtcctagctgtgacctgtgcccaggagggcgtgatccgagtgaagccccaggtctcagagagcaagctgtagccagaggtaccagcttcgcctggggcttcaagaacctcccatctatccccattcctgagacaggagttacagtcccttttggccctcacatccaataaagagactgataccactggagtggctggcttttaattcccctgggccagacctgcagccttgccttcatcccttaactccaggactccaggggcagagtccctggccttcagccaagaggccttgccagcttgggggcccaccaacaagggaacattgccccaacctgtgccacagccccccggctgtttataggctggagaggctgtgtcagacttccctgtactacacaagggcaaccccagccaaagctcaccctgagcctagctcaacagaagtttccttgatctgcttcacattctcttttggaacttctaggggctcccagcaccctctgcagcctcccagctattctgttctcatcaggtccttcccctgccttctggggcaacccctctcctcacagtggccttaaatctaggcaagggttagtccagcacctccttgatgagcaattctttg

SEQ ID NO: 101172 - DNA, 1814 bp, Homo sapiens
cgaccttgtctctaaaaaaatagaaaataatcatactgtggacccagattgcctgagtccaaatcctgtctctccaatttttaagcaagctacctggactctgtgcttatttcactgatgaaatgggggtgataatagtacctatctcacagggttgttgtgaggaatactattgtatgtacaatgcttagaacagtgcatattacagggtatgccttattactatgatgtgttggttagatattcatgatcttgtcttcacagtgttggttatgaggtaggttactatcattatccacattttgcagatgggaaaatagactcagattactaattagcacgagaccacatggctcgtaagtggccaagaagggattcaaacgctgcactatcctgcctgccacaggggaggggagctttggggatatcaggggtccctgtggaagaatgaggggagtcagaagaggcaatgcagatgtgactccctctcttcctgggtctcaccccgaccctcttccctttactttcagggaccctaacctccaaaagaggtacccattggcgctcaaccgaattgctgctcaggaggtccccattgagatcaagccagtaaacccatcccccctgagccagctgcagagaatggagcccaaacagatgttctgggtgcgagcccggggctatattggtaagagtaccccatggatgggaggaaaccactctccaaggggtctaccactcatttgctgtgtggccttgggcacatgagttcccttctctgggcctgtttccttatctgcatgatggggaagttggcttagcttctcacctgggccctctcagccctttgcatggggagaaggtggagatgactataatcccgacacaaggcctttctgaggaaggcaaaaggcacctcgctggggttgttgtccagctttgctgctaactataaagtatctttgtgcaaattggaagaagacaccccttttggggcctagagtgggagacttgggtggtgaagactgaatttcagtccctgctcacccctgccctccccaagtcgccatctcacttctcccctatcacacacacacactgtaggccaagcgctcttgtgcagcaaccagtctgcacacccatgcacgggagtcccttttccccctacctccgtgcaggtcctgagctggaaagcccaggagcccagggctgatggggacctgttgcaggcgagggcgacatgaagatgcactgctgcgtggccgcctatatctccgactatgccttcttgggcactgcactgctgcctcaccagtggcagcacaaggtgcacttcatggtctcactggaccattccatgtggttccacgcccccttccgagctgaccactggatgctctatgaatgcgagagcccctgggccggtgagtgtggggccgtgtgggacaagggcactgaccttgagtggcaggagcctgctttcttgggtgatgctgatttcccgacttcctgtgtggcgctgcacaggtcacttcctttccttccctcccaggctttggcatcttcatcttcaaaatgagagggtgaggccgggacacctgctctgctctaaatttctagaatgtgctggaaatgtgattcaccttctcccagggacccagttctagtcccaaaaccagttcagattctttgtattacaataggcaaatcatatcttccatctgaacctcagtttcctcatctaaacaaagagggttacattacagcagtggtatccaaacccgcagtccatcagactgccatttggggatgcc

SEQ ID NO: 101173 - DNA, 1766 bp, Homo sapiens
caggtgctccagcccgacatgctgccggctcagtggacggcaggctgtgctaccagtctagacagcatcctgggcagcaagtggagtgagaccctggataagcacctggcagtgactcacctcaccgaggaggtgggtcagctgttgcagcactgcaccaaggaggagtttgagcggaggtatagcaccctgcgggaactggccgacagctggattgggccttatgagcaggtccaactctgattattctcgatgcccagagatgctcatgcacctgtgcacactcacatccacccatacacacacacacacacacacacacacacacacacacactcccttacactgttgtacttccgtgggccctccttccagaacaaggacaacaaggacaaggttgaagggtcttctcatctaccatggcctgctacctagcatgtgtctagctcaatgagacaggagtcagcaaatcttaatctgtttagtttactcaggtggccacatacagtctctgttgtatattcttggttttgttttaatattttttttctttttttttttttttttttttttgagaaggagtctgtctccgtcacccaggctggagtgcagtggcgcaatctctgctcactgcaagctccacctcctgggttcacaccattctcctgcctcagcctcccgagtatctgggactacaggcgcccgccacaatgccgggctaattttttgtatttttagtagagacggggtttcaccgtgttagccaggatggtctcgatctcctgacttcgtgatctgcccgcctcggcctcccaaagtgctgggattacaggcgtgagccatcgcacccggcctgttttaacattttcataaggtaaaaacctttcttagctcaaaggtctttaaaaaagcaggcaatccagctgggcatggtggctcacgcctgtaatcccagcattttgggaggctgaggtggacagatgacttgaggtcaggagttcaagaccagcctggccaacatagtgaaaccctgtctctactaaaaatacacaaattagccaggtgtggtggcgggggccctgtaatcccagctactcgggaggctgaggcaggagaatcgcttgaacctgggaggcagaggttgcagtaggccaagatcctgctgccactgcactccagcctgggagggtgagactccatctaaaaaaaataaaataaatggcaacccctggtctaagataagagataaaacatcaggtggtgaggttgaggtttggggcttggtagcagttgccccagtcatgagatgactcacttaacccgtctcctttaagtgagctgggctgggaggcttcctacaggggaagaggcccctctggggagctgactcagccaggctccctgaacttttttccttgtcccatcctggggtcaataaaactgaatgttgcatattctagcacttgtctagttttttttttgttccatagaaggcagtttagggtatatcatggagagaatagactttagagtgttatacaacatgtgaatcctggttggttccttccctgcttgatttttgtgcctggttctgccttttactagctatgagacttattaggataagttacccctctaaacctcaacctgattatctgtaaaaatggggatctccacagggtatgttcacagagcaggcatacctagtgggtgctcaattaagtattaattttccttccttgcctatggtcctatgacctgccttc

SEQ ID NO: 101174 - DNA, 1788 bp, Homo sapiens
gatctgcgaggcccgcggaccttgacccggcattgaccgccaccgccccccaggtccgtagggaccaaagaaggggcgggaggaagactgtcacgtggcgccggagttcacgtgactcgtacacatgacttccagtccccgggcgcctcctggagagcaaggacgcgggggagcagaggtgagctggcaccggaggctggaggggatccccgagcccgggatcggtgcgcggcagaggaggctcgcgggtgggagctggcgctggggccggggcttccctcgcggaggcgccgccagcaactccccgggggctgctgcacggaagcgctgaggagcgagtcaacagcccctctgctgcctcccgtagatgatccgagccgcgccgccgccgctgttcctgctgctgctgctgctgctgctgctagtgtcctgggcgtcccgaggcgaggcagcccccgaccaggacgagatccagcgcctccccgggctggccaagcagccgtctttccgccagtactccggctacctcaaaggctccggctccaagcacctccactactggtctgccgccctgccttctgggcgggattgggagaagagatgacggatgagggatggggggtagttctgcagacccctgaggatgcctgggagccgggagggctggaaagggcccctccaactgcgccaaccctgccctgacccccctcccaggtttgtggagtcccagaaggatcccgagaacagccctgtggtgctttggctcaatgggggtcccggctgcagctcactagatgggctcctcacagagcatggccccttcctggtgagtggacagcagggggaaagcacagttcccaaagtaaaaggctggggaaagcgagagaggggctttgtgattttccaaaaagtttccttccttctaagcctcgggattttcctctatgccattggctttgctgcctgtacctctcagaggttttacccacatgtaaagtgcctctcatggtggccctttccctccacccagctggcccttgggacttactcagccatctctttcctcctcaggtccagccagatggtgtcaccctggagtacaacccctattcttggaatctggtatagctggagctgtgggtgtgtctgggcacttggatggggtggcatttagctaatttttccctcccctctagattgccaatgtgttatacctggagtccccagctggggtgggcttctcctactccgatgacaagttttatgcaactaatgacactgaggtgagtctggtgcctgcccatctgccccaggctccccggtcctccatccatggcatgatgctgggagagagagcatggccttggagtctacttttcgctctgtcatatgctattgtggtatggtggccagtcacttcctcttgcacaaatagggtgggttaatgtcattatctctgaagttctttccagttcaaataccaaagcttcctgattccctctgtcttgctctgccatccccaggtcgcccagagcaattttgaggcccttcaagatttcttccgcctctttccggagtacaagaacaacaaacttttcctgaccggggagagctatgctggcatctacatccccaccctggccgtgctggtcatgcaggatcccagcatgaaccttcaggtgcagggtagctgcaggagggaagggaggtagcttgaggctgtggccttacagttagcaaggtcagactgactggtcaatgtccccatccaacccagcttcctgcata

SEQ ID NO: 101175 - DNA, 1031 bp, Homo sapiens
ttctccgtccctcattgctttcttgcacctttaagcaatttagtgttctctgggacatgtgtctaagtgtgtattcccaccaccacctcctatggtggcaaatcccataacctccgtgaggagaaaggacttcttcacatttatcaaacacctgcaacgtggcaggcactgtgctgaactgtgtctatgtagattatttaagcttcaagattccccctcaaatgagatcatactacccacattttccagataaggaaactgagggctatgaattttgaaatcactgtctgaagtcacagtgttgggaggcagtgatgctaggatttggacccaggtctgggaagattcctgccactgagcctcagtttccctacctgtgaaaaaaagtgggtgaagaggtgaaatccaagagcagtaaatcttgggacaacttggtggggtcgtggagaggctggggatctgtaaagcatggtggcttggtgtatcattgcagcttcaggaagtggcccgcatcgtgggcaactctggcctcaacatctacaatctctatgccccgtgtgctggaggggtgcccagccattttaggtaggtgctgctgggtgcccctggagccaaccccagccccatctggaggctccacacccattcccccacctcacattgcaggtatgagaaggacactgttgtggtccaggatttgggcaacatcttcactcgcctgccactcaagcggatgtggcatcaggtgtgcgagggcgtgggcttcctcctggtgaggtgggggcagggggaggggcagggaagcagaggccctgacccactgtctgtgccttccaggcactgctgcgctcaggggataaagtgcgcatggaccccccctgcaccaacacaacagctgcttccacctacctcaacaacccgtacgtgcggaaggccctcaacatcccggagcagctgccacaatgggacatgtgcaagtgaggttccgtggccacctgtgacttggggtggtgggttgctggggcttgtgg

SEQ ID NO: 101176 - DNA, 1434 bp, Homo sapiens
gcctgggagtggccagctggctgcctggctctggcccacagagggcaagtgtggaggaattcccagccctaaggtcttgctggtagctgtgagcaaggatgcagctgctgtaggctgatgtctttcctggtggggcagatggaggtgcagcgccggccctggttagtgaagtacggggacagcggggagcagattgccggcttcgtgaaggagttctcccacatcgcctttctcacgatcaaggtagggactgggcctgctgagagataactgggccggaggcaaaggagcaggacccacccgtcctttccctctggctgccttttaggctgggtcatgggtcaccatctggcccctgtatgggcaagtttttttggagaggggtggggagggttctgggaagaataaagggtttgggatgaaggaattgcccccgagtgagcagttatatggggaggagggaatggtggggtcaggagctcacgaacattgctcctcagggcgccggccacatggttcccaccgacaagcccctcgctgccttcaccatgttctcccgcttcctgaacaagcagccatactgatgaccacagcaaccagctccacggcctgatgcagcccctcccagcctctcccgctaggagagtcctcttctaagcaaagtgcccctgcaggccgggttctgccgccaggactgcccccttcccagagccctgtacatcccagactgggcccagggtctcccatagacagcctgggggcaagttagcactttattcccgcagcagttcctgaatggggtggcctggccccttctctgcttaaagaatgccctttatgatgcactgattccatcccaggaacccaacagagctcaggacagcccacagggaggtggtggacggactgtaattgatagattgattatggaattaaattgggtacagcttcaaatcccgtcttctctgtggcactgggggttagagggggcactacaggctatgaatgtgggaaaagaggggctgagaggggttggggtcctgaatgacagctgccagcttggggattgagggctcagacagctgctgtggacggtgtgggggcagtggacgccctgacatcagcaggccggttcttctcaatcacctctcgcagccctttggcaaagtggagatcagccccgatggtgaggaatccctgtgttggggagaggggagcctcatttattcattcagttattgaggccagagtttagagatcaagagacagagtgtttgtctttcaggaactcaatctaatggataattccatgtcaaggtgttaaaatgaggctgtaggagtgtagactatgggtgtcaaggagggcttcttggaggaggtgacctctgagctaagacctgaacaattagtaggtattgggatgggagaagagtg

SEQ ID NO: 101177 - DNA, 1181 bp, Homo sapiens
tttattttatgtaacaaaacttcacattgcttagttcctgtcagacactaagcatatttattttctttttttatttttatttatttttgagacagcgtctcactgtgttgcccaggctggagggcagtggtgtaattttactcactgtggctttgacctccagggctcaagtcagcctcccacctcaggcttccaagtagctgggaccacaggcgtgcatcactatgaccaactaacttttaaatttttttgtagagacaggatctcactttgtagctcaggctggtatcgaactcctggcctcaagcgatctacccgccttggtctcccaaagtgttgagattacaggtgtgagccactgcacccagccaacgtgtttaaaaagttaatattagtaaactgttttaaaatacagtaccaactggtttagtcctcaaaacaagcccaaggagtgggcactattaggatttgcactaatttatagatgaggaaaatgaggccctgcaaggttaagtaatttgcctgaagtcacacagctggaaagtgtcagaagctgcctctagaacctagggtcctaacctacattatctcctttaaccttagaacagcactgtccagtcagattttctgtgaaacgttttgtatctgcaccgtctactatggtagtcactagccacatgtggctaatgaaatgtggcttagtgcaactgaaaaactatttaattataattaatttaaatgtaaatagtcacatgtggctagtatctaccatattggatagcacagccctagaaggcagatgctacttttgcctgtattaaacacatggagaaaatgaggcctagaaagacaaaatgggctgggtgcggtggctcacgcctgtaatcctagcactttgggaggctaaggtgggacgatcacttgagcccgagaattggagaccagcctggacaacaaagtgagaccccatctctacaaaaaataaaatagtcaggcatggtagtgcatgcatgcagtcccagttactcgggaggctgaggctggacgatcacttgagcccaggaggtcaaggctgcagtgagctatgattgcaccactgcactccagcttgggcaacagagtgagactctgtctcaaaaataaataaatacaataaaataaggccaagcacagtggctcat

SEQ ID NO: 101178 - DNA, 1043 bp, Homo sapiens
atttttagtagagacagggtttcaccatattggtcaggctggtctcaaactcctgacctcaggtgattcacctgccccggcctcccaaagtgctgggattataggtatgagccactgtgcttggccttattttattgtatttatttatttttgagacagagtctcactctgttgcccaagctggagtgcagtggtgcaatcatagctcactgcagccttgacctcctgggctcaagtgatcgtccagcctcagcctcccgagtaactgggactgcatgcatgcactaccatgcctgactattttattttttgtagagatggggtctcactttgttgtccaggctggtctccaattctcgggctcaagtgatcgtcccaccttagcctcccaaagtgctaggattacaggcgtgagccaccgcacccagcccattttgtctttctaggcctcattttctccatgtgtttaatacaggcaaaagtagcatctgccttctagggctgtgctatccaatatggtagatactagccacatgtgactatttacatttaaattaattataattaaatagtttttcagttgcactaagccacatttcattagccacatgtggctagtgactaccatagtagacggtgcagatacaaaacgtttcacagaaaatctgactggacagtgctgttctaaggttaaaggagataatgtaggttaggaccctaggttctagaggcagcttctgacactttccagctgtgtgacttcaggcaaattacttaaccttgcagggcctcattttcctcatctataaattagtgcaaatcctaatagtgcccactccttgggcttgttttgaggactaaaccagttggtactgtattttaaaacagtttactaatattaactttttaaacacgttggctgggtgcagtggctcacacctgtaatctcaacactttgggagaccaaggcgggtagatcgcttgaggccaggagttcgataccagcctgagctacaaagtgagatcctgtctctacaaaaaaa

SEQ ID NO: 101179 - DNA, 1091 bp, Homo sapiens
ctgggcaacaagagcgaaactccttctcaaaaaaaaaaaaaaaagaataataacatttttaaaaaagataaaatggcctcaaggtcacaaagctgtgttgtgctgaggtttttgtcaaaacccatgttctgatctttgctgtgtgactgtgggcatgttatttaacattgctggacccatttgttcatctctcataatacctgccctgcctgcctctgggacatgtgagaatgcagaggagtcagactttaccaaagcactttggcatgcattaacaaagacagaccccagctctcagtggcttacaggtatcactgtactttaagcgcaacatccctgtggacaggtgtgattgtcctccaatcactgaggtgcagggaagtgcgcctgcctacctgcgcaggtccagctgcgtgcgcagggccttcccccggagagccatcttggcgctgagacgggcgtcctgcaggaacatggggaggaggatgttactgacccagaaggtcagtaacccacagcccatttttccctgacccccagccagcagcccccactctgggacccgtaccatagtcatgctggacagctggacctcaggctggtctggtgggaccagggcaatggtgacgctagcagtgacagagatggtggtgccagagggcttgatggtgcagcgcggtggggccaggacccgcagctccagcttcaatggggagtcaatcactgctgggctctgggggatgagcagcaggggcgggtcaagtccctgccatttcctttggagcccccagggaagaaggggaaggaaggcaggtgcagcttctgtcctctggggactctcatattgcaaatacagagggagctctggcttccaaaactctcacatctgcatctagccttcatgcctttgccacacaaagaaacaggaatgtgttcttctctttctgcttcctaaatacatctcaatattcaggtctatctccaatccagactctttgtggatgtcctttttgcattagtatctcagcccttgccatgtcttctgtttttgatatggagtctcactttgttgcccaggctggagtgcagtg

SEQ ID NO: 101180 - DNA, 1050 bp, Homo sapiens
tcaagcgattctcctgcctcagcctcctgagtagctgggattacaggcgcccaccaccatgcccaactaatttttgtatttttagtagagacggggtttcaccgtggtggaccaggctggtctcgaacacctgacctcaggtgatccgcccgccttgacctccctaagtgctgggattacaggtgtgagccaccatgcgcggcccccccatgccatcttgtttagttatttttttgaaacctctatagtggtagtaataataataactaacattaatgagcacctaactacacaccaggccctaagtgctttccacataaaactaatttgaccctcatgacaaccctgtgaaggatgtatcctcattttatgggtgggcctctgagcctggagaggttaagcaccttatcccacatcacacagccgtgagtgacttgagccccttcctgcagtgcgcagttctgtggacgagcttgttggcattgactattccctcatgaaggatcctgtggcttccaccagcaacctggacatggacttccgggtgagctgcttgggctggtgtatgacctctgacttcctaacaagacctctttctctgctaagttgcaagattttacttcttaaagcacagctctgatgaggccactcccattactgagaatgctatggctccctgttactacagaattaggttcagcctcctgggtctggcatttgagcccctgttaatcttacctggccccaccttttatatctcatcctgtttctttgcagctgctctttcccaaattggaccctggcttcccacctcagggcctttgctcatgcacggcctttccccaactcccccgaaggagctggacataaatttctatacaaataatctcatttcattctctcacaaccctgtgagtcaggtactaacatcatcctaattttaggaatgtggagacttactcatagaggtgacgtcacttgcccaaggccacatagccagtgtgtagccactacctttggtctcccagaggagtatagcagtttcagagt

SEQ ID NO: 101181 - DNA, 1523 bp, Homo sapiens
cgatcttggctcactgcaacctccgcatcccgagttcaagcgattttcctgcctcagcctcccgagtagctaggactacaggcgcgtgccaccacggtctgctaagttttgtatttttggtagagacgggtttcactatgttggccagactggtctcgaactcctgacctcaagtgatccgccctcctcggcctcctaaagtgctgggattacaggcatgagccaccaccgcacctggcaaacaaacaaacaagacttttaagcgatggggtgaagctcatttttaacacctggatcaggaagacctcctctctcagccacccaagttcaactttgagccacccaagtctaagttgggcacttgagggacaatggaagaattcattccacccactcccgcttccccaggcctggacttgaaaggggagcagacaaatttcctgtcgttgggggaagttccctcttcttggccctggatctgaccctgaggcctcctgtagggtgaaggtcacagagctgcaactgacatcttccgagctcgatttccagccacagcaggagctgatgcttcaaatcaccaatgcctccttggggctgcgcttccggagacagctgctctactggttcttgtaaggacccagcaccctcaggggagtggagagtgggtcaggagggctggaggtgctgtggggctgtgggcagcccccttagccttcctgagtttccgtttcttcatctgtgtaacagaaacaggcatatgcatttcatacgagttgataggaaggtttggtaggatgtgtggaaagaggtgaaaccttattaagaggtatggtgatgcatgggggcactgaagactcaattgagctcctacctggagtgaatattaacccccctggcagctatgatgggggctacatcaacgcctcagctgagggtgtgtccatccgcactggtctggagctctcccgggatcccgctggacggatgaaagtgtccaatgtctcctgccaggcctctgtctccagaatgcacgcggccttcgggggaaccttcaagtaagccccagccccaaccccagctcacccttttcgagccccacagctcatctgcctagcgcaatgcaaagtgcataggcctgggaatcagaccaactgggtccaaagctcagctctgtcacttcctggctgtgtgaacgtggccaagtcactgaagcttggtgcctcaatatcctcattttataagatcctattttataagatcgttgtcaggattatttgtgttggtatatgtaaaaaatatttagaacaaggctggctgtggtggctcatgcctgaaatcccagcaatttgggaggtctgggcgggcggatcacaaggttaacagatcgagatcatcctggccaacatggtgaaaccccatctctactaaaaatacaaaaattagctgggcgtggtggcacgtgcctgtagtcccagctacgtgggaggctgaggcaggagaatcgcttgaacccgggaggcgga

SEQ ID NO: 101182 - DNA, 1221 bp, Homo sapiens
cgcgaggcctatgagaccgcaagccaccctccaagaatgcgcgtgcagtcgttgccgtggcaacgtgcaagcctgcatgggcccaccgctaaaggaaaggggaggttgttgggggtgtgggggctggtcccctggaggtccaaactcatcacgcggcggtagcacgagggaactgggaacgtcccctcccccgtgtcccaaatcctctgggagccagaacgcaagtcgcatcgcctctctgagcctcagtttccacatctgccatatggaggcaagattattggttccaagttccccgaagagttatctggagggtaacgatccaggctagttcccacttatggttggacgtccaaggaatgggtttaagcggctcagataactcctgcgaccccaccccacccccaggcccgctcgccatggccctcttcggggccctcttcctagcgctgctggcaggcgcacatgcagagttcccaggctgcaagatccgcgtcacctccaaggcgctggagctgggtaaggcgcaggggcagacagggacggacgggagcggacggggttggggtcgccccaacagtgggcacgggagctaagtaagggtttctctgctgcttcagtgaagcaggaggggctgcgctttctggagcaagagctggagactatcaccattccggacctgcggggcaaagaaggccacttctactacaacatctctgagtaagtggggggcggggcctcgcgatccggggcggggcctcggcggtggaggcggggcccgagaaatctcagggtctcgggagactggaggctgagtgggatggggcgtggccaaatcgatgaggcaagacttaagaaaccggatggggccgaaaagataaaggccaagccagtcatcataggcgggaccaggcagatgggcgtggccttgaaaatgtagagggggccaagaaggaagcaggaccagtggatgtgaggcgtggtcgaagaacaacagaaaggtggagtcaaggaacttcccaatagatgagagtggagtctcgggcacggggtggagttaatcggaggggtggagaaactgaaggctctaagtatggtttaggatgagggagggggaataaggaattgagatgtgagacggagcttaggtgatggaggcaaagtgaacggactctattaaaagaccgggtgtagcaaccccagggtgtgggaggggagggg

SEQ ID NO: 101183 - DNA, 1050 bp, Homo sapiens
cgcgcgcgcgcgcgcgcaccttcccctccccctaccccagcgagggtgggctgtttggcgcgcgcgcgcgcgccggcccatctctcgggctccgccccccgccccgccgcgcgctcccgcccccgggctgaggcgactcagagtcggagcccgacacaaaggcggtggcggcggcagcagcggaggggccctagagcccgctccgctggggctctccgggcccacctccctcacttcggccaccggcgcggccgcccacccgcgggtctaagatggcggcggcaacagagacagggcaagcggcagtcccgagcagaaagcgccggaggggccgccgccccccagcttcggatccccagaccctggcgcggctcgctgcgggaccatggcttcctgggactcttacctgcccggagcggactggaggggacgcggctacacgttctgctcgaccgcccgttttgccgcctccgcctcgccctccccagcgccgctgccgccatcttgtgtcccgggccgggactccgcgctgcgcatgcgctggtaccgcctctgagggacctcgccgcggccgcgccgccatcttgagtgtggcagggtcggctggctcctcgcacccagcttgctttcggccccctccccttcttcccatccgtccctgctgttccttgtggcgctgaggaaggggagacagctttgtaggcctgcgggtggactgaggaaggaatgaattcactggcacgtccccgcctcagtttccccctcgagcacacacgcaggagccggatgttcgcggtgggcggtgcgcggcggggttggactgagcgtgcgcactggggggcgtgggggctgtcttagaacctgcgggggtctcgggttctgccgccggcccaggggaggcatcgtggtgacgtaggctccggacgtagcaaggacctgggtcctggcacccgcgcggctctgcctcttccagccagtctctttccctctctgggcctttgtgctgcgtggtgtccaaatgttaagaagccctgccccatgcccgggcta

SEQ ID NO: 101184 - DNA, 2014 bp, Homo sapiens
gggcaaaagtttgatttcttttgggtggtgtgacctactgaaaacaactttagcatcaccagttctatctcagttagctcccagttgtctgacagccccaggccagaagcactttggctcctgaggctgttgctgggtgtgctttgggtgggggagtagggaatacagatctgaaggaactggcctccttgctggtacttacagtaaatattcacctggggattatgaaggagtcaattagatagtccttcttggttgcattggttattttagcaatagctgcttcctgccatgtagtgtaaaataaggtgaccaattagattccatgcccttccctagtgtgctttgttccttttagattttactggatgagagcagtaaaatcccatctccttctgggagttgttactattccttcttgtaggaatcgcttctcaagggcagaccctgttctgtcttttttgctgctcttggtgctttgtaaatatttgcagaatcagtagtgctcctgttgggtccaggtcctaggcctgagcacaggagagagctgaattggacgcagttcctatttctggaagttctgacagtttagtggggagacaaacccagctgatagatgagaccatctgagtgctacgacagaggtgttcacggccctgaggaggagctctgaccacctggcctggggaggggagagtcaaggaaggcttcctggaggatgtgaacccagtagcaagccaggcagagaagagggggaggggcatttcaggcagaggaagcagcaggagtgcacccattgaacagctggaattgcagcttagatcccagggctgctgtgtggcaccatgctggccctccaggataggacctgattggatttctccacatcggtgggtggtcactggggccctgggtggattgtaattggcgggtgagggggtggagctgacactctttggtcctctgtgtggcaggtcctgtgtgggtgtggagatggccaatgagaatcacggcagcccccgggaggaagcgtccctgctgagtcactccccaggtacctccaatcagagccagccctgttctccaaagccaatccgcctggttcaggacctcccaggtactgagggggagcagtagtggggtggtggggtaggaagggcaccctgggagcagtcctgaccctggctgggctccgtgcctgtttgcagaggagctggtgcatgcaggctgggagaagtgctggagccggagggagaatcgtccctactacttcaaccgattcaccaaccagtccctgtgggagatgcccgtgctggggcagcacgatgtgattgtgagtgccagcctagggtgggggggtctcagagtggcctctggcacctgggccttccccaaatgtaccctgagcagccgttcagtgcccagccctgtgctggcacctgcagatacaatgacaagcaagacagacacagcccctgccctcatggaacctacactcaaatggggtagactgacaagtaaacagatgattgcatggctgctgcacggtgggtgctgtgccgcgaggcaggaatgaacaaggcagacttgctccctacggtcgcagagcacccatgggctgccaggtgacagcaggattacacttgtggtccgtgtatgaggaatagtgttagaatacatctagatcctgacatactctggggaaggcaaggagatgggaaaagctctgagaatgagtgtttaaggtgagagagtgagtgagtgtggggaggaaaagaacattctaggatctgacatgtcagtacgacgggaagtacaggcatgggctgtctggtgggaacatgggcttttgggtccttctcagctggggcagcatttctttactgggcacagttgagacagttggcatcttcattttgcatgtgaagacactgaggttcaaagatggggaacgactggcacgagacctcacagtaataggcagagcaggacgcacacctgatgtgagttcagg

SEQ ID NO: 101185 - DNA, 1065 bp, Homo sapiens
ccccccaagaatgtgtgagggtcttgagggcagagaaggctgaggcagctggagctacttctgggaccacactcccctccctccctccagcagctccttctcatggcccctgggccttcactctcccatctggggtcccacacagctgggtccctggtggcctctgcctgggctcaggaggtccgaagagtccaaggccctgcatcccctatctccaaactcccccagcagggcctgtatggatacccctggggatcagaggactgggagctgtgcctgtccccaacccaaaagccagactcttgctggccctggatccccacagtgagcgaagagctgggtgtgcctcacagtcaaggctcaggagagcagcttcagaggatctgtaggcacagagcgtgtgctccctagggcccagggaggaagcaggtctgaaggtgcttgctggggctctcgctggttcagccgtctctgaaccagccacctctctcattgccaggcctctgcagcaagggtctgccctgctggtggatcaccggacttaacaggggcagggcaggacagggcacgctgtggagccaggcagcctccacctcacaagacctggcctggtacaggctacagcagcaagcagacaaagtaagctgttcaggactggactccggtccctttattgagactgacaggccagtgggtccacccaaacaaaaataaatttctctcccaaagcctgcctgcaggctggggcacccagcatgtcctggctggggcccatggctgcccctaaccccaacagcacaggtctggctccctgggaatgagaggatgctggctatccagtatctggagatcctaaatgaagagggaggtgagtcctggtggccccctacccccaggagagctggccgcaaatccatgatctgtgttgggccctcggggctcagtcatcggccagggtgatgacgtcgtactcgatgccctggtgctgcagctgttgaatgtgttcgggcactgtctcgtctgtaccaaacaggccctgggcttgggccatggcagcatcagcca

SEQ ID NO: 101186 - DNA, 1236 bp, Homo sapiens
gggatgaagttgttgcacctcagttcatcagatattagttagattcttagaaggagtgtgtgacctagattactcgtatgcacagttcacaatggggctgtgctcctgagactaatgcagctgctgtgacaggaagtggagctcaggcagtagtgcttgcccacctgccgctcacctgctgtgtggcctggttcctaacaggccatggatgactaccagtctatggcccaggggttgggcacccctgttctagacgttcgagtctccctagccatgcctctgtcacacacttctgtgcctttgctcctagaggcccagcttggccatcccttctgtggcattttccccagcacacacaagttcaaatgacctgctctgtgtcctgcacccttggttcacactcgggacactgtgtctggcattagtcacgttgtgtgtggtttgcctccccaccagaccaactccctgagagctgggaccttgcggagtcatctctgacccatctcatccactcagaggagagcagaggatctggcttgaaagggcactcattaaaggtttgttatacaaacgagtagcccaatgaatgacagcagagacacaggagcaaccagcacctacccggacctcgggccactggcgggcactgaaggggcagtcggggcacttgaaggcaccaggcccagcgtgggcccgcttgtgactctccatctcagctcggccagggaaggcctcggcacagatcttgcaggaaaacttctttgatgcagcagtggctgcagatggcggtgacgggggcactgccaggcccagggctttgctggttgcaggaggtgaggaggcagagctctgggagtcccctacgcagtgggtcttggctggagatgggggctcagggccgtctctgggcagtcccccacactgcagcaggggccatttggcaccagaggccagagcatctggacttgggaaggagatggagccatctgcggtgagctgtagagagacagggagcatgaggtactgagaaggggagggaggtgggggagtggttggcatccccaagcctcacctcaatgtggtgcaactgggtaccatcagtagccatgatgtagtgggtgccagcttcttttagggtgtcactcacaaccacagcctgggctgcctctcctgcgggctcctcgctgtgggcatggagaaggttctaggagaagatggagggccacaggagccccc

SEQ ID NO: 101187 - DNA, 1026 bp, Homo sapiens
ttgcaccacattgaggtgaggcttggggatgccaaccactcccccacctccctccccttctcagtacctcatgctccctgtctctctacagctcaccgcagatggctccatctccttcccaagtccagatgctctggcctctggtgccaaatggcccctgctgcagtgtgggggactgcccagagacggccctgagcccccatctccagccaagacccactgcgtaggggactcccagagctctgcctcctcacctcctgcaaccagcaaagccctgggcctggcagtgcccccgtcaccgccatctgcagccactgctgcatcaaagaagttttcctgcaagatctgtgccgaggccttccctggccgagctgagatggagagtcacaagcgggcccacgctgggcctggtgccttcaagtgccccgactgccccttcagtgcccgccagtggcccgaggtccgggtaggtgctggttgctcctgtgtctctgctgtcattcattgggctactcgtttgtataacaaacctttaatgagtgccctttcaagccagatcctctgctctcctctgagtggatgagatgggtcagagatgactccgcaaggtcccagctctcagggagttggtctggtggggaggcaaaccacacacaacgtgactaatgccagacacagtgtcccgagtgtgaaccaagggtgcaggacacagagcaggtcatttgaacttgtgtgtgctggggaaaatgccacagaagggatggccaagctgggcctctaggagcaaaggcacagaagtgtgtgacagaggcatggctagggagactcgaacgtctagaacaggggtgcccaacccctgggccatagactggtagtcatccatggcctgttaggaaccaggccacacagcaggtgagcggcaggtgggcaagcactactgcctgagctccacttcctgtcacagcagctgcattagtctcaggagcacagccccattgtgaactgtgcatacgagtaatctaggtc

SEQ ID NO: 101188 - DNA, 1028 bp, Homo sapiens
tgtcacccagtctggaatagagtggcacaattacagctcactgcagcctcaacctcccaggcttaagcgatctttctgcttcagccttccgagtagctgggactacaggtgctaaccagcacacccggctaactttttattatttactaatttttttttgtagagacgatgtcttgttatgttgcccaggctggtctcaaactccgggccttaactgatccttagagcttttaatatgcaagtaacattttgtgattgacagacagaaagaatgtaccatttcacaaatatatttgagtgcagaatatgttatttacagcgtgccccttagcgttttccccagtgaactccagctggggaagcactattctaagagaaaggggccttggcagggagtaggctcatagctgaggctgggtctgttcagtgtgagagggtctagagtgggcttggggaagctctggtctaattcctcggccttttccccacaggaagaagaggccagatccggtgagtctggcgtgctggcctgggaagggaacctgcccgggggttgtttatgggggtgaggacaagaggggaggttttatcctccctcctccacttctttctccatctggccccttcttatgccttcctagactccaaagctgagctctttcccctgccctgtgtgtggccgtgtgtaccccatgcagaaaagactcacgcagcacatgaagacgcacagcactgagaagccccacatgtgtgacaaggtgggtgggagccagggctggggctgagaggagggcctcccctgggtgatggagggtgatcgccatctcactgctctccacccctcacagtgtggaaagtcctttaagaagcgctacaccttcaaaatgcacctgctcacgcacatccaggctgttgccaaccgcaggtacatccccttggaggcccctggggacgggagcagtccccagctcattactgagcttccctccctctaaccgcctccaggttcaagtgtgagttctgtgagt

SEQ ID NO: 101189 - DNA, 1034 bp, Homo sapiens
atggagaaaccccatctctactaaaaatacaaaattagctgggcatggtggtgcatgcctgtaatcccaactacttgggatgctgaggcaggagaatcgcttgaacccgggaggcagaggttgcagtgagccaagatcacaccattgcactccagcctgggcaacaagagcgaaactctgtctcaaaaaaacaaacaaacaaaaaaaaaaaaacggttcctttttctccttaacacaagctaccatgtggcctgcagcagccctgagccttttatgcagtaactggataattaaatccttattgcagcccaatgaggtcgtaggtgtccatagtcccattctactgacccccaggaaactgtggctcggcctggccaatgtgcaagttggcagctgtgggagagggtacttccgggcacggtggtcagagcgagcccctgtgctctgtgcacgctgtgctgtgggctgttatgtgggttctgcagagaagatgtctcgtgacgcagtgggagaggtggaggctgcggcgccatgctgcctggcttcagctccaagctctgccatcgcaaggtccctccaccctgagactcaggttccttctttgtcaagttgtgagccagcacagagcctggcacagagtgggtgctctcgctggggacagtccccgggccttcctaggttttgacccttgcgtcggggtgtgttgtccacatgcctgtgttctgtgagctgctcccgcagcaaccctaagactgtggccacaggcatggtggggacggggatgggagaggaggccaagccccagcccaccatccttttgtctgtctcccaggagcacatgttcaaccacgtgggcagcaagccctacaagtgtgacgagtgcagctacaccagtgtctaccggaaggacgtcattcggcacgccgctgtgcacagccgggaccggtcagtgtgggggtgggagggacctgggcaagagaggccaggttgggtggggaagtggaggcccgggataaccatggttcccacttacc

SEQ ID NO: 101190 - DNA, 1053 bp, Homo sapiens
ggatcacaggcgcccaccaccacaccgacttaatttttttagtagagacagggtttcaccatattggccaggctggtctcaaactcctgacctcaggtgatctgcccacctcagcctcccaaagtgctgggattacaggcgtgagccaccgcacttggcctattgtattctttagtctctatttcaaaaaggcctttttaccgaggcacatatgtatggaaagttacacatattctgcccaggtcaatgagttttcacaaggtgcacacacctgtgtaaccaagcacctgtataacccagtcaagaagcagaacattacctgcattgtctgtattgttaatttgtctagtacatatttaatatttaaatactgtcaatgtttttgaagaggtaacagatttagattgtccaaatggtttgcaagcatggaagtcacatctccctccttccctcccatcagccctccagctgcctgacctccctggggaatgccagtgttaaagcactcctattgcttcccgagccttagattgttctgtgaagtcaccaaagccgccattctggcctcccttggataaatggggcaaatgagactccgggagaggaatggctttgtctgtaggtgcacagcatgtcagtgacagagccgtgcctggaacccaggtctcctgactgggaggtcccagctctcgccgttgctctaatccaggccaggtcctactgtgctgacagaatgtcggctgttgggcggtagtatccatgctgccctctaaccacaggctgtctgtgtcatgtgactcaatgcacccatcagtggtctgtgatgagtgggtgggaggatattttggctggcctctggcccacttgtccacgtctgtcctggtgtgtcagtggctggcttgtgacctggcatgtccgtggcaggtgtggaaggagagcctctagtgagttcccagagtggacagagccctccagagccacaggatcccgaggctcccagctcctcaggcccaggacacctggtggccatgggcaaggtgagcaggacccctg

SEQ ID NO: 101191 - DNA, 1064 bp, Homo sapiens
tcatcataacaattactggtgagttttggccgggcacagtggctcacgcctgtaatctcagcactttgggaggctgaggcagatggatcacaaggtcaggagatcgagaccatcctggctaacacggtgaaatcctgtctctactaaaataccaaaaaaaaaaaaaattattggtgagttttttaataccaattttttgaaattcattattttacacttaattatatctcagtttggactaggcatatttcaagggctcaatagctacatatggctggtggcagctgttttggatagggcagccgtagagtttgtggacttcaatgtttatttaaacttttttctaactggctgtacagtgtctggaggaagggttgccttttccctattcacatgaaggtgctttatgagctagtggtaggtgccaggaagggtagagaaagaacttcaggggctcagggcaggaacgccaagtcagccagaggagatcaggagggctttctggaggaggcatcgctgtgggcttggaggaggagtatgcaggggtagggaagtgagctgggcaaggggtcagggctgaaagggcaggtcccgccactcactgttcaccaactttactgtcccccacagaggatagcgactataatccagctgaggatgagccccgaggccggcagcttcggctccagcgccccacccccagtaccccaaggccccgaaggagacctggccggccccggaagctgccccgcctggagatctcagacctcccagatggtgaggcttggtcttgggaggggctcgtgtgggtgggtcaggagtggcctctctccctgcttgtctctgtggagttctggggactgagtgtgccctgcagggcagctgtctcaaaccgggtcacctgcaggcctccagggaaaggggaaagccctcaaagactcaagctcaagaaaccctgactcaggaaactctctcagctttatggaaatgcctttcaccacaatttgtcatagcaaaagagaaatttgggactttatcactgaatgcgtaagataagttttaaa

SEQ ID NO: 101192 - DNA, 1029 bp, Homo sapiens
gggttgcagggccggtggtacagcccgctggccccctgggtcagtggttcgctcccccccggttcccctgcggaggcggctgacagcgacggtctcggggcctggcgatttggggctgtccccggcgctgcctgtgctccaggcccgacgccatcttgtggtggcgccgggtttccgctcaggcaagtgcgagagcgactaaagggcctgggaccccggggccctgttcggacagccccgccggcctgggacctcgcctccgggtatccccgcagtgtgacctcactccacggcagggtacggtggggccgcctaactctacccgaagctcacccgaggctttcgtagccacgttcctctctgactccggcatcgacgaggtcgccatcctctttcctccgctgcggaggaacccatcggcctattgtaggccggaactacttcccccgctggccccgggaaagacacattttcagtgttccggaaggtcgctccgaggcctcaaaaccataatcgggtctcaacagactctgggactttatacgtcgcccggtgtttggcactgagcccactatggtttggggactactttatctcggcggagtgttacgtaggaagtggttgtgacgtcattctggtcccttccctaggccgcagggttgggcgcggcgaatgcgcgccccgctctcttggggcgtggctcccagtggggggcgtggctcccggtggcttggccgcgcccctcctacaacagcccggaagagcgtgtggccgcgggcgactttggcttggccaaagaggaattcatgttgtcagtcattttacctgactcattacttattacttagcgcgctgctgcaacccaatcgagctctgcccgttaggtttgatgtgttttgttgggaagggaatgtataattattgtacagatagggaaactgaggtctgggtatgggaagggctggtccaaaatcacatccaataaagggactcaggagctaagtacggatggcaggagtcggggaaatg

SEQ ID NO: 101193 - DNA, 1078 bp, Homo sapiens
ctcctgcccttggggggtactttgaaccagatacctccctcttctgtcttccaggcccgatttcccgccaaccactcggggcgacctcgggtgcctcgctgaagacacagccaagctcccaaccgctccagagcggccaagtgctcccctctgctacacccactccatctgcaccccccacctcccagcaagagcttcaggccaaaatcctcagcctcttcaatagtggcacagtgacggccaatagcagctctgcatccccctcggttgctgccggaaacaccccaaaccagaatttttccacagcagcaaacagccagcctcaacaaagatcacaggcttctggcaatcagcctccaagcattttgggacagggaggatctgctcagaacatgggccccagacctggggctccttcccaagggctttttggccagccttccagtcgcctggcacctgctagcaacatgactagccagaggcctgtgtcttccacaggtatcaactttgacaatccaagtgtacagaaggctctggataccctgatccagagtggccctgctctctcccacctggttagccagaccacagcacagatggggcagccacaggcccccatgggatcttaccagaggcattactgaagctaaatctttcaactctccccagtcccctcatcccctggcctcctcccacttacttgttctaaatagagctgtttggaggatgttctctgcgctcccaggccggcatcgagtgtcatcaatttctaccacctgctctctcttctgcccaaggctgtgttgcttattccttacaaagtttatactgcatttggggctgtatctttttttgttttttgttttgtagaaaataaatatctccgggggcagtacaggtgtctgggcttgtatttgatggggtttctccggtccctgtttctactggatttggagccaggcccagctagccaagtttggaatggcatttgtcatgtcagtagccaccacctttgttcattgtgaacctaccaaggctttccagcttcatacacattgaccagagctcaagctcctgc

SEQ ID NO: 101194 - DNA, 1129 bp, Homo sapiens
tcactacccagtaaaccatgttgcccatgggtgaggagaggaggttatttagggtcacagtttgatcttaatctatgacttttgaactgatgaattaaaaaatggtaggccagctctgtcctgaggagcacagtggagagccctgctttccagaggggcctgttggcctcctgctgctggtctagaggctgttgggcctgcctcccatggctgttccccacgtggtctgtttgaatctgtgggaggatgtcatgtttctttggtttttactacaagtctgtgatctaggaattcccccaaagaaccagctgtatataaaggtgcatctcctcaccaaaagtgttcgttcacttcccttcctggccttcatctctccccccacaccaccccactctcaatctcaaggctttttgtcaccaaaatgattttcttgctggtatgaggttaggaaagacttgacagagtgcagcaggtgggcacttaaatatgtcatggaagaaaataactcatgtcatttcctcctacagagcatcgcaacatgccccaagcagatgccatggtgctggtggccagaaattatgagcgttacaagaatgagtgccgggagaaggaacgtgaggagattgccagacaggcagccaagatggccgatgaagccatcctgcaggaaagagagagaggaggccctgaggagggagtgcgtgggggccaccctccagccatccagagcctcatcaacctgctggcagacaacaggtacctcactgctgaagagactgacaagatcatcaactacctgcgagagcggaaggagcggctgatgaggagcagcaccgactctctgcctggtgagctacgtggcagggccgaggtgaagttctgactctgcatttctctaatccccaggctctgttgggagggtgtcaggcccagggctctttggagtgggtaagggaactaagtccatcccttgggttctcccgtgggccacccatgctgatataatgttaataataactttatatttgggtactgaatgctgatccctatagttaatgtggtggattgactagtattgctggctccgtggtagccaggatggatgcccttttgttttttagcagttctc

SEQ ID NO: 101195 - DNA, 2805 bp, Homo sapiens
tggtgaactagggagagggtgtgacagggttagagaagacaggagccaagattatacaggaccttcatggcattggtagaggttgtagattgaattctaaatactgtgggagcctggcacagtggcacacatctgtagttccagctacttggtaggctgaggcaggaggatcacttgagcccaggagttcaaggctgtagtgttccgtgatcccacctgtgaatagccactgcactccagcctgggcagcataggtgagatctcatccctataaaaataaatacatactgtgggaaaccagggaagggctttacatacgtaacagatcactgtagagtgatctttctggagaaagatttggaaagaggcaaaaacagaaatgaggagactgctttagaaggctcttgctgtggtttgagggtgagatgattatgcgctggccttcagttttgccaaagaaggtaaaggaaagtgggcagaactgagaaagaatggagaaaatttggaaatgtggttggaagggaggatgaggctttaagggaaagatgacatccagtttcgtggcttgagtaactgagtagttggatgtgccatttactgagatgggaaggactggaggaggagcatggttgttggggaagatcaagagttcagggcaggttttacggagaaggtaatccttaaagcgggtcagacataagacattgttgtaaaagggtaaatgccagatcaagatgagtaatacagatagaaagtgccctgagctgagcagaagagatcagcagttaggaagggtagggaaggtttcttggaagacatgggacacgaacttgcctgtgtggattggatggtacttggattagtgcaggaaaaatattccaagtatagaaatcaaataaataaaactattgagatagattatatcttgtgagttataagaattaagtagaactgaggaggttgaattagaaatgagagggagataatagctgtcagatttattaggctttctaacatagaagttggcattttaggatagttagtgtatttatgtgttgaatgaattgaaagcaagtaggttgatttttaattttgtgttttggaaacctgttggtgtcagaatagaaataagggcttggattggacttacaaatccaatgggaatggaaagaaaaagtgaacgggacacaagtgactttattgggatgggggaagaaaaagcatagttaatattcaagaacttaaaacttgataagtggaaagatgattttgtcaaaagtggaaaagtggggaatgggactgatggggttggggtaagaagtttttaattttaaatatgttgaagaggagtttccagtgggttgaaacgtctcatgaagaacattgagtcagagcagacaaagcatatctgtgacttcactgttcaggttgtttttttgttttgttttgttctcttttttttttttttaaaccatcttgagcaaaatggaatcagcttctacgtaaaccctcagattgagagataccaatactcaatagccctgacaaaacagagaaacagattgttcttggtcctttactgtatgtatcttatagtaattttttccccttaattttattatcctgccaagatacttcaagtgcattttccgtactttaaggacagttcctttgatcacttttataagattgtgccattcgctctttttttcttcatgagtcttgcctccttactctgtcactccaactttttaccccttgtaaagtctctttcaagcaagtctggtggaaagacactttcactttgaaagcctgatgaatactgttatccagtcaaaaccttcagtttttggtcatgcattcttttgatgtcctaatcttttgagattgtggaacctctagactatttgctgaccagatggatgactggccttaaatgttgagtcatgttctgtttggctgccctgttttagagaagaatgcttggagggtgggggttttctcatatgaagagctgatgggttggctactttcaatttctttgtcttagcattttcttgctacctcccacagggatccatatggctttggagacagtcgagattcaaggcgtgatcgatccccaattcgaggaagtccaaggagagagcccagggatggcagaaatggccgggatgcccgggacagcagagacattcgagacccccgagacttgcgggaccacagacatagtagagatttgcgggatcacagagacagcaggagtgtgcgcgacgttcgggacgtgagggatcttagagactttcgtgatctaagagactctagggattttcgagatcagcgagaccccatgtacgacagatacagagacatgagagactcccgagatcctatgtacaggtacatacgtagttactctgcttgttttttcctgagttctttttatgtatgttctgctaaactaattgaaagctctgtaagagcagtcattttatcagccttttatttctggtgactgtcaagtgatagatgtgctgctgctcaataaattttgctgaatgtatgaatgattttcaacatttttaacagaaaataacagtgttggaaaggtatggagaaattgaaactctgagaaattgtaggtaggaatgcaaattggtatagccactatggaaaacagtttggcagttccttaaaaagttaaacatagaattaccatatgatctatcagttccgctcctgagtatacactcaaaacaattgaaaagagggactcagttgtacatgaatatgcatagcagtact

SEQ ID NO: 101196 - DNA, 2912 bp, Homo sapiens
atcacctcttcagatgtttcagtaaaccacagttctgctggctttgctctctattcaataatatgactccctgatgactccagctgtcagtgtgtaattctgacaatattggcccagccaagcacagaactctgcatgaggaatctctgctctggatcacatttcagcctgaattcttatcatctaactcttgagggccacttcattgaactcctgtgagtaccttgcatagttaccatgcaagttgtcaagcatcgatactaagcattagtccttcttcaaagacaggatcatgattccagttgtgccttagatatctcagttaccatcttcagctcaacaccttgacagtccagatcttgtagcatatctttatgcagatgtggcctctaggtacaagaagtaagactgtacttctgaatgacttaaagaagaacaaatagaattaacttgtctgcatccaacgctctgcagaggatttttccccatatatttgtgaaagatgttaaacctggtatctctttggtgaaagtcattgggtatcggctcatcagaaataacctggctgtagacaagtttcttatatgacctgaaatgctttctgcttatccacagggccctaatgcttttgattattgcttgctccctggttgtgagacagcccttgctctaggtgggccacaaagaaattccaggttgtgattacctctgcagtaacacttgaagaagtcatcagttctcagcagctgccacctctaccaataagaaagttctgtttgtgctggagaaggttgtcagtgcttcctaaggaaaagcatggacatgtgtaaaatttgggtctgtgaggtgtgatatctcattgcacgtccatatcctacctccacctaatggcaatattctggacaagtctgttgtctccatttctaacagtagcatgaagccctcctggtggaggatcaacatcatacagcagccagccatttagatgatgatatttgtggacagtatatctgtgacagaagtttgaagagctaatgaaggatttttcagggtcagaaagaggctggccctcccaaggaagacattccggtgaacagaaaggaagaaaggagatgctgacctttgcagaaaagaaagaaaaagacaggggtcttcctccctgaccgtctgtagaaccaaagccaaagaaaaccatcttggatgtgaagtttcagtctcttgccaaagagaaattcaaagtccatcacagttttccaagatgatcatctatcagttcttactctgtaggctgtcacatgcctggtgctctgcacacccctttagtcctcaggaagagacacattctaccagaagctcatcacttgccaccagagccattgttttccccttcacccctttcgcccttacgtctcaaatgtttcccagcagtgtgactatattcccctcaaggcaaagagtatttgcctttttccccctcctgaatagatgaggaatttacagcagaattttagttgtgtttgccacctgccttcagtttgtggactccagtgctgaaatttaaccactgttcagtttctttttatcctctagtgatgtagtacctgagggtatgctgcatttggttcctttagtaaaacacctctggtgctgtgggatgatattgttaaccttattatgctccagaaacctgattctaacccacttatcatctgaggtccagcgtctcccacaggaagctttgtcttcttgcactttgattcgtgcatactactgcccttttgttagctgtagtcttgttttgaaaaatatgttggggccagcagcaggagcccttttgttctgaggagttctttgtttgggtcctaaagcaaccctaaagggttttttgttttgttttcgtctccagaagaacagcagtctaccatagtgtttatcttttggagaaaggaaaaaaggctttgcctttccttttgagaaaattattatcttctttgtccctacttccaccatgcctttggttctttttccttttgtgaatatcacctcttctacatttttaccctgaaggcacttgagagggaattagtagttttgttgcacatggacttcaaattatttgagggaaagggtggggcttgccctctcagactggaagattgaacccagactttgcgaatctagagttttagtcaacttgcagggatggactttgacaggtaagtaaggtttttcagtggattcaaaagaatgaggaccaatcataacataacacttataatactccgaaggtggtaaataacatgctatgacatgccccaccccgatttccaccagcccaaggctttgtgtgtggtctgtggtctgtcaggatcatgatatctcagccctgattgccaagaacacttgaaattggattccacctctaatgactacttctaactgctccccaaggcaggtttatctgccgatcattaatccaaaaatactttgcagttgtcctttctctttggatcttgagtgtttgcccacattacatgctacatcagatgttacatgttaggaagattatatgatgtaataaggaaggttgaagtaagaatcttggttagtctttactttattctaataagaaaaataatgcttagctattctcatttaaagtccctggtctatgatatgtttgctctcacaagtcaggaatgctggtgaaccttagaatatataacaaatatttttcatggaagcaaaattggcatttaaattgtttttgctgtgcccgtgtagctgaggtgaggttttccacaagctgatgacatcatgatgaatacctaacgtgtgtaaccatggtagacgacaaaagtatgagcaaaacatgctgcctgctcttgagaggcttacagtttagtagaata

SEQ ID NO: 101197 - DNA, 3097 bp, Homo sapiens
taacaggaggccctgcttcatgggatattggaagttttaagacaatgaaatccagctattacttcttagtaacataaaatagaattatttgcctttgctcttttgttttttaaactctccttatcttcccccccactttcttcctcacaaaaagaatcttacagctgctttctaagagtttagaaaacaaccttttcctccccttggagggaatgtgtcaggtctaggtcttggcagcgtgttaaagcattgacgtaattagtttaagacaaattacgtgttaactagaaaacgaagggacatttcttaccaagccgtgacaatgtactaccttaactcaataataaaaattgcccaagtgacagtgtgtctctgctgaatggcttttcttacaccatctggttgtcattgtagtttttgttgttgttgctttcatttgaaatgtgctgatgatcttgtttttattccgtagcattgaacagatgggttgattattcttttcagatattaataaggcagcggaaagaagaaatatgaatacggctccatcaagacccagccccacacgaaggtaaagtaccctgaagccgtgagttaccttgggagagttgggctctggggagttaagcccagcttcgtacaccaaaggtcttttcttccccccaacaagtgaaacgctcaagcaaacaataagaacatgaaccctgtgtgaagggccttgctgctttttttaaacatacatcaggagatacagaggaagctttgtgttttcggtggcaaatccagcaagttcagcttgcaacatgagttgcaggcaattggaagaggataaacctctgtctgtccccagctcacgtgtcattgggagcctccagagcagaaggagtgccccagagtcattggtgtatgccatgctgcactgcagtgggcagcagagattcgactcttcattccaaatggctgccggtccagatgttaacccaggtttacggaaagtgctgcttgagagattgccgctgtgcctgtgctgcagatcccctgtttgcttacatacttgggttatctgtttgaggggaaataaaaagggcaaaacactccagctctcgaaggtctccctttttcttagctttcacggaaatcgagggtgttttcccaatgtattcttccttccggtgtatacaaaagagataatcctggtgtgtaccctcaagatacacattaaattggtccctcctctcaaagaagagctttattaatgataccatttacaccaaaaataaagatactgtattcaattgttctggccccataacagcacacaagtggatgcagttttgtgtagagggcagacagatatgatatatttcatacgaatgatatatttcatatctggtgtctcttcaaggcccaaatggattaattgattttgccttgcctctaagtaaaaaagccagttttccccagaaacataactaaactacgtaccacagtaaactgcatttcctacagtgaactggacagtgctgcatacagtgaatcctcgtctgtactggtagctccactggtcaccttgtgaacccaactaactgagcattacgcataacatacagctgtcctgcttttggacaaaaacacctgtattttgttacctgcttatatgaaagaatgtccactgtgtgtttcatgtatatactcctacttggatgtgaagttctagctaccgggaatagattacgcatgcccactctgcagtttaagcagaccctaagggcaagtaatgctgctggtttcattcagttggagtctttgtccactctgcctgtgcagcagagttgaatccaataccatagctacagctatataccacagctgtcgtgtggattccctggccattcgttggtttcactgcggaagtgggcatgtaaattggtattctgtctgttctctctaaagaatgcttgcagcttgcaggtaaatactctgttggttgatttgtgtgtatgtgtgagtatcctgaagaacataaacaaatcctgcagaacttcagcagttccgtataatgtctgctttcattagccttcatctaaccatgccacagatcttgggcagtcctatctgtgttgctccttattgtcccagcacagaatggaatacaggtggataagagttgcatctaatcttcagaagtacagggttcccattggaatctttagttgccaggtggcttgaaaggagataaggtgtgtatccaatttccaaagagcgctaacgtgtgtgtttcctggtgacttaccaggagtgtggaatttgtaactataaaagacactgactccgctagtaaaatcctacccctctctgttgtctccatgatacttggtgatctctggataatgtctgtgtgtttctgcaggcaaaaacaacaacaacaaataagccacattgcagaatagagaatagatcctgtttctgttatggattgagaagggtattttatatcatcctgttaatgatacttaaccaaatgcttttaacatttctagttgattgtagatattcaacaaacattgcagtgttggggaatgaccaacttccctggttgaaacccagtaatagccgttgccagagcattaaattaaaaatattaatttaccccaatctagaaatagttttatgctttttttaaataatagtccccgcacaaacaaacatacagacagcactggagagggccttataaaatgagcttctagccaggcacagtggcccacacctgtgatcccagcactttgggaggacgaggtgggcggatcacttgagctcaggagtttgagaccggcctgggcaacatggcaaaaccccatctctacaaaaaaatagccgggcgtcatggctcttgcctgtactcccagctactggggaggcattgaagcgggagaatcacttgagtgcagggggttgaggctgcagtgagccgtgatcacaccactgcacttcagcctgggcaacagagtgagtccctgtctcaaaaaataaaatgagctccttaccaactatataaatatacaggtcacctttgtatgccttttaaaatatcacc

SEQ ID NO: 101198 - DNA, 1864 bp, Homo sapiens
tcctagtcctcattgttttctgtggctgtagcttatgaactataaaatctggttttaaggtgaaaagagttgttttatgattgtacaattaaaaaataagtagaacaaagtagtttttggtactgtgagtgaaagaaacatgcatttttatttatagcattatccaaggaccattttgtgacccctgtctggcatattagtctaaaataaaattgtggattagatattgtatattttgggagttcttcaccccatccttttgtagtttataatggttctgccatttccagcatgttttctagattattttccagttcttttccttgtatgtaaagctctttttcttgtctaaaaattcttaactgagaagtgcttttaactgttttcagaccaccacttggacactatagatattcaggccaagataaagcacttcatggtgattatgatgattttgaatggcattcacattgctagtataattaacaaagtatagaagtatcacccaaactgaagtggagaagacactgagagatgacttttggtcttaagggcagttggccagaataaagtatagcagaaggggaaagaagtaccgtttcttcccttttctattcagaggagacattagacctctccttggaagagattcccaagttgccacttccctcttgttgattaatttttctccaaccagagttccccatctgatgtccagaaagatctccaaattgtctttctacctttttttcccttctttacattaacaccatttctatttgcttggtgttgattatatctctctataaggatttaggagaaaataatctgattatttaatacaaaataaaactatagattagatactgtgtctttctttgggaattcttcaccccattcttttgtggtttaaaacagttctgtcatttcctacatgttttctggattattttctggtttcttccttttatgtaaagccgtgagttggtgctttagcattctcaatatttgcattttcaaagaaaatcttttttaaatgaaccctctgcttccaactgacaggttttcaaattctgtgacaaaaaaaataggatgagggaagttttttcttgacttcttgaatctttgctctccgtgattagttccttaaagttatttattcttctgtatttctgaactcatggatttcccaaaagttctatgtgcacatgtgttaggattttttgggtgtatggggattggcagtaatgttggtggttgtgtttttacaactctcactgaaaactccccagccctaccctaatctgagcaattctattagataggaaaaaaaaaaaaatccaggtctcattttctccatacgtcagcccagatggaaatttaaggaactcttaaatagagatgaataaacagatacttgacatactacactaaaagtttactaaaccctaaaatgagacaattatctgagaattcttgtttttgcagaagaaacatcccatgctgtcaaatataaatactttggactacccaatgaaaatagatactacgaggcaaattacaatcaaaatggtttaaagatataatcttgaatattctttaatcttttaagtaattacaaaacgattccaccagcttcaaagtaaaatatttatgtccttcattctaactagaactggttttgttccaaagatatagtatacatgaccatgtgatttctccagttctgtatgtagatgctcacgaaactggctataattatacagtgtaatattccttttcatatgtagagagcaaattattggtaatagaaacctaccaattaaagtaatactatatgtgttgtactcttaacctgaatgtt

SEQ ID NO: 101199 - DNA, 1722 bp, Homo sapiens
attttaaaattttaagcagctcagactctttttttgtagtttagattagctcaacctttgcaaatccaaaatcattttttctcagctgatttttctccttgagtcaacatagctaacacaggcagaatatccattttgtcagaaaggaaatatagattcagagaaatcaaatgactggagtaaatttcccaaagtaaggaccacagctcagatttgctatccccagccaaatgccctttccttaaaagaataagaaaggtaggaaattaaatgttgataatttttgtcggaagagttgtggtgaatgttaatagcaaaccccagaaacactgtagtttgaggtaatagaaactgaagtcgtcattgaataagtaggttctaccctgttgggtgtctctgggtcatttaagcaatggagtgtctagcatagactggaccttttccaggttccatcagtatttgatcagggagtcctagcaagaatattctaaatggaaagcatgtctttccactccgttggaggcagcatagcataatgtttaagtactttggtgtaagaaagacctgggtctgagtctcagctctgcctcctgataattgtgtggcctgtcacttaatttctctaaacttcaaattttctcatttgcaaagtagaaattatagcagtatttaattccaagagttgtaaaaggattgaatgaaataatacacataatgttcttagtacacaggctcaggaacaaaataagcattctgtaagtataaactattgtttcccccatttctgttcccaggaataatattctaatacagttaaagatgtaataattattttagttggagaataaaggagataatcaaatatatagggaaagtatagtattcaaagtgaacttaaagggttgatttagaaagagcaagcataacattctcttatccctgacttgttacaatataactcattacaatatccctgatgttgcaatatatcatcaaagttgtcttcataaatatagtttagcgagaagtcctgtcatttcccctcccaatttgggggatttaatgtgtgatattctctgtcttgtcagtatggttttccaactggcattatctttatcagcatgtaatgccactttagtaattcttgattgttagttggttttcaactaagccttttagagagttttatgtcatttgtagtcagttattaaaacagtataggcttctgggttctttgaacagctagtggtggtactgtcactaagtgttgtagttcatgtggctgtcaaaagacaaaattacagcacacttagtttagagatcttaattgtcttttatttgcaactctagaatagggcaacacctcattctataaaatagaacaagtgttccaatgagctgagcagaggcgtttggctttataaacagagaagggagctgaggaaagcagagacaaggagcaaaaagcggattggtcatttcagagttacttttcttgtgaagggtaaagcagtgcagacttccttttcatgctggctaaaactggcctatttgtggttttggccattatttatctcctgatttcgcagaacgtcaggaaaagatctttgtcttggcttgatagcgtggaacttcatcatgaatttggtttggtctttgggcctagttcaggagctcagtccaaagcaatggcctcctggaaattttctttgacaccgctct

SEQ ID NO: 101200 - DNA, 3052 bp, Homo sapiens
gcagccgcctgtctgtgcacgaacggtcggtcactaggagtcctcaaggcttctctggttgagccgcacatcccgcaccccctgtcgaaacggtggagtcgctcgcccgcgggtcctcagcgagtcagtggcgcagtcgggattcgaaccgggcccaaggcgtcccgtggcaccgggcgttctccaggcgtgcagcgccgagcggtgtactgagcgctgtcccccgccaccgtctcgcggcccctgaccgcattctcggggtgtctccttgtggtgtgacaccccacgcgttttgtaggcgcggacctcgggcccagagaacggggagaggaactgttcccgggtttaccacgtagctcagcgccagcgtccgatccggccggctttccaagctcccggcgcggggcactgtccgctccccgccagcgggcgaggggcttctcttaggacggcgttgcacacgtttcagtctcgcgttgcacctttatgtccgtggaccatctgtactgctatttaccaaatgttacattttttaaaaaattcaaactgactctttttttctccttaaatatatttaaggcggcaacttcaatcacaaaccgggtactggaaagccagttatttttctaatgcttataaaaaaaataaatatctgtctgttgaaataaacagtgcgtccttgttcctcctgaaattattctgcgttccacactttgggaaacgctgcccgaggagtagctgattaattgtggttcttctggcttgcactctgtgcacagaatttttcctgaggcaaagcagattctatgaatgccctgggctcttcagggataatgtaacagctttcttgtaaactgttctctttgttgacttaaaagtgttagtcccagggaactgcaagaactgtgttcactcaggtgcacccggtgtgcctgaattttcttacagcgttgtgatgtcgtagccccctgttggctcataaaaagatgtttctacaaatgctggggaagcttttgtgagttttgacaactcttaatttaatgttttctctatgagtcagtctgggtgtgaaaactaactttgtgtctactttttgcaaccagtaaagcccatgctttgcattgtggatattagaaatcacttggctatttgttaacatccatttcttcctttattgtgatttctttgcctttctttgagctcatctgtcactcttcagattgcctttgaaacctctgacacttctcttaacctaaaacttagaaacactgattttccttgtagaatgtcccagcgaatccatattgcaaggctcattggaaggagtttttctagattcagtttgctcaatgttgcatacctgtgaacaccacaagtttaaaggaggcattgacagattaacttacttgtaagttaatagtgtgttcataagatctgtttatgtgaatgtaagagcagatttaatttaaatcattgacaggaaagtcccataagtcagttcaggcttattcaagttttcttcccctcccctcaaaggctgtgtaaaaaaatatatatatatgtatatgtatatatatgtgtgtgtgtgtatgtatctctccccctgttaaaaacatgtttctttggggttaccttggtatgatcacaatgtagaatttacgtaaggctaaggtcattttcttcacatttctgagaatttgatttaagcccggcgtccgtttcagaacttcagcaaatggaaactcatctaccagtgcttgagagctaagaaaaaacaacttgtttgttttggttttgtttttgttttttctgagacagagcttcactcttgttgcccaggctggagtgcagtggtgcgatcttggcccccgggttcaagcaattctcctgcctcagtctcctaagtagctgggattacaggcgtgcgccaccacgcccggctaattttgtatatttttagtggagacggggtttctccatgttggtcaggctagtctcgaactcccaacctcaggtgatctgcccgcctctgcctccgaaagtgctgggattacaggcatgagccaccgcgtccaaccagaataaacaatttttggaaagactttcgtagtctgatgagaaaagatttattggtttgaaacttcattttaaataatcattgcaagcagtccatgtttatgacctgcagatggcagtgcctttgtgtaatgttttactactgtgaggattaataaaatttagttgtgcttttaagaatggaaaatcttcacaagaaatatattaaactttttcttcccttcagtttaggttgttctcttgtttttgactccccacgtgaagaatgaaacgtctattcctgaagtcactgttactcttagtgtagtaatgataataacatacagccagtagtgcatatggtaaatactaaatcattgctcctgcccgtcatcttatgagactgataaactagtttgatcttttttatttatagggaaatgatgactcaaagaggttagatttcttgccccagatcacataattagtagaacatattcaagacatcattggagataattgatttcagggtcaagcaaaattgggaaatgttgagatatagtggtgtccttactccaaaacttctcagaggcatttatgtgctaaatatgtgcaatgtcaatatctgagagaggaagttatcatgatgcctttctcctgctatcctctcatgaatattttgaagtaatagtgttcctcagaactgactactctttctactacgctgtatttcctctctgtaccttgtggtttattaatgattactgcatatctttaagacagctgcttttaaagctcaatatcagcttttttgtgcaaaaatagttgtcctgtgaatagcacatatatttgtttagaccattctgcttaagcagagttaaactgtcaaaaagttaaaagagcaatgactaacagaattatcctttatgttactctcattaatgagagtcattaatgacaggatcagggtaaagccactgtctcaagcagcagtaca

SEQ ID NO: 101201 - DNA, 1043 bp, Homo sapiens
tgtagcatcttgtttacatttcacaataatcaagggggcaggcatctgcctgctttacagatgaggaaaccaaggccctcagcagtaaagtaaattttccaagttcactcagcatgggaatgatagacacaggtttgtaatccaggtcttgttgacatcgaaacctgggatgctagtaaccctaccctgctgcctgtcagtcctgccaggctttccaggacggcccccaccctgagccacatccccaggaacactctgccactccctatccccctcctgggctcataccatgaaagccccatgcagagcctgctactctagagggatatatattatctaaatttgataagacaactcaatttcactccgtgtctgttaccggcgataaaaccaggagacttttatgacccagcatcctcagcaagattgtcaggaacttattatacaaggtctaactggatttctctctgcagatggctgggagccatgggctggaacgcaattcggcaacacatttggggaaataaatgcaaaatgcttgttccagagacttagataaggcagcaggcctccaagctccccaagaatcggatctgcttttcctgggccctgaagggcgatttggggaggatttacgctgtcggaggaggagggaatggcgggctctttctcccctcatcccttgactcttcttgccccagggaaggaatgtgagcgcacctgagacttggagttcagcaactgtaattccctgagaggtagcaattcagagtagacctgggggtgggaggacaggatggtgggcagtggtgagaccaaggttatgaggactgtgtgcattgaaagaggggtgcaggatgatcaaaacgatggggaactgggtcttcactagctgctcgggatctgccatagagtcactccttactgccctgagaggcccgcgtccttcccaaacacacctctaggactggtgtggcccccataaactgggttcccaaacagaccccattccttggatgtgagttcacatccagattcagatg

SEQ ID NO: 101202 - DNA, 1061 bp, Homo sapiens
ccatgctgagcctgtgcttcttatcggggggtgctaatgggtgaccctctgatgaatgagctccatggctgtgtgttagctctgaccgtctaaagacactgcctatagcaacgaaaaagccatgtcgtggagctgcagggacctcagctacatggtgggggagcgatctgattggcaagagtgaccttccaggagactcacaggcaggtgcctaccctgtgtatggggtccccccattgctctcagaatcccccacccccgacttctccagcagcaaaaacagccgtgtcctgcctccagcctgttgcctgggaaatcaggatgcagggaggcaggcggtggcctggcctaggagtgagtggtggactctggagccaggccatcagtctgctccctgagccatcaccgactccgcagagacaccctaggcgccactgctggagtgggcggcaggagggggcctgagagctgggggtgggggagattaagcagcccaggggatgagagcaaatgctgtgctggagtccccgggctgagtttgaagcctgattctgctgctctgtgaagctgggtttctctgggcctccaattctccatctgtaaaatgggctcatctaacagttaaggatgaacggagatcaaaagactgaaaatcactagtgcttaaaaaagggagattctagagctggaccccctgagcccgtatccctactgaacgatactagatgcatggccttgggaaagttaccgaacttcttggggcctcagtttctcatctataaaatgaacgattacagcatctcagagggttgatgaagggatcaaatgagttaatacgcagaaagtagttgaagggtgcctggcatgtggcaagcactttatcacaagtagtagctattatattattatcctctggaaaggagctgaaggaactgggcattttgtctatcctcaagccctcaatgccaggtaaagagcgggtcattatgtgcttgctgagcaaaagaaggactgttgagggcagatgttggaaggcagagctcaggctgataggcacagat

SEQ ID NO: 101203 - DNA, 1076 bp, Homo sapiens
ggcccatccaccttatgtcccccgcctgcctggtgcctgtcactctgcccatcacacacacaagcgcgcgtgtgcgtgcgcgtgcacacacacatacacacacactccacctccccagctcccctcccctactctgcaagcactacggtgacaacaaagaatatggggcggggctttctgcttttttgactcgcagaggggtctgtggtgttaacatctggaccaactttccagaggccaaaacagttctctgccatccagcatccttcccttccccagggaccccccagtcccctcttcgctggccccaaggggcttctacttgaggaatctggtgagcgccacacgactcctgccaaaaacgtcccagtggtccctgaagaaatcatcggacaagagcgtgaagatgtgtgtacaaggatgttcatggcagaattgtttgtaatagcgaaggactggaaacaacccaaatgtccaacagtgggggctggttaaatgaattatgggcagccacacaatggagaaccatgcagctcttgaaaaatgatgatgtagatgtatatttatcgaaatggcaagacattcacaatatattatagggtgaaaaaaagcaggttacggaggcatatgtataaagcaagatgccatttttattttttaaaaatctatatatgtcaagaaggatatgcactgaaatggtagccaagtggtggtaaaattatggctaattaaaaatgctttcatatataaaaaggtacatacatatatacatatatataaatttacacacacacacatacacacacacacagagagagaatcactctgtattaaatacttcatatgagccccgtgcagtgttaagcgctttgtctgtattacttcatttctccagtccttggaggtaggttttgttacaaccattttctagatgaggaaacagaggctcactcagctattaagtggcagagctggaacttcaactctgctctgtctggctccagagcccatgcacctaatcagtaggttgtcatgtttctcattttctcattttgtttatctgtaacttgcctatt

SEQ ID NO: 101204 - DNA, 1099 bp, Homo sapiens
cctgctgtggccttccatagctccctgtcttgcacaagactcagtttccccttatgtacaatggagaggggctgacataggtgcaggcctaagatcttggcttggacacttggcccaaccctgggaagcaggcaggcccccctatcatcaacccagcccacccacctgcctccctccctcgggggacatatttgctgctgggaaagttaatccattacagtttaaaggctccgttcctcgctggcagtaaattacctgctttgcattttgcagcaacaacttaacggtattaatttattgtgctctgtctttaacaaacatcattatcatattgccagccaggattatgcaaatgggagggacaagggagaaagaggctgaatcttgtccccaaagtcaccttgatttattaactttggggccctgcaattggccaggtctgggaggtgcaggtgagtgcagaggccaggagaacccacaaagtctgggcagagagagtcctgaggccagagggggactcccaggggagggcacccttggagggaagggctggctggggcttagagggattcccttgtcaggtgactttggacaagtccattctgtcttgggcttcggtttccccacctgtaaatggaggttgaattaagaggtccctggagctcataacatatgaacttgagattcagcaatacattgtgaatgagtgagagagagagagagagagtttatgtgtttgggcagggtgggctgagtagagaagaagccacgtggtcctggggctgcagtgcccccatgccgggctccctggctgctgcggctcctgagcaccaggctagtcatggatgggcacatggtgggagatgggtgagctggggctgagaagagaggggtctaagggaaggggctacttctgggctgagagtctaaaggctgacggcaggggtcagttcatgagagggtctgagacttttaggctatacaccaagatgctgggttgggaaggggaggcaggaccatgccaggctgggaggcagcaccctttagctcctgattttgcatctggcctgggggctgggctggctggaggtctactcat

SEQ ID NO: 101205 - DNA, 2378 bp, Homo sapiens
ctcgtggcccgagggagatttagtgccagctgtggggtctggaagggaactcaaagtgtttcaggatactgagaacccggtgctggccagaggaagtgggaaaaatgagaactgagagggtgggcaggggtcatgtcctggaggccggattccccgtggaggagtttgtgttccatcctgagggaaaagggtttccagtaagggatcaaccagatcaggttaatacctccgctcagggggctcgccggagtgtttgtggaaaccataccggcccagccagttggaatgggccccagccctaatgctagagcagcccccgacctttgggggccagatattaaccctttagttgctggtggaaaagaaggcccaagggccccacaggaggcaccgggatggttcagaagtgggggacactcaggtgcctcagggtaccagcccaccccagcagagtgtggacctcccaagctgtcctgtgggtgcctgtgtcttcacagctctggcgacggcgcttgacgtgggcttgtccaactggagcttcctgtatgtcaccgtctcgctgtgagtactggccatgccctgctgcctcccttcaggctgaagctgtctgtctgtccagcggggtgtctgcacacccggctgctaggccagccactccaccactctgggaccagcccttgctctctcagcctctccctggcacccagcagctctccgggaagtcgccagcctcttccgtaagcccagcgcagaggagatgctgtgcccacctgccaggcagcgtggggaagccagggagctctcccagaaccccatcatcagagcaggggaaggcaggctgcaaggccacagacaggtggccactggtgggtggtacacgcagccgcagcagagccctatgtggcctgggggctacacaagagtttcttcttccctctgatgttttgcttcagagagcactgttcctgccttcttgtcctcctacttctcatccttccttcccgctcctgggctctgccgagggttaggtaaagaacaggactcagggagctcaacgtcagacctgtaacctcttctctctggtgataaccagaggcctcttagtcagagattccttctgattaaaggtcgcttatcactcagatgacagcccagctctgtttggtcatttcgctcagtgatttgtgctcctgctcctttctcggtgatgggtctgagccctgagctccagcagtgcattgtgggtaattttgcttccaggtacacaatgaccaaatcctcagctgtcctcttcatcttgatcttctctctgatcttcaagctggaggagctggtgaggccccagcgtctcttgtgtccttcctgcccccacagatgctaagaataaagtgggagtctgagcagtggcttgtcctgctgtgtgacagaggagacaagcccagtccaggtggcagtagatccctttctgagaagggacctagacatgggcaatactcagaatatttagaaaccagtgtggcagggtaatgaccaaaggtgaaagcactgcaggatgagggtcccagcagagctgggtctaggaagcaccctgctgtgggaggcagtagccctgtgtgttaggcccagggaggaggtgggaccacttgggggcctaggacagccgtcagtgtggcagagcaagcagggctgttggcataccagctgaccgtcagccctacatgctgacattggtgggcaaggactgtccaggaccccctgggatggagctgaagggtggaaggatttcttgccccaggggcagccaagatggctgctgaccccaggctccaaatgtgatgaacccttgaccctcaagacccccgagttagctgccactgctccccatcctaccagcgcgcggcactggtcctggtggtcctcctcatcgccgggggtctcttcatgttcacctacaagtccacacagttcaacgtggagggcttcgccttggtgctgggggcctcgttcatcggtggcattcgctggaccctcacccagatgctcctgcagaaggctgaactcggtgagcacgtgccactcatcctccagagagaggaaccccggcacaggcagggcggaggcagggcagggccggaccagacctgatggtgcctgtcccccgccctgcaggcctccagaatcccatcgacaccatgttccacctgcagccactcatgttcctggggctcttccctctctttgctgtatttgaaggtacgttgggccttccctctcaagggcacctcagtgcagcagaccacagatcctcgccctgagcccaacacagtggtagctgcagagattattgagatcaaagatgcagtccctcccctggaagc

SEQ ID NO: 101206 - DNA, 1034 bp, Homo sapiens
agaaaaacacaggtttgatgtgtttgacacgtggcagggggccgctgtggcgggtgctgggaccagtggcagaagaatgaggttacagaggccttccttgtggaccaggctgaggagctgggcttagccttagggcatgatctgtttcgtgtgccatctctctggctgctttatagattccaggccttaggggcgaaagaggaaacagggagaccagttagaccagtggcagtcagcaggtgaaagataattgtggcttagactgtggtagtgggaatggagaggaagagaagtagaggggtcaagaagtgtattgaaagtggaactgacagggcaggatttgagaaatgacagaaataagtggtcaaagatgacttcatcatagatttttggttttggcttaagtaaccaagtgtattatgctggcatttactaaatgactttgggatagattgggagcgtgagaaataattacgaaatcttcttagggcatcttaagttttagatatttggagtgcagctaccaaataggcagttagatatatgagtctgatacagaaaaggtcagggctgatgtaaagaatttagaaatcattggcaagtggattgggtaggatgagattatgtagggtaagatttaagagagaagagaagccaggttccaagctttaggcacccaatttttatagattgagttgacaagaaggtgccagcaaaaaagaccaataaggagtccagaaaagcagaagaaaaaccaggagaatgtggtatcgtggcacccaagagaaggttttttctaggaggaggaagtgatccattgtgtaaggtaagaatagagactaagccggcccggcacggtggctcacgcctgtaatcccagaactttgggaggccaaggcgggcagatcacctgaggccgggagttcgagaccagcctgaccaacatggagaaaccctgtctccactaaaaatacaaaattagccgggcatggtggcacatgcctgtattcccagctcctcgggagcctgaggcg

SEQ ID NO: 101207 - DNA, 1031 bp, Homo sapiens
ataggaaacgagaataaatgctgattcttcttttatgtacttactttcaaaataatgagttagttccttggtatcatgcaacagtgaccaattttgtgtgtgtgtgtgttttgttttgttttttaattgttaagacattcctatgccaaatacagcacgatagaagttgttagtcatcttggtaatataaaaacttttaggataacttacagtcatggatcgtgaccttccagggttctgagtgttgaaaatgacttttttccaatcttaaaaatatcacaacatctttgatgtgacttgggcagggagtgggtaagttaaggttgatttatgctgggcctcatctccagccacacttgtggccgcctaggagcattgatgacattcatctgaatcagcatgtttggtgatgatgccgagtcactaggactttggccaagatcttgatgtgcagaccccaggctgttccatcgctctaatttaaaccctttctccttcaggaggtgttggaattggccttctccatcctgtatgaccctgatgagaccttaaacttcatcgcacctaataaatatgaggtgagcagtgtggcgctgccttagacaacagagctatttctgtaactcttcagttggtggcaggaatgagcaaaacaggaaagtcccctgtggtgggtggctgcagtgtatattgaagcctaggaaggctttgagaagaaggtggcatttcaataggatgggaatgtctcaaaggaggagctgtggttgggggggcacccagatgaagcagcaggtatcattacataatgctggacctgaggttcctccaggcgcattgggtggctgccaaggatctgtcacactctggattgtttatctgtgagctgggctctccacattactcttcagcagcagccataggttgtcattacaaagataaggtcaactaggaatgagtcatttacctgggactgggaaaattctccccttttcagtttctctgtggtcagctacccaagagaacttgacaga

SEQ ID NO: 101208 - DNA, 1060 bp, Homo sapiens
ccttggtttcttctcctgtaaagtgggaataatagccacactttcctcctaagaggattgcatgagtaatgtatgcaaagcacttagaagagtggttggcaggtagtcagcataactgttagcagctgccactgctgttggcgatgatggcatcatcatcgccattattgtgaaggagaggggaagggagtcaccaaggtcccgttccttggggatataaatccaagagccctgaagtgaccctcagttagctttgacacagcctcactgggctgtggtctacaggagtgaccaagacggagggaacagtacaaggccatcctccccaccaccctcactgagctcatacagcagcccttggagtttggggctgaggcttcctatgcatctgccccagtacctcccttccagcactgatgtaggcactgaccagcttgcagcatgaacttccagagactaattcccatcatttatcagttcctgttgcagacattaaggccattgtcactgggaaagattgtccccacatgaaagagaaaagtgctctgaaacagaacaaggtgagtagagaggccagtttgagtagctggcccagtgatacttggagagtgccattggtggtggttttttccaggtgcattcttggcatcttcccctctctattcctgaatgttttattaagaattttgaacatacacaaaaatagatggaacctctgtatacacatcacccagactcagcaaccatggccagttctgcccatccacttgtttctctcctttatcgctttgaagaaagtcccaagtatcacactgtttcatctgtaaatatttagtgtacatcgtatagtgtataacattgccaccagtccattagcacacataacaggaaatgaaagtagttatttcagatcaaatattccactgatggtgactttctaccaattgtcttataaatgtcataatttctctacagatatataaatgtttatatggatacacacacacacacacacacacacacacacacacacacacacacccccatacccatcttgtct

SEQ ID NO: 101209 - DNA, 1041 bp, Homo sapiens
aagtaataaatatgaaatattattaataagacattttacattttcttttttcctactaaggcttcaagatccggtatgcatttacactcacagcacctctcagtttggcctaacatttcatgggcctgggggctaccaaactggacctcacaggtctaaagagattgatctagagtcagagcaaactctagggagagctgatccaaagttagaaggagctttaaaaagatactgagtcagatacctctctaaagtcagagcgctctagagcattgctattcagtagaactctgttaatggaagtgttccgtatctgcattgctgtagccgctagccacggtgactactaagcacttaaaatgtggctggtgcaactaaggaaccaaattttcaacttaaatttgttttaactgatttaaatgcaaatagctgcatatggctagtggctgctatactggacagcacagccctagagacagagctactgagtagggaaattgaaggacatagtggtggtacatgtggaaaatggaggagagcctcatttgggcaagaaagaaccaagagggacaggattcataatggtgggtgagacagagggagtgacaaatacaagggagcaagaagggaagcaggatattgtgggagtgaggacaggatggtgagagacaggaatgtaatcaagggttgatcagctaggacagaccgagggagacatagcatgcaagagaaagacagagacagaacatgagacaggaccaggggacctaaagtggggtgtgggcatcagagggacaaaggaggaggtgatgaaccgacaggggaatgtgggggcacagagacagtggggagggagagtcaggagggagagggacatggtgtgggcggcacagggagcagggacagagtgataggagagaggagaggacaagtgagaggaaggaaggaaggagagggccgtgggagggagctggtaggagagtgaactgttcctcctttgtgttgctatctcagtatcattgaaagaaaatggcctttccc

SEQ ID NO: 101210 - DNA, 2226 bp, Homo sapiens
gaccttctggcctggtaggaaagactagtgatcatagtggggtgtgatctgggtttgtggtctaggaaaggatggaggaggaacagtgatttctgccttgaagaagagtgtttccggaaacttttagaggaatgtcttcaggtgacccttagaggatgagtaggcagaccgggaataacaggaatttcagtcagagggcagccagaacccagaaggagtgtgtgattaggcacagagcaaggagcaagtagatgaggaggctagagaggtagcgaggaccagatcaggaaaggttagtctcattcctaaggacagctgagggcatttaattgagcttgtgaagtaaccagatttgcattttagaaagagcacatgaaagacatgtgtttgctaaggggtacctgagggaggagagcagagcaggagctggcagggggatctggaaagaggtataaatccctgttaccacctgtggggtggagtagggctgatgttgggaggtggggccggtgggagtggaggaggagagccaaggatctgaattaaaaggaggcaactttggccggacgtggtggctcacacctgtaatcccagcattttgggaggctgaggcgggtggattgcctgaggtcaggagttcgagaccagcctgaccgacatggtgaaaccttgtctttactaaaaatacaaaaattagccgggcgtggtgataggcgcctgtaatcccagctactcaggaggctgaggcaggagaattgcttgaaacccgggaggtggaggttgcagtgagccgagaccaggccattgcgctctagcctggacaacaagagcgaaactctgtctcaaaaaaaaaggaggcaactttatcaactgtcagaaacaagggaaacctgggagaccacagtgaagggaataaaatgaaaaattagaagtcaagtttaagacttaagctaaacatggactttggagtctgccattttccaatctttgatcttgagcatttcacataacttctctggacttcagtttgctcatctggatatgaggactaagtgagctaatataatactgtgcttagcagggtgtctggcactcagtaagcactttgctcgtattggcagaacaggatgcagaggtgataggattgaagaagtaagctctgagcacttgtgaagctgagcagtcagctgctctaaaatgcagagtctgccagacttcaccttgcagaaccagcttctccctgctggctgcttccctggtcacacccagctaccagcctggcaggaggggccccaagcccacaagtgacaggagtacacaggttcccacacattcctgcctacactcctgagcagctgtcctggtcaccctcttctgcatgtgtggggatgagtgcgcccttctgaaggaaatttaattatgtttgagacttactatttaatcgggttagaagttcaactcatttctggacaaaccttgtgaacaagtaaagatttcactatagaaggcagttcagcatcaggactcaggacttaagtggcctggcaggaaatggctaatgcatggtcactgaagtccagggatttcactgagtcaagccagagaactaagaccctgagatacttgacagtcaagtgagacttcaggtaaaacctcaaactgtcactcatcagactggagctgtacttctttaagccattgatgctaggataattaattaccttcctgccctgatgtttcttaagttggagaaagagaattaaagagaatgaaaatcagaatcacattaacttccacctctattcaaagctgttttataaattagggagaagagtgaggagagaggaataggatagacgaaggtagagagagggagcagtggagaagaaaacctcagagtgaggcaaaggaagaggtgtgaaggggaaaagaagtggcgatggcagggaagagcccctggccatgagagagactggggggagtgggaaggaagggaagttatggggcagggggcacagagcagagaacaagagagtaaggctagagagatgaaagaaacagtgagactgagctaagaagagcgatctcacgcttaagagacagagggcgtgcctgtgacagggcgggagctacaggactggacatgatcaccgattcagggggagggagggatgcaggcagaggcctaactccagcatgttagcatgtgctatggaagtgctgtcc

SEQ ID NO: 101211 - DNA, 1613 bp, Homo sapiens
tgtagttcaactagggcagaccagactcagaaacagctcgtaactttgatctagacaataccatggatgcgtcaccttcttacttgctttagtggaagagaaaaggtatccgtgccctttttggactcttactagaccgtgggaatccgaaaaggtttagacaatcgacaaaagggaatttggatgctcatttcttcattatagggagctttagagaggtcagctttgcgaggagatgaaaggggataagtgcctccccctgacaccacagagaagcttttggtctaagacctttatattctagctgcagaccactgtcaattacccaccttatgagttgtccacagcaagatttaatctcagtcgacctcctatagttaccagagaagtttctaggccactgtcctcctctgctagccagtatgtattcagagaatgcaaagtaaaatttaatgttcctggcagcattagccatttggaatatggctagaaatccagaagtgtgacagaggggcctttcagctctgagaaaaatgacacagagctcacagatactactccataggagaggtgtgacagctccctcaggcccactgatttaggattctctataaaattaaatgaaggcagcagtttagaaaatgaagtcatggtaattaacatcagtaagaagtgatggtcgacactggaaggaggagacaagaattatgaaaagctgtcagaaaaattaaaggcattgtaatctgggaccattttgtttatgggaaaatagcttcacatctcagtagctcctcagggtatcacagtgtcacaacacagaataatcactgatgttctttttgatgaagccgactccttagcagtgattaaattatcactgtagtcacttcagaaataaatgtatataatatgtctttaaaagatttgcataagaatggtcaaaataatgattctgagagaacccttaaagctttgctccctggaagattcatttatgtaggaaacttgatttcctgggtgggctaaataaataaagcataactatcaaagtctggatcaaatattataaaaaaggtgagcctgttataaaaaattacccaaaacaccagactcattgttctctaagccagttagaacggaatcctagactacttactgttgtagagcgtccagaccccagccgtctgctgtagggtgggagggggttgctggaccaaagcccttccttgtttggagtcagtgcttcactagagttccttctagccttagcagtggggtctacctggcacgatgcatgtggcttagaaaccatcacactgctctgtgtccatgtgcaatgtccttgtgacacaagcgtctcatcttcaagcagtcctcatctctctttgaagacagtggagttgattgtgccattaggaaaggaaatcctatttgaattaatttgcactcacaaaaatagggaatgttgcagagtgtaaaatacatctgatggtcagtggattttcgttcattcacccacttttcatttgggaggaaaaaaatttaagaaagcaaaaaaggcccagaattttgacatcaccttcctctcgatagtagtcacaggtgtgtgcctg

SEQ ID NO: 101212 - DNA, 1022 bp, Homo sapiens
ttaacgctgtgagactaacttgattttacagaggaagaaattgaattttgaaaagataaaatttgcttggttagtaaggtggacaggaactgaacccatctcttgcactctactgcctcttggcccaaaggttaacatggcacttacacttccttaggttctcccaacaggtgttggagtttgacaaaggtccaatgtcttctttggtcttgggaaatagataagtgattctgtgtccctgggatgaagcatatggagaaggaagatctaattacccagcaacatttttttttttttttttttttgcagcgatagatacctgggctgaatctgctctacactggctaggtgtgcacacaggcacttacagttacagttgcatcgactgatttcccatggggtgttcacattaaaattcatcttttttgtggctgccctcacacctgtgtttcccgatctgaatctttgtctattttgtgtgtgtgttgcacgtgtctcagctacagtgagatgctggcattcaccctgactgccttcctagagctcatggaccatggcattgtctcctgggacatggtttcaatcacctttattaagcaggtgaggcctccaacattctgtctttctctcctccctcagctgccagttcacaaggcttaaggggagatacaggcaatatcgccattctggtgagatcagctttatattccctggggccagatttttcatcctcaagctctagtcttctgtggcttctgaaagatttgcattttgttatattctcagggcctgcactgagatggaactggaccgtcagaactaaatatgatcaaagtagaattagattgtcagtgagactggggataaagccagccagtcaaccagtactagccctgagtcttttgaccgacttcctgagctctctcttctttttgtatatatataaaaaaaatttgcatttcatttgtaaatttgccttctatttacaaatctgcaaggtagcctgtttggattgtcagact

SEQ ID NO: 101213 - DNA, 1367 bp, Homo sapiens
tgggattacaggtgtaagccactgtacctgaccaattttattttcttttttatttttgagagagagtcttgctctgttacccgggctgcagtgcagtggtgcagtcctagctcactgcaaccttgaattcctgggctcaagcagtcttcccacctcagcctcctgagtagctaggactacaggtgtgcaccaccacacctggctcattttaaaaaattttttgggagtcagggtgtcactctgttggccaggctggtgtctaactcctggcttcaagcaatcctgccttggcctttcaaagccttgggattacatgcatgagccacgcacccagcaagacagcttaaatagaaaaccttcctctattaaaccagtatctgtttctctgtgacttaccatcgttagtgggcctcccagatgcctccagtattcccttggtaggaattttttaaatccataggccaaagcggtacagaaaagatgcagataactacagattggttttggcatactaataactccctgattgattccacaaacatttatttagcaactcctaagctgtgtgaaaaaactagttctgcctcaggtttggatgtccacagaagggcctctgtgagctatccacagagtagtaacctgctccaaggagcagatggcacatatcttgtccctggcctcctagtcccgggctgcacgccagctgatggagaggacccagtcatccaacatggagacccggctggatgccatgaaggagctggccaagctctctgccgacgtgactttcgctactgagttcatcaacatggatggcatcattgtgctgacaaggctcgtggaaagtggaaccaagctcttgtcccagtgagtatgactaaggtctcgttccaaggacttcgacgatttactacatcccacagggcatcctagtctcatttcccttgagtcaaataaggagtttattgaataccacctgtgtgcagagcagtgtgccaagcactagagtccataccaagatatataattccatattgtgattctaaatcgtgtagtctatttgggctctcacaaattaaataacagtacaaaacagtactgtgccaagtgagcagtgaaaataggggctagagaagtcaggaggagagcagtcacgtcgtgacagacctgttaattgctggaaatgtttggtttgatgagggttagtgagcagatggtccagtatctcccaggtgtctgtttgtaatcatcccctgctcctccctcttcagtcacctcccagcccatacacacacacacacacacacacacacgccttcctttgtgtttaccacaggtgtcaacctacccattcaccatctccctgc

SEQ ID NO: 101214 - DNA, 1071 bp, Homo sapiens
ctttttgtatcaggaaatagtacaggaaaataagtctgtcttggttctcaccacctagtggggagtaaacaaatgcaatagaaggcctgtctcaagggtcttgagagaaagttgcttagggagctgtgggaactcacaaaggggaccacctaactcagcctggagatttccagaaagtcttgccagagaaggcgtcacttagctcagatgttaaaggatgagcaagaattagctagagaaataagaaaaggaaaagtattccagtcagagaaatcagcatatgccaaggcacagaggtatgctgtgtttgggaaaagcaggagtgctgggtggctggaggcttgtagcagtcattgagaagccagatattcaaggttccttgatggcctactcgtaggtttcaactctgtccagaaggaaactggggacattgaagaattttaagcaggaagatatgttatgtttagattttaagttttagaaagatcactttagtgaccatgtggaagatgggccttaagaagaaggttggtggtagtaggaacctttgaagaggctaataaggaatgttaacagcccagtgaaggcaagtggtaatggagatgaaaggatggatatgaagagtatctaggaggtaagctttatgagtatggtgatatgctagatgtggaaggaaaggggagaatggaggatgaccctgatttgtgcaagagcagcccttaaaggtcactaaggaagcaaccagaagggtagaaagaacaccaagaaggtgaagtgactgaggagctttgggcagggagagtgtcaggactgaggagagtatggtctgcaatttttaataagcagagagatttagtaaactgagagcagaaaagctgtctaatgacttgggaggttagaggacactggtgatactcacaaaaaagttatggtggggaggccaggtggccacactgaagtggtcaagtaaaagaaaggtaaaacagtgaggactttgagtctactgctgtatcaagaagcttggttttaaaagaaaacacagagaaggtgataatgcgaaggggacgtgga

SEQ ID NO: 101215 - DNA, 1034 bp, Homo sapiens
agagacggggtttcaccatgttggccaggctggtattgaactcctgatctcaagtgacccgcccacctcagcctcccaaagttctgagattacaggcgtgagccacggcgcccggcctacagccccagttcagcaattgctcactgagtatctaccacgtgaccagcactgttgtaagccatttttggtgattgggcggtgtatgtcatagccttcatcttcaggatgcttcaggtatacttggaaagacaagactggatcacataaaatgactagatggtatgcaaggcatcatgaggtgtaatgaagagccagaatcagtatgggctggaggctgcaaagtggctgtcttggccaagctgcatgatgtgtttttaaaaatgttggatttaaactcctctaggcaaggtggtactttgcagtgttacagaccctacatggaggctgcttgttttatttacttacctgcttggctgcccaagacatttgaatttataaccctattaggcatgctatgctggtttcatgtgagtcactagaaaatatttgttgagcacttcttatttgccaggcattgtattagctgctgctttggaactgatcataacattttccaaagttcttccactgggaaatagtaataataatagtggaacaccaacaaatgctttgccttttgtattgactttcctcccggactgccttcacatatgctctcttattttgtcaacaatacacaacatacctgcctagcaggtagggcttactgtgttggggaaacgtggtttcagagcttttgcagtttcttcaggttcacacggttagaattctgctattatgcttagtgctttattatcccacttgatgctcacaacagctttacggggtagagttgatgctaatccccattttacaggtaagaaaatcgttagtgctaagatccaagttcaggcctttcccactccagaacacagctcctaacttgttaagctacacttcctcactagaaggccaaagttggaagaaagctcaaa

SEQ ID NO: 101216 - DNA, 1047 bp, Homo sapiens
cagatttacctcttccttcttgtgtgttttgataataactgaccatctttctgatatctgttgtacctggtctcactgtatgactatctttctctaagtgcttacttgactcttgtctgttttattcaacactccatcagccacacttccagcatactttgtgtactattccttgtgactatttactttttccactcaatgtttagtagtatttgtaaagtgtcaaaggtacttgtattctttgctagtttcctcttcctttccccctgttaaatagtggctggtatggatggatttgcttttttgtattttttgtttctgtatttcttcaaatcaaccaagtaagagatatttgcacttgaaatttgtttaatcttggaaggcttggcctgaagtctaacccctaaaacaatgcatttctaaggaattctcatttcatagcaaacatataaaggctcaccaattaccgttaattgtgttcctttttctagacattgatgatgccttagagaagaacaaggaaatccaagataaacatttgacacaaactgtattcttcagcaacaaaacactgattacagaaagagagaatgtatttgggaaaacacttaatctgggcatgaatagtgttccctcaagaaaaatgccctataaatgtaatccaggaggaaacagtttgaaaactaattcagaagtaattgttgcaaagaaaagcaaagaaaacagaaagattcctgatggatacagtggatttgggaagcatgagaaaagtcatttgggaatgaaaaaatacagatacaatccaatgaggaaagccagcaatcaaaacgaaaatcttattctgcaccagaacattcagattttgaaacaaccgtttgactataataaatgtgggaaaaccttcttcaagagggcaattctcattacacaaaaggggagacagactgaaaggaaaccaaatgaatgtaatgaatgtaggaaaaccttttctaagagatctaccctcattgtacatcagagaattcatacaggggagaaaccgtatgt

SEQ ID NO: 101217 - DNA, 1052 bp, Homo sapiens
tataagaagaccactgccatggctaatggaaagctatagagagatgtaattgtgggagggcagaaaattaaaaatctgtcactgtgttcattttttaaaatgaattttaaaaatgtgctgagcttataccatgtcctggagctattccaattgcctggattactaatcacataaaatactaatcttactctttaggagcatacattctgacagggtgacaaaaatagaaatgtacatctttaaagagcaatgctggacatatacacaagatgaagggtgatcacaaaagaagaaagcttgctccatttttgttaccccttccttgagagcataataattttagtcctgaaatataaacagtatgttttataggactgtagccattaagaatatacacagacacaaaacacatatggggagttcgagaactacaatctctccacaggaaaggttagtgaggagcgggacagaggtcagagaatagaggaactcttttctctaattagtagtcttgaaatttagatagtacggcacatcagtaaaacattcttgcatatacgctaacgtacatttacttaggaattgtagtatatttccaagtgagttccagctatacactaatatcaataaagcttaattattttttcattcttttggctgaaatacaagaatagaagtccagtgaattgctggggtgctccctatcctccactttggagatcactgttataaataatggaaatccataaagagttatttgtaagcaaggactggagatttgtgaccaaatgtgtattttgaaacaatgctctagagcataagagttggcaaacttcagtccgtgggcaaaatctaggccactgggagccaaacgtggtcacgctcatttgttacacacagtctatgactgctttcatgtcacaacagctgtgccaaggaaatccaacagagaccacagggccagcaaagccaaaaattttgaccttgtcctctaaagaaaacatttgctgtcccctactctagaaaaatggaaactggcttaaaggtcaaat

SEQ ID NO: 101218 - DNA, 1054 bp, Homo sapiens
gctatacttataaaacaagttctagagggaacaattcaatattatattctgtaggtaaaacttcttcatgtgcctgtctcatttcaacccacttgatacagtctggtgtctgcccccaccactctgatggatctgttctggaaaaatttagcagtaacctaaatattttcaaacccaatgagtatctttcagttcatactttaccaaactctttgttgcatttgacagtatgactgccccctccctaataggcacctctgataatgtctgtggtatcactcacatgattctctttgtagctctgtaatcatgtcttttttttttttttttaattgagatgaggtctcactatgttgcccaggctggtctcgaactcctgggttcaagtgatcctcccaccttggcctcccaaagtgcactgattacagctgtgagctgccacacccagcttgtaatcatgtcttctttatatcttttatacaatcttttgtttcatgaacattgctatgccattgttagcccattattctttctgattttttttcatgccctttgtggttttaacttgtgagtctttatgctctgaggtatttctgcctctgaggacctcagcttgagattcttgctgaacatctctgtaaggatgtccagaaggcacatggagtcctcatatccaacatggaaataatacttacaacttgctcaatgtgctgctgcttcttttttccctatcagtgctgcttccatctgaccagcgagacaagccagaaaatgaaggccatctttttttttttttttttttgaaatgggctctcactctatcacccaggctggagtgcagtggcacgatctcagctcactgcaaactctgcctcccgggttcacaccattctcctgcctcagcctcccaggttcacaccattctcctgcctcagcctcccgagtagctgggactacaggcacccgccaccacgcctggctaattttttgtattttttagtagagacggggtttcgccatgttagccaggatggtctcaatctcctgacctcgt

SEQ ID NO: 101219 - DNA, 1011 bp, Homo sapiens
gcacccggcgctggaggcgcggcttggcagacggcggacggtgcaggaggcccgggcgctcctccgctgtcgccgcgctggtaaggtgggccgggatcccggcgtgggcggccccgaggctctggggcctgggcgggtgagggactcccctgcgctccgaagctggatttccctcagtttctccttctgtgccttctgcggtgtccggcctttcggaaatgttattctttcatcccttttttcattcgttaagtcttaagaaaccacgtggccatgcagcgtcaagcttttgtcctgaggccgttctgcctggttcaaatctgggatctgtcattattgctcaatgttgaacatgtttaacttccctgagccttggtttccccatttgactcgtttcaattttcgatcattatctttccatttattagttttaagaaacatgtaatgacaagtacttgccccactggagccaggctccctgggttgaaatactaactctgctgcttgtgtagcctttcaacaagttatttagcctctcagcctcggttttctcacctgtaaaatgggagacatagtagcagtatccatgtcatagggatgttgtgaccattagaggaggtatgtgtgtcacgtattatgttcaaatgtgtgcctggcacatagtgcccaataaatgttggatttcattaaattgcctattttttcattaaacatcattgtgcgccagcaccataaactttgtcctcagatgagaaagtgacactcagagagaagtaacttgcccaaggttacacggttactaagtggccggtccaggccctcagctccttatgcctctgactcagaagccctggctttttacttttacgcttcttgcctttcttttatcagtattttttaggtaccagtgggtaccaggacattgttaagtgctgggagatctgggtgggggatattcagtagccaacaagcggacacattgctgccctttcagagacttaagatttcatg

SEQ ID NO: 101220 - DNA, 1532 bp, Homo sapiens
cattgggagaaaaacccagacgccaggaaaagaagaaacaacaaaggcaggagaacagccactttcagacttgaaaatgacaaaaccctcagttgagcctgagcccccggcgcgggggctgctacactacaggacacccagcatcggctttgactgcagactgttcacccacacgagccctgtgcttttggtgtaaataatgtacaatttgtggatgtcattgaatctagaggactttcccctttttatatttgtattaactttaacttattaaaaaaaaaaaaagaaaaagaaaaacgatttaaaaaaaaaaaaaaaagcaaccaaccccaacaacaaaaaagaatgttttggtattggagaagggatggtcagttagcctgtctgtcacacgacggaatggatactgggcccggggaccactttcatactcacgtcctcatccttggatacccaggggagggcgaaccgttttcgctcgtgtgtctgtacgcagcatgttgggatcgggagtttcggcacagactatcccatcaagccgttggctcctttcagctactacgttaccacgttcctaaaacgcaagctctccggaccagacggacacagggagaagctagtttctttcatgtgattgaaatgatgactctactcctaaaagggaaaaaacaatatccttgtttacagaagagaaacaaacaagccccactcagctcagtcacaggagagaacacagaaagtcttaggatcatgaactctgaaaaaaagagaaaccttatctttgctttgtggttcctttaaacacactcacacacacttggtcagagatgctgtgcttcttggaagcaaggactcaaaggcaaggtgcacgcagaggacgtttgagtctgggatgaagcatgtacgtattatttatatgatggaatttcacgtttttatgtaagcatgaaacacaggcagtatgagagaaagcaaggcccgtcatgctgtccgtacactacgtatgctgtagagccattttgtatgttgtgtaaaacaaaaagcattgatgaaaaagcaaaaggtgatgtatgtatatgagaaaattaattgtacgatatcattccagtacgttttgttgtacattttagtcttgtttactttctcttcattgttaagaggatgcgaactgtacagtttccagctagttacccatattagagaagaaataagagagtattagaagaaaacaggagagaaagaacatttgtgaattgcagttgtcaaaaaaaaaaaatagcctagctggccttatttgtgaagcataattgcttttagcatatggaagtattttttcacattttctttgtataaaatttgtattaaacttaaatatctttttgatggtggtgtttctttgtgactgagccagtagactcacactatatgcttttttgggtttgcccgttccttcccccacccccccagttttttcagatttctttacctttttttaattaaactgttttggaaaaatgccgtggtcgtcctcg

SEQ ID NO: 101221 - DNA, 1033 bp, Homo sapiens
tggtttaactgatagtattacctagtcagaggctagcatgaattaaaagcggactgacagaattttgaagtaatgtactttctccttggatatggcaaaaatctggagggggttctgttagtgagtggagtttaggaaacagtgaatgttctagggtacagtgaggggccactctggtgctgcgttccagtctgttcagtgtgggagatggtacctggggtttggccacctggccgccctgtgcccatcactcccacctgaccgtgccaggcagaggacactgagatgctttgggggcagcgatgagcacccccatgactccctggatttccctgtgggggcgacagtagcctcagtgccttgagtccatctttttctttttgtatttctagacccttgacctttctggctccagagagacgccctcctccattctcttaggctccaaccaaggctctggtatgttgccccctggtgggcgaacggtgctttcacatttcagatgggcagatggggagccattttgtcagggagaatttgaagggtttattccaatggtttccaaacgattatggatccttaggggtgcctggggtgggtcagtgggggtgagggggtagctgagcatgttaactttcaggtacctcttcaagctgatcggtattacctattgtatttactggggatccacataaaactccatttggacagagggttctgttgctgacctggggtagggtagaagaagtgcatttggattgggaagttttttttttctctctctctcagggaaatgagaacggtaaatgacactgtgtaagattttattctgaggttctgacacctgcatatggtggatgaaggcgctcaagcctttgagaattgaaggcagtgcttaagtggatgatctttctgttaaatcctttccttttggagaataacctggcaggcaggtttggggaaatttctgagacttgacatctaggttttttcttctgtggggtttgagctgtcttccttccttagcccaaag

SEQ ID NO: 101222 - DNA, 1034 bp, Homo sapiens
ggtcttgtttgcctcattctcccctagaggtcttgacttgtatctcagatgtgggccggcgctcagtaaaggaggccgctgctcgcggagatggaagacgccgcagaagtggcctcagcgttaggtgagaatgtactcctccagcgcggtgtgcttggcacgtcgaattggttcggcattcctggctttcataggttttacccagaacttggtggcgtcaagaccgtgcaggtgaacctgagtgaaatccggtttttgtttgttttttcttcatgcattggctagttgtaggtaaaactccaccatccacgacggtgggcagccattctcccccggaaacaccggtgctcacccgctcttccgcccaaacttccgcggctggcgccacagccaccaccagcacgtcctccacggtcaccgtcacggccccggcccccgccgccacaggaagcccagtgaaaaagcagaggccgcttttaccgaaggagactgccccggccgtgcagcgggtcgtgtggaactcatcaagtaagtttcaaacgtcctcccaaaagtggcacatgcagaagatgcagcgtcagcagcagcagcagcagcagcaaaaccagcagcagcagcctcagtcttcccaggggacgagatatcagaccagacaggctgtgaaaggtaccgagcctccccttctgttctccgtggcgcccgctcccattttgccacatcgacaggagaaagtcattgctcttttattttttttttttagttctcgtttgtttccgggccattgtatcttgaaggccttgcacattccatttggcattatttttaaaaattgttttgctacttgcttttttactttcaaaaagttttttttgttcattttataaatgatacatgcatatattctccttaaaaagggggcagaaagttttacataaaagtctgttatcccgtttaccttccatttcattctcttcccttccacagtggccagtatcaaccgttgtaaaagcttttctatgcatgtatgcatgtat

SEQ ID NO: 101223 - DNA, 1007 bp, Homo sapiens
aaaaagggtgaatttttttttaaagggtcagcacctgagaagctgccctatcaaattaacctacttaattcctgaatttgtcactggtcactgtttttcatttataaagcaaggactttttaagagaaaaattagcatcccctttgtagaaggatggaaattactgatgtgccagtgaaagcacagcgaagagtctaagtgtgctctctttgcttctgttctgaggttattagctataaaagctgttttgccatctgaagattcatattctacccataagctgcatccctagtggaaggtaagctggaggtcacaacagcgcaatccaaaatgcccttcacttactaaactcttaagtgaaaacacatcattgaaaagatgctctctagcggagtctgacacgagaatttttcaagacccaaaccaccatcagctctgaatttaagatcaattggttttgccccaagccttaggaagctgctctaactgaactgtgttttagaatcatcttcagcttaattgtccaccatctactaaagcttcctggagaaattcccttcagacatcaatgtgaggaaaagttctacttcttttaatcaactagaatggttttttgtttttttggaaagtatgagatcttctaaggtactgtgtttcccattctgctttcagagccaacttccctaactctgaagattgaaatagtacagatttctgtataaaacctttccccagaccacttgctattctaccttcattttccttttacatggatgtctttattttcatcttgtttcatatggttatgtatccttgtcaatctgttgcaaattctttctggaagaggtaggggcacaaaaccaatcaatcaaaagatctgttccagaaagaaagaacagtataaatatgtcactcataggagcactgccatctgcacccaaatattcctacgatcctcatgaaataaatgctactcctattgttctctgcaacaacagagacagtct

SEQ ID NO: 101224 - DNA, 1029 bp, Homo sapiens
ctcaaggcccatccctgacttgctttaagccaccagacaatggaaaccccaaaggacatggagttacatcttattcaagggtttcattgacaagttagctcctgatagaagttaggcacagtcaagatttaaacctggctatcccttaagtcactcgccacatacataaggttttatggctacaacctgtaatttgtcctggggcaatgtttcttctgggcccttagttaattcttcagtatctttattgagcatgttgaatcctctaacctaattgccaagccaactcaaaaatgtgctgaatactttgtcagtgggaaggacatccttccaatcattcccacaccccttttgttgggcttgttaacatgcccaggctgcactaggctgtggggtagtcactgctggttcagaatataaccgtagcctctgagactcaggggatatttggcaatatttgattgccacatttgtgactgccacaactgagcaagtaaggttgccatctggctggtagaggccagggatgctggaaaacatcctccaatacacaggactaagaattagccagggcaaactgtcagaagtgcaaggttgtgaaactctgagctaagttaaatgcaaataagattaaaagccagtaaggccagacgcagtagctcatgcctgtaatcccagcactttaggaggccgagctgggtggctcacctgaggtcaggagtttgagaccagcctggccaacatggtgaaaccctgtttctactaaaaatacaaaaattagccaggcgtggtggcaggtgcctgtaatcccagttacttgggaggctgagggaggagaatcacttgaacccgggaggcggaggttgcagtcagccgagattgtaccattgtactccagcctgggcgacaagagccaaattctgtccgccccccctccccaaaaaagccaatacacatatccaccatactccattttctagtgccctaagaagcactcagtattctggcaccaatcacccaaatactgtc

SEQ ID NO: 101225 - DNA, 1032 bp, Homo sapiens
tacagtagtaggacagtatttgggtgattggtgccagaatactgagtgcttcttagggcactagaaaatggagtatggtggatatgtgtattggcttttttggggagggggggcggacagaatttggctcttgtcgcccaggctggagtacaatggtacaatctcggctgactgcaacctccgcctcccgggttcaagtgattctcctccctcagcctcccaagtaactgggattacaggcacctgccaccacgcctggctaatttttgtatttttagtagaaacagggtttcaccatgttggccaggctggtctcaaactcctgacctcaggtgagccacccagctcggcctcctaaagtgctgggattacaggcatgagctactgcgtctggccttactggcttttaatcttatttgcatttaacttagctcagagtttcacaaccttgcacttctgacagtttgccctggctaattcttagtcctgtgtattggaggatgttttccagcatccctggcctctaccagccagatggcaaccttacttgctcagttgtggcagtcacaaatgtggcaatcaaatattgccaaatatcccctgagtctcagaggctacggttatattctgaaccagcagtgactaccccacagcctagtgcagcctgggcatgttaacaagcccaacaaaaggggtgtgggaatgattggaaggatgtccttcccactgacaaagtattcagcacatttttgagttggcttggcaattaggttagaggattcaacatgctcaataaagatactgaagaattaactaagggcccagaagaaacattgccccaggacaaattacaggttgtagccataaaaccttatgtatgtggcgagtgacttaagggatagccaggtttaaatcttgactgtgcctaacttctatcaggagctaacttgtcaatgaaacccttgaataagatgtaactccatgtcctttggggtttccattgtctggtggcttaaagcaagtcagggatgg

SEQ ID NO: 101226 - DNA, 1467 bp, Homo sapiens
gaacactcctaaccgtttgagacttgtcaaaagagaatgagatgtctgtggaatgcagcactgaaggaccatttgacaagatccaaatgttaacaaacactttggggaaataaatgagcatattggaaaagaagctgctcagactaaaaatgacttggtcactaaaagtaaccatcattttctaacagacttctctttctgtactcaaaatcaatcatactggataccgagcaggttaaaggtaggcaggcccatgtttgagtccaggtcctgttctatgactagctaggcaaccttaaaccaaacacagcttcactgtgcctctctctcagtgtgttagagggtcacataacttctgatttgtttctttaagggtcacataacttttgatagtaagtgtacgaggtaggattctaaaccaaattaagaaaactggaaacagatacaatcacttaccatcctgtttgggagatggttctttgggttccttcttattttttcgaccctcccgcccagaatggtcttctcctaaatctatgacaagttcgctctctgaatcagagtccaggcccaaatggactgttggggaatccgtctcatcttttcccttcagtttatcctttatggggtgaggtgaaggttttgccttttcggaaaagtccttctcaggctcagggctggccttgtccttgactgctccagggtctgccttctcgctggctggtgacgtgcttttcagctcctctttaatctccactgggtttgtaggcttgggcttttttttaacagcagatggctctttgtccatctgacaaccttctttgtcctctgtgtcttctggctcgttcttagacttctgctcatcatcactgatatactcactatcgctactatctgacttctcagaatcctccgaatcgctgtgctctacggccgtatagacatcttccgagatttcatttatgcctaaattcaaaaagaaaacccagcatgtggcgtagtcacaaaataaagagcaggatgaaaaatgcaaacatttttccacaccaaatgctggaataagaaaagcacgtttcaaatcgcatcacattggcctaaatggggccagtaataatctcaagtggcaactggctacggctgccaagtggtacttgccttgggagagggttttggttgttaggagacacaggacctaccaacggagattttaaatttatatggcactaaacatgtggtgccaaatttttgcaacgttgataactaattgggattattgagaatgaagagggctggaagggaacagcagggacaagctgttcaaactgatccaatttacagattagaaaacagaggcccagggatatcacctgccctaggacacaagacagaggccaggccagaaccccgggttcctggctccccaccaacactcttcccttgggtttccaaagggttaaagttcttgat

SEQ ID NO: 101227 - DNA, 1002 bp, Homo sapiens
agccaggaacccggggttctggcctggcctctgtcttgtgtcctagggcaggtgatatccctgggcctctgttttctaatctgtaaattggatcagtttgaacagcttgtccctgctgttcccttccagccctcttcattctcaataatcccaattagttatcaacgttgcaaaaatttggcaccacatgtttagtgccatataaatttaaaatctccgttggtaggtcctgtgtctcctaacaaccaaaaccctctcccaaggcaagtaccacttggcagccgtagccagttgccacttgagattattactggccccatttaggccaatgtgatgcgatttgaaacgtgcttttcttattccagcatttggtgtggaaaaatgtttgcatttttcatcctgctctttattttgtgactacgccacatgctgggttttctttttgaatttaggcataaatgaaatctcggaagatgtctatacggccgtagagcacagcgattcggaggattctgagaagtcagatagtagcgatagtgagtatatcagtgatgatgagcagaagtctaagaacgagccagaagacacagaggacaaagaaggttgtcagatggacaaagagccatctgctgttaaaaaaaagcccaagcctacaaacccagtggagattaaagaggagctgaaaagcacgtcaccagccagcgagaaggcagaccctggagcagtcaaggacaaggccagccctgagcctgagaaggacttttccgaaaaggcaaaaccttcacctcaccccataaaggataaactgaagggaaaagatgagacggattccccaacagtccatttgggcctggactctgattcagagagcgaacttgtcatagatttaggagaagaccattctgggcgggagggtcgaaaaaataagaaggaacccaaagaaccatctcccaaacaggatggtaagtgattgtatctgtttccagttttcttaatttggtt

SEQ ID NO: 101228 - DNA, 1703 bp, Homo sapiens
aaatacaaacacccagatctggtataattctgggatcctaggcttgtgctactggtaggtaatgattggaaacaagaaggaaaagtgtaagcacatatgtgataggaaaagcttgggtactgcagtccaaaggacatgaattcaaatcctgcttttctgtttttattactggtgtgaccctgaacaagttatttatctctctgagcctcagtttctctatccgcaaaatgggactgataaaagtatcaacctcccaagacaatctatatgcagtgcttagcatagtgtccaaggaaacactcagtaaatggaaataataaaattcttattagcaataaaaacaaatcaagagttgggccagctgcatggaaggacccaagaggattatttaaatggcatgccaaatttcacccatgccacccaatgtcctcaccaaacaggcaacccaacgggagctgttgtcctctggatagccccagatgggtccctaactctagctgctttctcacctgaagatgcagagcacccactgacactcagaggagcttgctctccagaggcccagccatcccccacttctttacaaatgccctcctagctttacttacttattcaacaaacattccagagcatctaccatgtgcacagaccaagtaccatagagaaggcaaatcctcataaaacggcctccctgccctcaaggagcttccagtctagattgggagggacacccccacacaaagggaccattgctacttccgagcaatgaagtaccaaaggaggagggcagatggggagggcagtcaggggagacttcctggaggaggtgagatctgagctcagcctcacagaaggcaggattcaggtaggcagtgtgaaggcaggcagcacagggaagaggaagaaaggcaacagctacagaagcagggtttgcccggtggggaggagaccagtctggagggaaagggtttcgtgtcggacacctacagaacacactcactactcgtgtggagacactgatgcgtactgaggagagcagaggcaaaactcagaggatcctcattctgcttgcaaaccttgatgattcaaacctgtatctcgagtttccagactgctttcaccaaagaataaactgatgagttcaaaaagccctgaattaactagcaagtctgaagtcttttgccatgagtggaaatatattttagctgagcaaatagttgaaagttaaagcagctgctaaaagcagccaggattcaaccttgatttcatccaggtggtatccctaccagtaatgataacaatgatactgctggaaaaaaaaaacaaaaccaaaggtatacctaattgtgctttgcaactctctatggtcttgtcaagattcagctggaacctgctacgaatctggcgcttgggagagatgagaggaacaggggtggactgttgctggaccgactcgctcagctccttcaaatccatctcagctttgcttcgatctgaaagaaaccatcacaccctcgtaagatcaggcacacaccatcctcatcacggagcttcgtccttgcaaagtcagagcaaaacacacattttagaacatgggggagggggagatactttttttgtcattcatcccaacaatatcatctgctcaaccaaatggggtgacatgaagataatggcccacgtgaacacgtttggcaggttta

SEQ ID NO: 101229 - DNA, 1561 bp, Homo sapiens
ccaggcatgatggcacctgcctgtaatcccagctgcttcggaagctgaggcaagagaatcacttgaacccaggaggaggagcctgcagtgagccgagatcacaccactgcactccagcctgggcaacagaatgagactccatctcaaaaaaaaaaaaaaaaaaccacaccaacaataaacttgccaggtgatcctaattggcagctaaggctgagaacccctgtatcagaccaatcttctatgtgagtaaagaaaactcactatttgccttaactcctgtgtgtgtgttaacaggacaacctttctaaaccttagggtccataaaaagagacctagacctcacctgaataactgagctctgtgtgtgcacctgcgtgtctacacgtatggctacagtaaatgcgacccattaactttagcctaaaaagactgagcactggaatgttcataatcaagaaaaatgcaaagaaggtaaattccctcattttacaaactgaggtttctctggtcagtaagctgctgttatgtttattcttgttagaataaaccaccaaatggctaggggctgggcccaggccctggaagctgaccttcaggagtttagccgaatgtaatgatctttatccaaacctgcagctgcatttgactcccccctcctccgcagagagaaaacagcttcactttctcatttagctcatgtagcttatcgggacttcttccacccctgcccttctatatcgggaatatcttcagaatccacccttgctgccaacattttgaacttttcagctgatatgaagacagcttaggctataaatggaaaccagggatgaaaaatactcacgctagagaaaaaggcacgatcttacatttctggagggagcataaatcagaaccacctctttagagggcagttgggcgatacctctcaaaatgtcgccgcatgtggcctctgatgctcaattccacttctaggaatttatcctatggattaccctcccacgtgggcaaaagggttcttcattgcagttgtcttcaatagcaaaaatggaaagaagcgtagcgtcagtaagtaaggcgcctgaataaatgttacagtttacctttaaatggaattaaatacagctgctaaaatgaaatgaaggccgatttctgtgtgttgatatgaaaagccaacctgtttcatgaaaaagcaaagactggtggagcaccttagcactgctgtaggggagccaagaaggaaatggaaaatcgctgggaaggctatatattctcagggtttctcaacagtggcactattgatatttgggtcctggataagtctttgtggtgggggtggggtggggtggaggggctgtcccgtgtgttgtaggatgttcagcagcaccctggcctctaccccctagatgctattagcacctacacaccagttgtgacaataaaaatatctccaggccaggcgcagtgcctcatgcctgcaatcccagcattttgggaggctgaggtgggcagatcactcgaggtcaggagtttgagacaagcctggccaacacggtgaaac

SEQ ID NO: 101230 - DNA, 1893 bp, Homo sapiens
ttttaatttacagacagcaaaattcacttttgggagaatacagtcctatgagtcgtaacacctgcatagattcctgtaaccaccaccacaaccaaaacacagagcaggtccatctcccgaagagttccctcccaatgtgtaggcaaaccctcctgcactccaacccccagctatcactcatctgttccccatctctgtaattctgccttttctgatatattttttaaggaaatcctgttttgttagctacaataacttcatcattatccagggtgctccctttcattgtccctgtctggggaaagtcgttccacggctgacagacagaatcaagccctataaagcatttgttcagtccctgggcagtcactggagaattccttaacattgccctgcttgttctgatctcctccccacccacggcacttccatcggtccctagctgatcctcttcccgttaggtcattgcaatcccagcccacaaaacgcccacattcccaatgctcttgttcctgctgacgaagataagaaatgtgtcctgaaccggaagagctgccaggggagacacaagagggcctcggttcccctggtgctcacccaccaccatgcccacccaccaagacacacaacaggaagaaacctttcactcccacaacagatcaagccaaactgaaagacccacagtgtcacgaggaagcccaatgaccacccagtttcagcaaagagctattcttgacaagcatgactggcagagaggaaatgtcaccgtgagaacgcctccaaacagcatttcttttcagggtgtggaggtggaaggagggtgtgagaaagcaaaccacagatttgggaacaatgaatgttcccaaggaagcacgtgtgtcccttttcactcaagtgaggaaccaactggttggtctgaatgggagccccgaaagcaactgccctgaccatcctattacatcagggctgtactcacaggtgagccaggattggagccaggctgtgctccagccctgctgcctctgggatcctgggcaccccatgcctcctctccagacctccctcagtttctccatctgaaaatggcactgtaggacaagatggacctggagggcgccaaccaccaaaggcgtggaattcacacttaagcgtcactgggcacaggtggccgccctctctttctgaaacccccatactggaggctccagggcaacacactcccctggtgtggctactccaccccttgcttctcctcctcaaccagaactccacatcctcaatgtcccaggggcctcactcctgctcaatgctctacccctgactcgcaacctcagtaagccaatggggctggagtctttgttgagtgaggctgtcctatgcactgggggatgtttagcgcaactctggccaccaatcattagatgccagcagtgtccccatcaccccctcaaagtcatttcaagaactaccactctaacccaatcccacgtacacgtcaagattcccagaattacacctcctgcctgaacctggccacagggaaccctaattcctgcctccagctgccctattgacctctccacctaggggtgtaacagctgctcaaatttacataatctaaactagacccttggcttctcctgccatacccagatctgtcagcacaattactgacacaatctagaaattctctgttgggggccctgttctacattttgtaggatgttgggtggtatctccctggcctccctccattaggtgccaggagcaccccaaccccaggtgtgacaaccaaaaatgtctccaaacattgccagtgggtggggaagtgttacaaaattgcccccagatgagaatggttgactgatatggactatttgaaacacagcaccg

SEQ ID NO: 101231 - DNA, 1728 bp, Homo sapiens
gaattagaagaagagaattaaggaatatcagagtatgctgcacataggaaaggtaagtactgattcctcctacttgcttctgtgccatgggtataatttgcaaatagaactgggttaatgtggtcaaggacaactgaggtggaaacactggcctggataaaagcactttgggccaggcatggtggtttatgcccgtcatcccattacttttggaggcagaggtgggtggatcacctgaggtcggggtttgagaccagcctggccaacatggtgaaactctgtctctactaaaaatagaaaacttagccaggtgtggtggcatactcctgtaatcttagctactcgggaggctgaggcaggagaatcacttcaacccaggaggcggaggttgcagggagccgagaccgcacccttgcactccagcctgggcaacaagagcgaaactccatctcaaaaaaaaaaaagtaatttgtatgtcaataagccccaagaaatcccttacttattcttttcacagatcttttctcaccttcatcctctgaaacttttgcattttttgcatagagaaaagagttgaaggttcaagaaccacatacacaagaggatacgtcatttgcaaaaatatccacagttgccacagaaagatactggcaaaaattctgactgacccaggttaagattcaggatgctgccggtggtggaggttttgtccgttttcgtcgtgataggagctgacagttgaggagagaagggctttgggctgccggataaactccctgcttgtcccgtcttggtggaggctggtgaagctgaaaaagtatggcattgttaaaagacaggtttacaaataaacaagtagaacgtgtaggtgtggtgtagggagagaatggagagattatgaaattgtgtttgatttcagcaaggccgctacagtatcacgaatggggtggggtggagcatagcaggttggccatttattttcagcaaagggctttaaccggatgtgaaaccgttaaagccacaaatgaagaaggtctccccagttactctattaagcacaaagctctaagacaaatcggctaagctgccactgaaattggtttggcccattcacggatataaatctcaacataaatagcgattaaaccaacccccacatggtccagatgtggagaacgggagccaggcttacaaatgcgtatcatctgtttgtggaaagacaccacggccagctcacacgcagccactgcacctgccagggaccaacttggccccttgggaaatctccagctcccatttcaaaggttcttgaggctatgtaaagccaaacccagtaccagatggagtgagggagacgttggtaaattatgtccttctttactgtatttcaaactttcacaggaggagagagaactgtacctatgcctaaggcttttaaaaataccttaaaatgacctacgacctgcttctcccctgcctcatttcacagggttaggacaataaaccacttacgtttaaaaaagcaagcattcataggggccaacaagcgtcctaaagatccttcaaatcctgcccctttgtccttgcccctccatggtactgggactgtcctgttaatgcctcttgggcccatttaaaaacagctgggactaaaggcatcactaacaacaatgacagccaactcttccaagatgagcaagaaacattctgagttgatctggtgctgga

SEQ ID NO: 101232 - DNA, 2415 bp, Homo sapiens
atccgcccacctcggcctcccaaagtgctggaattacaggcatgagccactgcacccagccatcagtgactttaaattctgtaataaagaactaatttatgacaaaaacatattgatttcacaattataaaaaaaggggggggggagtaatatgaaacctctttttttttctttgagacagagtctcactctgttgcccaggctggagtgcagtggtgcgatctcggctcactgcaagctctgcctcccggattcaagcaattctcttgcctcagcctcccaagtagctgggattacaggcacatgccaccacgcccagctaattttttgtatttttagtagagacggggtttcaccgtgttagccaggatggtctcaatctcctgacctcgtgatccgcttgtctcgacctcccaaagtgctgggattacagacgtgaaccaccgcacccggaccctctttcctttcttaaatggtaactcacagtgtagctaccagaccaaaggaccattagcccagagggtggtgaatgtcaggccccccgactctgaccctaatacatattaataacttacatcgagatcgcgcaaacaaataccggtgaaggtaaccattctggccaggaggtctatataaaggggaaactacaaaaatcactcagaatattaaccacttaggccacctagctagcaagattataggacactgtgagttaaagacttctggctgagcaaagtgcttcttagaaagctaaatatccagttctaaggattataggcacacagctctgagttctccaatcttctaaacaaaaacaagatttctacactgttgtacaagttttatgcaataacatttcaatctgtagttttatgttactggttacaaaactttcactggtgaggctactatattattttctattctatgacatggcaattattttacacgattttgggtgaactactgtcttatctcaattatattatcctgactgtggaagcattttaatacaaatttcccatctccctccactaaatgctattatcactgctaacagcagatggcagtagggtgcagagaaaggaaacaggtatggatgcagaatctggctgtggggactttcacacctcccttacactctgcatggctctcaatttgccttctgtaaaatgactcagtttcttctaatcctcttagtctgtaatagtggttggcaaactatagctcaagggtcaaattgggcatatcacctgttcctgaggggcctgcaagcgaagaaaggtattttaacatttttttaatggttggggggaaaagaattaatagctcatgaaacatgcaacttatatgaaatttaaattccagtgtctggacacctcgggagactgaggcgggtggattacctgaggtcaggagtttcagaccagcctggccaacatggtgaaaccctgtctctactaaaaatacaaagaacatctgggcatggtagcgcatgcctgtaattccagctactcaggaggctgaggtgggaggattacttgaacccaggaggtggaggttgcagtgagccgagatcgtggcactgcgctctagcctgggcaacagagcaagacttcatctcaaaaaatataaaaatttaaataagtaaataaattccggtgtccattaaaaaagtcttaactgtctacggctgctctattttcttctatctagctagctgtttattgagctagggtctcactctattgtccaggctggagtgcagtggcacaatcacaggtcattgtggcctcaaactcctaggcttaattgatcctcccagctcagcctcctcagtagctgggactacagcagcttgtggctacgttactgcaacaatgactaaatagttgcagagttggaaaaaagacccaaaaagcctaaaatacatactatctagcccctgacagaaaagggggcaatttgtaagagtaaaataattttcaatatcactctctcttcctacactacacattggctaattcatgattagtaaaatgacctaagcacataccagcaaggagattatattttaggaaagggactttaaagtctactcaaatgggggattcaactaacttctcacctaaaaagcactcaaagaatgaggtatatttttccaggaagtctgatgtcatttatctttctccttttgtacctcccaagggaagacagaagctaaattaaacacattatccctgttcttatattcctataaaactgaattttttgaaatgtggtgcaggagaaccaatggtcatatatatgccatgtttcattttactagttatgtattaatttcacatatattaggaaaagccacaacaagcaatttaaacacacgagcctatacattgtgtttagcttaggaca

SEQ ID NO: 101233 - DNA, 1065 bp, Homo sapiens
gcttgttaaatggatcattaattaatccttcaaaccaagtttttttttttttttttttaatagaataagaatcttggcaaacatgcttggctaatttggttcacatcaagaaaaaagcaatcttggaaattactgaagttgacttaaactctctttatcttttgcccttctagggcctgggttccaataaataattgctacctcatgtctaaagaaattcctttttctgtgaaaaagactaagagcatcttcaacagtgccatgcaagagatggaggtttacgtggagaacatccgcaggaagtttggggtttttaattactctccatttaggacaccctacacacccaacagccagtatcaaatgctgctcgatcccaccaaccccagcgccggcactgccaagatagacaagcaggagaaggtcaagctcaactttgacatgacggcatcccccaagatcctgatgagcaagcctgtgctgagtgggggcacaggccgccggatttccttgtcggatatgccgcgctcccccatgagcacaaactcttctgtgcacacgggctccgacgtggagcaggatgctgagaagaaggccacgtcgagccacttcagtgcgagcgaggagtccatggacttcctggataagagcacaggtcagctccgtgcgggggagcggggaggaggccccttggacacgggggtttcccatgggtgcacacttggtgggcccaagcaggtgagcatcaagcaatcgtggggaactgtagggggccacagagcagattttcaagaagtcaccagtggagttcttgctgctagtaacccagaaatgagaaaagtgtccccaaaaggccacctggaggttatacctagaagtagatggagatggccagaaatcttgtggagttctgttcagatgtcgctgcattttggattattgactttccataacacaaataattttgttttagttgaaattgtatttttctgtcaaaaccctacattcatattaaacagtgcaaatcttagagaaacacatatgataaaaaataatacttgacca

SEQ ID NO: 101234 - DNA, 1417 bp, Homo sapiens
ataacctccaggtggccttttggggacacttttctcatttctgggttactagcagcaagaactccactggtgacttcttgaaaatctgctctgtggccccctacagttccccacgattgcttgatgctcacctgcttgggcccaccaagtgtgcacccatgggaaacccccgtgtccaaggggcctcctccccgctcccccgcacggagctgacctgtgctcttatccaggaagtccatggactcctcgctcgcactgaagtggctcgacgtggccttcttctcagcatcctgctccacgtcggagcccgtgtgcacagaagagtttgtgctcatgggggagcgcggcatatccgacaaggaaatccggcggcctgtgcccccactcagcacaggcttgctcatcaggatcttgggggatgccgtcatgtcaaagttgagcttgaccttctcctgcttgtctatcttggcagtgccggcgctggggttggtgggatcgagcagcatttgatactggctgttgggtgtgtagggtgtcctaaatggagagtaattaaaaaccccaaacttcctgcggatgttctccacgtaaacctccatctcttgcatggcactgttgaagatgctcttagtctttttcacagaaaaaggaatttctttagacatgaggtagcaattatttattggaacccaggccctagaagggcaaaagataaagagagtttaagtcaacttcagtaatttccaagattgcttttttcttgatgtgaaccaaattagccaagcatgtttgccaagattcttattctattaaaaaaaaaaaaaaaaaaacttggtttgaaggattaattaatgatccatttaacaagcatgttctaccataacagaacatgaacaacaaaacttcggcgaaaacatttaaaagtgcaacagacttagtcattgtgagccactaaagaaacaatcctctttggttttctcttagtagagaaaaataaatcagccactgcatctgacaacacctctgaaaagagacttattcctcaggttacactcagacataaaaagcttccttttcccattgccatttgaaataggaacagaaggaaactttggaatactgcatccctaaaaggaggtacatgtttttgaatgtaagataattcacacagaaaatcactgaaaaaggagcccattcgcctccaggcgtgcactttccacctcccatcccaggccagttccatcttcctaacatccatatcccacattccaattttgctctgcaaagacccatgacagcatgtttttgcagaacaaacaatgccagcagcagcttttctggaaccagagccagtggcccccgggggaggtgcaaacaccacaaccgctgctgcgggtgaccacgcagctgatacagg

SEQ ID NO: 101235 - DNA, 1135 bp, Homo sapiens
gctgaggcacgagaattgcttgaacgcaggaagcgaaagttgcaatgagcccagatcgggccactgcactccagcctgggcagcagagtgagactctggaggaaaaaaaaaaaatggtggctgtggctgctctgcagggaatgtctataatgggggtaaaagtggaagtgggtgacgtggggagttagctgttgcattggtccagagagaaaggacggtggcttggactgggtggaagcattgggagcgatacatagtggttggattcatctccaaggtgttccctctatgggactttaaaacatcttaaccttcaaaatcatcaagcattgattgaggtccacaagatatccacccctggggtgacacattctaatgtatttttgctttacagatgaatgaaatcgaagtatgtccagaatgttatctagctgcttgccaaaaacgagataactggttttgtgagccttgtgtaagttggatttactttgcttatttcatttactgaaccctgtgccttggatgactaccctgagacagctttttccaggtggcttattagatgaaactttggatggagttttaagataattttttgctgataaaattatggcagaaggaaagtaatccaggtaggataaacctcttaggctgaaagttcatgtgccagagatagcatcatggcttcctgggttgattagcctgggcagactgcaaggtgcagcataaaagagagctcatcagagatgtgggatgcagcaaagcttttcagataataagatgagcttaaatcagtgtggatttacaaatcatgttggttctattttaagaggtttgaaaatacttccctggattaactccatagtccctccaaaacatgattcttgggggaaataaagtcaccctagtttccctgtggatctgccttctccaagctggggttctgcagagagaagtacattgttgggctgcactggtgtgtgtgttgggggtggggttggtgggttggagtgggtttggaggcaagattaggcaaggaaagttgagaaaatatactttgcatctcttcgtgcttttggagattaacaccggaatagctaagccttcaataaagaataaaggtagcaaaatactg

SEQ ID NO: 101236 - DNA, 1401 bp, Homo sapiens
agcaataaagatgtggcttcttagaatttgacttactctactgattaggttttttcttgaatgcctgaaggttttaaaagttcatgctaaaattccacgctgaaaattacacttggaacactgtagattgtgcacattattctgatgctgattttccaactatttgcagcaaaatatgggcagtgaaatgcatccacgaggaagaaacattacttcatattgtcttccccaataactcccaaaccataaatccagtctgtttttaggaaattgcacataccttcatggtgtggtggaaaaaaggaggcattcaaaagagatggagttggaaacctgactttatattaattaagttaagagctgtggaactttagatacattccttaacattactgtatctcagtttgcctttctgtaaaatgggtatgataataagtacttcattaaattattgtgaggtttgtgtgagaccatatgactaataataaataatgtataaatatatgaaataccctgtttggccgggcgcggtggctcaagcctgtaatcccagcagtttgggaggctgaggcgggcggatcatctgaggtcaggagttcgagaccagcctgaccaacatggagaaaccccgtctctactaaaaatacaaaatgagctgggcatggtagcacacgcctgtaattccagctattcaggaggctgaggcaggggaattgcttgaacccgggaggtggaggttgcagtgagccgagatcacgccattgcactccaacctgggcaataagagcaaaactccacctccaaaaaaaaaaaaaaaaaaaaaaaactaaataaataaactatcctgtttattggaagaagctacatgataaatgacagctactataagatgagaaaattccagttattgtgttaaattcaaagagtgcatttttatagggttatagatctcaaaaataaaagcattctttagtcggggtgttgtaggttaaaaagaagcatcttgggaaatgaatagaagaacactaattgatttggcaaatgactgctacaaaaattatgtggggacacaagagtcactgactgtggcttgtctagactcactgtgattatgctccatcgcttttcttcccagaatgcgaaaaagaaaatgtatggctgcacagaagccttcctggctgatgcaaagtggattttgcacaactgcatcatttataatgggggtgagtggcttagatgactcctaagaaagagtatgctgtgtatgtgttgcacaaattcctgtccttcatgaaaaatcaggctcttaattcatattgagaatacttgcgtatagattgtgctaatatatgtgaataggaggcagtgaccaagttcattttaaggtatgagctgacatct

SEQ ID NO: 101237 - DNA, 1115 bp, Homo sapiens
ctgggactacggatgcgtgccaccatgcctggctagtttttgtatttttttgtagagatggagtttcatcatgttgccaggctggtctccaacactggggctcaagcaatctacccacctcagcctccccaagtgctgggattacaggcgtgagccaccacgcccacctggcctttgctttcatatcccattcttgaaacctaaaggttataataatgatgatttttcaggcccctgtttagccacatcttttctcagatcatgtcgtcttcctgagctaaaaatgcttcctgataaggaaatagattgatacgctttttaatagttacccactgatctggtacattttgttccaggagtctttgctaagtgaaacaacaagtctcattgggatgagaattgctttttgtctgtcagttgactgaaaaaatagaaatcagtacatggatggtaatttcttttttctaaccggacgtttatgtatgactttgactttgtagaaaattacagtagcagaatgcatcgagacccagagtaaagccatgacaatgctcaccattgaacagttatcctacctgctcaagtttgccattcagaaaatgaaacagccaggggtaagaagaaagttcctcttggtatacgcgtaaatgaacgtaatgacatatgttttgttctgttaatagcttagctttttaggtacctgatgtattctttgggcctccttgcatccccaaattcaagtatgtgtaaatcacacatgaggtatgatgccattcagttaattctctgtcgtagtaagcactgtatgtcccagaggagtttaattggtacattagtctgttttcacactattgtaaagatattacctgagactgagtaatttatgaagaaaagaggtttttttttttgtttgtttgtttgtttttctgagatggagacttgctctgtcacccaggctggagtgcagtggtgtgatgttggctcactgcaacctctgcctcccaggttcaagtgattctcgtgcctctgcctccccagtagctgggattacaggctcccgccaccgcactggctatttttttttttgtatttttagtagagatggggtttcacca

SEQ ID NO: 101238 - DNA, 5224 bp, Homo sapiens
tatgattttcagtcaataaactattggaactgtctatatatgaggtctgtattagaaatctgacagcatttctgtctatcaatgataaccgtttagtaaatccccattcgtagtatcatcaaaaagtatgcaggatctcaccaacgtagaagatatttgtggaggaaaccatcatgttttactgaaggacagaaaagaaacatgttatacagtgagatttattcgagggtagggaatatggttgtggctaaactattctctgtggttttattgccagggaattgaggctcaaagtgggttgagtcactttcttaaggtcacatagctagttaccaggtctttttgaatcttcccacaggacttacatgtgtacttcctaaataggatttcgtatttgtttctgatagacattttcattatgagtttctcctgagtgagtttttgtgttcaagtgtggctttgctggattccataatataccataatattccataatataccaggaagaggtcgacctcccatgagttggccacccatctcatctttctgccattgctgatgtcaaataagagatatgtctccctagcaaaaacaaggacctaccatgctcaagaattatggctttaggaagcctcttgttggctcataaatgctttatgtattgggggtaaacttaaaaattagataactggccgggtgcagtggctcacgcctgtaatcccagcactttgggaggccgaggtgggcagatcacgaggtcaggagattgagaccagcctggctaacatggtgaaaccccatctctactaaaaatacgaaaattagccgggcatggtggcacacgcctgtagtcccagctactcaggaggctgaggcaggagaatggcttgaacccgggaggcagaggttgcagtggagccaagattgtgccactgcactctagcctgggcaacagagcgagactccgtctctgaaaaaaaagaaaaagaaaaagaaaaaaaaaattaggtaaccattttttggtgactgaaaccctattgatctattctctaaatgtctgccatttgaagaatcccagggcaaactactatgcttttattggctttgtaaattgggacttccataagttgggcttccaaccacattagcattgttagtatggtggcattttgataaacaggcatacattatatcaccccatttaatagcaacacagtaccatgaagtgttaggcattatcatctccattttacagatgagaaaattgaagctgagaggttaagagacttgtccaaggtcatgcacctggttaatggtagagttaaaatctgaacctaggtagatgtgggttataggcaatgtgccattctgctagggctgccttgtaactcttagataccagcttttaatcgtggcctcttaaaatagaaaaaagaaaaatcctcataattttaacaacttgctaattatatatttagtagagtaacctaagatagtttggctttttaatgaatttgtgaaatgctgttattttcttttgttgttattgatgtacttgttcaaattccttttgagaatgcacatttgttttgaaaccaaacctgtctttttgcctacatttcagtcagaactaagacatggtccgttttactatatgaagcagccactcaccacagaccctgttgatgttgtaccgcaggatggacggaatgatttctactgctgggtttgtcaccgggaaggccaagtcctttgctgtgagctctgtccccgggtttatcacgctaagtgtctgagactgacatcggaaccagagggggactggttttgtcctgaatgtgaggttagttcctgatgaatgaatgcattacctgcctcgtttcctctcctttctctttcttccttttatttttaaatttacaaataatccagatagatggaaaagagaaatttcttgctttccacctgttctatcctggtcacccccttcttgaccaacaccggcagtggctgcagtactgcagctcttggaaagacaattgcacggaatattatttctgatttctcatgagtccttggattccttggagatctgtagtcgtcatctctgcatcttctatgatgaactttttgaaagttaactcccaaatcatgaacggctcacacattttgaaaagatctcattctgttttctccgtcttggatgttgttgcctgccgcatcattgaatcatcagcagtagccaagctgagaagaccacgtttggttgcatgttccctgtagtggccgtctggtgctttcttttgtgcaacaagtatttcttgagtgcctattaggtgctgggaattcgacagtgcacaaaaacaggcatggatcatttttttttttccagcagaaaaggacaaaaaccaaaataaataaagttccatataatgaattaaaagaaaagtgctgtgaagaaaacaaattcaggatgggaataggaggtccaagggagtgcaaggtgttttcattttgaatgtggtggtctgggaaagcctcactaaaatttgagaaagacttgatgaaagagaggagtgagccatgcagccatttgggggacaacttccaggcagacggccggaggcagcagtgcatgggcgtagtcggggcagtgtgtatgcctcctgtgtagcaaaccccaggcaccctttattaagccaactattagggtttccactgtttggaggtggctcctgttcttggagacccccaactctgatgtttttttggaattgctgaaaataaaaatgtcatctccacaattatttaatgtggaatgtctcttggattcaaagatacattggaggctgagcgtggtggctcatgattgtaatcccagcactttgggaggccgaggcaggagaattgcttgatcccaggagttcaagacctgtctgggcaacatagggagacccccatctccacagaaagtttaaagaaattagctgggcatggtggtatgtgcctgtagtcccagctacttgggagggtgagcttggaggatcacttgagccgagatggttgaggctgcagtgagctgtaatcatgccactgtattctatcctgggaaataaagcaagatcatgtctcaaaaaaagaaaaaaaaaaggtacattggagtttgatctcaaatgtggaagctttctatgtgtgaaatggaaagatcatccagatgtctttagtagggaaaaaagccagctataggacagtgtctgtcatacttttgtgtagggagaggagaaaaataagaaatacataaaaagaaagtagacatgaaatcaatatgatgacgatgatattgtaatggtgtcctctctaaaatggcaaaaggcggctgccgttctctttgggttactctagatggagaaatatgtagggtttgcattgtacagcggcgccctcctctgcacgcagaggctgacctcattctactacatttgtcatgggatctggaaccttcaccaattttctttagtcttggccaacttttcccaattgtttaatgatattacaaagatgacagcagctctgataggatgcttttgctgcaaataatagttcttttatttttatttgagacatggtcttgttctgttgcccaggctggagtgcagtaacgagatcttgctcactgcagccctgaccacctgggctcaagcgatcctcccacctgagcctcctgagtacctgggaccacaggtacacaccaccacacctagctacttactaagttttttgtagagacagggtcttgctatgttacctaggctggtcttgaactcctaggctcaagcgatcctcccaccttgacctcccaaattgttgggattataggtgtgagccactgtgcccggccaacaaaatatagttgttaatgcaagcactagttcctgatagaagggggctgaaacaatgtggatttattatcatcagaacctagaggcagggccaggccagagtttattcagagccagactctttccatctcattgttgaggtgacatgttctccatggccataagttgactgctagggttcaggtattatgtgtggatagacaaaaattctcccaaaaggaggatgtctctccttgcatctctttttatcaagcagaaagattttgtccatcatcccccagctgatttgcccctgggctcattggtcagtattgcatcaccagtccttgtacaaaaaagccttgaaaattgcatatgtggtgctttttgtgttgtgggaaccaggcactgccagccaggaagaaggagtggggggtgagagggaatgaatgatagttgggcaggcagcccaagtgtttgccatggataagttacctggaaacaaaccagaatcaaacaaacaggtgctctgtgtctaagattcggggctctgaatttcttccagggatgagttgttacggcagtcaactgggaagactgaacgttgcaaggctgtggtagctaagcaaatagatgcatgcgtcatgcactgttttcagcttctgagtgactcttgtgttggccttttcctcgacaaccaacgagacacatctgagagttccttttggaggccccagagatgtgaaaaatggaaacagaatccaaattaattggagaaaacttttctcagctctccctacacagatggttaaagagtgtttcctgacatgatcagaatttgctatttttgttgttgctgctacataaggattctgaagccttaagatgtagtaccagatttacatagcagaatctggtttcagacgttcctttgggtctcttctttgatgggaatttcccttaggagctgatatctattacccatggagatagacagttaggttaggttgtgctccttgtgtactttgacacagtgccttaggtgggttcaaagtaagggagatggacaatgaagtcatacgtattattagtccactgctttcccttgtaatctttctgcagggaagtctgtccctttccatcagtgatgtcattgaattaatgccttgtcagtttcctgaatgacagcccagaaccttaagaggatcaggataaatggttgataagtacccatcctgtgaagtaatcaccctgaaatcatccgtggcctttactttctttttttatacatacatatttttgagacagggtctcgctctgtcacccaggctagagtgcagtggcac

SEQ ID NO: 101239 - DNA, 1054 bp, Homo sapiens
agttttctcatctgtaaaatgaagggtttagaggctgggcctggtgactcatgcctgtaaccccagcactttgggaggccgaggcaggtcgatcacgaggtcaagagattgagaccatcctggccaacctggtgaaaccccgcctttactaaaaatacaaaaaaagttagctgagcatggtggcatgcgcctgtagtcccagctactcgggaggccgaggcaggagaatcgcttgaacccgggaggcggaggttgcagtgagccgagatcgcgccactgcactccagcctggtgacagagcgagactctatctcagaaaaaaaaaaaaatgaagggtttaggttctttggtaagaggcattgccaggggcaggcttaggtaattggtcacagttccttttcgtggaagcacagaggattctttccagagcccaccctcccttggcagctagcaccagtcagctagataggaaaaatccgttcaccgtttggatcttttctaagggacattctagctttagaattctctggggcaggctagatactcttcagattacaaaaatggagaggcactttagtggacttactggtggattgtatctatccccctggactatgaggtcggatctcatagcactgaaggaaacagtgtcccgttggttctgatgccacttgttcttcagcagtgattcctagggatgcattcatccactttgtgcattattgagtagaggagtgggccctggggatggaaagttgaattaaacgagattgttgctttcatggaaggagacctagcaacggttaaatacccaggcctgtgagaggtgtgtgtttctgagcatgaatctattttcactctcaaaattacatagtgaaatgccagccctgcttttgctccgtggctgtgggcaagttaacctcttttgtgcctagttttctcatctactgaaatggggataatgatactaccacaaatttcacagggttgtgaacattgagctaaatgccataaatagtgatattaaaaatgaaacataaagtcagtttctctg

SEQ ID NO: 101240 - DNA, 1026 bp, Homo sapiens
aggccagaagggaacttgcctcaagccaagcaaccgcttccagacagagctgagaactagtcctgtgggcatggcccaggaggggaaaactcctcaggccacatggggaaaacagtcctaaaagcatgaaaaaaaaaaaaatacaaatacaaggaaacgccccaaaccctaaagaattatataccctcatctcatctgggtccctgctctgtccccgaaacagatctgaaaacccactggaaatttctacacaggcccatttttagccatctttttttgtccaaggcaaatgacagccagcgcaaggcagctaactaaatccaagaaagccggcgcttacaaggatccagaggttcagcgctactagctggcctctgtcccaccagtgaggacaccgttcccagcggctgctttacctgctccttattgttactgttcagtaagccaggtttctttttctttttaatggggcttgttgatgtgtcctgcggcgagtggccattggaagaatgtggagggctggggaactttcttttctgggctgttctctctgcagagccaggatctgaaagagatacaggaccacaggttttaaagcagtcagggaggcctgggccccacagggaggaggtgtggaggaaccaagtgtgggaacagagtgcattctgtcccccaactcccgaagccacttcagtgttcctcctcccagaatatacgtgcccccttcttcactgtctgcttcaacagtcagacaagtatttctttgacctatgtaacatttttgtaaaatcttaacttgttgccaagatacaaaaatcaggaaatttcatgtaataacctagatttttcacttttcttaaaaaaacagattaggagggccaggcacggtggctcatgcctgtaatcccagcactttgggaggccaaagtgggcagatcacaaggtcaagagttcaagaccagcctggccaataccgtctctactaagagtacaaaaattagcctggtgtggtggcacatgccttta

SEQ ID NO: 101241 - DNA, 1022 bp, Homo sapiens
ctgtgggctgtacccaaagcacttgaaacagacgtctgcaaacagaggactggttttaccatgttggcccagctggtcttgatctcgttaacatggttttaccatgttggccaggctggtcttgatcttgtgacctcaggtgatccgcctgcctcggcctcccaaggtgctggggtttataggtgtgagccaccgtgcctggctgaagtgtacatgtgtttaaatgagatgctgaaagatgaaaagaaggggtgcatgaacaagagtggggctggtgagaatccacaaggatgtaatttgtattgatctttttggaggagggtctcaaacacgaggcccagaggcggtgggagcacgggaacttcccggtgggtggggtgtgttctttccacacaattacagttcatagcctattaaacacgaataaatgatgttgttttccacaaaggagaatgtatgccttcatttccttgaagtatggccttcctggtctatcttctttggtttcctgcttttgcaatcaggcatgggcatggacaagtcgtatttctttggggtaagaacaatactggtccctgtgtgatgactgttggcaggttggcctcggtctcatcagcagggacgtagtggggaagagtggcgattgcacatgtttccatctaaaagtggggtagctgttactcagctgtatctggtgctataggggcctgcaggtcctaatctgtttttttttttttttttttttcacgtcggaggcttgccctgtcccccaggctggagtgcagtgacacaatctcggctcactgaaatctccgcctcctgggttcaagcagttctcctgcctcagcctcccgagtagctgggattaaaggcatgtgccaccacaccaggctaatttttgtactcttagtagagacggtattggccaggctggtcttgaactcttgaccttgtgatctgcccactttggcctcccaaagtgctgggattacaggcatgagccaccgtgcctggccctccta

SEQ ID NO: 101242 - DNA, 2776 bp, Homo sapiens
tacgtgaattaactcattgacttcttcgataactttacaaggtaccacttgtaaagtggtaaactctctgaggcacagagaggttaagttgcctttttacggtcacactgcaggggagagcacagccaggttctgcatgcattttgacgccagaaagctgattccccaccactgtggcatcctgcctctctgtcgtttgcaacctggcccatgagagcatatgccttgacctatgtgtcctggtttgcccgggacccagctaagcacatggttggttgccctactcctgtggcctgtcatgcctgtctcagcctgtggaccaagcttctcttttcgttcaggccccagcaggcttgctgtcgacatcattaaggaaattaaacacccacaaaaacacaagaagctcccggcctttcagctgcggccctttcccttgagggaggagacaattccctgtaatggtgtgtcatttcctagcccctggagaacggcatgtgctgtgactcaggcaccggatgtgggggcaggagtggggtggagggcgggtacctgatgtggcctgctggggaggcctagccttgatggaggctggaaaaggggaggtgagttggccctggagcccccagcctatttcagggactgatgccactgtttggaaattgggaggtgaatgtgctttctggggactgcctttgagagaacggtgtcatcagtgaatgacacgactttccaccttttcccagttcctgaaactgtttgttggaccttctctgtccctatacttccatctgcagtttaggggaaaaaaggcaaaatgagagtgtgctcttaaatcatagaccctaaattagggagtcctcttgctacagggctgaggatgaggccctcctggtacaaggccatgtggtacagagattagaagctggccctcggagtcccactgcctgggttgaaatcccagtactgctctggccctcggagcctcactgcctgggttcaaatcccagcactgctccttggtagctttgtgatctcaggcaggtgacttagtggggactacaggaaatgcattttgaacattgcctagaatatcacatataataaaagaaactcttagctttctttctttttttttttttttgagagcgagtcttgctctgtcacccaggctggagtgcagtggtgcgatcttggctcaccacaacctccacctccctggttcaagcaattttcctgcctcagcctcccaagtagctgggattacaggcgcacaccaccactcctggctaatttttttgtatttttagtagagatggggtttcaccatgttggccagactggttttgaactcctgacctcaggcaatctgcctgcctcggcctcccaaagtgctgggattatgggtgtgagccaccacacctggccgaaactcttagctcttcatactcttggctcaggaaagctatgagcctgtgttatcttgaattaagatgccccttaaatcaaaagacatccaggaagtgctgagctccaggatgatttctggtggatcacaggcttgggaaggatctcctcatatgcttggttccttttttttttttttttgagacaaagtctcgttctgttgcccaggctggagtacaatggcatgatctcggcttactgcaacctccgcctcctgggttcaagcaattttcctgcctcagcctcctgagtagctgggattataggtgctcaccatcacattcagctaatttttgtatttttagtagagacggggtttcaccatgttggtcaggctggtctcgaactcctgaccttgtgatctgcccaccttggcctcccaaagtgctgggattacaggcgtgagccaccgtgcccggcctcatgcctggttcttaatacccagtagaccttcccatattgttacaatttcagcaaaatgtcacaaggagaggaaaattctgctgctttccgctccatgccaagctgttttcctgagtcactgctctgtcctctccataaggctgcattcctccctcacccacgttaactcattcagaaccactcatttttgggggatgggtgagaggcagagggttgtgagtgagccagccgggcggggtcacaggtcctactccctcagaaaaggcagcagaaaagtctttcagatccagggtgaaccagtggttcagtcgacagtggctgtttgtcattgttcaaagtttatagatgaaatgcactgggcaatacatccttgtcagaattaaatcattaaagaagaaaaaattgactcagctttctggaaagggtccttatggagcctgggtaccacggctacagtcaggtgtacacccaccagtccatcatcaccagaggcccagcccccactggagtggggggcatttaagtaataatgcccccctgctgtctcatccctccgaaggataccgaatccagcaggcatttcctaattcttctccctacaacccttcattgaaatctcctgctgttgactgatgtgtctgttgtttggaacctatcaaatttcgaccccttggatacagtcactgaactctcatcaactccagggggaattggtgtttgtaacagcaaacagaattggggtttttatgttttgctgaaactagaaggtttggaatactctcaggtgtgggcatgcttgggctaggacccacctccccctacctcttgctgagcagaacctcagtttccccctttgtttcctggtgggcttgggtgatagtcccttgcc

SEQ ID NO: 101243 - DNA, 1201 bp, Homo sapiens
gttgtcgtttttccagagggcctcatcccagctggggaggagaaagggccgcggttgctattgcctctagttgttgagggctaaacactgaattcaattgtaaatcagcctcttttctgtagattgaagcaatttctgtcctgccaggcgagtttggaagttcgccttttacatatgaatgtgccctttaatcaccacttctgcattattgagagaagggtggaggaggctgtgtctagtgggaaaggattatacctcaagtataaaagatgggttttctcatttctaggagaggggcatcagaactggagaatctgaaacaattactaaaaatgttaaaaacaacttcaaaatgcaaaccacagctgtttccctccccccaggctcccttctgatattgtcacctcggccagcagaacaactgcagttcctcgtatttattcacaatcccacgaaatcaatggctcttcggtgcactgcaccggagactttcagctcagccgagctgctgttgagggtgataaattataggcgaaagcccggggacatgaaggcaagtcgctgggtttcagactgcctgattgcaaagaggtgacagtgtccttgccccgccgggcgacctaatgcgtacaagaccggggctggcctggtaagtggtgactcttagcctgttctctttgcttcttcctcctccccctgggagaggccgctgaggatccggaagcaggaatgtctgctgtgggtgagcctctgttctcttttgaacaagagaggctaggccctctgagcagccgcactttctcaatggcaggtaagtgcctcctcttggcgttccctgcccctcgcatgttctgcctccgaggtacttgatgttcctggtgaaatgccattttccccaagttgagagtgacctttcattccacagcctcatttccattccagccctccctatcccggctctggatgagaagttcctgttgatttgcagagattctttataagcacagttcaggccagtgcagtcctctggaggagagggctcagcccggcagctctggcaggcccaagtcagccagggtgcagaccggtcctcgagtttctgtgggtctaagagacggtcagcgttggaggaaataatcatttgctaatgcgagcggttttcatttacaagttcctcctggcttaggcattctctgctgcg

SEQ ID NO: 101244 - DNA, 1795 bp, Homo sapiens
tggcattctttttttttttttttttttgagacagagtctcgctctggcgcccaggttggagtgcaatggcatgatctcggcttatggcaacctccgcctcccgggttcaagtgattctcctgccttagccccccgagcagctgggattacaggcgtcctccaccaccacacccagctaatttttgtatttgtagtggagacaggttttcaccatgttggccaggatggtctcgatctcttgactttgtgatccatcagcctcggcctcccaaagtgctgggattacaggcgtgagccaccacgcccggccaggtttggcattcttaataacacttggcagatgactaggactctgaggctcagagaggtgaagtaacctgttgggacacacagccatgtgagccaggaccagctctctccctagcttgatgagcctcatttgagtggagaggggagtgcagttggaggagtcctgggggaaggtcagtggaggtggggtggggctgggattgtgggccatctggagaattctgctttgattttcaaggaagttctgagccctggagggattttgagcctggcttccttgagctcctgacagcctgagggggtttattgtgaatatttgtgtttctcatcagtgaaccctttttaaaaacaggcttggaagaggtagtctggtgaaggtacagaaagatttgggggccaggtgcaacagctcatgcctgtagtcctagtactttgagaggctgaggtgggaggatcacttgaccccagaagtttgagactaggagatcccatcgctacgaaaaataaaaaattaagtggtcatggtattgcacaccgtggtgttagctacttgggagcctgaggtgggaggatcgcttgaacctgggaggttgaggctgcagtgagccatgactgtgccactgtcctgcagcctggctgacagagtgagtccctgtctcccccaaaaaagagaaaagttgggggaaatgagtttgaaatttctcggttattgcctttttctgtgccctggccccctcttccccccaggagaataatggtaataaagtatggtgctttgatgtgccagatgcctttcattcactttgtatgcattatcttatttaatcctcacaacccttttgggaagagcctaatagttccaactgaatgactgagtcacagagaggctaagaaacttgcccaaggtcacacagctggcaggtgccagcacctggattcagacctagtagtctggctccagagcccacacactgaacgacaatgctgtgttgacgttggccaatgccaagcatgccctttgtgatggagaattaccaggtggcactcacaagcctaggagagacagttgacctgtacagtgaagggctttagagtggaactcaaccgtgatggaggtggggcgtgctgtgtcgatctgcttgtcttgaagcatataaatgactttgcctctctgagcctcacctataaaatgggtacagaaataccatcctggctgggtgtggtggctcacgcctgtaatcccagcactttgggaggccgaggcaggtggatcacgaggtcaggagatcgagaccatcctggccaacatagtgaaaatgggtgtggtggtacgtgcctgtagtcccagctacttgggagactgaggcaggggaatcacttgaacccaggaggcggaggtcgcagtgagccaagatcgcgccactgcactccagcctggagacagagtgagattctgtgctgaaaaaaaaaaaaaaaaaaaagaaat

SEQ ID NO: 101245 - DNA, 2763 bp, Homo sapiens
tgaacatgtttttttttttcctccagcctgcttttcttgggaagtttagggactctgttcccctgtgacatgacccgggtcagggtccttcggttctgagcaggaaagggatggactgcaggtggtctgttggtgtgaagctgctcccactgcattggtgggaaggctggaggtccaggccactctcgggagtagagccagcccggagcctcctcagggacaatagcgcaaagtccatgtgcacgtctctggccagggaagggctaatatcctggacacctggacccaccaacgctgtccccactgggaaagagatgggtcctcaaaaggagataaggtgaccactctaccatcttatgaacctggcaacgtgtttttctctacttgcacttagaaaacaggtgctgagccgtcctcttcttgggaaacttagaaactctgacaataattggtgcagaattcctcagtcctattcctacatctagtccatgtgacctttcagtttctctaactgaatttcaatttttacgcccctctccccttgacacatactcacttattaactgagtaattcccaagccagtcattgccattatgccagccttggcatttagtagagcgttttagctctcaggagacaaagctttcgagctttcaagatgtcaggttgacatttgtgtccgagggtaatgatcctgctgaaagatgctcctacatcaatgggaagtgccatctcgatgccaggtgtgtttgcgtggctaatattttctgagtacttcatggcatgatatgcaaattacttcatttaattttcatactaattccatgatgtgggtgtgtcattcccattttacagttaaggaaactgaggctcagatgaattaaggaagtgtcaaagtagggatggaactagggtcaggttttatctttatttatttattaattatatagagggttattgccgtgttgcccaggctgctcttgaactcgtgggctcaagggatccacctacctcggctttccaaagtgctaggtttacaggcgtgagccaccactcccggccctttgatttattttattttattttatttatttatttttttgagacagagtctccctccatcacccaggctggagtgcctatctcggcttactgcagcctccgcctcctggattcaattgattctcgtgtctcagcctccggtgtagctggggttacaggcgcctgccaccacgcccggctaatttttgtatttttagtagagacagggtttcactgtgttggccaggctggtctcgaattcctgacctcaggtgatccacccgccttggcctcccaaagtgctgggattacaggcgtgagccaccgtgcctggctggccctttgatttttaaacctttttttttttttttgataagagtgtttaatgtccctagattttaaacctttgtacttaaccatgacctgtattccaagggttgcaagtcaaatgcctgaagggcccagcaggtagatcagtgattgtggctggcatctggggatgcagggggaaggggagctttggtgaatgggagagtgtgccaaagtggggagggtgcctccatctgattgctgaccagcaggaatatggctcatccgctgtggccagctgggattttcttttcccctgtaaaactgcctcatttagaaatgtggtctgtgtagactggcttctctaaagatcatgcgtgaacccaacaaaacgcatttccgggtcagaagaagccgagggctgtcattttgcattccctgtgcgagactggccaaggcacaattcattgcagaatttggcctcaccatgcgtgagtcagaacaagcgccttgaaggccagggatttgcagcctgagaaatgatgtactccgcgggttgaattcacgtctccatacaaaggctcccctgtttgggctgcttgcgtcttgatcctgccatgtgtgcgttttgtggtagtgcttgtggtgtgtggatgccagcctgccaaagctgaaaccatttttaaaaatgtctgtgtaatgtcaccggcacaagggaatgaacgacttggaaacacgcacagatgcagcggaagcccaggatattaaaatcttgaacagtatcattcttgctgagatttgctgggggtatggatgtgttttcagagacaggatgctagagaatgtacaattatagcaatttgctaaccagccccagaccttaattagcacaggatccttgttctcactgttgtatgtaaattaagactttcacaaagggattgtttatgaggacggctgtgagatagagaccttctgtcatttttcaaggaaactctttcagaaaatataaccacaaacacttttaaatcacagcgcgatgcagaagtgctgagaatttttctttcaaaaaatgagcatcagtatttttaaccgtattttggctcctctctatctctgacagcccaagaagtgccatccgtgtactgtgcagtggaaagaatttatttgtgagttagatgactaccagattgttcctctcctaacaaggtctaaaatatcccagaactctgaagatgtctgattatggttttgcaaatgagaaatcttctaccttctcttggccagcatcgtctctactgtgcatctgttcatggaatcctgtcggcagtgtctgtgcaatttagctttgtggttcactcatgcaaaccttgtgtttgccccatttttgaagcatgacccacgttatatgt

SEQ ID NO: 101246 - DNA, 1009 bp, Homo sapiens
tggctcacgcctgtaatcttagcactttgggagggcgaggcgggtggattgtctgagctcaggagttcgagaccagcctgggcaacacggtgaaaccccatctctactaaaatacaaaaaaattatctgggcgtggcagcatgtgcctataatcccagttacttgggaggctgaagcaggagaattgcttgaacccaggaggcggaggttgcagtgagccaagaccacgcctttgcactccggcctaggggacagagcgagactccgtcttaaaaaaaaaaaaaaaaaaagtgggtcaggttctgtctcattttgctaactccttctgatgattttccagtacccttccactcaggtctgaagtcaccgtgacctgcctacctgggccggccctgtttacctttgtttcctttgtgatgttctgttcaccttgtgccatttctcccccaacttcacttgagctccttggcctccttcctcttggttccttccttggggcccctgtgtgtcttttgccaggagcaggctgcccatttctcattgtgatctcagacttatctcagatggtggctcctcaaagaggcttttggtggccacggagtctgaaggagtcatttcattattttctgttttaaatatatatataaaagacaacgtctcactgcactgtcctggctagagtgcactggtatgatcatagctcactgtatccttgatctcctgggctcaaagctcactgtagcctcaatctcctgggctcaagctatcttcccacctcagcctcctgagtagctgggactacaggtgcacaccacctcacctggctaattaaaaaaattttttttttgtagggatgaggtcgcagtgggttgcccaggctggtctgaaacccttggcctcaagtgatcctccctctttgacctcccaaagtgctgggattataggcatgtgccaccatgcctggccaattttctattacatttttaaaatgaacttttaatttaacagt

SEQ ID NO: 101247 - DNA, 1045 bp, Homo sapiens
ctggataaggatgagggaatgtctttaaggtgtgtttgttgctagaacttccaaatagctgcccccatggggcaagttctcagccttcctaaacatgaacataatttgctctgtttcagcttggctgaagaggaaataaaaacagaacaggaggtggtagagggcatggatatctctactcgctccaaaggtgagtaaaaatcttgtattatctattctagagctaaggaggaaattggaatttctttttgttgttgtagtgcagtgaagtgtgtggctctctgagccgacgttgtaactcttcttggattttcagatataagattttttgatggatgaacctaattgatggagaactctcctccttttggttttctttccctggtgcctgtgtaggggtcctgacagtgaattttacctgtgtgtcatgactgagggtggctggctacctctccgcagggtgactttcaggagccacagtttaaataaagcatgttctggaagccaccagagcctctagctgctgctcgttttctgattttaacaacagacctctttggaatcccagaagtgggatgaagtcagcccgcttcactggaaagtggtggtcttgggttagagataaaaaggaaatgtagagcttgctgggatgccggggccagtgtttgcatttagttcaaaatttagcaaattaggacaaacacaatttatgcgtttattcacaagcctggagtagactcctgaatatcttctaattgagggattggtacttttcatttggtctttgtgaaagagattttatgaggcttcccaaaatgaagcagttattcacttttaccttcagggtgctttcacaaatgagctactggagtatttttcgtatctttggttgatgaaaaggctcatctccaaacttaatggttgtaccaaggtgttttcattccttcaacaagtcactgagtgctttcttggaacacacagccttgcactgggggttatggggagggaggaagaggctggacagggttactgcatactgccggaa

SEQ ID NO: 101248 - DNA, 2072 bp, Homo sapiens
agagaaggcttttccttaggaacctgtgacttcacaaactctccctgtcattgcagagttttttttaagcttctaaacgttgggttgttggtgtcctttggttcagcttttcctagttctggtatttaggaaggtggctttgaaactcgcagggctgcttaaacaagagctacagctattgaacaaactgctaccattttagcttcaacacaggaatgaggcagtgttgccagacgccattttaagaatcctgcataaatagcttagctaccgatgactctgcctgttttaggtgagtgcttatataaagctgctctgctaaccattcccccccaccccaatttcttaaaaaattaattgtagatttagggaagcatggtttttaattttgatgttcactattttgtaatctagaagaggaagatgttatgccttggggattaaatatttcttacagcctggaccattttggtattttgaatgaaaagtaaaaaccaggaaaagtcctttcgaatgatgcatgattcttgaattgctgtgcgatgatcctcatctgtagaaccagagtcttgtgcatgttggttatatattctagatggcttagatactcttctttaaaagtcaaatagtaggggcacttggggaaaagaaatatgtgggcattgtgtattcaggcatttttctgtcaaaactagatgctttcttttttctctctcttggaagtgttgaggagatgagattcctgggaattacggaccatccctgagtcctcagaattaacaatcagaaggcttaaagcatcctggaggtgcagtagttcatctgcaacttttaattgctcttttttcagtgcatgcaggttaagaagtaagcataggttttcttgctcaggcactgggggagaaatcttttattctttttgggatgggatggggtggtcttggttatctttgcaggtactgttatttctttgaattgcctcaaatgtatcagtttgtgaaatctgcaggcaaatgacttgggtaaatgtgagtgtaagaggtggtggtgtatacaatgtatctaactagttgatggtgtattttcctattggagtgagaaattgtttgcttttcagctaattttacccttttctgtagcgggcccccagtttcctcaacagacctttaaagggaaaaaagtaatgtcagtttgaaacaagagcttgttgtcccattgtttttgatttaaatcatcagggttgctggaagctagcagatatggaaggaaataagctgtctatgttctaagactttaatgtgttaatgacagaagttcagagtattttctccagatgcagctgccttttctttttaagaattatttgactgttttttttcccccaaatgactgaacagttcttaacctaaattgaccaacatcagtggggcaattcagacaggtacagatcttttcttgcgcctacttttgatgtaatattcatttttttttcctaataacatactagttcttaacactaaatcaaaaaaaaacacacacacacacacaaaaaaaccgaaatcagtggtgtaggaaaaaggaagtccctttagatgtggctattcaaaatgactaattttgcattctggtctttgcttttgtaaatgaagttttttttttttttttttttttttctccttttaatgcatagacactgcagtttcctttagtcaaatacaagttaattgtgtgtgtgagtgtgcgtgcatgtgtgtgcacgggttccttttgaaaggatggtttgctgatctgtgaaaaagatggttttcttaaattgttgtgcttgaaatgctgtgctaaagctggtggtgctattgctaaagttgggtgattatggtgcccacttgtaatacttggaaagataaaacagcttaacttttttttccctctctcttctgctccagcattgattatcttaaaactcagaagcaaatagccaccacataactagtttgcattttcctcgtctctcagcagcattcctgcctgaagtattcagctcctctaggctgttacaagccaaataatggttc

SEQ ID NO: 101249 - DNA, 2202 bp, Homo sapiens
cactccgatttgccggggcagccaatcggggatgagcttttattaggcggccagatcatcagccgaagtgccaaaccctttttctgtgagaactaggagcctgtcctccatgttttataagtattgacattacacagtgttaacaatgcatccacagaggtaagctcgactttttaaccatcttttttccccctccctctgagacatccgaattgtgggcgagcagtgtgatttctctgtggctggccgtgccacactcacccccagagcacttatgttaacttggaactgtttagagagaatttttttgctttcttgggtcacatggctcagtagccattagccatagcttgattttgcaaactggcaagggcctggcacacctttccttccaccagggcatggtgtttctggaagagtttgaagctagatcctggtatgccaaaaaagaagcttttttttttccttctttttttttttttctttccctcttccctctctcttcccctctctctctctctgagcagttccccccctcccacccctgcactattgtcttctcttttgccacatgccctgctgggggaagaaaatggaaggtaagcaaacaggctcctctccaaggagagctcatggcagacagcagagcaggcaagtttgcctctccaaagaggttctgggaaggctggataagttttgacaagagaggagcgtgtttgcaaaagaattgtgccctcagcagagcagtgctaaggagagtctagctcctggggcctaggtgggtggtggtgtctgtacacggtcttctcttattctacagagcttctgcacttgaaactacattgttcagcctgttttcctgacttaggttgctacagagtgttctgcaagccagcctacagccagcaaatgtttctgaaagtgttttctaggctttggaggaagttttttggagtagggatggggactggggggtggggggagagatcttggacaacatcctgcaaaaaaaaaaaaaaaaaaaaatctgcaaggattctgaatcccttagctttctactcttgcatgattttcaaggaactaatgttaccttttatccttgttttcattttcctgtcccttttatacattgtatcctcctctcttctcctgtgtcatggagtgtagaggaaataaaatcatgtctgtggctcatgacagcattccatattcagttgttgggttgtgttgttgttgttgtgtgtgtttttaataataccatgtaactgtttaaaaaaatttcctttttgatcaagtcccaaatctgccagcctgttctctcttcctaactgtggaaaaatgagacggttgcttgaacatttgttgggtaagtaaagcaatccatttcctctgtgaccatgtttgaagagttttgcgaacatttggggtctgtttgtaatagtgggtcttggctacaggagttgggggcttcattagcaggaacaaaataagggctttttaaagagtgtcttgattttaggtgactgtttgaatccactgtttttcctgataacctgcagctaggattgaagattatacttcctgtttaccctgagtcaggggagaaatgttcagttcattgtgacttgactctagacctttaatggggtttgtttggatattcaaactgtgagtaggtgatgtgcttgtgaaatgtcatgaaactgcttgttcttagaggtgcagagccctaaaaacattggtggtgtagaagctggtggtggtggtggtatgtgtgtgttgggggggtggtgtcagtgtgctcatgttttaggacttatgtatagtgcaaaatctcatctaccaccagactgggtttgattcaggactcactgaccaacacattttggccttttttcaggtctcctccacacatctgtatgcatgctggccccacataagatttctcactttttacatttcccttgaccacttaaggctgcagctagaagttaagtgggaaaagtagagtcttgtttagcagtaccttcagaatttccctagaagttcagtacataaattttcagcttggagaccaatccgacatgaccgtaaatgcaggaaatatattcaattgctgtgttatgtcaactttatggagtcagtaatcttttttctttcaaatgagtgtccagtagcccactttctgacaccgaattggaa

SEQ ID NO: 101250 - DNA, 1042 bp, Homo sapiens
aatcctctctgtaccctgggaatattaagagagacacgttttaatctatttttattagctcattgcttattaatatcaccaaagaacctgcttgtttaggcctgtgctggcttttctagccagaggcagaatgattggactgttttcttccctttccttaaagggcttaaagccagggtttcccaaccttggacattttggatcagatacttccttgttgtggcggggctggtcttgtgtacttataggatgttttgcatcatccttggcctctacccactggataccggtaatacaacctccctaactgtgacaacccacacgtctccaagcattgccaaatgccccctgaagggcaaatccccccatggttgaaccactggtttcagggaatataaaagcctaattttagagatggcaaagtgttcccccttgacatcttgcatcttgctggaggttgggagggagagggtcgcttcctctgggcctcaatctgtaatgaggggcatttgaatgagtctaatctaaaagtttccttcagcgccatcattcaatactgaaaacccacctcaaaagggtgggtcttcaggttgcagcattgagttgtgatgatgccactgcactcaagcctgggcgacagagcgagacactgtatcaaaaaacaaaaaagcaaaaaactggtctacctcctaaaagaaaacacagattatgcagttgctgttcgtaggtttcagcctcattgtttctgctgtgcttggttcggctttgcttttgcttctttctttagagccaggagaaggtacagagtttagggatgtgaagtgctaacggggtggacatctgatctctggcacttcccagctgtgtgaccttgggcagctcacttcacctctctgggcttagttccaggtttctaacaatgccacctacttcaggaatcagtctatgtaaagcactaatttagaagtaactgctgggatactcactgcagtggggctttaagaggagctgctgaatggatttctagattgagacctgcaac

SEQ ID NO: 101251 - DNA, 1075 bp, Homo sapiens
gcaagcttttggtagagatgatttattcaatgattccaggcactttttatttttgttcccattgtactgatgagaaaatcaaggcacagagaacttagtacttcaagcaaggccgcacagctggcaagtggggtggctgggatccacacccagagagtgtggcaccagcagccacacactcaatcactgcacagttgtgcttcttgatgtggggaagagagaggaaaaaggttacaggtgcaagagaaatggggctagtttttaagccagggctcagatggaaagatatctgatgtagggtgcagcagaagagaggccttgtcggctgtggggaatcctttcagaagcagcagggaagatacagacatgttgaggccccgcggaggaaatggctagctgctgggtggtttggggaagtgggcagatccattgattgtaggaagggtcagagtagaagatcaagtaccacggctccaaggaggagagaacaagttagagaatggaaagaacaggtggatgatcggagtggccggagcagagtgagccacaggagggtggagggagatggtcggaggtcagaagggcacagtgccagccgggaggctggtgggccgttatctggacttgggctgttactgagaaataggagtcattgatggattttgagcagaggaaggacaggagctgacttgtgttttgaaaggatcactggctggccgggaacggtggttcacgcttgtaatcccaacactttgggaggccaacgcaggcggatcgcttgagcttaggagttcctgaccagcctggccaacatggtgaaatttgaaaccccgtctctactaaaaatacaaaaaaaaaaaaaaaaattagccgggcgtggtggtttgcacctgtaatcccagctactcgggaggctgaggcagcagaatcacttgaatccaggaggcggatgttgcagtgagctgagatggcgccactgcactccagcctgggcgacagagtgagactgtgtctcagaaaaaataaaataaaataaataagtggctgggcatggtggctcacgcctgtaatccca

SEQ ID NO: 101252 - DNA, 1057 bp, Homo sapiens
gccagatgctgtgctaagtgagcactttttactacatgaattaatttaatcctgacaacactctaggaggtgctattatccccactttagaggcccagagaggttaagttacttacatgcggtggcacagtgagtgaaaggcagagccaagatttgaatccaggcaaactcactcagtctttgaagctggctggagctcagaccctgagcaaaagctggagaagggaatcctacaggccccctagggctcgttgaagaatttcagactgtggcctgagaacaatgggaaacctgtgaagggttttagaggtgggggttgggggatggggatgtgatctggcccaaattgaaatttcaaaagatccttccagcagctgagggtggaggatgggagcagagtcggggtgaggaggctgttcccttccagcccagatagcagataatggtggctctggagccaagcacctgtgcagaatggagctacgccgccgcagtcggcagtggaaggcgctcagaaggtgaagccacagggcttgggatgggagatggggaagcggtggtcaagggtgatgtccagatctgggacttgagggaccaggtggatggaaaacacagggaggtttggggggcctcagaacacgagatgaattgtgattgaattgccctctctggaatttctgtttgtgtttggtctattttttgctgctgttgttggtaaattggttcctgatcacctgtaagtgttggtttctccatagttttagcttcttgaaattttagaggccaagtaggctgaggtttcatttttcttatgaatgttttccttttttcagatgtgtaaattacttgatctctctgcacctcaggtttctcacctgtaaaatgggggttatccttgtacctgcctcatagggttgttggaggggttaaattaattaatacgtaaagtgtgtttggaacagtgcctggcacatggcacctcaataagtgcaagccactcttccaaggtaaagatgaggaggaggagatgtcgtcatgacaacgaggagggcgatgg

SEQ ID NO: 101253 - DNA, 2851 bp, Homo sapiens
tcacccagtgactttagcagctaaggaacagcctcgtggcttccgaccttgtgcctcagttcgctcatctgaaaaatgaggatgatcatggtccctaccggatgcttgttttgaggatccgtgcttggcataccagaaacgctccacaaatgttaggtattactggacgaaggcaaatatgaaaaaaattaagggcagggctaggactgcattccggttctccggatcccgagggagctcccagtcgatgctgggcgaaagcggccgcacgagcccacgtcgccacgccctccgccgcggaagccagggtgggggtcgctggaaccctaggccggccgcgcaaggccccctgggaccggtagtgctgggcgtggcctcgggactacatatcccagtggcccccgtgcggcgactttagctgctgctgtctcagccgctccacagcgacggcagcggctgcggcttagtcggtggcggccggcggcggctgcgggctgagcggcgagtttccgatttaaagctgagctgcgaggaaaatggcggcgggaggtgagtggagataaaggaggaggcggtggcgggcgagggggtggagtgcgaggcggagggaagaggggcgagttccccaggctgcgagagccagcggcttcagatctgccaaggcactgaggggcgcgccggccgggggacgcgctgaggtagtttcggggtgtcggggccgcgccgcttcccctcagcccggggggcggcccgcggcggtaggagctgagacgaagctgggtggcagtccgcttggggatccgagggggtccccgcgcggaggggtcacccgaggagtttgcggggggactgcaggggcccactttccccttctgtccctaaagttttttcttcctcttgcctcccccagcccttttgaaagctccccgcgtcgtcctcctgctgccccggctccttagcagcttctgggacgcacgggagggaaaagccgcggggaccccccccaccccagcctcccagccgggtgagatttggttgctgtgtttcctcctcacttgggcatttaaaaaatattttaacacgaattgtccgcggaattttcatgttgggctcgggtagcttcttagttttctcggtaaaaaggcgttttactacctctggtgtgaaggctgggaaatggcaagtgggaagttggttgataaaattaggagtttggctgtctttattactactttttttttttttttgctctccccatctctcattttatgaacatcgacccagttcgtcatggtttaaataaactgcttgtcttgtacctgccttaacaaaactagccatgggtcgttgggagacttagttgcttcctaggcagtttgagggcatctagggtggaaaagttaaccgagagagcgagcatctacctcactggcaggatctgggattcccaaatggaatgacacggaagctatgagattctctcgaagtcgaaacttttttccccctcccgaatgcgaagacttcctttttgcaatatttgagcagggcttcaaaaccaacctgtttttgttattaagcctgtacggtaaagaaacaggaaggagagtaccagctgtcttgctgcagtggttttaaatggagttgaatgagatgcgtgagagtggtagtagtattgagtaagattgctgcatctctttgatttaaatgcctggcctcggatccacctaactgatccctggctgcaaaaaagcttcagtatttgttgcagcaggttgttgagaaggtgattggaggaataaaaatcttaggtcttcagcgaatgctgcacaaacgaaaatgttaatggaaacctgtaagtttgtgaattgtttgttcttgaaaatattttaaatgtatgctcatttagaatatggttctaccgaatgatatccaattggaaaggtacaaacacattgaaaagtgaatctctctttcacgccaaaccctacagtttccccttctcagaggcaaagactgttactggtttttagaatatccttggtctttggaataattattttaagattttcatttgaaaccacttctgttggataccaaaagcagggaaataaaatgaacagaagaaacagaaaatgtgggaatactgtttttgctctcttaaaaaaaatgttgatagctattggaaaaagctcttcagaacttactgcttatgtcaccttatctattaataccgttaaataacaatctgtggggctttaggataaagaactctgccagggttcattgtttgtatgtacaatgaatcctctgcttgtaacatgtaaaatgatattgaacactatagctcctgtcactagaggttgcttcaggttctgcatttcaatgagcagaaatctaaattgcctgtgatcctaaattataggggcattttatgtatagatggaaatgacttaattgtccaatcagcatttgaaataagaggcatataccagcttttggcatatagaagatggggattgtggactaagcgggaggctgtaatatttctagagcagttataggaaatatttctgccataagatatttaattacaaaggctttgaaaatgtacaacttaagcatcaatagcgagatttatatttttatattttagaatggttgttttaacagcttgccaacactaacaatttgctaaggaaattcagtgatattagagctaggttattaaagattatattaaataatttaactgtattttgaaaatgattatgctgtgcatttccttctctgtataaaaattatttctaaaaagtgccacgcacctcccgagcaaataaaatagaattcagta

SEQ ID NO: 101254 - DNA, 1366 bp, Homo sapiens
aagtctttaaaagaaaattaaaaaataaattttagtttggacaatagggtaagatttaaaaactctgctattgtcctatcccaaattgatggttaaaataaatggctttgggtttttggttttttttttttttttttttttttttgcgggcaggggcgttttttttttttcttttctttctttttttttttttttgagaaggaaatttgctctgttgcccaggctggagtgcagcggcgcgatcttggctcactgcaacctctgcctcctgggttcaagcaattctcctgtgtcagcctcccaagtagctgggattacaggtgcgcaccaccacgcccggctatttttgtatttttagtagagacaaagtttaccatgttggccaggctggtctcgaactcccaacctcaggtaatccacctgccttggcctcccaaagtgctgggattacaggtgtgagccatcacgccagcctgcattttttaaaaactatataatttcacactttggccagaggaggtagagtacttttgaaaacttttaatttgttgcaagtttagaatgcatattagccgccagtgacttttggtctacaacagcaaatttgtcacaatttaatacagttgttaccctgtaaagctatctaggattagaaaaaaaacaagacttgttgatcatgattgaagagattacctgtagcagtttggttcatatccttggtataaatatttgttttttgcattactgagcggttaaagctctgagagcagaaaattagtattggaaatgtatgttaactttttcttatttttttctcatacttcaaaaaattgaaaaacaaggggactatattggtttggattctcaggaatagctttgagattgagtgctgcagtaaaatgtaggcattttctcctttttttttttttttttttgagacagagtctcactctgttgctcaggctggagtgcagtggcatgatctcggctcactgcaacctctgcctcccaggttcaagcgattctcgtgcttcagcccctgcccgagtagctgggactaccggcgctcgccaccatgcccggctaatttttgtatttttagtagagatggggtttcatcgtgttggccaggctggtctcgaactcctgacctcaagtgatcctcctgctttggccttccaaagtgctggggttacaggcgtgagccaccgctcccggcccattttctcccattttatgagtgcttcttggggttggggaggggttacaaaataaacacttcagaattaaggtggaggaggggctttgtggtaatgaggcatattccatgagtttggtcatgtttttactaggtaaattcattttg

SEQ ID NO: 101255 - DNA, 1054 bp, Homo sapiens
accacgcctggccaacaacttttaaaaaataaatgaatatacatcattttagtgtgaaatttaagtcagtaataattgacttagcccctttctcctcagctatcaatgtaggttgagatttttaggtctataaattgtattgtttaaaaaaaagggatagtaatgatgtagtttttaacttcgtgatactatccatataaatatgaaaattttcagaaacaagcttaatttatatacatataagaaaaagactgttcttatgcttggccagaaatatacttctttctgtcctgtacttttattaggttggtgtttgccaagcttcaggcatttacatcccaccttcatatctaaggctagcatttttagtttgtttagagaatttggattgggtgcagcaagacatttttgaagtcattcttttaaatagatgttccatgaaggagggaaaatctgaaagaaggaatttcaaagcaacccaagcagtgttttgaaaattctcaagactgaagaataatgactgactagtaggcaggaagcctgcagttgtattgtggtattgttcctccatctcatgcatttgagaactttagtacaaaagaagagaaagcatggggaggggaagaaagggttttaacaaaaaagggggcacttttggagtaaatattctttgcccttctgtttaaatgaaatctaaagccatattattttactttgaaagaaaatgtgtatcataatagaaatgtcctaaactgacatttttataaatgaaagttaattgctgttggtggaaagagcagcatgatcatatgttcagtttcaaaacagaactttgattaaaaagaaatctacatgtgaaaacctttttttcctttttggtacctgatcaatatattttgttagcttgttactttgaaaagaagacttacctagggcagagttcagaataatttgtaagcatgtgctataagctttggacaaatcaatctctcttggccagtttttaaaattttaaaacaaagggtgctctgtatggttttccaaggttccttat

SEQ ID NO: 101256 - DNA, 1041 bp, Homo sapiens
aatcgcttgaactcaggaggcagaggctgcatgcagtgagccgagattgtgccactgtactccagcctgggcgacggagcgagactatctcaaacaaacaaacaaacaaacaaacaaaaagaaattggggaattcaagatatataaatgaacctttaaactgcacttttgcagagaggaatttaagggttcaaagtgatgaaacagatgtattacagatatctttctgtgtttttacacttgcacatcactgacattttggaagtaaagccatattaatgcagaagtatatctcttctggactgttgggctagatttgagcaagaataatgttgtgacataacagtgttctccatcccttccctgtgatctgctcctcccttgtacagtctcatccttcctcttgacctttcctgtatctataacttttctcttgacctcttcatgcacttccccttctcagctttcctccagtctgcaactgtcttatcccttccctcagcctaaatttccgtctggcttgtaacctttttacctctgtcaactttccatccttcaggtccctcactttttctggtttctcactgttaaccaaggtcttttctttacctttggaagcttctttactgcgtgtgttctctgctcctgtcagattgatttttgtttagtccttgacccctcaaacgtgtacatcctcacaccctccaaaatcctttaactttcatttcttcttccatgctttaatttattctgcaaaaatttattgagtgctagccatgtgttgcctattccttagatgttaggaatataccagtgactagaaaggttacggaaaaaaaataaaactttgtagggggggacttgtgtgtgtgtgtgtgtgtgtgtgtgtgttgcagggtttacgttttagatatcatggtaagttttgctaagtaagtgatacttaaacaaggacaccaggaagtaagtaagccctgagaatattgggttggggtaaggttgggatggggagctttctgtttagagggaactaccagtggaa

SEQ ID NO: 101257 - DNA, 2088 bp, Homo sapiens
tgtagcgaacagattcactgacagtgaaaagtgtatttttatgtatatattacccaaatttgtaatatgtttatgttttgaacaattacatcctaataatgatcatagtaactcagaataagatgtttttcaatacttagaccttatgatcagatggaatttaattatttcagtttatatatcttttttcagatataggataataaaatacattcaagcataaaatggcatttcctcatgattaaattctggggaagaagaacggaaattttatatttcaggagaaaggaagagttgtagaatttctgacttggagatgatctaggttcttttcaatatgtaagagtgatataacaccttattaaaatgctaatgctcataatatcttggaagtgactacttcgtaactaaattgatgaaaaatttaaatgtcaacttgcaaatgttctggggcccatagtttttcaagaatcttctggtaggtacttgagcaaaaacattcaagtcctttggtacctgtttgttgtcaggctccgtgctggctgtgttggtgatgtaatgacacgttccctgaattgacacattcccatctttcaagcagtagactttctacaacaaccaacttaatttatgtctgaagcaaagacgtataactgtacacactaaagatctttacatttcgtgtttttataaacagaattacaaatgcatattttgtatttgaaattttaagacccctcacctccaggatgtgtgtgtgtttctttatgaaagtgcaggctggaagataaattttcttactaagatgaatgtttctttttgacagtgattaaaagatgattaaaatagtggtgattctgttgaaaaattttaaacatgtattttttaaaaatggaaaaacattatttgtgtatgccatagcaatttattttgcccacgtaggaaacagaaagggaaaagaagaatttttatatggttcaatattttactgttaagataacttaatacgtatgtatccttccatgaggaataaataggaaggctaaaatagaaaggttaatgtaaacattttttaaaagtaaattgttaggttttaaaaaaactttaattttactgttgttttttgggctttaaggaagctctgtatctctaggtttttaaatcctaatgtaccaggttggcccttttgctgaggatgaggcacttctgtggcagtgttgccatggtgactgcttgccaagtgctgtctcaaggtcactcatcactcatagccctgaatacttggattttgttaagggaaaatatcaacactcagttgataaaatgaagttaattatcatatcacattactgaagcatatctagcaaagttatacttataaacagcattttgtgttagtattgatgaactgtatgtttttgaatattgagttttaacctgccagattagaaggccaatggaaaatctataaattagccatagcccatattgtaatactttaattttattccatttctgactttaaaaaatgcagcagcgtaattttactgtggttatgtttgaagatatctaaacatatttccctcaatatttgctttttgatatgaggcaagagcaaagatttcttagcatttattttatattttggtaaacttagcttgaagttgccagttgctgaagcccttgtccatataagaacaggatgatcattatattttccccaaaccagattgcaggtagatagtagatctatctacctaggttctatttcatatattctttgtctcatactgctgttaattttccttgtccttactttgtaggttttaattttttttgttatatacgaacattatacaagaaaagctgttcattaaaggtttttgttgtttttatcaaaccagttttcaataaaggaatatatgaaaagaaattcccctttgcattagcctatatttcatctgggtcttgttctagagagaaaatcagagctatgtgtcttcattaggatgaaaggtgactttgaaatcagagatgagaagcattactgtaaaagggaaaaatgtgattgaaacaaacaaaaacatg

SEQ ID NO: 101258 - DNA, 1007 bp, Homo sapiens
attttggaacccttcagcagttatattaagtcacacacttctgtatatttgcttactttcacgttttcagaaataactggtatcttactttgctggtttggataagagctaatatcctacatgaaatcgttttcttaggcaatggtggtgcctacagggtattctaaacgtaaaggtaaatttaagtcaatgagtctgttaaaattcaactacctattgtgtcaaagagagaaatattgctaactacaaatttacagtgtgttcatttaggatttgactaatcattttaatagtagagcagttaatacagcgatttcacttttatcctgtggtgcttcaaaggcatctagtttttaaatgtagtccagttaaggtgtatgtagtagaggttttcattttagacttgctcaatgttaaatatagaatgttgaaaatattatttaatggattagtttattggtttctgcatttgaagaaatttacataaattagttagggagcagttgtacctactgccaaatggttcactcctgagtttattgtacagttactcccaggtactgaaatataagaaaagaaaaatttaaaccttagctaagagctctgcctgcatttctgtggatccacattatgaaaaggatagaggaacattacctgtgtatagtaatggtttgaggagagggtagggaaactatgcaaataaaaaaattggggtataggcaaatccttcagttagatgtctttattatctgagttacttttaaagcatttactggatacacaaccagtattatctttttaccatcctataaattgttcatagaattgcaacctcatggaggaaaatccatctcctttacctgcctaaatttattctttgtcttgatactagcattaataattggtttgttagatactacaggctaaagaaactcagatttcaagaagaaagaagataattactcgatcatttctcccctcaaacacctgtttaaaatatattgtct

SEQ ID NO: 101259 - DNA, 1066 bp, Homo sapiens
tgattatatggtacaataagacatctactcaaattcctaggaagaggtggtgtacttgatagcttttgtttgtttcatatatccagggaagggaaaaatgggaagacttaatttttttgagagagaatctcgctctgtcaccctggctggagtgcagtggcatagtctcgggtcactgcaacctctgcctcccaggttcaagtgattctcctgcttcaacctcctgagtagttgggattacaggcggatgccatgtcgcccggctaatttctgtatttttagtagagttggggttttgccatgttggccaggccagccttgaactcctgacctcaagtgatttgcccgccttgcctcccaaagtgctgggattacaggcgtgagccaccacgcccggctggaagacttaatttgtgggtgactaatcataatgcttaaatgaagaaaagacaataaaattcaatccctcctcttctttttgtcctcaggatcaaaatacttgctggatggtggactcagagaccaataaaaataaactgcttgaacatcctttgactggttagccaggtaattcagctttagtttgatttgatcctttgtaattttttgtcttcaaccttctgaagatattaccctcctctttaatttatgatttaattaaaactatttatgcttcatgtttttctctttaatgattattaaatgaatgtgcttagagtacttgagtgaatacgtatgtgtatgtacagttggcccttgaacaactgaggactggggacactgaccccttgttcagtaaaaaatgtgcagaactttcgactccccccaaacttaactactaataacctcctcttgcctagaagcctcactgttaatataaacagctgattaacacatattttgtatgttacatatattatatcctgtattcttacaataaagtaagctagagaaaataaaatgttattaagaaaattatggccaagtgcagtgactcatgtttataatcctagcactttgagaggctgaggtggttagatcacctgagtccaggagtttgagaaca

SEQ ID NO: 101260 - DNA, 1035 bp, Homo sapiens
actttttttttttttttttttttttttgagacagactccctctgtcacccaggctggagtgcagtggtgtgatctcggcttactgcagcttctgcctcctggattcaagcaattctcatgcctcagcctcccaagtagctgggattacaggcgtgcacggccacatccggctaagttttgtatttttggtagagatgggatttcaccatgttggccaggctgaaactcctggcctcaagtgacgtgcctgccttggcctaaagtgctgggattataggcgtgagccactacgcctggccccttttcttaacttttaatattacatcagaataggaaaaatgagaatagaaaaagctgtctagttgccgagaaaacaatcatgctttgcttagctaaatttcttttggtaatcccatcattctcttggttagctaggtttgaaatctgagttgtctttgaatcccaccgtactctgattcatttggtaagcaggctttatctggctttctattttcatgtgtcctgtatttgttccactttctgttcctaattttagcttccgaggccaagaccccataatttcatgagggtgtttttccttgtctctactgcttccttgtccactcacttaaaatttagctagattttcctaaatgtatacttttagccaagcttatgttgtgctctaagttttgtgctacctttccttggcttacagaaagaaaaagtacaaactcccttctctgacatttcaaatggtactttatctgagaatctatccaagttaccagccttaggtcttgcaatttccctgtaaaatccctcagttaattgtgatatatacccattcttctgaacatggcagagaactatctccacaggttttttttttttttttttgagacagagtttgttacccagcttggagtgcaatggcgcgatcttgtttcactgcaacctccacttccagggtcaagtgattctcctgcctcagcctcctgagtagctgggattacaggcacgcgccaccctgcc

SEQ ID NO: 101261 - DNA, 1050 bp, Homo sapiens
ccagcactctgggaggccagggtgggtggattacctgaggtcaggagttcaagaccagcctgaccaacatggtgaaacatcgtctcaactaaaaatgcaaaaataagccaggcgtggtggcgcatgcctgtaatcccagctactggggaggctgagtcaggagaattgcctgaatcctggaggtggaggttgcattgagccaaagtcgcaccgttgtactccagcctgggcaacaagagcgaaaactctgtctcgaggaaaaaaaaaaaaaagtaatcatgtaatagtgttgtataggggctgattctgctaacagctcttttgtgatatatatattatgtctcctttcccccctttctacgccttttcccttagtcttacctgcagtggtgaaaaacggagacgggagcaggaaagtaaatatattgaagaattggctgagctgatatctgccaatcttagtgatattgacaatttcaatgtcaaaccagataaatgtgcgattttaaaggaaacagtaagacagatacgtcaaataaaagagcaaggtaataaaaacactcatgtctttttgaacagtggtggttcccaacctttttggcaccagggactggttttgtggaagccagtttttccatggacctggtagaggggatggtttcaggatgattcaagcacattacgtttgtggtgcattttatttctattatggttacattgtaacatataatgaaataattatacaactcaccataatatagaaatcagtaggagccctgagcttgttttcctgcagctagatggatccatctgggggtaatgggagaaactgtgacagatcattaggcattagagaatcataaggagcacacaacctagattcctcgcatgtggagttcacattaagatttgcacacctgtgagaatctaatgctacttctgagctgacaggatgtagaactcaggtggtaatgtgagtgatggggaggggctgttgttaatacagatgaaactttgctcacttgcccactgctgacctcctgctgtgca

SEQ ID NO: 101262 - DNA, 3470 bp, Homo sapiens
ctcccagagtgctgggattacaggtgtgagccaccgcgctgggcctccagcttatgctctttagagacggttaacagacaattgcctgttatttggtagttccttttcaggaagctgtgggatagtacatttagtagtgaaatgatttaggtatcttctggcttcctgggcaactatgaagtttagttttgatgttataatattgtagcatcattctcttatgaggaaatgttttgtatgtatgtatgggcatgtgcatgtgtatctttatgtctcttctggggactattcgaaggtgatttaatctataactgatagtgtgttattcgttataccaccttctgtcttttcaggaaaaactatttccaatgatgatgatgttcaaaaagccgatgtatcttctacagggcagggagttattgataaagactccttaggaccgcttttacttcaggcaagtataaagattttaactgtccagtaggctgtattgccctttggtttattataaagttataaaaaatcgatgaaattttggttaggaaatgagaacaaaaagaaaacatttttttctttgagacagttcagtattctgaatatgatggtaaaatgctcttataattacaatatacataattcaggaagccttgcccccctagtaaaaatatagttgcaaactgaggaaccacacatatacaaacataaaaatataagcaagcaggaaaggaaaggtagcctgtaatttcacagagatatttgggtacaaatggcccttcatatccatgggttttgcaccacagatttggaggctgaggaagaaataaaaaataatgttaaaacaataaaaaacacctcagtgtgatgactatatagcacttacattgtattaggtattataactaatctagagatgatttaaagtatattggaatatatgcataggctataggcaaatacaccattttatattggagacttgagcatcctcagattttgctatctttgggaggtcttggaaccaaccttacacagatactggggtatgatgactgtacgtttcggctcagacatttttggtgaatttttgcgtgattgatcacatggcacgctatggttttatattcttgaggaattgttaagacttaaacatgtgctttgtatttgtttaggggctgaagcccttcataaagttaacttgtcaacttctttttgtttcaggtagtttgttccaactacttttagttgatcagttttgaaattcctctttgtaaattctcattaaggaatagtagagcagtttctgtagcttgacttggcatcaaatggaaaaatgggaagagctaaggatgcttttctcatttttaaaagctcctttaaagatataattctttaaaaattaggttagacattaattcagatttcatgctgaacatatttatgtacacactcccccacccccaattattcttctttttttttccccccagtaaggcctgtagtaatggtgctaatgttagtagtaatggtggcttatagttgtttgcagtaattaagtcagcagtagtttttacacattctacttactactgtggttgctgtttgctgatactaccataacaaaataccacagacttggtaggtgaaaccaaataaatttatttcttacagtgttggtggctggaagtccaggatcaaggtgtcagcaggattggcttctccttggcttgtcactgtgttctcccatggcctttttctctgcgtgcacattcctggtgtctttctctccccttataggataccagtcatattggattagggtccccaccgttatgacctcatttatctttaattacctccttgaaggtcttgtttccaaatacagttacactgatggttagagtttcaatttaagaattagagggaggaggatacaattcagtccataacagcctgtattaacatatcctattttaggcattggatggtttcctatttgtggtgaatcgagacggaaacattgtatttgtatcagaaaatgtcacacaatacctgcaatataagcaagaggacctggttaacacaagtgtttacaatatcttacatgaagaagacagaaaggattttcttaagaatttaccaaaatctacaggtaggcttttaatgtgtattttctaaataggttaaatttttttccttgaccatttcttagaaaattgaatgtatcttttaggaagtcaagcgatcaaatgagggtagaaaggcatgtgatttaatagcagaattttcacatatggagtcagtgaattaaaaatttggtatacattttaagaggcatatagttacaaaatatgcagtgagatttctgttaaagttgaaattattcacatgttttgtatattgccagcctgaaatgttagtatagatataactatggaaaacatgcataatgagaaaatgcagcttgaattcttgatgatggtcatagaatgagttaccagctttttaaaatgtcatttcaatttgttttccaaagttaatggagtttcctggacaaatgagacccaaagacaaaaaagccatacatttaattgccgtatgttgatgaaaacaccacatgatattctggaagacataaacgccagtcctgaaatgcgccagagatatgaaacaatgcagtgctttgccctgtctcagccacgagctatgatggaggaaggggaaggtaagagctattatatgtttgtgatgttcatgaaacaaatagtggccatacttggagttttgaaacttgtgttgtaacccttcttactgaattccatgtctttgcttgcctattgaacatatatatccaaaagttaagtataatccttaccagggtgaattttttattgtagatttgcaatcttgtatgatctgtgtggcacgccgcattactacaggagaaagaacatttccatcaaaccctgagagctttattaccagacatgatctttcaggtaaaaactctttttttgtctctctctctctctgtgtatacgtacatttttattttggaaatttttgtaaatgttactatttttaatctgtactatcatagaaatgtatacctactgtaatgagtgctttatgtgtatcttttttcatgttgcttatgcaaccttaaaagaatttcactaaaattcttggcatttgaattgggtatgtttggcattttaaatcccccagataaattaaaaaaaaaatttaggggcacctggttttctctccaaattgcattttgcgtcagaatttagtatttctttaacttcaagcccatttgtcataaagaaacatgttttaaaaaattataagtaatttaatgagaattattgggagtaattcctttttttttttttttttgttgagacggagtcttgctctgttgcccaggctggagtgcaatggtgcgatctcggctcactgcaacctcc

SEQ ID NO: 101263 - DNA, 1591 bp, Homo sapiens
cattcctggaggttagtagatggaactactaacagaaagttccaatcctttaattacttggtctttctgattatcagctccatcctgaggtgatctagagaccccaccctaagtctcctcatcagcataaattgaggtgtgttccaaaggggctctttatgaataacttgaaaatacttttattactcaggaaattctgaggattttggataggggctctgtgctagaaatctgacaaagaccaaatgtattattatactccttagcagaacatgtagggagaatcctgtggtgctatgtcttaaggagaaaagctgtggatatagtagaaatttggatcagagaaggtggagcaaagatttaatatcttttattttattctccagtgctaagccatgtgtaggcagccagtaaatacttgtgggctggatataagtctttttttcctttttttgtttaataggaaaggttgtcaatatagatacaaattcactgagatcctccatgaggcctggctttgaagatataatccgaaggtgtattcagagattttttagtctaaatgatgggcagtcatggtcccagaaacgtcactatcaagaaggtaaagaattttggggttgattgttcttatcattttattctttagagacagggccttgctatcttgcccaggctggactcgaactcctggatttaattgacccttctgcctcagcttctgagtagccaagactgcaggtgcacaccaccatacctggttttgtggttgattcttgatcttgtttgtcattatgtttggtatacacatgactgtagttgctctcttgttggtgaggggtaggaaaatgatgcctgagtgttcttattttaccctgttgatgattttggtgcagatccagtctttccttggatttttagaaatgtacttgaagtatatttcctccctgtcccctcctatatatatttgttttgctgactgtagttaccagtgatgggatattttccccaacagcttatcttaatggccatgcagaaaccccagtatatcgattctcgttggctgatggaactatagtgactgcacagacaaaaagcaaactcttccgaaatcctgtaacaaatgatcgacatggctttgtctcaacccacttccttcagaggtaatgatagattactgtgtattctaatacaaaatgcagcagtgttctcaaaatgctttattattaaagtaaaaagggaagggataaaatgagacaaaatttaggaaggttattgggtttgatgaaatgagtttagattcctggattatgatatgtttaaggttgtatttttatgtgaaagtgattatttattaaatactttacaggaaagctaggtgatgggaaggctaatgggtggataaaagagcacataaaatctgattacatgtcttaccactcatttctgataatgtgtgttgctttggggactgcatttaaaatttgagggtaaacttcaagaataaaggtagttactgtctgggttggtagtggcaaataagaaatgcatgaaggggaggatattcacccattaattatcttgagtaatt

SEQ ID NO: 101264 - DNA, 2025 bp, Homo sapiens
aaattttattttattttaaatctgattaaaagctttcatgcatgcttagaattttttagtaaaagtttgatgtttgttttgcagagaacagaatggatatagaccaaacccaaatcctgttggacaagggattagaccacctatggctggatgcaacagttcggtaggcggcatgagtatgtcgccaaaccaaggcttacagatgccgagcagcagggcctatggcttggcagaccctagcaccacagggcagatgagtggagctaggtatgggggttccagtaacatagcttcattgacccctgggccaggcatgcaatcaccatcttcctaccagaacaacaactatgggctcaacatgagtagccccccacatgggagtcctggtcttgccccaaaccagcagaatatcatgatttctcctcgtaatcgtgggagtccaaagatagcctcacatcagttttctcctgttgcaggtatttgtgttgacatttccttttattttttttctttttaagtaattattctttccatactactataattcttgtaaagttaatctattttataatagaaactttgaagaattaagttgtattttgttacagtgtctggtagtctaattcttttcctaaattttttttcaaattcaggtgtgcactctcccatggcatcttctggcaatactgggaaccacagcttttccagcagctctctcagtgccctgcaagccatcagtgaaggtgtggggacttcccttttatctactctgtcatcaccaggccccaaattggataactctcccaatatgaatattacccaaccaagtaaagtaagcaatcaggattccaagagtcctctgggcttttattgcgaccaaaatccagtggagagttcaatgtgtcagtcaaatagcagagatcacctcagtgacaaagaaagtaaggagagcagtgttgagggggcagagaatcaaaggggtcctttggaaagcaaaggtcataaaaaattactgcagttacttacctgttcttctgatgaccggggtcattcctccttgaccaactcccccctagattcaagttgtaaagaatcttctgttagtgtcaccagcccctctggagtctcctcctctacatctggaggagtatcctctacatccaatatgcatgggtcactgttacaagagaagcaccggattttgcacaagttgctgcagaatgggaattcaccagctgaggtagccaagattactgcagaagccactgggaaagacaccagcagtataacttcttgtggggacggaaatgttgtcaagcaggagcagctaagtcctaagaagaaggagaataatgcacttcttagatacctgctggacagggatgatcctagtgatgcactctctaaagaactacagccccaagtggaaggagtggataataaaatgagtcagtgcaccagctccaccattcctagctcaagtcaagagaaagaccctaaaattaagacagagacaagtgaagaggtaatttgttttctgtatatttcagctcatatttcatcatttttcggtgttagataatgtgatataaaaattcttccattttaggtttatttaaagaaagttaaatctttagctctcatttctttataattattttggatgtcagtaaaattatgatgtaatttagaaataacagatgtgtatgttttaagatgtgactataactctttagtagccaatatgaaattttttcatggaggtgtttattgctggaatgggcagattgggtcattaagagaatggtagaagtaatcaggaaaaaaaaaacttgtattaagcagcataatttttattttaaggtaaaatcaagtttcatgcacaagatgacattctgtataagcatttcccaaacttataggatatattaatatgcacttgagaaaatgaaaggcttaaagttaggatgtgggcttaacctactgttcaccaaatttattgaccgaagccctttttagagcatg

SEQ ID NO: 101265 - DNA, 1169 bp, Homo sapiens
tattgtgtgtgtcaattgaaaaggcagcatgcacaattattcagaatggtcattattcagtagcattatttcctaaactagaatggatagatcaattaagagtgggggggaaaaaaagaaggttagaaggggattttacattttatttcttttcgatcagaaggcaacttatctggttaagttgattgttaaaattataaacagtatacttaagtacaaatatgcaagaaccttcaggagcttggaacatttgtgaatttttcaatattaagtgaagcgcagagtatcagtgaccatatcaggctacagaaaagttctcagtacttcagccgacatggagattgttgtttctactttatttggaatatgagacccttttttggctggcaggggggcggggggtggcggtggtgggtgagggccacttccctcacttattttgtaaaggaagacagtgtttgtttttgtaagaaagacattcttgggtggggagtggtggtatttgtgttttgtacttgattatttatatattaaatcacgaagaaatgtttttgtattgtgttttcaacaggtttgaaaagttcacagtctgtgcagtctattcgtcctccatataaccgagcagtgtctctggatagccctgtttctgttggctcaagtcctccagtaaaaaatatcagtgctttccccatgttaccaaagcaacccatgttgggtgggaatccaagaatgatggatagtcaggaaaattatggctcaagtatgggtacgttatttctaattagtatgtatgattattttgggaaaagcatatttaaaatacttaaagccatctaaataattgggagtaaataataactttttgaataacgttagtatgtttcttccatgaatatccttcatttattctatgttttggttatgtaaactcttcaagagtcttttggtctatgacattttccagcctgttgaatatatgagaatagtggcctatgtctccacagttggccagcccttttcttaccatgacaaagtgctgttttgtcaaggttgatgttgtgtataatggctgtacttacatggtataagaaggatttcattataatatggaaaagacctaagtatggctacctgttttaggtgggccaaaccgaaatgtgactgtgact

SEQ ID NO: 101266 - DNA, 1030 bp, Homo sapiens
agcctaggactgaaccctgatgaacagttagcattcattcaaggaaaggccagagagatgggagaaaaatgagaagtgttgcgaagtacagtggggtgaagtatgcttcaagagagacatgtcaagcatgctggctgcatgcttggcattcagtgcctgtggatgagaaaataaaggtgaatgcacagtacacctggttcttgtcttagcacagcaggttgttctcttcttcagaatatcaacttttacttctttttctgtcacctgtgggatgttattttgaatgtatccttagcatgtagagaagtgatgcctggcacataacaagcatttacttaaatacttgttgaatgactggatgttttttgcactttctttagagcatttgacttctgttgctttcatagatgttcttcactgttcttttatgtgttgtgtttaagggacaggcattagagcccaaacaggatgctttccaaggccaagaagcagcagtaatgatggatcagaaggcaggattatatggacagacatacccagcacaggggcctccaatgcaaggaggctttcatcttcagggacaatcaccatcttttaactctatgatgaatcagatgaaccagcaaggcaattttcctctccaaggaatgcacccacgagccaacatcatgagaccccggacaaacacccccaagcaacttagaatgcagcttcagcagaggctgcagggccagcaggtaaccagtcatgtgttcttccctctggcttctccttctgttgttttcagactatgtttctcagtgttcttaccactggtgcaatctatccctgtcaactaaagaaattctttttgttttacttctgtgtaaggttttatttgtacaaatggctccttgttaaggagtagttttatgagaatattctattttacaggtaaaaagtaaaaaaatgtcaggaaggattgctcttggggaagaaaaatgttacttgatgactttgtagtcttaaaggtagataaggttttttttga

SEQ ID NO: 101267 - DNA, 5109 bp, Homo sapiens
ttgggaggctgaggcagaagactcacttgaacctgggagacgaaggttgctgtgaggcgagattgtgccactgcgctccagcctgggcgacagagtgagaccctgttaaaaaaaagaaggccctgggtgttttctgtcttatacctggtgtattgtgggggtactatatgtatgcaactggcaggttcttgctatatatatgtaattgcactctttcttgggtattagcagggttttcttaatgctcaaatggtcgcccaacgcagcagagagctgctaagtcatcacttccgacaacagagggtggctatgatgatgcagcagcagcagcagcagcaacagcagcagcagcagcagcagcagcagcaacagcaacagcaacagcaacagcagcaacagcagcaaacccaggccttcagcccacctcctaatgtgactgcttcccccagcatggatgggcttttggcaggacccacaatgccacaagctcctccgcaacagtttccatatcaaccaaattatggtaaatctgacaatgaaaatgtgccttccccaagttaacattactaaggacataagcttcattacatttattgcacatgaaagacaaaaacacgattcactccctctttacttcacaaggaaaaccaaattaatttaaatgattggaaaacaaaaatgctgcagcacacaggtaattgagacaggtgtatcctgtcatagttgaatatttttttcagtcccactcattaagagtccccaaactctggaagaaacactgcaaagttgtccccttgccccttcttgtatgttccagtatagtagaactctctaatctctgaatgcttggtcaagtcagtgagaggaatgcactttgtgggcttttaagttgattttcttggtgacttggatttattattttttttttgagatgggggtcttgctctgtcacccaggttggagtgcagtggtgcgatcttggctcactgcaacctctgcctcccgggttcaagtgattctcctgcctcagccctgagtagctgggactacaggtgcattccaccacccccggctgtttttttttttaaatttttaatagagacggggtttcactgtgttagccaggatggtctcgatctcctgacctcgtgatctgcctgcatcggcctcccaaagtgctgggattacaggcgtgagtcaccgtgcccggccctggatttattattacagtgatgcagatacctcttcatttcagcctttgagaggttccaggaacatggtgggaataaaggtgtctattggggagccctgtcatctgaggattataactcccctgccctttaaagaaggatggagtgatgtgagttgagtgatacggagtcccttttctacaggaaacccattaaagcaactgatctttcagtgatccagatggtgctcctttctgtagtaagcctgttactctagtcgtcatcttggtgagaatctagaatacctgggggggcagcatcttatagcactctgtatcttacacttatcacttccctccacccccacctcctttaaaaaaaaaacaaaattactacagaaatctgatattctaaggagaaggcatttgggcatttttatttcttctgttttatttttgtaaggaatgggacaacaaccagatccagcctttggtcgagtgtctagtcctcccaatgcaatgatgtcgtcaagaatgggtccctcccagaatcccatgatgcaacacccgcaggctgcatccatctatcagtcctcagaaatgaagggctggccatcaggaaatttggccaggaacaggtaaagaacagtgacttataaagttagtcacatcctagtcccagaagtccaagaacttaatgtatttttcagtcaagcctttttggatggagaggttgaaaggactgggttcatattagaaggtgtgatttggcttgtccattttgagagtccttcaagcacgcacatatctattagggtgtctagtacagaaagctgtgaaaaatggatcacaggctgtcagggagttttctctaacattcccagcttaagtatagcaatgtttgacacaattgtagtaatttctgtgggcatgccctttgtcgctaaagtgacttccagaggtaatattaccatttgtttacttacagctccttttcccagcagcagtttgcccaccaggggaatcctgcagtgtatagtatggtgcacatgaatggcagcagtggtcacatgggacagatgaacatgaaccccatgcccatgtctggcatgcctatgggtcctgatcaggtatgggatcgattccttacctttttcaaaaagtttttcttgttctctggatagaactaaagcctaggctataatcagaatgtcctaggtatattttaacttgaatgtataacttaaaatatagtaattgaaaaaacttggtttgaaggcattgggccattagatacttttggtaagccagagctgcattgtaagatgggatctcaggaacctgaatcactcagccagagctgcactgtaagccatgaatgtggacatgggtatttttttgttgtgcaaagcatgtgttttactcattttttttttttttttttttttcctggttgctgacagaaatactgctgacatctctgcaccaggacctcttaaggaaaccactgtacaaatgacactgcactaggattattgggaaggaatcattgttccaggcatccatcttggaagaaaggaccagctttgagctccatcaagggtattttaagtgatgtcatttgagcaggactggattttaagccgaagggcaatatctacgtgtttttcccccctccttctgctgtgtatcatggtgttcaaaacagaaatgttttttggcattccacctcctagggatataattctggagacatggagtgttactgatcataaaacttttgtgtcacttttttctgccttgctagccaaaatctcttaaatacacgtaggtgggccagagaacattggaagaatcaagagagattagaatatctggtttctctagttgcagtattggacaaagagcatagtcccagccttcaggtgtagtagttctgtgttgaccctttgtccagtggaattggtgattctgaattgtcctttactaatggtgttgagttgctctgtccctattatttgccctaggctttctcctaatgaaggttttcatttgccattcatgtcctgtaatacttcacctccaggaactgtcatggatgtccaaatggctttgcagaaaggaaatgagatgacagtatttaatcgcagcagtagcaaacttttcacatgctaatgtgcagctgagtgcactttatttaaaaagaatggataaatgcaatattcttgaggtcttgagggaatagtgaaacacattcctggtttttgcctacacttacgtgttagacaagaactatgatttttttttttaaagtactggtgtcaccctttgcctatatggtagagcaataatgctttttaaaaataaacttctgaaaacccaaggccaggtactgcattctgaatcagaatctcgcagtgtttctgtgaatagatttttttgtaaatatgacctttaagatattgtattatgtaaaatatgtatatacctttttttgtaggtcacaacaactcatttttacagagtttgtgaagctaaatatttaacattgttgatttcagtaagctgtgtggtgaggctaccagtggaagagacatcccttgacttttgtggcctgggggaggggtagtgctccacagcttttccttccccaccccccagccttagatgcctcgctcttttcaatctcttaatctaaatgctttttaaagagattatttgtttagatgtaggcattttaattttttaaaaattcctctaccagaactaagcactttgttaatttggggggaaagaatagatatggggaaataaacttaaaaaaaaatcaggaatttaaaaaaacgagcaatttgaagagaatcttttggattttaagcagtccgaaataatagcaattcatgggctgtgtgtgtgtgtgtatgtgtgtgtgtgtgtgtgtatgtttaattatgttaccttttcatcccctttaggagcgttttcagattttggttgctaagacctgaatcccatattgagatctcgagtagaatccttggtgtggtttctggtgtctgctcagctgtcccctcattctactaatgtgatgctttcattatgtccctgtggattagaatagtgtcagttatttcttaagtaactcagtacccagaacagccagttttactgtgattcagagccacagtctaactgagcaccttttaaacccctccctcttctgccccctaccacttttctgctgttgcctctctttgacacctgttttagtcagttgggaggaagggaaaaatcaagtttaattccctttatctgggttaattcatttggttcaaatagttgacggaattgggtttctgaatgtctgtgaatttcagaggtctctgctagccttggtatcattttctagcaataactgagagccagttaattttaagaatttcacacatttagccaatctttctagatgtctctgaaggtaagatcatttaatatctttgatatgcttacgagtaagtgaatcctgattatttccagacccaccaccagagtggatcttattttcaaagcagtatagacaattatgagtttgccctctttcccctaccaagttcaaaatatatctaagaaagattgtaaatccgaaaacttccattgtagtggcctgtgcttttcagatagtatactctcctgtttggagacagaggaagaaccaggtcagtctgtctctttttcagctcaattgtatctgacccttctttaagttatgtgtgtggggagaaatagaatggtgctcttatctttcttgactttaaaaaaattattaaaaacaaaaaaaaaataaatttttttgcaatcctttcctcagacctggctccaggctaactggaaggcagcactcccttttttatatagtagaa

SEQ ID NO: 101268 - DNA, 1763 bp, Homo sapiens
ccatgtgggcaaattatcgcccttggtgaactgccacttgcaacctctggtctactcatttcttcctttatatgcatataaacctgtgtggctttaataggacattagtaacaggtcacctaagcctttcttcggtgcttctagaattaaggtacagaatctttacatatcacaatctccttagccactattctgtccagatccttaaatgccatccttgccaggcattgggtgtataagtaaacaaaaaattgaggtgactaggtggtggcaatcccgttctaagtaacctagaaatattcattctcagcagccttgaagcaaagcttcctcagctataggaccgattaggaagtcatgataaagaccatgatagctaagtgctaagatgagtttgttttgttctttaggggacaactgtgggaaggctgggaaggttaagaaacaacagaggtggacctccaaaaacatagaggcatcacctgactgcacaggcaatgaaaaaccatgtgggtgatttccagcagacctgtggtattggccaggaggcctgagaaagcaagcacgcactctcagtcaacatgacagattctggaggataaccagcaggagcagagataacttcaggaagtccatttttgcccctgcttttgctttggattatacctcaccagctgcacaaaatgcattttttcgtatcaaaaagtcaccactaaccctcccccagaagctcacaaaggaaaacggagagagcgagcgagagagatttccttggaaatttctcccaagggcgaaagtcattggaatttttaaatcataggggaaaagcagtcctgttctaaatcctcttattcttttggtttgtcacaaagaaggaactaagaagcaggacagaggcaacgtggagaggctgaaaacagtgcagagacgtttgacaatgagtcagtagcacaaaagagatgacatttacctagcactataaaccctggttgcctctgaagaaactgccttcattgtatatatgtgactatttacatgtaatcaacatgggaacttttaggggaacctaataagaaatcccaattttcaggagtggtggtgtcaataaacgctctgtggccagtgtaaaagaaaatccctcgcagttgtggacatttctgttcctgtccagataccatttctcctagtatttctttgttatgtcccagaactgatgttttttttttaaggtactgaaaagaaatgaagttgatgtatgtcccaagttttgatgaaactgtatttgtaaaaaaaattttgtagtttaagtattgtcatacagtgttcaaaaccccagccaatgaccagcagttggtatgaagaacctttgacattttgtaaaaggccatttcttgggagttttttggtgtgtctgtttttttaaagtattcaagatactaccagtcaacatctttttggaagaaaatgccttgggtttagaagattttcttaaaaggggagtagatggttgtagattgactaaaaagtctaccatacttcaagggactacaggtaagtctcatagtataccagctttggtacttcattttttaaaaaagtattaatcaattgcaaagaaattcgccttggccaacccttctttgtgtatcaggtagtctaacctgatacaagtagttgacagatttcaactatcaatcaccagtccaacccatttctcatttaacagatgacggagataatccctaaaagcacccacatttgtt

SEQ ID NO: 101269 - DNA, 1031 bp, Homo sapiens
catgtgttagctgataagctttgaggtgaatcttatcctcattttatggaggagtaaggtgaacaaggtgggctgaccccggagcccacgcacttgatcctgccacatcctcgggaaaacttccccagagcccaaaggggaactccctcctgcacttggtcagggctcttggctttctgtcctctggagcacagatgttcatgcctgcatctacctccctcaccataactaaggtcagcgctgaatgaagccatcagggtcctgaaactgatcatggtgacactggattttaggcaatctacaaggctatctaggagacttagggcaggttcccctcataattcagtctacccctcataattcagtctactctgagtagggaacactatcagcatcatgggattgtgacaaaaaagcataagatggttttctggtgtgttggggttgttttgcctaaactatctgctcctgttttgtttttcatttctccttcatttaggacttaaagatggaggaagctatgagcaatacaggtatttcgttttattattaaagcctaaacaaagttctcctatcttggcccatccttcagtctcatctctgtgagtctgcacctgttatcttgagaaactgcccttccctctggtctgcccgagaccaggatcacccaccaaagataggtgtcacctaggagaccttctttgtatagttctttggggactttttctttcttggtgatggttaacattcattctcctttgacacttgaaaacttaggcagtttcagcgtcgaaagtggccagaaatgaagagaccttcttccaaatcactgtgagttgaggaaccagcttacaaatagaaatctggttctgaccgcttcattttgccaatgctattctatttgcatgccatttcttacataccaccctttgtttgttctcatgatgagggtgggggggaagtactaatgcacatctttccctaagaaaacacttgaatccatttcatgttttagattaatgccttgtcca

SEQ ID NO: 101270 - DNA, 1050 bp, Homo sapiens
gtctttctccttagataggttcaccctcatactttaccaaaggggtaggttaagtccctcaccggtagctcccagactacacaagaacccaggccacttacccgtcctttcatcaaatggctgctttgcaatcaggaggagctgagggcccctgaatgaaggctgctgataaaaccaagacttggaaggctttctttccaagcttgggaagtttcctgaccagtggctgcagaactccaacgttaaatacacagacgtggtttttattctcctgagttttcactctcatgaagagtgaacctggtgggacttgaagccaaaaagtcacctaactcttccaaacgctggctcttgcagaagttggagtaaacaggtcaccagcccctagcaccttccacccgccacctgcctgaaatatgtcccctggttggtagaagggcagggcgagagtccctgtacttaccttgttgacagactaccttttttgcaaccagctgatgaatgcagtgaacacactggacagggatgtcctcaaccagctacacgtacagctcatggagctgaggagctgcaagggttacaagcagtgtaacccccggactcgaaacatggacctgggtgagtaggcaccccaacgtggggcccttggacagcagggtaaccaaaggaagggactcaggaggtggtgtctaccccaagaatgagcctgaaatcaccaggctttgggaggtgatacagttccagacgagtcatgggagcccctgtccatagcaggcagatgacctttaacaagctgtgattcctgagagaggaacacctgcaccaactgcccaggaaacacacggaattccgtctcatttcattgtcctcccttttgtccactcatgcattcaacaaacacttcctgagaacttacacctgaaaccatgttgactaaagatgaccccatcctcgctgacttgtgtggagccagtgttgtcctaagaagagcagtccacagcaggaggcctcttgcttgtatggaaagggtaaaactggatggtagaatcc

SEQ ID NO: 101271 - DNA, 3232 bp, Homo sapiens
gacccccggttcacagtgggagggcagtgaggccagacccagggaagaggctggagaggtgaagtgaggtccccacagattcctcaacgcggggataggtgtcagtcccagcatgagacagatagcttcctgcccaggccgtctgagggacgatggcttagccacgttgtcccccttttgacttacaagaagtctacgctacaggaggcctttcatcaaacccaggggagacactggaggcctcagtgggctcagcgggttcctgcgcaggccaggccggaaaaatgactcggttcccttgcaagggctggctggaggagaaggcgggcttccttcaggcagaacaagtacctcctccccacccagacatgccggtgcttgccctggggcccggggagtgcaggctgccgctgctgagcacagacacggcagcgtgggggcagtcaccaggccaagtctttgttgtccagccttgaaggtttcaaggcctcctcttctgcccctccctcagattgaaaccctgcagaacaaaattaagaacctgagggaagtccgaggtcacctgaagaaaaagcggccagaagaatgtgactgtcacaaaatcaggtgaggcagtagcaaagggacctccctaagaccccactctcctacaggacagttcagttcatcccctctcgtgattgacccctttcattttttatttttatctttatcttctcccctcatggcattaaaaaaatccgtaatttacctccctgttgtcagccagtgtggcacacggacctgctcctcagccaggctggcgcccagattccagtactgctagcaagagacccgtgctggctgcgcagagccggctccaggccggaaaagtgcctctgccgattgccctttcagaaatcccccatgtggtttgaggtccatgttcccggcttaggggtcccctggcccaaaggactgaactctagaacagctctaatagaacattctgtgctgacggaaatgggctatatctgcactacaccacacgtggctggtgcatacttaaaattttggctagtgtcactaaggagccaaattttttattttgcttaattcaaattgaagtagccacctgtggccagtggctaccatactggacagcacagctgtagaagccctgctgtctttccagaaagtgttgcaaaacacaggcttccctgtgttgaccccgaccaagtgtgagtaggcagggtggtgagggaaccaacctcaagatgctgaggctttgacatgtaaaattaaccatcaaaaaagaaaggaaaaaggatgctgaggctgatgcacctaaagccaggcccagcttctagtcgtggctaaattacaattaacccaacctgctaaagtctagcaaaagtccaggcagagtcctggctcatgcttggagaaagaagccactcaggcaggcacctgctgccctgaggatagggtcatgccctacccaccaccaccccagaaggagggacaggggtggggcagcagcaacacatgggagtcccagaaatcacagcttgcacctgccagcggagccctctgagccactcctgaagcctggggctgggggggtctgttacagctaccacacccagcacaaaggccgcctcaagcacagaggctccagtctgcatcctttcaggtaagagcagcttgaggtcctggggaagagatgcagaggcctgcatgaggaggtggccctcccttaagctaaaactcagaagaaaaggaaagaagtccaggcccttccctgggaagtccacggtagccctcgaagaggccttacttcccaatcaacactgagcgggcctccgacgcccccttgtggctaaatggggttaccgcaactccaccaagcagggcaggacacaggaaggaggggaaaggggtgtcaacaggagtcccagtagctgcctggttctgtccccagcttgtgcccccttgggagttaaagtagaatgacaagacccaggttctggtcccggctctgccttggagcagcactgggacttgggaccctgaattgctatgcccatggctctctgttggagaagcctcagcgaagcccttaggtggacaggaagagcagagacatggggtcactgatccctcagaggcccaaggtgtgtgtggccctctgcgcccataggaagggcctgcaagagaaggacaaggtgtggctgttgcgggagcagaagcgcaagaagaaactccgcaagctgctcaagcgcctgcagaacaacgacacgtgcagcatgccaggcctcacgtgcttcacccacgacaaccagcactggcagacggcgcctttctggacacgtgagcaagcccagggcaggggtggacaggctgaggcccaggggttcaagaaacttctccacttagtgacccagacctctctcagaaagggggtccccaacaccaggggtccacggtgctcgggacagcctcttggcatttgacgaactggttttaggggctgtccctgacaggaatcactgttggcagatggggcctcctcccgcaggcactcaggacatgctctctcttccttggcagtggggcctttctgtgcctgcaccagcgccaacaataacacgtactggtgcatgaggaccatcaatgagactcacaatttcctcttctgtgaatttgcaactggcttcctagagtactttgatctcaacacagacccctaccaggtacaggcaacccgagctagagggatgggggtgtggggtacaccagtgctgccaggtaggccccccccaacctcagggaagtgatgacaaattgtccaagtcccactgagtccctgagccggtgggagtaagttgtgaagctgctgagattgggggttctgtgttcaatcagccttttttgcctccatcaccctgctttttgcctccatcaccctgcgtgtgtaatatatatggcttcttccctctaacttaacatgcagcatgcaaccaggttttgccggaacttgtgaagactcctaacactgtcaggctgtaggatcaagccaaatatcacccactgcagggcctacacggaccgcgcagctaatataacagtaacacactgcaccaagcactctgctaagtgcttccgtacagtaagccatctaaacacacatgcgactgaagtggcccaggaccacacaagaccaaaaggagcagtggcatgtctggtcatc

SEQ ID NO: 101272 - DNA, 1077 bp, Homo sapiens
cccctggcaatcaccaatcttctttctgccgctatagatttacctattctgggtagttcctataaatagaatgtaacaatacgagcccgctttgtgtctggctggtttcactccgcctgcttttgacattcatccacgctctagcgtgaatcagaacctcgctcctggttctggtcgcatattccgttgtacagatgatgtaccgccatttgtttacccgcaagcagctctcgcttgaaatcctcttgagtcagtggcttcttggctccaggacttccgtcttgccggtgtgatcacctcgaggccctcccctgcggtccaggatctgcgagcaggcgggtagattccacgacccctcgagtcgcaggcaaagctgagcctcatgcttggaagcccggccctatcttgatgaaggacccactgccctgggagcctggccagcctttcctgcctccctaactctgccactcctctaatgcccacagagtacaaggccagctatgtccgcagtcgctccatccgctcagtggccatcgaggtggacggcagggtgtaccacgtaggcctgggtgatgccgcccagccccgaaacctcaccaagcggcactggccaggggcccctgaggaccaagatgacaaggatggtggggacttcagtggcactggaggccttcccgactactcagccgccaaccccattaaagtgacacatcggtgagtgtccaggtggaagtcgagggtgaaggggacaggacagacctcggcaaagggcttcccacacctcttgggcccctgaggaccaagatgacaaggatggtggggacttcagtggcactggaggccttcccgactattcagccgccaaccccattaaagtgacacatcggtgagtgtccaggtggaagtcgagggtgaaggggacaggacagacctcggcaagggcttcccacacctcttgggcacctgggctgctccccctccaccacctccgagccacacgtgatcccttctctcaagcaggtgctacatcctagagaacgacacagtccagtgtgacctggacctgtacaagtccct

SEQ ID NO: 101273 - DNA, 1111 bp, Homo sapiens
agcaaagaactaaaggggtgagggacggtggcccctgatctccagggaaaggacattccaggcagagaggatggtaaagaagaaggccctgaggctgcactgtgcctgggctgtcaaggaacagcgaggagccagtgtctgccccagaggttcaggggaagggttcaggaagggccaggatttgggctggctgtaaagggggggtcgccttcactcaggaagtggggacaggaagggcaggagggggacagggtgaggctgtcagctcacggcatgagctgagacacagaaactaagggggggcgagcacagagtgggggttcagctgaatctgggccgcagaggggagctgctgaggttgaggtgccagactgcagcttccatacctgcagatgtcagcctcccacaaactgctgcccacctaccgctccccaccccccacgcgaggctgaggcaccaccacctgagtgactgagtccccgatctcctgcctcccccaggaatccccacatcgtcctcaacattgacctggcccccaccatcctggacattgcaggcctggacatacctgcggatatggacgggaaatccatcctcaagctgctggacacggagcggccggtgaatcggtgaggacggagcagggcaggtgttgagggggccgggacattgacctgcgggaactcagagcaaaaccctgtgggtctagaacgtggggtctccaagggtcgggagctggggttctcaggtcccgccatgccaaccacttacctgctgtgggagagaagcatggtcccctctccgagattctgtcttcccatctggaatgtggccaaggtgaccagttggggaccttctctgagctaaaattacccaaagcttgaaatgatagcagcagtgatggtaggagatggtgctaactgcacggcgcttgtgtgtgaggccctattctaagtactgtgcagggaaatctaggaatttgatcctcacagtaacccagcgaggtggacattatcatcatccccattttaccagtttggaatctgaatcccaaagcgattgagtgacgtgtcggaggtatcccagcaagtctggatgtagctctgggaat

SEQ ID NO: 101274 - DNA, 1064 bp, Homo sapiens
gcagcccaagtttcactcattcattcattcacctgacagcattattgagtgccagtgtacgtgggatacagcaggcagggaacaaaatgacaaaagtgtctgccctaatggaggcagcatgccaaggcagggacacagatgatccacagataagtaaaagagatggatgccaagaagggccatgaagaaccgtggaggggagggcgggccaggggtgacaagaggcaggaaggtgcagtgacaaaggggacagcccctgggaaagttgagcaaagacctgaagcaggggagggacggggcctgagatctcaagcgcctgtcaccccgggtcggagacgggccaggcacccagtccccactgtcccttgcctcctcgcccgtgttgcagatttacaacatgctggttgagacgggcgagctggacaacacgtacatcgtatacaccgccgaccacggttaccacatcggccagtttggcctggtgaaagggaaatccatgccatatgagtttgacatcagggtcccgttctacgtgaggggccccaacgtggaagccggctgtctgtaagtgtgtcatcccccagggacccagggaggcccctgggcccagctcagggcttcaaccatgcagcccaaacccaagcccaccctgggtggcacacagttttcgcagatgtaccccagggccagcggaaagcaattatgtcatgcatgttatatccctctgctggggaaggagaggccgggagctgttagcacctgtggaaacaggtgtggtggggccgtatgccaggaaatccagggagctgggctgtatacgtgtgtgcgcgcacatgcatgtcaccagcgggtgggaatggtgcttggatttctgttctgggctgggcagtctttgagcctggaggttgtcagggaggaaccccggaccacagcacaggcagctggttgtcagctgggatcagctgagccaactctgggcagcagcacaaagggaaatgctcttccctcccatccttcctggaggaccacgtgggccgcagccctcagccagccattctcctcgg

SEQ ID NO: 101275 - DNA, 1078 bp, Homo sapiens
ccagcccggccaacatggtgaaaccctgtctctactaaaaatacaaaaaattagccaggcatggtggcagacgcctgtaatcccagctgaggattactcgggaggctgaggcaggagaattgcttgaaacctgggaggcagaggttgcaatgagccaagatcgtaccattgcactccagcctgggtaacagagcaagactccatctcaaaaataaaaaataaaagacacactgtatcgcaaatgtgtttagtattttgataaccgtatttccaaacaattgattttctctgtaatcctatatcttgtattcaatgcacgtaataacattggagaagggatccattgctctgtgtgccagagggctccatggcagagcaggtgtgcatgctcaggcctcggacacacaatagtttaataaacatcgtcaggcactttctcacgtggcctcctgatccatctccctccgcagctttcttcgggaagtatcttaatgaatacaacggctcctacgtgccacccggctggaaggagtgggtcggactccttaaaaactcccgcttttataactacacgctgtgtcggaacggggtgaaagagaagcacggctccgactactccaaggtaagctgcaacctttccagcctgggagtggctgtgtggcccagcagttagaggcccaactcaggagccagactacttgggttcagattgtgactcaggcacttaaaagtgtgaccttgagcattttacatacacctcctcctcagtttttcatctctcagccagggacagtggctcacgcctgtaatcccagcactttgggaggctaaggcaggtgaatcacttgagtccaggagttcaagaccagcctgggcaacatgacgagaccctgtctgtacgaaaaaaatacaaaacttagccgggtgtggtggcacatgcctgtggacccagctactagagaggctgaaatgggaggattgcttaagcccgggagtttgaggctgcagtgagccaggatcttcccactgctcttcggcctaggtgacggagcaagactctgtctttaaaaaagaaaag

SEQ ID NO: 101276 - DNA, 1216 bp, Homo sapiens
gggcggtgtggggagatgccatttgaataggagggttaggattgagccccagtaagttaacatttgaggctggacatggtgactcacacctgtaatcccagaactgagagaggccaaggtgggcagatcgcttgagcccaggcattgagaccagcctgggcaacataatgaaaccctgtctctacaaaaaaaaaaaaaaaaaaatacaaaagttatctgggcatggtggcttgtgcctgtggtcccagctacttggaaggctgaggtgggaggatagcttgagcctggggaggttgagggtacagtgagccacgaccgcaccactgcactccagcctgggtgacagagtgcgaccctgtattggaaaaaaattaaaagctttgagcaaatagctgggaaaggtgaggaagcagcccatgcaggtatctgaggaaggtgatttctttcaggtaacagcaagggcaaaggccctggggcaggtatgagctttggggttggggtgctggtaggatagagggagaccccaggacaggaggctggggggaaagtgggggcagatgcagtcacggagcaggacaggagacagttataggactttgtagggcatggcaaggactttggattttagttgaggtggatgtggagccactgaagggctttgcacagagtggggggcttgatcaaatttgtgatttaatgggatccttctggctgctgtggaagatgggctgaaggtggaggcaggaggaccagggacgaggttccagcaaggtccaggcagaggcagtggtggcttggaccaagatggtgacaggcggatgatgggaagtggtcagacctggatgtgtcctgagggtgaagctgctgggacatatgtgagggaggacagaggagctgaagtcccctccatggtgcgtagccttgacccactggcattgacggatgtatggatcacagggcgaaaatcaagaggccggtgtgaagtgctgatttgacaccaaatgaagtgatttgaaggaaattactaagtatgcagcggtccaaatgatacataaaaacggccaaacgtgtgtgagaggcacgcggacaactggaattgagatgatgccacgaagggcaaagaccccgttttgttttcgcagactccgtgcctgcgaaatggcgcgggtctgttttgggaaggacggactttccacaggcttctgcttcatctttc

SEQ ID NO: 101277 - DNA, 1157 bp, Homo sapiens
ccttagcaccattcttgattttttttttcctattcctttcacactccacattcagttcatcagcaaaccctgtcagctctgccttcaaaatatgcccagagtcccctctgctgccaccagcccatccgcgccactgtcttccccgcctgccctgttccaggtttctcctgggatcccccagcttctgcgtttatgaccccttggtctgttttcaatgcagcagccagaggggtctggtcagaacctagttcagatgctctttctcctctgggcagagccctccttggctcccacctactcagggtagaggccccgacagccacctcagggtcccagtgatccttcccttctctctgaaccctctcagcctcctggtctcccctcagtcactgtcctccagccacagcttctcaagcagtcagccacacctgacatgcacccactcacagtgctttgcacttctttccttttctcaaaacttctacacgtctgcactttcctcgtgtctgtgttccaatgctgcctcctcaaagaagccttccttgactaccccatgcctcctgttcatcccagttttttcccaccagtgcccccatcaccactgaacaccactgactgtgtattctgcccatttgtctcattgattgtctcgtttctaaaatgccagctctcaggctgggcgtggtggctcacgccagtaattctaacactttgggaggctgaggcgggtggatcacttgaggtcaggagtttgagactagcctagccaacatggtgaaaccccatctctactaaaaatacaaaaattagctggatgtggtggcgcaagcctgtaatctcagctactcgggaggctgaggcaggagaaccactggaaccagggaggtggaggttgcagtgagccgagatcacaccactacactctgtcgcttgggtgacagaatgagactctatctcaaaaataaataaataaaatgccagctccctggaagcagcggcctctgttctgtgccctcgcgggttgccaggcctagagagtgcccaccccatcgtaggtgctcaggagaccttcccaggatgactggtgactaagtctccacattctgtccccgccagcagcccacccccatctcttccacactcctttctcctctccc

SEQ ID NO: 101278 - DNA, 2334 bp, Homo sapiens
acaccaacaatgagaactgctcctcgccctcctggcaggcacagcacgagagccgcacctttgccgtgtacctcaatagcactggctaccggacaggtgagcagggacgggggcaggtgcaggaagggagtgacagccagggcgggcgtccctaggtgtggtctgcacaccactgcggtacccaagttgattctggatagcccctagagcaactctcttataatttcagagttgtgcatttatttctgtgtgtattaaagaaatacagatttatttgcctacagtagtgatgtaaagtgaccttgtcaaaggaatttgagtcccccaaaaaagtgagtcttttcaaactatgaatcatagtgtggagaggccataaggtgcccatgcatgagtttgcatcctctgttaatagttattaagcccatcagggactgtttcgttgacttcaaaccattagcttggaagaaggttccaaaacataggggtgggggatgggaattcatggaggggaacagataatggggctgtgtggtcgctttctacgtggcagtaaccaaggtggtgcagaaactgacatggtggttgactgtccacactcacccgtgtcatcctgggtggagggcgacccagttcctgtttgcttatccttcaggaggtctttggtgggctctgaaggctcacctgccaggctggttgtctgaggtagagatgcaattacagtatagtcacttacctgtagcgccattgcaaaaccctccagactcaattcatttaacttgctttaattaaaaataaataaatactccccgccttgggtaagaagccgcggcggttgtgaaatcaagatattgtggctcagatgttgcaaccccaggaagttgcatccaagtgacaaggggtttgtttgggtgggagtgccgcaagggaaggatggactcctcctccagccctgtccgcagtgctggacctgcagccctcgaggctgggcagcttcctctcagatacacagtgtgggctggcagggatgctttggtgtggggagcaagccagtaaggtgtgtcttcttacagcctcatcccatagccagaatcacctagaaagtatgttctgctgagaactaggaaggcctcgttcctataccttgttcctgtgtattgtgcgtgccattatgcagaatcaaccacctgttggttcccctgagcctctgcagaaagccacatgtgtcagaagttaccatggccaccaccctagatgattggcgggggcctggatgttgctagcagaagcaggacaggcaggcccgcagcacagcagtgggcccttattgaagatgcacctgcaacttggctctagaaagtacagccatgcactcaagagtgaccagccttgaaatgttttaaagtctgaatatttcactgaaaatcttattttaaaatatgccggcacagcttattttttctttaatgtatactgggggccaaagaaaatatgtctgaggagtgagtgtgtggctcacagactctcttttcacaacctctgggtgaaaggtctgtacagaaacctttcgttttggatgctggaagatcagtaaagaccctagacctgttctcatcaatccccctcatttcacagccagggccactgcagcccaaaaaagagacctgcccagagtcaaagtgaggtgtttgtggcataatcaaaatggaatgcaagatcatgggaattcagagggggcatggaaatagtattcatcagactgaaaggaaactcatatattctgtgccattttgagggctcagggtgggagctaaaggctagtgtttcaaaatcttacaggcgacatgagaaaatcaatcatttcaagaataaacattctctaaagtggatttcccaaacttgtccttgaatgtatgcaaatcaccaaaaagctgtctccctaaataagtgcttttattcaactatgattcattattataccctcatgaagactgggagcgtaatgtcaagtgtaaagagccagataccgagaacatttacgtttttgtaaaactgccactgagaattttattcattatatttagaatgccactctgtacaaagaatcccattccagccttactttcagaactcaggaccctgaaaacacctgtttagtctgatgaactggtgtactccttgttattacataataagagccacataccctgtatagtttccctctttgccctggcagctaggaagctcaggtttgagttttatattgagttgttgtttaaagtggaaatgtttttaaagatccaactgcgtgatatgttatactgatcagtgttgact

SEQ ID NO: 101279 - DNA, 1047 bp, Homo sapiens
ccaagttggctttactctcaggccagctctccaggcagcattcctggcatcactagacccacatgaacaccatacaggtgcaagccatccctgtggaaagagagcttctctcacctagaagagagtacccaaattgagtctttttggtctgacactgtctgggacttctggtcaaccagattcaggggaatggaacacagtggttggccagatggagtcaggtgcacattcctggagccaggactggagccaaccccacttgaaccatgaggactgggattgggatagagcagattccccaaaggaaaattcagaagctagtgccagaagaaggcaggtagctggtgtgcagtccagttagagagatgctcgtgacaccctcacatggcgctctctgaagcagctgctcaaactgtggaccagacttattcattcggcaggtgtttcctgagcacctactgtatgccaaaggagatccaacagcaaacaaactaaacagagcttacattctaatgcaagagttaacaagacacatcgaatctatagtacataaaagagcagaaagtgaggaggagaataaagccaggaggggaagccaggaggggcgatcaaccaggagaaaggtggagaaaagaatcgctgggattttctatagggtggtctcattgggaaggggaaatctgagcaaagaaggtaaggaaaccagtcaagggggatccctggggaagagcactccaggcagagggaacggtgtgtgctaaggccctgaggcagatgcggtctcagcaggctcagagccgcaaagaggccagagcagcgtgcacaagagcagcaggaagaatgaacggtaatagggaggtggtggttggatggaccgtgcaaggcatgagcctttgaatgggaggaagattttggctttctgagtgagatggacaccaatagaggacattgagcagaggaggacattgagcatctgatttgtgtcttcataggacccctctagaagaatagactgaataggtgtaatgagagcagggtgtccagtaa

SEQ ID NO: 101280 - DNA, 1023 bp, Homo sapiens
tagattagggcctacaagtcttgccctctataaacaagccagacctcttccaccagcagcactgggttttgaaggaggcaagggatgggaaggtggttgtgggaggggcatgataggctttttataaaccactagacagacccagatcaataatgcatgtcccaaaaaagcccaatacattatctcacagtctctgctacaactggcatgcagcgggtggtcctaaaaaatttatcatttgctattttctgcccatccgtgcagcagttctgacagccctctgggctggagacttcttgactgagataatcccaggattctttccagtcccaggacagagaacagacgtccatcctcattagggtccggttgggaggactggtgccagatacacaagacgaggggcttgttctgtttcctaattgcaaggttggggggttcggggctgtaccacgtatattcaattttcctttccctgcacgcatttgactccctaagctgtcatttggaattatcaaatgcccaggggaactgcttccagggccatactagttcgtaagtggcctaaattatcattacatgtttaaagtagttggggacatccctgtgtctcaatggccctctgagaccaacggacttttgctggacttccgctccaaaagaataagagggaagcacatggaggtaaaggtctcgtttgcagacgtcctttgttcagggaggcagtagaatctttgggctctgccagggtttactgatttaatttgatctaaacctctggggagcctctggggctccagcaggctctgagacagcaagaggattaagacatggttctggcctggagcaagagaatttttgcagcatcccagttctgatctatgacttgagaatttctttaactggacttatttttgaagcttaaatattattttaaaaggaacctccaaattctgactgtaaaggaaaaaaccaatacccattgccttcggcaaaggatcactgtaaaaccaaacacagtga

SEQ ID NO: 101281 - DNA, 1536 bp, Homo sapiens
agcgctcaattttctctattgtcatttcatttattctgcaacttaaaactaataggctgggcacagtggctcacacctataaccccagcactttgggaggccagggcaggtggatcacctgagttcaggagttcaagaccagcctggccaacatggtgaaaccccatctctaccaaaaatacaaaaaattagccgggcgtggtggcaggcgcctgtaatcccagcttctctagaggctgaggcaggagaatcgcttgaacaccaggaggcagaggtcgcagtgagcccagatggcgtcattgcactccagcctgagcaacaagagcaaaactctgtctgggaaaaaaaaaaaaaaaaaaaaaggaatacttttttgcccaactacaagatcccttaacaaggggctttcacacgcatccccagcagactgaaatcttacaacagccctgtctactcattttgttcatggggaaaccgaggttccaaacgggcttgctcacgggaaaactgagccagtgagtggaagatctgccactcacacatgccagttgtccagcccaaaacatccagctccaggctctcgtttaaacccctgattgaatcccccgctgctggggagctggaacttcatctccctcacctctgtaccccacggtgcgggcagatgcaagaggacggcaaatattcaccccttgagaccagcccgctgctgttcctctccctggggacgatttgtctgtggagttgggtggattattcagagacggctgttatctgactcgggtcttgggctgccaccgacacatcagaggctcactggatccagggaagaaattgtttctgcagaagtggccacagaaggcttttctgccagtctgttgaccaagcaaactgtaaagactttgctaacttcagcggagttcggttttcactctgccatagccacccctgttcaaagaaactcccattgttcatgccagccgccatacaaatcattatgcaagaatgagcagccggcagccttgacataaatattgacctgattcttcctcctcctctagatctgcgagtgaagagggacgagggaaaagaaacaaagccacagacgcaacttgagactcccgcatcccaaaagaagcaccagatcagcaaaaaaagaagatgggccccccgagcctcgtgctgtgcttgctgtccgcaactgtgttctccctgctgggtggaagctcggccttcctgtcgcaccaccgcctgaaaggcaggtttcagagggaccgcaggaacatccgccccaacatcatcctggtgctgacggacgaccaggatgtggagctgggtaagcctcggggccccagggtggcacctcggcccctcggagcagggtccctgggttaggctgaggctcctgaggcaaggcggtggtgttgatgcgtcgtgctcacttttgagtacattgaaaccaagacacgggccacccacacgtgtttggggtcacaactgggtcctcaaggttaggggtctctacccttctccagt

SEQ ID NO: 101282 - DNA, 1743 bp, Homo sapiens
caagtcaagatgagatttgggtgaggacacagccaaaccatatcagatacacaacatagtttgaggattactctgatttggggtggttcagggactgattcgatggctagagtttgtctccttttcagctgtctggcagcctccagttacctccagcagaaagtctcagatggtgctaatgtgctttgactcctttcaacacctgctaatctcacttcaaaagagagtgcgagcgcgagggcacgcgaagcctgggaagctatttgcatcaagttccactgattcagctttctttgacttttatttgtacaattagctctacagggaagcgatgtccactttccatttatctttgggtaggaagttttcttttcccaaaacatgtgtttgtgtttttattttaaaatgaggccatttaaagaagcacgttaagcaaataatcactgaagggctctgcagattcagcagaaatcagggccgtggtccttgaacggaaagagttgggaaatccgagtttcgtgatgagaagcccacattgaacggtgagggagggcagaattcacatcccatccctgccatcttctgtctgggtggccttaggacagtaatgaaacctcagttttctctggggctaataatagtacttgcaggagggagccttggtggaggttgaaggagatttcagagtgcctgacgcaggacagctgcagcggtaggatcactctaataatggtttacattgtggaatatgtatcccagttagtactatggccaggctctagtcccagcacactgtatcaacacatttaatcctgcacacccatttcacagatgaggaaactgaggcacaaaggtgttaagttactagctcagggtctttcagcaagtaactccaaagtccacatccttaaccatcacaccacgtggcataaagcaggtgcccagcaggcagttgccgcagtggctctggctgtcatgaggtgtatgtttctgcagacgagagattgagaaggaaggtgttgttcaccctctggtcccatgaaactcacagttctcatgtcagacgactgcatcgagtgtgtccccagctcccctgaaattgtgactctcagagccacctgggaaggaggcattgagcggagcctgcttcctgctcccaggggaggtgctagaagggagacttgctgtcctggccagcctgacataggatacaggtccctgaatgaagtaaattagggtgcgcatcagggcagctgggagagttgattgaaagcactgttttcagaggcaggtgggcaaagggagcaaagaaatgatgctgcaccgaggaaccggtagcaacaggagcccttactttcccgagacttgatggggcaagaggagggagaggtgaactcagaactggggagacgctagagccaggaggggccccaggcaggagctgcatccacacacacagacacgaaggctactgcctggggagctactgcgtgcgggaggagaataaatgcacggacttcccaccacctcccatgctgcagcctcccagccggaagccagagagcagggacgtgccgaccgtgccatctgtagagctcagcctcccagggtgccaagcagagctgggggagaaatggagcaggagtgacccttcctggggtttttcaaccatagcgctgcccagagaacacagtggccagctcctcgttggtgtccatggagggtggctggggcaaggcatca

SEQ ID NO: 101283 - DNA, 3450 bp, Homo sapiens
ggtggcccaaacctagcagagaacacaagccagcatttattgggcacttgctgcatacagatctgttgaaagtctccgtgcatgttaaaccatccactctgtaggcaagtgcttgtaggtgtcctcactttccagatgaagtcactgagaagacaagaggttcagacacttgcccaacctctagtaagtgacggagctgagatccaaacccaggcaggctagctctagatcctaccctcctcctactcagcgtgttccctgtggcattttcccccaagtaagtatcaggctgtttgcttacctctgtccgctgtttgtcagctctctgagaatcgagagttttgtctgttctttttttttttttctactgatcatgaaacagtacaaagcaagtggcagatgctcaggtatttgagggtgtgaattatatggcctgtcaaacatctacccacttgacatacaaaacattttggtgctcagcttcctaagacttgaatacattgtttctaaatttcctttgtgctctaactttaatccatggccactctgttctcacagcttgccggtggtttgccattatttccagtcctcttttctgatcattctcacatgtagctggaatctttcaactccagcttttcctatgttgacttagagtatcacttccaggagggcagggagctttcttttcactgctttatccacagtgccaagaactgtgcctggcacacacgagccttcaggaatgtcttgttacatcaatagttaggcaggtaactgggttcctaagccctgcatttttgccctacaatctttatgccctaatttcctttccagatcctgagcctttgtcttgaaacctgatctttccctcctccctctgaatgacccttctattgtctcctgccctgttcttgagagccggcttggttctctgcctccatttggaattccaagaacaggcaaggagagccacaagatggcctgggctaggtaggggagacagggagaagctgtggcccataggttacaggagcttctgtcctttctttgacggccccaaagaggaggagagaaggctggagaaagcctgtagccaggaagaaagggagacacaggggagtgtaaagtttaacagatgtgcgtgtgtcatcccctgtctagacagcttctgggcttgtgaggtttgggaccacactttcccatccctccaggggcctctctctgtttcctctgcctgctctttgcccaaactgtttctcctgcctgaagcatcctgtcctccaccctcctcttcactggccatccaaatcctttggattcttcagaactttgctcctgttaggctgctcagtttatgctaagtactcctccaggaagccctccctgactgctcccaggccagcagtttcccctttcctcttgctgtttatacaacacacttaacctcagtcccttgtatcacttgttgctttccaagtcagcataagtgtcaaaagagtaggctctggggtcagaatgtctgtgtgcaaatagccatgctggcttgcttgttttgtctgtcacttggaggtggcacatccaagtgaacctcccaggggacagggaagagtggattactgttgtaatcgggcaggattctcctatcactgaacactgcctcacatatagcaggcccttaataaatatttgtaaagtaaatgaaggaagagagaaatgatcaggctccctggaccacctgaggaggccctcaggtctgttgctgggctctggccccagcccgtgggacatatctgcacacccacaatttcctttcttccctcctctcatgagtgtttcccgtctgaccaatgccgccttctgcctctggccccttcttcctctcccaccacctcaactgcctaattattaccaaacttctctctcctgtttttttttttttgttttgttttgtttttttttaaggcagtgtcgctctgtcacccaggctggagtacagtggctcgatctcggctcactgcaggctccacctctgagttcacgctattctcctgcctcagcctcccaagtagctgggactacaggcgcccgccaccacgcccagctaatttttttgtattttttttagtagagacggggtttcaccgtgttacccaggatggtctcgatctcctgacctcgtgatccgcccgccttggcctcccaaagtgctgggattacagacgtgagctgccgcgcccagccctctctcctcctcttgttggatttggaggtggagagaagatgggaagggaggaccaaagggacagtattcagcacccatgctgcacgacactgggcaggttctggaacctgtccgtgccttatcttccttgtctgtaaatggagcatcccaactcacaaggtggttgtaagggtggcgtgaggtcacacactaaaagtgcttagaattgtgcagggcccctgatgttagctatcattcattattgttcttctagggtgtttcctgtgttggtctgggtgctccctgttgcaaatgacagccctaattcggactctcttaagcagcaaagggcacttttttgagtctgtacctggctacaagatgcaacttggtccaccccattgtcaccagcatcctctctctcgggctccatccaatgggcggccaccatcagcaccatattcatgcctcctggcacccagcacagtctcctccagcctccaggactccctctcgcttattggccagacttgggtcacatgtctgccccaggaccaatcgctgaagctagagctggaattgctgattggctccacctggctcacatgcgctgccctgcagtcaaaccatatataagggggggtgggaaataagagcacttgtggcctcaaagcactaacaggggctgttaccaggagacaggagataattctttgttaagccagtaaatattttgaatgcctgctatgccgcaagcattgttttaattgttgaggatatagatctgaacaaaaatgacaaaaacctgtaccttcagggggctgatattctgctggaggacatccgcaaagaaataaaggagctagctgtgagaggtggtaagtgctactggggagggcagagatttcggttttaacctgccaaggtgaaatttgagcaaagacctgaggagggggaagaagggatggtgaagataacctgaatgaaggctccaggcagagggagcagcaagttcaagggccctggggtgggctgtgctagcatgtgcaaggaacagtacagagaccgtgtggctggaaccaggtgtgcaagggagagaggggaaggcaataaggtcggagaggtgatggagcaggttgggtgggttcttgtagcccctttggagggtttttgcgttttactctgcgtgggatggaagttattgaaggccgttcagtggaggaagg

SEQ ID NO: 101284 - DNA, 1050 bp, Homo sapiens
gccgtgccctgaggcctctgttcacacaggcacgaggtggccaggaagccacgggagtcagccctctgcctccagcccgccccccaatttgggttcatttggttgcaagtgagagagcaactaggaatgacctaattgaaaaaagggaatttcacttctgatcttgaagagtcaaaagtatggggaaactgacctacaaagaaaacagaaactagttaaagaggaatttattgggcctgaaacaaagaacccaacccaaatcttcctctttcaggctgggctggatcccaggtgtccagtgctgttaagtcccaagtatggtgcatttcacagcactgctgtgttcggtgtgttggcttcattcccgaccccactcaagacaaagtggcgtcgctgtcttccctggtcctcacattggaaccacatggagtgagttagccagttgtaaagactggatgcctcttcctgaccagtcaggccaaagggcctggattactctggcccgtcactgaggcaaggggtggggaggctctgattggcccaggtctaggatcccacgatctagcattgtagctccagaactggagcctaatttgaactttgtggaccaagggtggggagaaaaggatcccccaatattttttttttttttttgagacagagtcttgctctgtcgcctaggctggagtgcagtggcgtgatctcagctcaattctcctgccttggcctcccgagtaactgagattacaggcacatgtcaccacacctggctaatttttgttgtttttgagacacggtcttgctctgtcacccaggctggagtgcagtagcgcaatctcggctcactgcaagctctgcctcctgggttcacgccattctcctgcctcagccttccaagtagctaggactacaggcatgtgccaccacacccagctaattttttatttttagtagagatggggtttcaccgcattaaccaggatggtctcgatctgacctcatgatccacctgccgcagcctcccaaagtgctgggataacaggcgtgagc

SEQ ID NO: 101285 - DNA, 1025 bp, Homo sapiens
tggacgattctgtggtttgaccaggtggttcttcagcttcatgtgatatcagctggcaggtctaaaacaaccccattcaaatggctggcagctcttgctggtcaccagatgggagctcagttattctccatgtgggctctgccctatggctacttgggcttcctcgcagtatggcaggttcagggtagcctgacttctaagagtgcaaaaatgaaagctgccacggtctcttaaggcttaaccgcaaaaccggcacagcatcacttctgccaccttctcttggtcaaaacaggtcccaaagccagcccggtttcatgaggtggggcccacacaagggtttgaataccaggcagtgtggctttttggagtccaccaaagtacccattcatcacagactgcaagtagcagagcccaacacttactacctcaagctggaacaggatttactggggggctcaggaaaggacaggtcaggaactgaggaaattctggggaccttggcgcaggagttactagcagcctcctgaaggagagtttccatcccaatgcgacaaatgcacccctgctttttctttctgcccttgacactttatttgacagttggggacatggtaagaaagtctgattgaccttggtcacatgatcaccccttggcagagaggatgggggcatcttggcagaggggagggagtcctcaaaaggaagctggggtgctgtcaaaagaaggggaccagatggacaaaaattgttagaaatctctgcaccgcccctgcataggtgactccacccctggcagagcaatgaacattttaaaacgagtgaatggactttgaaagtccagtataagtagaatgcccaaacctgtgtggcagcttctccagctccagggccccatagctcaggtgctgctgggggtctggaagcttctctccactttacggggcaaagtcaactcctagaacccctgccatgcctcaatatccccctccagaagataggggcagtttgcttctggctcctgaaag

SEQ ID NO: 101286 - DNA, 4239 bp, Homo sapiens
gaaggcggggaaaatgctctaggcctggcgtgctggctcatgcctataatcccagcactttgagaggccgaggtgggaggatcccttgaggtcaggagtttgagaccagcctggccaacatggcaaaaccctctctctactaaaaatacaaaaattagccaggtgtgatggtgcttgcctgtaattccagctacacaggaggctgaggcaccagaatcgcttgaacccaggagtcggaggttgcagtgagctgagatcgcactactgcactccagcctgggcaacaaagtgagactcagtctcaaaaaaaaatttaaaagaaaaatgactgcatgatgtgatggggtgggaggcaactttaggcaggctgtcagggaggcctctgtgaggatgtgacctttgaactgtgacctagattttaggaaggagtccgccttggaaagatctgggggaagagcatgccaggtagaaggaacagctagtgcaaaggcccagaggcggtgggaggggcctgtccaagacacctgccccaaacacaaatagaagtcaagtggggtaggccaggcgtggtggctcacgcctgaaatctcagcactttgggaggctgaggcagttagatcactggaggtcaggagttcaagaccagcctgaccaacacggtgaaacctcatctctgctaaaaatacaaacattagccaggtgtggtggcacgtgcctgtagtcccagctatttgggaggctgagacaggagaatcacttgaacccgggaggcaggggttgctgtgagccgggatcacacttctgcattccagcctgggcaacagagtcagactctgtctcaaaaaaaaaaaaaaaaaaagtcaactagggtagagggtcaggagtaagtgggggagggcacgtcagagatgagaaatacaggccatgctaagaaattttagactttattttaaataaaatggataactgtctggacgcggtggcttatgcctgtaatcgcaacactttgggaggccaaggcgggtggatcacctgaggtcaggagttcaagactagcctggccaacatggtgaaaccccatctctactaaaaatacaaaaattagccaggcacggtggcgcacacctgtaatcccagttactcgggaggctgcagcaggagaatcgtttgaacccaggaggtggaggttgcagtgagctgagattgtgccattgcactctagcctgagtgacagagcaagactccatctcaaaaataaattaaaaaataaaatggagaaccattggagggttttaagtcagagaatgatatgatttgtgtttcaagaagatcctgctggctcctgtgagaggcgtgctgtgcagatggaagtggtatcaccgggactgttaggcaacagagagggcccgagagtggcttggaccgtggtggtatcaatggagatggagtgaaatggggattggagatgtattttggaggtagggcccacaggacttcctagtggattggattacagagtgagggaaagggctttgattctcaaccgagggtgattttgacacccagaaaacattttaacactatccggagacagtataggttgtcccaactggggaagggttgctactggcatctagagggtagaggccagggatgctgcttaacctgcaatgtacgggatgaccccacagtgaaaaatgattcagcccaaatattcatgatgtatcctgccaaggagtcaaaggtgactaggcagcctggtgcgtggtgattgctaaatagggaagataggagagaaggttttggggaggaggagtgatctggaattccgacgtggaaatgttgggtttgagatgaaccccacctggatgtctgaaagctcagtgggtggtgaacgtggatgtctgcagccggtcggggctggcaacctaagtttgggagttatcggcatattgatgttattttaagctgtgggactggacacaattatccagagagaatgtgttttgttttctagtgtggttttctccccccagcctccccctagtgcctgtcatgaatctatttgatgaatatttttagcatatcccacatgctcacctctctgacatttccaagaagttcctgaaggctcgggctgagcctccccttcttcatcgcctggtttctcagtgattaacagacagagctaaatattcattgctctgccacagatgcccttgggaaattgcttaaggtcatgtgggatctcgggccttgtaggcagcacgatgccttctgggtggaacagctgttggcatggccttcagagcttctcctccagcccaggccagggcttcttggaattctctgtaaccagaatgttttgaattccccacgttctcttaatgtgattccaaagcacacgttgcccagtggccctggcctctgccatggagcgtcatcttacagaaggcctggcccactgctctgcacacctgggcccagcttgaatcttagataaattctatcccaaactcagagttgttatggccaggtcttgtgtgtgtaagttggtggacagggccatccccagggaccacaaatagtaccaaagatgtgtttggccatgtggaagccagatgtgttaggggaagaatgtggccaatagcttttcttattggctcatggtcaggaccccagcgggtgacttgacccaccccagtagccagagaagaggagcttttttgtttttgagacagggtcttgcactgtcatccaggctggagtgcagtggcacagtctcagttcactaccacctcaacctcccaagctcaagtgattctcccacctcagcctcccaagtaggtgggactataggcacaggccaccatacccagctaattttttttttttttttttggtagagatgagatcttgctatgttgcccaagctggtctcaaactcctgggctcaagtgaccctccaaaagtgctgggattacaggcgtgagccaccctgcctggcctggaactttttgaaaagagattgaaaaaactgttagctcacagaagccttggagatgttcctgcttggtgaaaatcagaccatctgaaagccacatttctggtctgctctcgagacagatactatccatagacttctgattgcaggccacttatctggatatttcagagaccaggaaagcctactataattcttagtagcttagagtcctgatcattttaatgtgaattgaaatggtttcattatgaggaatcacatttctgactgacagtggcttatgcaatagaaacatttaattctcacataacaccaagtccaaagcaggggagtccaggcgctggtttttcagtacaacagtgtcatccaaggtcccaggatctttcaagcctcttcttctgtcctcatcatgtctttggccttgttgcctcatagtctcaatatggctgccacagctccagacgtcgcatcaccctacaaagtgggactataggacaggactccttgctgtctctcttttaatcagagagtaaaatccttgccagaacactcccaccctagcagactttgctttctgtttcattggtccggagttgggttttgcactcacctctaaatcaaacactgggaaaggacctggctccttcctatgcttcggatctcagctgaaatgtcacctccctagaatgctggaaggacaacctgttttatgttttataacacttatcactctctggaattagcctggtttgcttatttgtcctttgtcttctctctcctcactaaaaagcaagctctgtgcttgtagggacattgtctgtcttgttcatcgctgtatccccagcactgagaaccagggtggcactctttggatactcagtaaatttttttttgaatgaaggaagcaagaaaagaaagaggcttggagagctacaggcacatctggctagcatgtttgctcgaaggtgactgctcagggcaaggatgtcaaaacctgttagtcatttgcaaaaagctaagcaggtggctgggaggattggtttcatacacactcacttgctccccagtgccagagctggggttttgtgctagcattgcttgcagaggaaggatcgtcccctttatgccacggcagggacctcacggccttgcagaagggctggtggaaccctccacttctgatgactctggggccaagctagtcttccaggtcagtggtgtgacattctaatgag

SEQ ID NO: 101287 - DNA, 1456 bp, Homo sapiens
catttcactccatctccattgataccaccacggtccaagccactctcgggccctctctgttgcctaacagtcccggtgataccacttccatctgcacagcacgcctctcacaggagccagcaggatcttcttgaaacacaaatcatatcattctctgacttaaaaccctccaatggttctccattttattttttaatttatttttgagatggagtcttgctctgtcactcaggctagagtgcaatggcacaatctcagctcactgcaacctccacctcctgggttcaaacgattctcctgctgcagcctcccgagtaactgggattacaggtgtgcgccaccgtgcctggctaatttttgtatttttagtagagatggggtttcaccatgttggccaggctagtcttgaactcctgacctcaggtgatccacccgccttggcctcccaaagtgttgcgattacaggcataagccaccgcgtccagacagttatccattttatttaaaataaagtctaaaatttcttagcatggcctgtatttctcatctctgacgtgccctcccccacttactcctgaccctctaccctagttgactttttttttttttttttttgagacagagtctgactctgttgcccaggctggaatgcagaagtgtgatcccggctcacagcaacccctgcctcccgggttcaagtgattctcctgtctcagcctcccaaatagctgggactacaggcacgtgccaccacacctggctaatgtttgtatttttagcagagatgaggtttcaccgtgttggtcaggctggtcttgaactcctgacctccagtgatctaactgcctcagcctcccaaagtgctgagatttcaggcgtgagccaccacgcctggcctaccccacttgacttctatttgtgtttggggcaggtgtcttggacaggcccctcccaccgcctctgggcctttgcactagctgttccttctacctggcatgctcttcccccagatctttccaaggcggactccttcctaaaatctaggtcacagttcaaaggtcacatcctcacagaggcctccctgacagcctgcctaaagttgcctcccaccccatcacatcatgcagtcatttttcttttaaatttttttttgagactgagtctcactttgttgcccaggctggagtgcagtagtgcgatctcagctcactgcaacctccgactcctgggttcaagcgattctggtgcctcagcctcctgtgtagctggaattacaggcaagcaccatcacacctggctaatttttgtatttttagtagagagagggttttgccatgttggccaggctggtctcaaactcctgacctcaagggatcctcccacctcggcctctcaaagtgctgggattataggcatgagccagcacgccaggcctagagcattttccccgccttct

SEQ ID NO: 101288 - DNA, 2933 bp, Homo sapiens
taattacattcagcttacgtttcaatctgggtatttgctcatctgtgcgtgttgggacacccgccctctcgcccctccatctgtcccctgcctgtttcccaccgggtccacccccacttttggggcagagaaggggaggctgcgctggagcaggttctcagggggagacagggagcaggagagacgggctttctctggaggacacccccggatctgcgcgctctccaaatttcagcttgtagtgaatagtgaaggtgatttcttgacagcctctgcctcccattacagaaccaccagagggttctaattaaattagagccaatcgttaagtataggaacggggtagggaggacagaacgaagggggccccttccctgtaagagatgttctccccagcttcgtctctcccacatcatagagaagagaaaactcatccagacagcctgtcggatgtgtaatttagcgttctaataagcagcttgaaaggcgaaggtggtgggcttggcagatggcatgttggacctttgtacatgaaggcctcttccttccccagctaaatttatatacataaaggccgtgatgttggcatcactgctgcagctgagggtcaatgtgggtttggggtttgggctttgtgtgtacttcttgggttttttatttgaatttatggctttttctgaaaccctaataacatgttaaattttcaaacttgagagtagagtgatgagttgactgtaaaagtctggtcttggaggaggacagcatagcagtgtgtgtgcatgcacgtgcatgtcccccagttcagctgctgtccaaagaacccagttgatatgcagtttcacacctgatttggacctgatttgggagataacatttccttctcactttttctggcactggttagtttatctgcttggacctgcctcaagagggcagctgggttaaccaggcagaatatcacccaactctgtcaagctttggccattatctgaccttagactttagtcctgcagaaggagtccagaagccctgtcctacagaaaaatatcagcatttctgaccagcttgtagttaaaagaaaaggtttagtccagacttaagataattggtaacacttaagtagttttgtatgggcctgatctgaggcattgatctaagcccttataccttactcattaaatccacacaaataccctgttaagtaagtactgccattgttgccatattaaagatgaggaaacaggcacagagaggattgtgacttgcctacagctggtcacaggtagagctgggattcaagaggccctcaagctccggggtccacttggaaccactggactctcctccatgaccttggcctttgtcccagatgtagaagaaacacatatgcaggggaagaaaacaccttcagacagtcaaactttgcaaagtaaaaggcccttaactttccataaacccccactgttccgacagagagtccgggtttgtatttgaggttttttgccccaaggaaaacatgtgtctgcctggtgctttttcttctgcttatgagcagacacactgtcccctcccccagtcaaaatgcaaagggaaacatcaaatgcagctgatggaaaagccaggtgaaccatggtgaagatttcagcccactcagagcacagtggccagagagcaaaagctctcctagaggtgagaccttcctgtggttggtgatggagtctcgatggcctggccctgggggtggtgccagggtgctctgtgtcaggcctgggcggatgtggaagatgggggcctctctcaatgctgatctgcaggtgagggggccctccctgaaacctgctttctctgggcctccttggaatgggccttggtggagatctacagacagccctggcccagccggattgaaggcactgtctaattgggagggcattaagatcgttataattaattggcatcccgataaatggcatggttgcctaattggggtggttgctagggaacgaggcctcacttggagcctaaaggggaagaagcgctgggctggccacagttgggtgtcagggtacagatccagcagtgaatggaccggaagggagagcagtccatccgtatctgctggtgtttactgagcagctgctgtgtgcaagttgcaaatggagtatcagttaggggtacttgcctagaagaactgtaaagtaatcaggttcctttctcttgcaagcaacggaaaaagagaagaaaaaaactcaagccagcttaaggagaaaagaagtggacttactggttttcataaccaaaagtcttaaggtgactaactctagcttcagacacagctggacccacagctcagattttgtaatgagaatccattcctatccaccgctcctctgccttccatgaggctgatgtctctccagctctggggcgggcagtccctggcagctgtgggcaccgtggctaggagagccagactgcctggctccctgcccagcagtgggatctggggcatgctacttaacctttctgtgccttgatgttcacatccaacaaatgatgatgatcatagcacctgtctcctgcttgtggtaagcatgaaatgagatgatcaatgtcaagtgcttagcagggcgtctgacccaggtgagccttcagtaggcattgactgttaccataacttaggtgtcaggacagatgtcatggagcagaggggtctcatcccctctggtttaagcccaaaaggaaagaacaagcctctgatctggcaatgcacacctgagccccatggttccctctgattggactgttttttgtccaaaccagtcactggctaaggaaatgagttgccaacaattggcttaagccaggctcacaggcctctccctggagctggatggaggctgactgctgagaccccaaagcctggaataaaa

SEQ ID NO: 101289 - DNA, 1076 bp, Homo sapiens
ggcgcggagtcccctgcgcccagcggcccggccgggctgcggcagaggcggcggcggcgccccgctccgggtgaggttgccggggccgtgcgcgctggtgagtggggcgtggggggcaggtgggtggctgggggacgcggggctcgggcgggggctcgcggcggccggagccttccccggcgtgagcccggccgcgagcgccgcccaggtgagccggggctggtccggaccgcccggctccagccccagcgctgcttgcggaggtgggtccgggcgggcgggagggaggctccggcgccggccgtccgcagagggatgacctgtttgaccccgctggctggcgggcgggcgaggacttcccgccgcgcccctgacccgcggacacggcacaccgagcacaggcggccccgggtaggggagcgcgcctgggccggccatccgcaggggcatggccttgttgacccttagggtttagacccaagggaccggtagatgccagcccacgtggggcttgtccgggcaggactcggggaagcagtgggccggatcttcagagtggttggaaactcgcagacaccgaaaggacaaacaggatcgaaaaggcagacttcctcccaggccagggcagaacgagtttccatcgcctggcggagggatgctcccctccccggctcctcggggtttcaaaagtctagcggtgaattctaggagtgcacttttccaaacattccttatagtagttcgttcattcgttctacaagcatttctggagcaccccctcgtgccgggcaccgcgttctgttccagggaaacgcggctgaacaggatctggctcctgcgcgccagaagctgccggttcactgggagggcagcagggtagagagatgccgtctcggggtggaagatggaaagggaagcctgcaatcctagtttgcacactggcctcggtccgcaactcccccacctgcacgcagtaggcccagcacacagtaggaagagcaagccagacctgcctgtgacgaccctctcctcctcctcctcccccttgaaagctttgattcattccctgcccccct

SEQ ID NO: 101290 - DNA, 2056 bp, Homo sapiens
ctgtgttagagaaactgccgctccaacaccaagaataaatcagctccatttcccatcacctcggttgcttctttttcccatctcttcctctctgtaagttttgcctaagaaaaatgtatcatgttttctgaagacaaccgcttccccctcctcccttgtgaacagtcaggcaaagaatgaatttagatttttttgtagtgtcaaggcctctctcattaaattactcccaccatctcttgtctctcctggtgagtgagtttaatgatctcttgctccttactctcttgaaaactgcctcgtgtgcttctggcttgggcaatcttaatgctttgggcagctttcagtttcctgactgtagcttgcactccagacttcatccccagcccgtccccatcctcttctccgcccagcgcttcccatcttcccacattcctcttctcatcccctgttctctctgcacttatttgctcactgacattcccatattttctacttctactgaaatcctgattgtatccagtcatgcttttttgattttttaaaaacactgaaatgtctgtaattccaacactttgggaggccgaggtgggcggatcgcttgagcccaggagtttgagaccagcccaggcaacagggcaaggccgtatctctataaaaaatacaaaaattagccgggcatggtggcatgcgcctgtattcacagctactcaggagagcgaggcaagaggatcgcttgagcccaggaggttcaggctgcagtgggccatgatcacaccacggcattcagcctgggcaacagagagagcgcctgtcttaaagacaaacaaacaaacaaccctgaaattttggctcacacctgtaatcccagcactttgagaggccgaagtgggcagatcacttgaggccatgagttgaagaccagcctggccaacatagcgaaatcccgtcgctactaaaattacataaattagctgggtgtggtggcgggcacctgtaatcccagctactcggggagactgaggcacaataattgcttgaacctgggaggctaaggttgcagtgagctgagattttgctactgcactccagcctgggcaacagagtgagacttcgtctcaaaacaaacaaatacacacacacacacacacacacacacacacacacacacacaaacacaaacaaaaacccctgaaatgtgatgatgaccgttgtgtccttatcaacagccattgcttgcctgcttacgttagttgcagtgggagggtaggcagccagaagtattgggcattcccctggcctgtgcattttgaatgatgaatacaaaactgctcaattcaccaaaaacaatcatgtaagaaaggaacgtttcacttcttcttatgggcccctgattgcatgtgatgcaggtgacaattacatatgtccccttaacagtttggaaaattctagtgaagagaggagtttaagtcccttcacactgaactgaaacaattaattctctataaaaatctccgcatgatggatcatgttgcatttcaaacctctacagactgtctcatataaatatctgtttctcttttttgagacagagtctcgctttgtcacccaggctggagtgcaatggtgcaatcttggttcactgcaacttctgcctcccaggacctgcagaggtcctggtctcagagttcatgccctgcagttgctgtgtgtccagcagctggcagggcaagagggttggggggtgggcgtcacccccacagacacacagcacccggcagaaccctggcctaaaggcgcgcagctctggggtctcccaagcccacctgggagtaggcccatggggacagctgtgggggacagggactcccaatgtacaaaacaggccatgagctgggcaagctactccttctcataacctcagacctttcttctgacccagtcaggaccagctcctgggagcctgcagacaatcctgggcccagagaagcaggcagatgtggctgttggtagcactaatatgggttgtgaatatcatcctgtggttattactttactt

SEQ ID NO: 101291 - DNA, 1054 bp, Homo sapiens
attaagaggccgacacaggaccacgttttaaggagattctcattcctaagcctgttgcttttccctgcacagcacaagcaagacctgatttcccagcaggaaggttgtcttaattaaatcttatttgtcaagaaggcaagatgtatttgtgtttcctcaggctcccattattataaacttcgcaatgttttctctgagaaatgctccttttctgctcaaaagagctgattgttgctgtttttctctcttccattgtgagaaggaaatgctacaagttctttgtcaggtaatcaattatcctccttaaaggatccctgaagtgtcatttgaaaattatggctcctgaaaaataataaaatggccactttaacatattgttgcctgtcagagtgagtttctctcccctgcagagtcacagagcctgtaaattgcccgtggtaatgacctctggctccaaatgcagtcactggtctctgcacagatagacactgtctgtcacttctggggtttcactgttgacgctgtgtctcttttagcttctaggaagccctgtaatgatgctgtaattagcaatgcatccttccctctctcccaactccaattgctgtaatttatgtctctcaacaatacttacaccaagcacgccatctgtaccactgtgtggggaaggaagttctcaggttcaaggtctcagggagataaacacaattttaagttcacagacatcctcagcaatcaacatcaactaccacaccaagaaagcaagaccttggtattgttggcgagtagcaggtaattgatgatcttgtcagcatgatctactgtccctgatctgtatcaatatgaaataagaaaccatttaagaggtgtcaggaaaacatgtcaggcccccctcctcctcctcctaccatttgacattgactcattcacatataaaattgagtctttgtgatggtgaagtgttaaagaccccgtgtagtcaaattactatcatgaaaccagtgagtggaaacaagttattaaatgtccctggttcctcctcattcaaacaggt

SEQ ID NO: 101292 - DNA, 1043 bp, Homo sapiens
gtgtctcagggcttgggccaggccgactttgacatttaccgcttacctcttcatccctcctccctcctttcttgttttcttcttaggcctgtgttcccacactgcaaagagaaggcagtaaatgcccatctaatttatcagggcagtaaaaagtattgggattcatgaccagaggattgttccggaacaaaaattgtgcagctcacctcacctttccttgcactgtatctttttggaatctaagcacggcgagcagggcacatgaggacacggattccctgaaaagcccttgagtaattctggcttaggccattaaccttacacaggcataagaaatcaacatattttacacatgttcttgtaccccagctagtacatagatcaatgtaactgacctataacatgcatatgaaccaaaatactagaaatcttgtcctgggctatctataaggtgcatatgaacaaaaatactagaaactttgtcctgggctgatctattacatgcatatgaaccaaaatactgggaactttgtcctggtgttgtcctgaataggacttcttccagtcaccagaatgccaatatcattagcagacactttcccatttagcagcgaaatggcaggtctgtggggatgctactgaaccatgtttgctttcatggggtggaaacctgcttggctctgtctctggtaagttcaacctcaaaatatttactcttaaatgggttaactattttctcctaaccacactgaagctagcagcaaaggacgaacaggtaactttaacattcattttcccagggaagaaagtaattcatcaccccgtagcggccggctggcgggccaggctgaagactggtgtggagcgagccagcaaggctaaggttggcctaagagaccacagagggtgccagagccacagaaaaggcatagccttgccccctggcagaaaaagagggtgagaaaaaccctggcttctcccttcttccatgctccatggccccagcagtggcttggactggccaaacctggcccaaagacaag

SEQ ID NO: 101293 - DNA, 1125 bp, Homo sapiens
tcaatcttccctgcccacttatccagaaaataactattagtgaattatagagcaaacagacaaattgtcacctttatctgtgttctcagaaccgtgatattaactggccataaccctcttgtctttcattagtgagaatttagagtaaccaccatcactccctgaggtcacacataaaacagctcaaagatgactgcaattaaaccagtttataaatttcccacctcccaactaacccactcttcatgaaggtgctctattgggcattgggtatcagtataaattagacgctacaatcacatgtaattaagcagggggtaatggaatagataccgtgctgcagagattagtcctgttttgctgaagcgaattcatctccgtgtcagtgtgttcacccagggaggcagcatgagaagtaattatctttcttctgacttaatggtggttatgctgccattttttattaccataatttctcaagactcatacacagatccctttctcctaatgcgattgcagttctacatacaagacagcttatgcctaggtgaaaactcaagcagaattaaccataagactatatagttatagttgatgctggaatttgtatttttaaacccagagcaccacggtccccactcaggagtagagaatttagatcatgatcctttgagggtgactgcagcaacttttgctcttgaaaggcaattttcagccaaatttcggggccacctgtgctccaggtctgtgggcttattttccaaagcctccgaatgcatcccaggccacagccatttttcctacttttaatgtttctccttcacacactgatttgtttgacatgctgagagcttgacttttacaaccttcataaaatcccatctgctacaacccaaactcagccagaaagtgctcagacaaaaatggtacaggttgtattatagtctcttgatggagattaaaaaatacacactgagtgatttttttcctttttttttttttttgttgttgcctataagtcaaggaaataaaacagcaactccagctttgcaaggtagatggaaccagggggtgttctgcacaaaagggctgccaaggaatttgcaggctgaagaagcgaggtgt

SEQ ID NO: 101294 - DNA, 1067 bp, Homo sapiens
tctcaaactcctgggctcaagtgatctgcccacctcagtcccccaaagtgctaagattacaggtgtgagccaagcacctggccaagagtttcctaaaggggaaaggcaggatccatcctcccatatgtgcaattccatttagggctctttttgggacagcacacctggttttacaactcctttctagaaagttcacttatgagctgattaatggcagtaatgatttagtgtaagcagagcgcagtagccctagggctgaggttctaacctgggctctgttcccactggctggtaaatccttggctgacctccccaggcttccatttccgcatcttgagagtagtgatgatatcagcgacactgcagggacattgtgttggattgagtgagatgaaggagagtataaatgcacagcacagaccggttctgagcctcccatttcagagcaggaagccgggcctccccctcgaggatgcactgagagaggccactgtgagatctggcagagggtgtcttgatgtcaggtgatcagaacacatggcagccttggacatctctgatacgactcctgctcatggagtcattcatttgacagatgttattaagttaagtaccagatcatagcaaccacaggagttataaagaggacatgtcacctgcttcaggggaacttagagcctaggaggtgaaacagatgtaacaagtgaacatgacaaagtttgcagcaggagctgctggttgcttacctcttctttgctaataaaaatgggatctgtttgggcagcaacaggtccagttcaaggggagagaacaaccctgtcaatcatgacaatcccacaggtgggcacttgagcactgctggccaaggagctggaagggccagtcagctggaggcttctgggaatatttttgtccttgctaaaatgggagaaaagtattctgatttcttttcagagttattgaaagctggaaagagcatagctcccaaccctccaaaggaaaaaaccagacaagcaacaagtgcatgccttttccagagcccaacaaaatcctgaggttgcagagca

SEQ ID NO: 101295 - DNA, 1053 bp, Homo sapiens
agcaaatggaggcagcacattttcactccaatttccacttaaagctgcagctgctgtcgccgcctgggaacccctatctttttacatgttattgtggatcagttgcccgctgctgcaataaagaactctcagtgggttgcctggaatttctaactcagtgccacagaaaacctggtggataaggaaacaagaggctgcgcttcagtggtggtaagtgctagacttaagcaggcaaccctgggtcctagcctcttctggtcagtcctctcccagacatcagctccaggagggaatctgcttcctcagccatgagggcaatgaggaccctcaccatagctatctatatgggatcctccagcatcctttagcctcgatggcaaaacactcactggctgttttcagtaagttttagattcccaatattgttcttgcaatcgtggggtggaggacagaagggtggatggtcaggtattagatcgatcaaatcaaattgcagtactcagaccctgggggtacacaatgactttctaagggttcacaggcaacaggccattttgagagaatcacttttcagattctcaactgacatgggtactctgtgggctcttcatttccacatcctcttttggtaacactcttctcccactttataaaacaaagattgatcagtcaatgttctggcaggagacagatagcgtacttacattggctaattggaggaaagtttcataaaggtattatttaaaacttgtgatccggatgaagggaaatagcaaacaatagtgccaggccctggctagtaacagtggggccctggggagggtgaggggaaagagccttctggaatctgcagacaaaaggagactctaggcgggggctgtcagacaggagctgtgaccttctgcagtggaggcaggcagcctgggctcccccacagtagggataaagaacccctacctcactcatctctcagtctaccatctctgcctgttctcgctatcccatggcaaaacccaactgttacaggaaaggggtcccggtccagaccccaag

SEQ ID NO: 101296 - DNA, 1043 bp, Homo sapiens
aaaaatgatacacgctgcttccactcacatgtcttagacaacaccagtcacatgactgcaccaaacggcaaggtggcagggaagtgcaattctaccaaaaggcaggaaggaagcccttacatatttagcaaatagcactgatggccaccataccccatcacatgcagccatgccaagcttggctgagtcatgaatttgattcccatgcggtcaagctcgggggtggaacaagacctctcgcctggtgatgaaggctggcctcccactcagtatttgcaacccagaaaggtttggacatgtctctcatccatgttgtgttcaaatagataagaaattgattaaaaattcagattcttggtgaacgatgatctctgagcagaaatccaaatttccgtattagaaatggagaaatctaaaaaaaaaaaaaaaaaaaaaaaaaaaaaaaaaaaaaaaaaattcaatggtcttagccagaaaaacaaaactgtaaaatgtgaatgtaaccaagattaatgaaatggatgagaccgcattatatgctgaatggaagcttaaaaaaccatttatgagactgttttggtggggctgcagcctgtgaaatcgctgcattttatgtgagatgtaatgtagaccacagaactgttcacagagagttcccagtggtccctggagctggagtccaaccgcacatggaaagagtgtctgcacggttggaaggcctggatgctaaagtcaaacatagctggtgaatgctcttctgctcctgtggtctctgaatatatatgagacagggagagagagacagagagagagagagagagagagagtgtgtgtgtgtgtgtgtgtgtgtgtgtgtatatgcagttgtccctcagtatccatgggggattggttccaggacctcgcttggataccaaaatccatgagtgctcaaatctctgatacaaaatggtgtagattttgcatataacctacacacatcctcctgtatattttaaatcatctctagatgacttataatacctaatacaatgtaaatgcta

SEQ ID NO: 101297 - DNA, 1049 bp, Homo sapiens
tcccagctctccctgttctgtccctaccctgagctctgctgttccccagagacatgcctccatcagccagccagaagcccctgctgaaggtggactggtatggctcattcagccatcctgcctagaagttgctcagttataaaagggaaagaaggaaaaccaaaaaggaaggaatctccaatgctggagtttcatactcagggcaggctggtggggagatgggcagccttgctccatgctggtcactgtgagagaggcctggagtgttctgctgccccgaggtgcagagatggagatggggcagaggcactgggtccccagccatgcctctctctgtagtcatgagcttctcacctcctgctgcacagacctgtggttccactcagatcccagcacagaattgcacctgacattgggtctcctggttctcggcagctggatctggttctgtccctgtggggaggtggctgcacctgcaggtcctcccgggatcctgactgatgcacaatagacaaatcaccatgtgaggaaacgcttcagggaggagggcgtctccactccccaacaacccagcaagacaaatccaaagggatccaggagaacggagctagcaggagcctgctgctaaggagaacgagtcgagtgttctcatgtttctgaggttatctaacaagatgcacagactcacgtgggacagacatcatttcagggcaaagatgatacgctgagtgtgggttgggtatttgtggcttgaattttcaaaagcattttaggtgcatagaaaactattctgcaacaaaccatttcacaaaggatatcaaactttacaagcacagtggaagcttctagtgtaactctccaccatcatgtttgcctccctccctctgagaatcacacctgaactttaggtttactatgctcgtgtatttcactttcactgcattttcatgtatgaccacttttccagtttattttaacctctgtagagtactccacgccatgagctccagctggtggacatccgggctggctctgtgtttttcatgatc

SEQ ID NO: 101298 - DNA, 1042 bp, Homo sapiens
ggggacaagaggactgtgtattttagtgaccatggatgtctgaaaggaatggcagctcatctcattttgtaaatgtttggttcggtcactcccttaattcagggtgacctttaccccagactgaatttttctgatgttattgctcatagctggaagccggtgcccaaatctacttcagaaatcagaaggggctgaatcctagaaatttgtcctcacctctgttgtcatctgtcatagatctttcaccaactttctgcttcacttagagagtttctgaggttcttctcaaggagaaattgacaaatatgcaactgtgtccaggcactacaaggcccactaagagtctcagttagcacccgctttattgcaaatatcataaaaactcaactcaatattaaaaggaagatgttgactcatgtaactgaccatttctgagccacgtggatgcagtagattggactattgtacccaatccctttcctctcttccctgacatcctcattccaaggactttggtcttggccatgtgactttctttggccagtggggtattagtggacgtgacatgggagaaggctttagatatgcttgtgtgggatgcttaggatcttgcccttatggtataggcacaagaagggcaggctccaagcatcctatgaacccaggatggagatatgtggaggtggatctggtctgaactctgaagcagagatgcaccagttgacttgcagactcgtgagtgagaaaaagaagttttttgttttttttttaaatacgccaccaagattttggggctgtttgttacaaagctttgttgaactacacatccctcactaaaccaatcactgagaatggacaggataaagtaggtttctgacctaagcccataagactcatgctggaactgagggtagaatcaatgttctctggtgtgaactggggtttgatccaggaaaataaaaagggggatataaccttattaaaagtcatgtgaagggatgctggaacacaaaagcaacatttgcctataatgctgagctta

SEQ ID NO: 101299 - DNA, 1084 bp, Homo sapiens
agttttaaatatgattatttcagtaaaaaggcgagctgacttagggaaaatgtggttgatcgatgggttggtatgtggaagtggcagaaagcaccaaggtggaatgtgtctgctgaaagctgtggaaacacctggtttgagagcaggctcccagctcggctttatctgcaggggggaatgggagggacaattgtgcagcatagggttggagacctgccttagacggggatgtgggcagggtactgatgctccaggagcagtgacacccattgccctccctggcaggtgctgcctctctgctttggggatcgacccacagaatggcccagacctgccttcctaggggacttgtgtgggtgtttttctagggtcagcaccgagatgtaccagcagatcacttctcaccctcccacctgcgattgttaaactattgactggttggagtgctggtctcacctccaagggtcttaggacaggagaatgatggaggtgtgggaggatggtctggaatttctgttcgaggacagaagctccaagggcaggccagtgggttgtgcttaatcaaagatcctggtggcatgggctctgcctgattgacatttctctctgtatttgggagctggaaagcctggtggtgctactactattttgggctgaattttcccagtgtttccaaggcagaaagtctctgggttggcaccggggttattgagagtgatgctggttttcctcatggcctttttccctgcctcttctacctggtgcaggatcatcaaaatccccgaccagccggacacactgtgcttccagattcgtggagctgccccaccgtacgtctatgctgtggggagaggtgagtgggagccttgggagagaggggaaaggtgcagaagatggtggatctgtctgtgtggcaggagttcagagccttctgaactctaggcttctgccagacaatgtaccatcagcacttattttctttgcctgatgccaagacttgcaaacacaaatgcctgttggggtcaggcaggctacaagtgggtagccatcccagtggaagacagtgggtagtggtgaggactat

SEQ ID NO: 101300 - DNA, 1020 bp, Homo sapiens
cccactgtactttgcctgtctattcatttttatttctactcagcacattttatttttccctagcagttcctctctctacatctgtctccactgttagggaactgcatgaatataaaaagtgtctgatttatcttttggtttttagagacagggtctcgctctgttgcccaggctggagtacagtggtgtgatcataactcactgtagcctcaaactcctgggctcaagcgatcttcctgcctcctgagtagctgagactacaggtgtgtgccactgtgctaggcttctatagctaatttttatttttttttgtacagatgggggtcttgcaaatgctctcgccttggcttcccaaggtgctgggattacaggcgtgagccactgcacctggcctgatttgtctttatcacccccaagggttggctttgagttagacttggactcaagtcttggttccctcactttctagctgtgtgacattggggaagtttcttaacctctctgaacctcagtgaacgatcagttaaagggagataataaaatgtgcctctgaggactgtcggaggatacagtgagagaacacgtgacgtgtgcagcacagtgctggtgagactcgtgggaatcgtactggctgtgcatgatgagtgtatgaaggaggggcctctttctgccctactcagagaaaaatctcttagatgccacatttaaaaagcaaagaataaaatctgtgtgtattaatgtggagggtgtcctgggaggagcatggcctgtgccctctggcatcgtcagattagtaggggagacaaaacagattcactcattcattcacccactcagtgttaccgagtccctgctatgtgccagtcgggaataggacagatgaagtccctgccctcatagaggtaagcatccagtgggggaaatcagacaacagaagaggagacagatagaaagaagggaatttcagcaacttgatgaatgcgctaaggaaatacttagcgtgaagtcaggacaagagga

SEQ ID NO: 101301 - DNA, 1039 bp, Homo sapiens
ggaaaccaggacccagaagagcaaagtctcatgcatctcaactacctgcttagcatcttagaggcagcagtagtgtgtcgccattaagaacacagagggccgggcgcagtagctcacgcctgtaatcccagcactttgggagaccgaggagggtggatcatgaggtcagaagatcgaggccatcctggctaacacagtgaaacccccccatctctactaaaaatataaaaaaattagccaggtgtggtggcacacgcttgtaatcccagctactcgggaggctgaggcaggagaatcacttgaacccaggaggcggaggttgcagtgagctgaggtggcaccgctgcactccagcctgggggacagagcgagactctgtctcaaaaaaaaaaaaaagaaaagaaaaaaagaacacagaggctctgcttactatctgtgctaccttgagcaaattatgtcagctgtttgcgcctgtcttttcctacctgttatatggggataaaagtagtcctcatttcatggggttgtttttatagagtaaaacatgtaaaggtacacatgtaatgtggttagaataaggcctggtgcgtggtcaagtggaagaaatacaaatacatatatctttatttgggtgtctcacacatagcccacacttaaattgtgtctaaaggggctcttgttttttgtcttaacttctgccccttggatcttcctcattaccagtaaatggtaccaaaatttgtattaagtcaagattctccagatagacccaatagggtgtgtgtgtgtgtgtgtgtgtgtgtaaagagatttataataagcagttgactcgtgattatggaggctgacaagtcccaagatctgtcgtctgcaagctgaagacaagccaatagtgtcgttctgatcctaggattggcaggctcaggaagagctgatatctgcttgagtctggaggcaggagaagaaatttgcccaggagccgaagccagaatcttcttgattttgagctatcattatccccataccaactacatcagca

SEQ ID NO: 101302 - DNA, 1005 bp, Homo sapiens
cctgcaaaccttggcatgcatcacttaggaagacagacgttctcttgtgtaaccacagtgccttcaacaacaaaatcaggcaagtcaacatttatactaaatgatacaatgcacagtctatattcagatttcactatttctccccaagtgttccctatacccatctcctcgcccatccccacccccagtccaggatctagtcctggatcacgcattgtatttggcagtccagctctggtgattttgattgtcctcagtagagagtctccactgagatgtgctcatgcttgtcccagagccaagctctgtgaccagctctgtgacctcgggaagctgattcttggacctcagtttcttcagctataaaatggggaaatcgctgtccctacctcatagacttgttcccttgttccaacacattgtgttaagcacctactgtgtgcctggcccagatgctgggatacagcaggatgcagggcaggccgacatctgggccgttgggggtggagtagagtaggtgagtgctgggtgtggagccggctccctaggacgcccaccacgtatgactgtgtttgcagttactgcgctcattttagaaaatttgggaaataaagatgaataaaaagatctcacccttccaaatagctgtttcatctttgggtatatttcctctttgttccttgcatttggtctgagcctggtacacgacagcaggtactgcttgtgcatacttcctcgtgtcactgctaaatgctctccatcagcaagcctttcatggcttcgtaatgaaatgtgggggctggatcatggccactgtccagttcaaatcctgactgcctgcctgctgtgtggtcagtggcccagctgctccatctgtgtgtgcctcggtttcctcatctcctaaaatagtgccctcttcttagattgaggggggaattaggtgaattaggacctgcaaagctatcagaacaatgcgaggtacatagtaagcattccatatatatt

SEQ ID NO: 101303 - DNA, 1023 bp, Homo sapiens
acccactgtgtgccaggcactgtgctaggtgctggcatgtggctggaacaagacagacaaggtctctgccctcagggaatcttcagacaccgcaaaaagaaatcccttgagaaaaggaccagagttgtcataataaggacacccactgaggccttgctctgttccaggtactgtgccacatgcttcttgagcccttgcagcaactccctgaggtcaatatcatcattatacctattttgcagatggggaaactaaagccgggagaggctgagtaacttgctgaagtccacacagctggggagtggattcagacagaaggaaataaaatgaggtgatgtttgtgacagggatggtcgcatctactttagatgggatgggcaaggaaggcttttctagggagatgacatttgaccaagtcctgaaggaggagaaggagccctggtggaaagagtggagaaaagtgtgttccaggcagtgggagcagcagatgcaaaggccctgaggcaggactgtgccaggcttgtttgaggaacagtaagaggccagggtggctggaggggagagtaagggagatgagattggcatgttggtggggtccaggtcgcatgggcctcagatgcatggtgagcagtttgggttttatttctggtggtgtgaggagccaccagagtgctttcagttggatatggcatgggtcagttggtgacgtggaaaccaagactgtgcaatggtcttactaaggtctcagagaggaatgggtgtaccgtcccctcccacagcagatcccctgcctgctcccaggctgctctgtgacctacggctggttctgtcctctctttgggtttcagctttcctgtgggtactgggttaccaagtaaccagggcaggcttcctggaggaggccagtggacccaaccacacccaaagaggagtttgggcccccatctgtggccagaatgtggatgagctgtgaaggcagctgcctctgggctgggagggctgttgatgcgagatgaacctctg

SEQ ID NO: 101304 - DNA, 1680 bp, Homo sapiens
ttgatgtaaagcacttagaacagtgtctggcagtaaggtatataaatattggttattattgttgttgtaggaaaattaaataatacagataattagggttgtgggacttcagcatccagagagcaggggtgatcagagagggcttcctggaggaagtgaggtctgagttaagtcagcactgagaggaggatgggggctctgagtgagtttccttttgacaccctaaactccggccacaggaaccagtggttttgtttggttccaggccgagggctttgtggttccttgagaatcttcccatctttccccatctccttcaggaactgggttgcactccctccctcatctccagggagtcctctgagtttggtgttttgcgtgtgtttattaaataatcatgaaaaggcaaggacagccctttcacagagatgctggatcggtcttgggggaaacagtgcctggggttttgactcagaaccttggctcgaatcatttcgaggccctggctatgtggggtactccccgtgtgctctgggcagcgttagtcatgatgaaaacaatgacagtcattgctgtgcaggaactgactttgattcatcacttgccattctaagcactttgcatgtgtcaactcatttaattttctttatgaaggggatgctgtttttatccccattgagaggtgaggaaactgaggcaaagtgaatctaagtgagctgctctgggtcaggtggacagcattgccaggatttgatcctaggctgcctgaccccacaactcatgtccccagccacttgatagaccgcctttggctgatccaagaagggcttggcacatgatttattaaggtggcagaactgggatttgaacccaggtctgtgtgatgtttcacctccgcctgcgcttcctcctgttacttgccctctgtgactcccattcttttctccacagaatgggaagaactgtggacggatagaaatggcaggctgccgagttcttgctctgggctccgggtctgttcatggcacgagggttgagtgaggctctggagtcatgctgctggtgttcaaatccaggcttcttccacttggactgtaggtgaccttgggctgatcactgacttgctctgtgcctcagtttccacatctgtccaacgggcacagtgtagcacctgcgtcacagggatgtggtgaagcttgccccccactcccctagaggaggctgagtagaccttgggcccacctgccaaggggaggcacctcaggggcaggtgccagtaactcccatgatggggtgtgtcagctgggcagtggtcgaaagagaagagagggcctgggtgggtgggcagagaggccggtgggtgggagttggtcagcagctcctcgaaggtctccccgtggctgaggacagagagctatagagacacagagggtctgcccggaaccgaccaggatgggagtctctgaggaacagggattgtgggcagaaagctcccagaatgctttctgtggttctgctttttggagggaggagacaaaagtttttcttctcattggagctccgcttgccaaacaagaaactgtggttttttgttgtcactatttttttttctgttttaaaagattctgtactcctagtctcacactagggagaaatgccacgggtggttggggtgggggc

SEQ ID NO: 101305 - DNA, 1038 bp, Homo sapiens
atttttgtatttttatcagagaggggatttcaccatgttggccatgctggtcttggactcctggcctcaagtgatccgccgacctcggcctccaaagtgcagggattacaggcgtgagctactgggtcctgcctcctccgtttttaagattgggaaagtttagctccagaggggccgggtagcttgtctgggatcgcacagctgattaagtgggggtactgggctttgaaccgggactatcccagctggtgttctaaacccctattctatgctgcatttttcttttgctttttttctgtgagagggaggaaggggccacttccctactctcctaggaagtgagaaaagtggccagcgggtggagggggtgggacggggcagagccttggatggaagttaggagactctaaagtctttaatctccatgcctcctgctggggcctcatttactccccttctctgctctaggaagtcttttaatcctggttcaggaagggctggtgtgggggtggctctttcaaagaccctagagccaggctttgtagctcctagtctttgggagaaagagggagactctggggtcctctggggctcctcatggcttaggggtgcagctgaggctgtgtgagatcagagttccagctcagggaggagacagccttagactagagcccttctgcctgtgaaaggagatgtactgggggcagggggatgtgggagagggggttgtgcagaagcattgaaaaccatttggctaaaggacccttctaggaaggcctgtaagaataaggcaggattggctttctttcccatcccttcttctctcacagtttcgggggtggggggtgggggaagaatttgttctgttagaagctggcagtttttgaattaaacatgtagacaaccctggtgtctctgagcaatgtcaaattctagggaactcctgacttctccttctgagccactccatgctcctctgcttggaagagaaacaggaaatacaaaccaattttgatattaatgggaaagaaaatatac

SEQ ID NO: 101306 - DNA, 1082 bp, Homo sapiens
ttaggggctaatggaaagaaggaaatgagagtaaagagctggttacacataagtttcatttgagttattcagtttttcttttttttttttgagacaggatcttgctctgtggcccaggctggagtgcagtggtggggtgcgatctcaggtcactgcaacctctccatccctggctcaggtgatcctcccatttcagcctcccaagtagctaggactacaggggcgtaccacccacctggctaatttttctgtttttagtagagacggggtttttctgttgtctgggctggagttaatcagtttttctaattgatgatatctcttcatcagcagtaaactccctcttattaattctggagttgtgacctgttattaattctggattgtgattcatttctttgggtacagcaggcaatgggagaccaaggctaaggaagagagcaacttgcccatccacatccacacagctgggtggggaaacgtagctgcagcacatgatgtagcttcacatagatcataacatccattcttagatttgctcctctgtttaatatacgagatttaggatgtggatgggtcattggtgaccttagcttgagcttttttgatgctgtgatggaggtgaaagccagactggcatgggttgaggcgtgggaggtgaggaaacagatggtgagcatagtcagctctcccaaagtttggttgtgttgtaaagaggaagaaggagtggctcctgggagttgtttgtttatttaaaggtagaaaagattttaactttaaatattgttaagggatccagttaaggaagtatattcctaaatcttagttgtatatgaatgtgtgtaagacatacaaatgggcatttatcatatggacatctgtgtgtccatatgatacataaattgctttttcttccatatgatccttttattctaattttgatgtgttcagaaaaaccattctcatcatgaggattactgtgaaacttgaaaaatataaaaaacatctctaaattgatgtaacgtggcggggcatggtggctcacgcctgtaatctcagtactttgggaggtcgaggcgggc

SEQ ID NO: 101307 - DNA, 1035 bp, Homo sapiens
cgggctctgtcctgctctaagcccccattgctgctaggctggattattagcagtaacttcctgattggtttccctgcttctgtcctggccaccttcctctttatcctcacagcagccagagtgatctgtccgaagaaaagttgagtcaggccgccctctcccagcccctccatgggcttcctcccatcccttacaaagatgccgttatcatctgggcccctactgggcctagtggagaagacttttcaagagtgtctttctttctttatttcttttttattagatggactccaagtctttttaccatgttgctcaggctggtctgagctcctgagcttaaactgatctgcccacctcagcctcccaaagtgctgggattacaggcgtgagccactgggactggcctcaagatttttttttcttcaacaaaagagtagtttagaaagtgcagcaattcctaattcttgtgggaatacttaagggtaaatttagaaaaccaaagaaaatctgtgaacataggatttgcaactggagtttcttgggtttctgcagttactcttccaggtagcaactctttcctggtcacaggagagggctgctctcttcggtccctgtgccctgcactgctgctgctgccagtcctgtcaacgcttgctcattcccattccaaaaccaggttttacctttgctgtggtcatgccaggccagaaacagactttggagatttcagaaggcttgtaaactagccttcccagctggatgggttcacagagcagtaaaacaccagtgttttgaaccgtggttgtagctttcatggttagtgtcagtgctaggaaaaccacacatttaaactcttctgcatttatggtttacagagtaattccatatgcttgttcgagagtcgaggtatccaggagaacacagactctggagcctgattttctgggtttaagtcccatctccagtacttaataacttgtaacctctgtggatcttgattttcatctataaaatttataatggagtttggccttg

SEQ ID NO: 101308 - DNA, 1037 bp, Homo sapiens
agtatgatttcaaacggaaacacaccctgccttgtttcaacccactgtgaatcttgagtcttatggggtatggttatctctctttttagaatggaagttctggctgggtgcagtggctcacgcctgtaatcccagcactttgaggcaggaggatcacttgaggccaggtatttgagaacagcctgggcaacatattgagaccccatctctacaaagtaaagtaaaaataaaaagttagctgggccatgtggtgcacacctttagtcccagttactcagaaggcagaggcaggagaattgcttgggcccaggaggttgaggctgcagtgagccgtgatggtgacacctaactctagcctgagtgacaaagcaagaccctgtctctttaaaaaaaggaaaaacacacagaaaggaatggaagttctctgagatgtaatagattctctgagatgtaataggtacactaggatttctttgtttagtatacaaaatgagtcatcctttttatgacatgagaaagtggctcggtgctccctgggctactgaatggaaaaaatgtacttccccatggtggctgcccttgccaagcctgtttgactggcttttcccagtgtgggcaaggtaacctctgtcttagaaatggaaggccagcatcggggtaaagtttggtttgggcagaattgaaaccagctgcagatacatcagtgctatgccctgccattccttgagcttggcgcagcagtaggagtggcaaaggtgcttctgggattgatttgccataagcacagttagctcaggcttcctctccactgggagaagcctggagacttcccctgcggcttgcttctaccaggtgaaaaagattctgtcttccctttctccagcatttggtctgctacacgcttccccgcagccagggctcagtgtaaggggggttaaggtcagtcttgtctaagctactaagtagtccccaagtttttctggtcacatatcaattttatatatatatatatatatttttattttttatttttttag

SEQ ID NO: 101309 - DNA, 1124 bp, Homo sapiens
aggatacaggaactctcctttctcctggccttgtctcactgcacagatgaggggggaagtcatgcttaaaaccctttctgatttgaagagtaatgtgccccttaaggagtctggagaggggaggatactttctgtccttttcatactttagttaaagtgcgaaagtcgtaatccatgtccagcctgctttgtggcatcagtattgcagcctacttttcagcattcacatttgaggagttcctagaccaccccacttgcaatccagtgcacaaaacagacttgagtctgttagatgtaagaacaagcaatgtcaaaaccagagctcattttccaggtagacagccctgccctcctaggaagcctgcacctgcagcagcaatgtgaggggtgaggtaaagggcatctggacttgcccttcacaggccacacccctcacctggagatttgggggttggacttgagcagcagagtgtacgcaggcctctctcctgctccttcagttactccatccagtagtattgcatttctactctcagccactctctcaatccatttttctttctgcttgttgagtggtgacacttcactagctaaggaaggggaaaagccattgagaaacggtgtcggacctttgcagagcggccagtcttcctcccacagtggtggctgctctatagataacctcaggaacctgagtccccctggtgggggcagaagcatgtgaccagtagaagccaaaaaggggaaagaacagaacagcagttttaggagtcttcaccaagtcactggaggcagagaatgccttagagttcacatgtatatgtgccagatgagtgattcttttatctgatcaaccatcaatataacgtggatagcttggagaaaaacactgattcctgggctccacctggaagttctgcttcagtaggtctgggtcggagtccaggaacctgtgtttttagtgagctccctcaggtgattatgtttctcagccaggcttagaaatcatcctgctgctgacctttgaggttccttccagctctgtcctccatgctgacatcccggttgtgtgtgaggtggcacagaccaatttgtaacctctcagagagggcacgttccaagca

SEQ ID NO: 101310 - DNA, 1030 bp, Homo sapiens
ggatgtttgtcttgtttactttgtgtcctccagccgctactgcagagcctggtacataattggcacttgataaatatttattgaatgaaatatgctttgtagggctattattgaaaattgttctcattgtttcatgtccctttatagaaccacattataaatttttcttagagtttcattgctctgctgatcatcagatatgctttccttcattaaatgatgaaatctgtgtaattctttattttaattcccttttttcacatggctgccaagaagctcaggtttacattttttctctgtgactaaggttttctgtcataactggctcttctctaattcctttattaatggtactttaaaaaaatctgtacctttcatgtttagctgcttctaatctttttcaaaagtgaatgggggtgggtagggctgctgcattgcacagttctggaggcaccattgatctggagagaattgtatattgctgtggccctggcagtggggctgtggataacaaacactcgtaaggcttaagcatcactttggccaaggcttttccaggattatgtcagtcatgggctggtggcacaggaaaaggggaaaaagcaacagctgggaggttcacagataacttctttttggtgtcaggcagccctttagggtaagtacagtactaatttggctatgactttgtacttgtgttttaagaagcagcggaaaagcatggtctgacagaacctgagagagttctaggtgaactggagtgccaggaatgtgctattcccccaggagttgatgaaaactcacagaccaacgggatagccgatgacaggcagtccttgtcgtcagcagataatctggtatgttggtgatcatcctctgtggacttattgccatttttactttttcaaaagatgcagaattaagtctttcctcaaaagaagcaactaaaataagcaagccctgttcctttattagtcacacagtcctgggctgatattctttgtattagcaggttcagttcttagaacgt

SEQ ID NO: 101311 - DNA, 1062 bp, Homo sapiens
catcttcatggtgtgtgaaacagagtgagccaggtgtctcagcctcccacaagtgatgtaaagtcattgattcttgcagtacagttgcagaactcgctctccagaatcagttgacactttgctcctgctgtattctctactttgtgatggaaagagacaaataggagttggcagctcttgttctcaaagggcctgcgattccagaaggacccaactcatgccatctgccctcattctcctgacatttaggtgctattaattctttaaaattctactcattggtaaaggagcaaggccttctcaagaaacatactgtttgacattttttcttttagcactgttgtggtttttcattttctttgccagatcccatgagctgcgttccaaggtggtttccctgcagctgctcctctctgtgttgcaaaatgctggccccgtattcaggactcacgagatgttcatcaatgcaatcaagcaatatctctgtgtggccttgtccaaaaacggcgtctcttcagtgcctgatgtctttgagctctctcttgccatttttcttactcttctttcaaactttaaaatgcacttgaaaatgcagatagaggtacggattccaaagttttttcatttcattatttactattattattagtcattaattataatactcaatattgagaatgctgctaatattacactaagcattaggaaaatggttcatgaaaatgtttcatatcttaccatcctggaactcagaagtgggcaggggcagggagggtaaatggcatattcatcggctggcaccccagtaaatcagaactttttgaatgagtaagagaatatctttttataaaaagttactgcccccagcctgggcgccatggctcacgcctgtaatcccagcactttgggaagctgaggcgggcggatcatgaggtcaggagatcgagaccatcctggctaacatggtgaaaccccgtctctactaaaaatacaaaaaattagccaggcgtggtggcaggcgcctgtagtcccagctactcgggaggctgaggcaggagaatg

SEQ ID NO: 101312 - DNA, 1048 bp, Homo sapiens
ctgggcacggcagatcatgcctgtaaccccagcactttgggaggtcgagggtggtggatcacgaggtcaggtgttcaagaccagcctggccaacatagtgaaaccctgtctctactaaaaatacaaaaaattagccgggtgtggtggcaggcgcctgtaatcccaggtgctctggaggctgaggcaggagaacagcttgaacctgtgaggtggaggttgcactgagccgagatcgtgccactgcactccagccagggtgacagtgcgagactccatctcaaaaaaaaaaaagaattagctcatcaagtttcatgaggaaacaagtttttaagtaaagtatctgaatgatactaaggtttcatgcttataatccttatagtattgacttgttgctattacaggtttgggaaagggagccgtgcagccagacctagctcggctgtgtctgtgtcccacttgcttatttggcttcctttacttttgtttctccgcaggtcaggagaggctcacggatcaggaaataggggatgggaaaggccttgacatggcaagacggtgtagtgtgacgtccatggagtccacagtgtcctcggggacccagacaactgttcaggatgaccctgagcaatttgaggtcatcaagcaacaaaaagaaatcattgaacacggcatcgagctgtgagtggggctgccgttaactagcagggattctagcaaagccatattttctctgggaacctggaactgattcctaaaaaggaaatgcctgtttacaaaaggctggtgctggcacttgtagctaagcctgattgagccaggcaatcagtaaatgagcgtatgtgtgtgtgtctgtgcacacagagagagaaaactttaatacctttgtgtggttgatgcagccttttttccccccttttctaatgaaaataataaaaccaatttagaaaatacagaaaagtataaagtaagaatgtaaaaatcactcataaaattactgcctgagatggcccggcgcagtggctcacgcctgtaatcccagcactttagg

SEQ ID NO: 101313 - DNA, 1043 bp, Homo sapiens
tgtatgaccctgggcaagtgacttaccccctctgcctcatttttcccatctgtaaaatggtaataataatatttgtaatggactcacgagatggttgggaggatttaggagttaatcattgtgcatcttttgaaacagtgtatggcatgtagccagccctcagtgactgctagccacacctatcatgctcttactttacagatgtagctagtgaaaagcagcggcggctgctgtacaacttagagatggagcaaatggctaaaacagccaaagctctgatggaggctgtgagccatgccaaagccccgtttaccagtgccactcacctggaccatgtccggccaatgttcaaagtgagtatcctgagaacttagcaagcatgtggctaagcctgattctgaagctggccagcgagaagtactctttccacgctaaaactctggatgttattgaaatcttccttccatgatagctggtgtggacgccactattggcagcctacagcatcggactccagaactgtgatgacactgaagtggcctccttgtgtttggaaggcatccgatgtgcaatccgaatcgcctgcatctttggaatgcaggtaggtgtaagtcagcaacactccagagatactggtgggttgtgctcttttagatttggcaaaacttagaaattatcagaaattttcagttaatcaagactcttagcaagctacttacttatgcctactgacaagaaatccgtagctttgtgatgacagctcgttaggggcaaaaatggagatacggattaaaactgtctttaagaatgggtaggctgggcacagtggctcacgcctgtaatcccagcactttgggaggccaaggcaggcagatcacctgaagttgggagttcgagaccagcctaaccaacatggagaaaccccatctctactaaaaatataaaattagccgggtgtggtggtacatgcctataatcccagctactcgggaggctgaggcaggagaccggcttgaacccaggaggtggaggttgcggtgagc

SEQ ID NO: 101314 - DNA, 1055 bp, Homo sapiens
tgtgtgacagtcttagtattcaacagacatagtggaacatgggacaggtgagtttgactgaagtcaattagaaaggagagagctgcttctcaaacatgtggcagtgcatagatacctctgcaagatgttccaaaagcaagagggcattagcatggaataactgttgtgctaatgtgcagaaagccagtcaatgtgcatacaaaaagtatcagagaagcccagtgtgccagccctgcagatgtgagaatggccacactaaggttggagtcacagtgttctctcttgggtttctgttacagctggaacgagatgcctatgttcaggctcttgctcgcttctccctactcacagccagctccagcatcacagaaatgaagcagaaaaacatcgacaccattaagacgcttatcacagtggctcacaccgatggcaactaccttgggaattcctggcatgaggtacgtgtctctttgaattgccttttctcagttaggatgactcctggcttccttttattcattgttgatctcatttggtcagttctgtttttcttgaagtcaaatcactgtacctcatgtatctggaagtcaccctctctggggctgtgaaaggcgggggcgagttcaggcgcaccagctcacagtgagcacccttgcacccagcagccagtgtcccccatgaagtgtacttctgttgttgcaactttctttccatattagtgccatttttttttttttttttagtccttatgtacctcttgggagcttgggagctcctgtgatcaatgtgtaattttaagacaaagccaggagcctgattagaaatggttgatagtcacaatgagctgttagggagagtgccagtgaattcacatgtttttaaaacagtattctaagattctcacccaaggatatagttacttatgtgtacaacaatgtatttaaaaggatatttgttgcagttttagttgttctagggaaaagtttgggttaaaaagagctagatgtcccaacaatataagagattgctactttttttaaaaagtatggtacagc

SEQ ID NO: 101315 - DNA, 1032 bp, Homo sapiens
aggtctgtgtgccattccttggtaagtttcatgtagccagtgtttcctctgacagaagttgggaccagtttctgtttctacagctgagcttcaggtaggagggcccgtgtgcagatctgcattctcaagcaccagaggcacccctcaggaccaggagatccagcctcatctcccactgcatgcctgatgtagagcatattctcattccttcagttaaaccaattaacgattgccaacaactttaagtgccagggacttaagtgttcagcagtgaacaagacagagttaatgccctcttggcacctaaggcaggaaacaaacaaatagatatatggtataatgccaaaaagtggtaagcactaagaaaaaaaaagtatgagcaggacatggtaatgggaaggtacgatctcacaagaaagatctctttgagagggacacacatgtctgagctgggaattgaaggagtgagccatggggagacaacattccaggcataaggaacagtgagtgccaaggccctgaggtgggacaagagatgacaagttaaaggagcaacagtgaggccaatgaggctggtgtcttgtcgtctcacgaggagggtggaaaaaggaggtgggggtgactaaatgatgtgcctattaagtgacatggtgggaggaatccgccgccccagtcaaatgctttttctctctttattgagagcttactaaatttgcataaacatctatatggcataactccattgaaccaacttttttttaatgactaacttaagattacagtgccctttttctagctgtaaggtaggaactcatttcttcatgccttctttctcttagatcttgaaatgcatcagccagctggagctcgctcagctgataggaaccggtgtgaagacgcgctacctgtctggatctgggcgtgaaagagaagggagcctgaagggccacacattggcaggagaagagttcatgggccttggcctcggtaagacaccaggccccacagctaacagtcacggatttgcaagct

SEQ ID NO: 101316 - DNA, 1013 bp, Homo sapiens
aatgttctaggagctctggattaatatcaattgattcaaatttgttttcctaaatataggcctttaatactataaaaatgtaaaagattatagagaaaggtagatggttggtagaaacaagaaagcttatactaaggatatattttaaatgcccaatgccaaaacaaaactttaattttatcatcagtgggtttttgtttcttttttgaacttgcagagtcattcccatttatgtcccctgtccctgcgtgttgacataacaggatgctttgttctaaatacttgactgtttttgaagtactgctgattttgtgcattgtgtttcaggtaatttggtgagtggcggagtggataaaagacagatggccagcttccaagaatcggttggtgagaccagctcgcagagtgtggttgtagctgtggacaggtaatgattttattcttcagtgaccctgaactacacagtggtttggtggcctctctgtagttactggacatgaatgattcctaatttctttaactgatacaagtgttgttagctacaaattgcttaagtgtcacatttatttgcattttgaccttttagaaaaggtataactttaacattgtgacaaattatgtcaaaaataagagtttttcgcttatgttgatgttttaaattaccttgtttccttagtagaaattatttttttaaaaatcacaagaagagtttaggattaaaagcctacccatgctcacgcctgtaatcccagcactttgggaggtcaaggcaggcagatcactagatcaggaaatcgagaccattttggctaacacagtgaaaccccgttctactaaaaaatacaaaaaattagtcaggcgtggtggtgggcacctgtagtcccagctactctggaggctgaggcaggagaatggcgtgaacccaggaggcagagcttgcagtgagcggagatggtgccactgcactctagcctaggcgacagagtgagactccatctgcaaaaaaaaaacgc

SEQ ID NO: 101317 - DNA, 1020 bp, Homo sapiens
tacataaccagagttgctaaagaaatttcagtaccacttcaagagtggttacagagcagaggggtcaaaatcccagaaatagggcagagagtagggctatacatgcagactgtagaaagactgccaggtcctagctgtatgaccttgagcagcttactgaagctcttgatgcctcagttaattcatctataacctaggaccattgtttctacctgccacttggaatccttgtgagaattgttaatccatgaaaagaactttaacagtgcctggcccatagcaagcactcagtcaatagtagctgctggtattattttaagtaatgtgtatgacagtaacattccagaaagacctaagataatgatacatcctggatattttgtcaatactatttgacctttaagctcttcttagtataacacctcccacccccaggactcttgtgatctgccccccttcaacttgttctaaaacccgcagaggtccataggtttgtactgggaaactgctcatatgccctttgggacagataatgtctttgtgtagtctgttcccactgtacccttgctgaatggagatttttgggagagaaaaatgtgtggggccttaatctgcatatagttccctttcagttccttccttttgcatgcttagtttacacctgagatgtgatttttcatcctaggtgctacaagaatacacaagtgatgacatgaatgtagctcctggtgacagagtctgggtccgaggctggttccccatcttattcgaactctcctgcatcattaatagatgcaagttagatgtacgaacaaggtaaccatgttcccgtgcggtggccccttacatcactgaaatgaacctcagtcacttgctcacctgaccccactctcttctctgttgttctcttctccaccattctctcttctgtgcctgactttgtttcctccaggggactcacagtcatgtttgagatcatgaagagctatggccacacctttgaaaagcactggtggcagg

SEQ ID NO: 101318 - DNA, 2823 bp, Homo sapiens
agagtgggtgctcaatagttattgcagtggctgggctcagaggctcaggctcacatctataatcccagcactttgggaagccaaggcagacagattgctgagcccaggagttcaagaccagcctgggcaacgtggtgaaaccccatctctactaaaaatcaaaaaaattagccaggcatggtggcgcaagcatgtagtgttagctgcttcagaggcagaggtgggaggatcagcttgagcccgaggaggtcaaggctacagtgaaccttgatcacaccactgcactccagcctgggccgcagagcaagaccctgtctcaaaaaaaaaaaagtaattaaaaaaaacatgttaaaataattttaaaaatagcacaagaatgaatagttctcccctgaatgtgagatgttaatcaattgtttgatatgcctccccctctctaattcttctagtgtttgcagtgaagctcttgcctatttcatcactgtgaattctgagagccatcgggaggcctggacaagtctcttgttgttacttctaactaaaaccctcaaaataaatgatgaaaaggtatgaacaagtaaactctgaccaattttcactaggacataaagtttgggttggctttttactcaagagtttgcagtaactattttctcagttctcccaaggatggttacgtgactagcaccattctagatgcattggagagaagttaatccgttatggacaatgggtgccacaggatattagggctttttgcctggaagaacagtagttgagaacggctgaagtgtagacctcatgtgttgctgttaggaatggtatggtgagtttcagtgcaggaagagagggttaagattgtgaagcaccagttttgacctaggaacctgctttacaaaataaaagagctgttgacttttggcagcaagactatccaaatttaattaaagttaaatataactgaaagaagctttaatttgcaaggtttcttcaacttctttttttttttttgagacagagtcttggtctgtcacacaggctggaatgcagtgacgtaatctagctcactgcaatttctgcctcccaggctcaagcgatcctcccacctcagcctcctgagtagctgggaccacagacacgcgccactatgcccagctaagtttttgtatttttggtagagacagggtttcaccgtgttgcctaggctggtctcgatctcctgagctcaagcgatccacctgcctcggcctccccaagtgctgggattataggcgtgaatcactgcgctcggccccaactttctaatagcaagaaaagcaccaatattgtaataagttccagggtgagattaacacttctgaaaaactggtgcccaaaaaaaaaaaaaattgtctaattttatctgtttctctcccacctcaagttcaaagcacatgcttcaatgtactacccctacttgtgtgaaattatgcagtttgacctgatccctgagctccgagcagttctgcggaagttcttcctacggataggtgttgtgtataagatatggataccagaagagccatcacaggtaccagcagcactgtcaccagtgtggtagccctggctgcccaggccagtgctgcagctctgcagaatgttcagcatgccatttctgactggcacatctcgtgaagtttcatagaaacaaggagttggcatcttggatctcagaatggcctggaaacggatggcctctacgctgttccatcacagtctccaactaaggcttatggtatttcattaaactgttgcatacccagttagcacagtaggtggggagtctgcttcatttctatcattccatttttctgattaaactgtcaaatctgtcattgcatatgccatcgttttctagcaaaatcccatgattggctataaacgttttgtaagaagtcactctccttgaaaatactgaacatagctgtataggtttgtgattattagagaatatgttaataaaacttcttgtaacggctaactgccacctaaaatatgctgggttttctgttgtttgagtgtgttagagaaatttgaatgtttttgtcagttacgagtcagccgtaattagattagtttaaggacaggtcaggattagagaagagttgtttttgtgttttgttaatgtctgagtgatttttaaagtattttacaaaaagatattgaaaatttggttgaaggcagagtttagtaattaagttagaattaagagttttgcgaggttaaaaaaatgtgcctcgtggatctccctgttttagtaacatggagagaaaaagtctacacgaaaaagtgaacaatttaatgaagatgattagccttccttgaaataagtatttgtggatgggtgttaaattaaaatttccagaatacactgtccatctcacacactctgaaatctaatatatgaagtagtaatgaaaatgaagtagtaatttaaccagagttcatttatccttgaataaacctttttattttcacctcagaaaagtgagtgtactggcagttagtgtcactgctttgcacagtccccattaaaggaccctccagagagggacagtaactgtgcatgagaagccgctcccataagcctcctcagccagatgtcatgggtggaactggagctgtgtcggggccagcacagctgaactgtgacaatggcaggaggtggcatgtgcccagcacttccattaatctgagcctaggagttgaattctttggcaaggttggattctgaggtccttattatgttaatgatggtgcaatactctcacctgcagtagaact

SEQ ID NO: 101319 - DNA, 1100 bp, Homo sapiens
gagaccgatattcttaagttgttttcttgttttaacagccttgagaaatgtttggttttggccagcagaattcttgtctacttttttctttcccaaaaagtgttttttaatttctctaccaaagaaaaaatgagcaggtttaggtttttacatgacttatatacattagataaaaggagctgtataatttagcaggaagggactatgggagaatactttactgtgagtggaaaatgttagcacatttgactggtttgccctggaatccactgcacctttacactgcaccatgaaacctacactccctggtatcatagcgcgtcatcacctcaacaagtcagtcgtctccattgatatttgtacaaaaggtatacatggggaacacgtgttcattcattaagtccatcttgcgtgcagctatatccctgattggttatttttcctttccttctgaggttctcatgtcattttcttcatcggatgtgactaaaatttttctggtgtcttctgccctctctttaattttgcctcttgaggggtagcagatgtgtcagtgcattttattacttgctgaaacattcaggcttacatttcttattagtttagtattttaaaagatttaattttctgaatgaggcatttgaattgtaccagcaatggacttttaaaaaattggatgtaaaaccattcagggtgatttttcttgtcagtggacagtgacgaacagagatttgaaatcccttacctccaataataagccattcagcctaaattcatttttatgaataaatctcttctttctcatggtaaatgtggcttgtgccactcaaacactagtgaaagggtatgtacaaccgcaacatcaggccaggacaccatttatttaaccaagtaatggaggagagtgaaacattttccaaggccttatttctttttcagaatgctttaagtgttgattatatgtgctgggtctctagagaagtttttatttgttacaatactgctgctttgagcaattttgtttctcttcattgtctgttagggaaatcaccagctttggcatcttaacaacaaacagtggatgggtaatttttatttct

SEQ ID NO: 101320 - DNA, 1047 bp, Homo sapiens
acctaattatttgtatttttagtagagacagggtttcaccgtgttagccaggatggtctccatctcctgacctcgtgatccacccgcctcagcctcccaaagtgctgggattacaggcatgagccaccgtgcccggtggaaaaattattattattatttatttatttatttatttatttatttatttttgagacagagtctcactcttgcccaggctggagtgcagtggcgccatcttggctcactgcaagctccacctcccgggttcaccccattgttgtgcctcagcctcccgagtagctgggactacaggcgcccgccaccacacccggctaattttttgtatttttagtagagacgggtgtttcaccaggttagtcaggatggtctcgatttcctgaccttgtgatccactcgtctcggcctcccatagtgctgggattacaggtgtgagccaccgcacccggcaattattttttttttaataatgtgtgaggcaagagttctgttgctttatgtattcaggacagagtataaaaataatctggtatttctgggaagttaggaacatagcatttctcagggatcgagactgactgactagactgactcaactagaccttttgagactccttgagtgcgcagaaacatatgcatgtgaatattgtgataagttgaaagaaatgaacacagaaaggaacagactcaaactcacttcctggatattgattacaatttaggaaagagacttggcaatttatatgggcttttcctcaaatcatggatgtagtgtgttgccctgtacaaaatgctggctactaagtggaggaaacaaattgttctgtactcatataaaaccatagtatgtcccctcctgaaaaacatttttcagtttaacaatcttcatccttcaagaaagacatgataagcacaaagcaaggagagtttgaaaatatcagtgaaactcttgggactcagtcagaaagagggaaggtgttaaatgatacatgaaattaatttttcaaaaaatattggaatattgggtgt

SEQ ID NO: 101321 - DNA, 1392 bp, Homo sapiens
taataatatattaggatgaattgactcatttgctcttcatcactagcctataaaagaaatattactactaatagtactaataatactcctttctgaaataagacctgggtatatgaagtcttgaagccacttaatctgcctgggaagcagcttctcttgcagatgagatgatcatccaattaggccactgtataggtttgtgagaatcatgtgagttaattgatggtaaagttatttgaaaactgaagcattatataagtttaatgtaacatatataatccacttaatagataagaaaagtgaggccctgtagacccacaaataacctaatcttttctctttttttgatttttttttatatatatatatttgatatatataaggtggaaagatttttatcttagtcttttaacatgaaaattcttttacagctgagaaatttcttgaatctgttgaaggaaatcagaattatccactgttgcttttgacattactggagaagtcccaggataatgttatcaaagtatgtgcttcagtaacattcaaaaactatattaaaaggaactggagaattgtaagtattttgtgaatacataatttaataccctgtatgtttataaggtttatataagcagtgttcttcaaagataaggcacgtgcttgtagtcccaactactctggaggctgaggcggaaggatcacttgagtccaggagttcaaggctgcagtgagctatgattgcaccactgtactctagccttttagtgacagaatgagaccttgtctcaaaaaaaaggattcagatatggatcaaagataaaattaaacaggacccttttccaaagcttctgttatttcatttgaatttatataaatttgtccagcttcatacctcgggttgctagggagtgagacttggtcttaatctccattatgtttggaatttatgctttactcaccgcctactgaagagacattgtgggaagacagtctgaataaatgaagtgatttctgatgttggaaaaataaagctgagaagaaatcagatacataaaacatttgcagaatgcaaaataatttagatttcaactttttgataaggtattttgccctatgtcttgtgggatatgtatatatatactaattttgagattaaacctattttataacaggtttaatgattagtaaattataaattaagaaacaggcattttttttccttagcttaggacagtgattctcaactgggggcagtttggctcaccaggggacatttggcagtatatttggagacatcatagctggaggattgctactggaatctagtgggtagaggccagagatgctgctaagcatcctacaatgcacaagatagctttccacaacaaagaa

SEQ ID NO: 101322 - DNA, 1053 bp, Homo sapiens
tcctgaccttgagtgagccatcgcacctggcctaaaatggaaattttttttttttttttttttttttttgagacagagtcactcttgttgcccaggctggagtgcagcggcaccatctcggctccctgcaacctccacctcctgggttcaagcaattctcctgcttcagcctcccgagtaactgggattataggtgcctgccaccatgtccggctaatttttgtatgtttagtagagacatggtttcaccatgttggccaggctggtctcaaactcctgacctcaggtgatccacctgccttggcctctcaaagtgctgggattataggcgtgagccactgcgcccagtctaaaatggaaattcttaattggcatcaaggagtaagggaagttcactaatttgtatgtaaaatatttgcatttgggaggcaatgtacgtttttctgggaaaaggattcacgctgtcatcagattattgaaggaatctgtgacccattcatgtagagggaaactgaagaaagaccaaaccttcctctatttgttttcttagaaaattagtaaataaaaaaacagttatgttttacctaaaatcatgtggacatgaatgtggattttgtgttacttcctcagttactgctttgcttttaggttgaagatgaaccaaacaaaatttgtgaagccgatcgagtggccattaaagccaacatagtgcacttgatgcttagcagcccagagcaaattcagaagcaggtaatgtcgctccactttttagatgggctcctctgtaaagctctgatctaattaatcttttcctctcctagttaagtgatgcaattagcattattggcagagaagattttccacagaaatggcctgacttgctgacagaaatggtgaatcgctttcagagtggagatttccatgttattaatggagtcctccgtacagcacattcattatttaaaaggtattgatgcatagattcatgtttttaaaatactttctaaagttttatttgcttgtgtaaacagttgtgtttttgtgactgttgtc

SEQ ID NO: 101323 - DNA, 1051 bp, Homo sapiens
cttgataaactgcttgatccctttaaaaagaaaactggctgggcatgatggctcacacctataatcctagcactttaggagggcaaagtgggcggatcacctgaggtcaggagtttgagaccagcctggccaacatggtaaaaccccgtctctactaaaaatacaaaaaaaactagccaggcatggtggtatgtgcctgtcatcccagctactcaggaggctgagacaggagaatcacttgagcctgggaggtggaggctgcagtgagccgagatcaaaccactgcactccagcctgggcgacagagcgagactccgtctcaaaaaaaaaaaaaaaaaaaaaaaaagaattccctttgaatttcggaatttcggaaacccatctattcatagatgtccaatcagcatctctccttgaagacctaaagtgagtaaataaaaaaaacttgtaaatttatctgttttaccttaattttctagataccgtcatgaatttaagtcaaacgagttatggactgaaattaagcttgttctggatgcctttgctttgcctttgactaatctttttaaggtatggaatgcatcttggtgatatttttaaattaatattttaaattgcttgaatgtttgtatacatgttaagagaatgctttgaaagcttatttgatagataatgtttagagcatttcttttgaaaaatttcaaacctacacagaaatagagatgctatagtgaactcccatctattattacacaaatttaatggttagcaacgttttattttctctgttccctttcttaggaatgttataaaagcaaatcccaagcatcatatcatttcacccaagtattttaaagtatgtgtctctaaaggaagaaatacatatttttatttgactatgtttggagtttaattaattatatatttatacattattttacagtttacaggatactttcctgaatgtgttcttggtgtttgtgaaaatcctataagatttaaagaaatatatatatactttttttcttttttcttttttaaagacagggtc

SEQ ID NO: 101324 - DNA, 1029 bp, Homo sapiens
gaccaaggaaagaggcataatctaccctcaggggacttgtaccctcattaagaaggcagtactatgccacaagaaatcagtaactaaaagacaattagtttatctgccttggtggtcatcttacaataaacgtagttcagaaaagaaaggggatgtattagtatgcactgagcttgagctttgtaaggaaagtcttcatatagtcttagctgaaccttgaaggaagatttagattaggatgagaactagaggtggcatcatttatagcatacaaacagaggcagaagtcagaatgctttatgcagctgccagatgtagctggagcagagaattcttgtcagaataggtaatgctcaggctgtgaagcctgtgtataaaatgttttgtccacgtggtaagggaacttataaaagtggtgttcttaatattttaatcaaaagtttcaagtcagtgtttattctgtaggatctccctgaattttttgaagataatatggaaacttggatgaataattttcatactctcttaacattggataataagcttttacaaactgatgtaagtatttaaaatgttgcctgagtggtctttttctttcattaagagttatttggctacagtctggaaacctatttactcttgcattgttaaaagataaaatttcaatactgtaataatatttgattctatttgatgttacatgtttggtgtgtgtagtatacagaattactcttatcatgggcttggcttaagccatagtgtacatataaggctgtttcattacattattgaaagtaggtctttaaagtagtgacattatggatatttcatgaaataaaattatttttcattgaagatactaagaaaacttaaaactctataatggtagcccctttttaaaaatcatctggctaggcatggtggttcacacctgtaatcccagcactttgggcggccaaggtggggaggatcccttgagcccaggagttcaagaccagccttggcaatgtaaggagacccccatcacta

SEQ ID NO: 101325 - DNA, 1074 bp, Homo sapiens
gaagaattccagcgatacctgcctcgttttgttacagccatctggaatttactagttacaacgggtcaagaggttaaatatgatttggtaagatgatggtggagacaaataattaaaagacattctctccctatctcctccaagaaataagctgttgagttttgcttttaaaaatattcttgtttttgtgttttgttccagttggtaagtaatgcaattcaatttctggcttcagtttgtgagagacctcattataagaatctatttgaggaccagaacacgctgacaagtatctgtgaaaaggttattgtgcctaacatggaatttagaggtaattatggcaaaagtatattagtataaatctactaagtctgtgtttgttttttgtaacatattcagtctaattcatttattactggataaaacttgtatgtcatttatttcttattttctaaaccaagacagaaaatgtagtatctgtaatgagttttgttgtgccctgtgagggttttctcatggaaatattaaataagacttcaaaaattcctttacactaagaagataaactatctggaatttctatttagagaaagaatttgattttgtttcatttattatttcaatgaatttttagctggctttatttatttatatatttatttgagacaggggtctcgctctgtcacccaggctggagtgcagtgatgcaatcttggctcactgcaaccttagcctcccaggctcaagtgatcctcctacctcagtcttctgagtagctgggaccacaggcacacatcaccatgcctggctaatttcttgtatttttggtagagacagggtttcaccatgttgttcagggtagtctcaaactcttgagctcaagcagtccacccgctttagcctcccaaagtgctgggattgcatttctgagccacctcgcccagaaatagctgtttttaaacaatcgacttgagaatagaaatgataactttataaatacaaggttgaagcccacttagtttgtgcttaaggttaaactatagtgctaagagcctatatttataaaatgtatgt

SEQ ID NO: 101326 - DNA, 1062 bp, Homo sapiens
atagctattgggtggccctttgtttttcgttcttttttttccgttttacaatcgtagccaaattattccaggcaatttgttttcttataaattggatcagcttgttggtggttgttttttttccccataatatattttcttttcatttcatagatattgatactagacgcagggctgcttgtgatctggtacgaggattatgcaagttttttgagggacctgtgacaggaatcttctctggttatgttaattccatgctgcaggaatacgcaaaaaatccatctgtcaactggaaacacaaagatgcagccatctacctagtgacatctttggcatcaaaagcccaaacacagaaggtaaatatttttaatgtggttttgtttctaaaacagacatcagtgacacccacacaagtcaaaaagaaataacgtctctgataatagagcttactctgccagataacctattctgattaagatttatataatctctgaagatggctttatgttgatgtattgagcacttaagtttcttatagaccagaaaattgatagatggccacacttgttaccttagctgagacccgctgtatcaaatatgcttaacttaaacttagctgttctttaattgaggaaagtttctttattgtctattagtatagtcttattttacatttttatatttttgagatggagtctcactttgtcaccaggctggagtgcaatggcgtgatctcagctcactgcaacctccacctcccgagttcgagcgactctcctgcctcagcgtcccaagtaactgggattacaagtgtgcactaccacacctggctaatttttgtatttttagtagagacaaggtttcaccatattggtcaggatggtctcaaattcctgacctcgtgtgatcctcacacctcagcctcccagagtgctgggatacaggtgtgagtcaccgtgcctagacagtatagtcttattttatattttatacataagcaggttgtgttttgttgttgttgttttgttttgttttgttttgagacggagtttcgctcttgtt

SEQ ID NO: 101327 - DNA, 1042 bp, Homo sapiens
tagtagagatggggtttctccatgttggtcaggctgttcttgaactcctgacctcaggtgatccacctgccttggcctcccaaagtgctgggattacaagcatgagccaccatgcctagcctaagcagttcatgttttgaagtgtccctctctctctttttttttttttttttttttttttttgagacgttgtcttgctctgtcatccaggctggaatgcaatggcaacatctcagattactgcaacctctgcctcccgggttcaagcaattctcatgcctcagcctcccgagtagctagaattacaggtgcatgcaactacacctggctaattttttgtgtttttagtagagacggggttttgccatgttggccaggctagtcttgaactcctgacttcaagtgatctacccgcctcggcctcccaaagtgctgggattacagccgtgagctcctgtacacagccagtacagtctcattttatacataagcaatttgtattttgaagtgttcatctccattttaacatggttttctaaaattgcctgaatttctaatgtgatagatatatacaggtattttgttattttactatgttatgaatttgcttttcagcatggaattacacaagcaaatgaacttgtaaacctaactgagttctttgtgaatcacatcctccctgatttaaaatcagctaatggtgagttgtgaaattcttgctttttttacagcttgccacactatacctgaattcaaaaaacagcttcctatccttgttcccttttgttctttttttttttttttttttcttttgagatggtgtcttactctgttacccaggctggagtgcagtggcacagtctctgctcactgcaactcctgcctcctgggttcaagcgattctcctgcctcagcttcccaagcagctgggactacaggcacgtaccaccatgcccggctaatttttgtatttttagtagagacggggtttccccatgttggccaggctggtctcaaactcctgacctcaggtgatccacct

SEQ ID NO: 101328 - DNA, 1027 bp, Homo sapiens
atgagctcccatgtgaccatcatttagcttcaagaattattaacatttggtgatctattcctttcattaatttatttccctacccactagaataatgtaaagcaaattccagctagagagacatgtttctaattcagaatagcttcacttctgggaatgtaggtagacatgctcaccgatgcatggtccagctcatttttactcaattatgtaatatgtgttccttagtcatgaaacaggcatggggaaaaataaaatcatttataatcctaccaaaattaatgactaaatagtaaatcataatataattaactgtgctttaattacttgacattttatctttttttataactctgatgatgtcactaatttggaagtaatgatccttaccacttaagtaactgtggctttctgtttttttatatagtgaatgaatttcctgtccttaaagctgacggtatcaaatatattatgatttttagaaatcaagtaagtagctttttatttgttacacgccacttaatctctttaagagttttattatgtaccaccttctcatctactgtgcagtcattttatatccacatctaacaaaattaacaatgatttctttataacttagaattttagaccatgcttaattttcctcagatgtctttttgcaataatagtaatagaattgggatctagataatgtccacacattgcttacagttgattgtgtcttaagtctcttaatttacaatagagaggtccttctctgccactttttgtttgagatggagtctcattctgtcacccaagctggagtgcagtggcaccatcttggctcactgcaacctctacctcctgggttcacgtgattctcctgtctcagcctcccaaatagctaggattacaggcacctgccaccacacctagctaattttttgtattttcagtagatccggggtttccccatgttgaccaggctggtctcaaactcctgacctcaggtgatctgttcacctcggcctcccaaagtgct

SEQ ID NO: 101329 - DNA, 1038 bp, Homo sapiens
aggctgcttactaaaataggtgcattatgacaatacaatttaataaactggagccaaggaaagtaactgagataaagttaataaacagaaatgtgtgtcaaaggatcctatatagtagtccaagaaactccaaattttatttggagtctcttagcagccagggcaaagagggaaacttgggaagttaaaattttcacagggtctatgagataaaagttaaagcagagaatactgtacaatagtagtagtagtgttctcagcaacaatcatgtaacagttattttcatgtggctatttgcgtaaggtcacttatttctgagatatgacctaaccgaatgaaagtaattcactggggaccaagaaaataggtcttctggcctgaaccaggatgaaatgtagaggaatggatggtctgcatgtctttcaggccactattcaacagtattatttcttgaaatgagctttgggtaagagatggaaaacagttctaggttctttccttcatcaagaacttgaagtacagatactctcagtggccaattaagggtagaaaggacatcctttgaggtgagtcaagccagtacctatcttcaggcccagaatttatgcagaaaacagttctgaatcttggctccacctccaaaaacaaaataaatgacagagtcccctgagattctgagttctttctcagtggtaatagatataaaccagggacaactgtttcaacttcagatgttgttgggtttagctggctttttggttcagttgtgtttggttctcgatgtgccttcttaggagcctaacatgagcacatgtaaaaaaattattttcctaaactgtctatcaattgtcagtggtgggagatggctcagttttatgctgagaagggtgacatagtggttgccaagggtaatctgcagtgacaagctcaagagttggtagtgactgaaagctgttttttcatctatagctttacagctgcagaaatcgcaccgtttgttgagattctgctaacaaaccttttcaaagctctcacac

SEQ ID NO: 101330 - DNA, 1044 bp, Homo sapiens
tatattatgaaaggtaggctgtttccctggtgtgcagactacaggtatccaatctcagattgtaagggtgagcactctgagttatacttcaggttatacagtctatgaaccagataatgtttaccaagtagtaagttagtttagatatttcaaaatgaaaaacattatcttgtttactactaacaataatttttttttttttttttttttttttttgagatggagccttgctctgttgcccaggctgaagtgcagtggcttgatctcagctcactgccacctctccctcctgggttcaagcgattctcctgcctcagcctcccgagtaactgggattacaggtgcactccaccatgcccggttaatttttgtatttttagtagagacagggttttgccatattggccaggctggtctcaaactcctgacctcaaatatctgcccgcctcagcctcccaaagtgctgggattagaggccactgcacctggccaacagtaatcttaatttgatatggaacttctcattacagaaaatgtagcaaagcccttttttccttccctagattgagtttctttaaggcaaagaagagatcatgcaacgtttattaactgcatgctcacctaggtaggggtgaaatgtgggtgcctgtggtagactctgcacaaatcgtgtcttcttacgtactgccaaggacacaggcagctgtatccatccacaggctggtgtatccatccaccaggcactacattagttgagtgtcctggtgccagctctgaatttagagatagtctcagtgtttttcactgttgcatcccaaaagcctagcacattgggttgtaggaagcacttttcagagaaactccctgatcttttcagtctggatcagaaatcctagagtggatgtgtgtatctgggtgtatgtttccaacactatccttcccccaacaatgatgtataattgtgtaattattgttgtttaatgtcctttttttttttttttttttttttgagatggagtttcactcttgttgcccaggctggag

SEQ ID NO: 101331 - DNA, 1065 bp, Homo sapiens
caggtgagtctgagagagaactgtttggggtctctttctcttagaaatcagtagcagaggccatgcttggtggctcacacctgtaaccccagcactttgggaggccgaggctggcggatcacttgaggctagagtctgagaccaacctggctaacatggcaaaacccatctccattaaaaatagcaaaattagccaggtatgtggtgcacgtctgtagtcccagctactcgggaggctgaggcttgagaatcgcttgaacctgggaagtggaggttgcagtgagccaagatcatgccactgcactccagcctgggagacagagcgagactccctctctctctcaaaaaaaaaaaaaaaaaagaaaaagaaaaagaaaccagcatcagaaaatgtttagccctagcctaaaggaaacatgatcacaaactacaggaaactgaagagaaaactgcctatccacctccctcaaaaaaagagattaggagcctaaaaaaattctaaaaatacatgtaaagccacagagtccaaattgcaaaaatattgctcaaaagaccataaatgggttaaaaataggaagcatgggagaaaaataaatttgtcagctaaaaatgtataaaagctctctttccacaaataacatttctaaaataaatgtttactaagcagagccccaaatacatgccaagcataaaggacagaaagctatctgctcttgcctcctgaactctgcacatcatgtttcctcctctactggagtcaaagactcatccacccttcaacagattgctacctatccctcacacctaacgttcggttaggtcatatctcagcttagagatcacttcctagagaaaatccttccctgacctgggttaaaagggctagaggataaattggtgctcctccactaggctggcgcagaattatttcattcactcatacaaccgtacagagaaggtattacatactgtgtattcttacataccctaaaaacacagtaatgaagattacagactagttagccgctctcatagaaatggacattaaggctgggcgcagtggct

SEQ ID NO: 101332 - DNA, 1401 bp, Homo sapiens
tgaaataattctgcgccagcctagtggaggagcaccaatttatcctctagcccttttaacccaggtcagggaaggattttctctaggaagtgatctctaagctgagatatgacctaaccgaacgttaggtgtgagggataggtagcaatctgttgaagggtggatgagtctttgactccagtagaggaggaaacatgatgtgcagagttcaggaggcaagagcagatagctttctgtcctttatgcttggcatgtatttggggctctgcttagtaaacatttattttagaaatgttatttgtggaaagagagcttttatacatttttagctgacaaatttatttttctcccatgcttcctatttttaacccatttatggtcttttgagcaatatttttgcaatttggactctgtggctttacatgtatttttagaatttttttaggctcctaatctctttttttgagggaggtggataggcagttttctcttcagtttcctgtagtttgtgatcatgtttcctttaggctagggctaaacattttctgatgctggtttctttttctttttcttttttttttttttttttgagagagagagggagtctcgctctgtctcccaggctggagtgcagtggcatgatcttggctcactgcaacctccacttcccaggttcaagcgattctcaagcctcagcctcccgagtagctgggactacagacgtgcaccacatacctggctaattttgctatttttaatggagatgggttttgccatgttagccaggttggtctcagactctagcctcaagtgatccgccagcctcggcctcccaaagtgctggggttacaggtgtgagccaccaagcatggcctctgctactgatttctaagagaaagagaccccaaacagttctctctcagactcacctgctccattcatgtcagctcactgtttcttcctcttagtcaacctctttaattattttttaaaccttgagccttctagaaatactcagtatttcccagctaaattttgttgccaacccgtcctaattttaaaaggaagggaaatttagattatttttaaatgtagagagctatctcggggttgtctaagcatcttaaaatttagttgatgaattagtgcgcttttttccccccagtcgctctcttattctgaagtttaactaaactctatttgtttttgctgtttttgtattttacagctatcatgagaagtttttctctcctacaagaagccataatcccctacatccctactctcatcactcagcttacacagaagctattagctgttagtaaggtaatagagccaattttgaaagtggggttccttttttatttgctccaaactgtttgggcctcagaactctttggc

SEQ ID NO: 101333 - DNA, 1054 bp, Homo sapiens
caaaagtaacatgtttattgtagaaaaagaaagtgcagatgatccaaaattaccttaaatggagttaagtaggctttgcactaaatggatataaaagaggctgtctggacttctatgaaatgatgattaaaatcctttgtgttgtcttttcttccttactcttatttctcaaaaggaaagttcactctgatcaaaattttacagatacttagattcatgtttattaacactaaattttagaaaataaatccgtttaaggctgacagaattcctttttagatgctattcttgatcttatgagaattagatcaattcataggaagtgttggagggattttggagaacagagtgattattattcaactgagttagggctaagggtctttggactacttagggccttgagggatggagcggggagggaacccaagtctccgcctcccatatgtattaccatctcatgttctgattgagttagatttgtatgctagtagccttccaagaacttgtttaaagaaaaatggggttttgttgcttaaaaagaacataaaaaactactcatttgggggattatcagtaagtagacatagacattgaggcccacagaagttaaggctagtggcattactaggacttagtatttcttctctgcgagggcacgtgggcttaagacaagttacagctctgggatctgaggtttgtataagcaactctgtaactctgaagtatttttttcatggtggactttgggccatttaaaaaaaaattcaaatgaacaagcactagggtataattggtgtttttttcttaattttgatttttaaaaaataagatggcctctattttaaatgtgttttataaaggttaggtgtggattattagcataattaggttttttttttttaatttcagaacccaagcaaacctcactttaatcactacatgtttgaagcaatatgtttatccataagaataacttgcaaagctaaccctgctgctgttgtaaattttgaggaggctttgtttttggtgtttactgaaatcttacaaaatg

SEQ ID NO: 101334 - DNA, 2049 bp, Homo sapiens
aacctgggaagcagaggttgcagtgagccaagatcgccccattgcactctagcctgggcaacaagagtgaaactccgtctcaaagaaaaaaaaaattactttaatggctacgcgggaggaattgttccccatatgtttcagaaataattaaagagaaaaggatagattattacagtatgaactctgttttaagacatatatcatgtttaacttttcgaataattattcctgttaaccattttctgttggatctcatttcttaacagcctgggttactaggtgtctttcagaagctgattgcatccaaagcaaatgaccaccaaggtttttatcttctaaacagtataatagagcacatgcctccgtgagtatgactagaactttgtgcatttatttagaaattttgttaggtgctcagaaaagtcctaaatttatattgttgattttttttaattctttagtgaatcagttgaccaatataggaaacaaatcttcattctgctattccagagacttcagaattccaaaacaaccaagtttatcaagagtaagtaaaatcatctggatgttctacagaagtaatgaaagaaggtagctaaaacccttagactttatggttgcagatacattttttatccgttttaaactttatgcaaaaaatacttggccacgtgtggaggttcatgcctgtaatcgcagcactttgggtggccaagggaggccgatcgcttgagctcaggagttcaagaccagcctgggcaacatggcgaaaccctgtccctacgaaaagtacaacaaaattagccaggcatggtggcatgtgcctgtagtcgcagctgcttgggaggctgaagtaggagcatcacctaagtcccagaggttgaggctgcagtgagccaagattacacccactgcactccatcctaggtgacagagtgagaccctgtctcaaaaaaaaaaaagaaaatattgtaagggcctggtgcagtggctctcatctgtaatcccagcactttgggaggtgaaagtgggagtattccttgagtccaggagttaacgaccagcctgggcaacatggtaagaccctgtctctacaaaacagccaagcatggtggtgtgtgcctgtagccccagctactcaggaggctgaggtgggaggatcacttgaccctgggaagttaaggctgcgtgagctgtgatcacgctcctgcacccagcctaggtgatagagtgaaaccttctcacaagaaaaaagaaaatattttaagatgtttgtgttctccaaacattaagttagtgttagtcatattgtgttccagaggttggtttatggttggataccaaaacattttttcagtagagagaatattataaggaaatataaatcaaagagagacagcatgtaaaggtctatgacagaaagacaagttttctatttactagaaggcaggtattgatgccacagcctttggatgttaatgattaagcataggtttattttgcagacttatcagttaccagtttagtgcgtgagttctctatgctgatattctgcatcttctttcaacaggttttttagtctttattaatttgtattgcataaaatatggggcactagcactacaagaaatatttgatggtatacaaccaaagtaagtttgtttttattattttttaaaggaagaaaatgttttgactttttttttagtacaaatcagtatctctgtcttatagatgatgatgtggttcttggtatggagatagtgtctatggttttcaaaatattcttaggtattgggagtaaagaaaaagtaatcctggcccagcatggtggctcacgcccgtaatcccacactctgagaggctgaggagggcggatttagctcaggagtttgagaccagcctgggcaatatagtgagactccatctcaaaaaaagaaaaaacaccctggaatcattgttctaatcctctagattagaggaccatctactctacacactggcattctccacagccagtgttctatattatgttaaatggtcagtgtt

SEQ ID NO: 101335 - DNA, 1849 bp, Homo sapiens
gcactttgggaggctgaggcaggtggatcacctgaggtcaggagttcgagatcagcctggccaacacaatgaaaccccatctctactaaaaatacaaaaatttgccgggcgtggtggtgggcacctgtaatcccacctactcagggggctgaggcaggcaaattgcttgaacccaggaggtggaggttgtagtgagctgagatcacaccgttccactccagcctgggcaacaagagcgaaactccgtctcaaaaaaaaaaagaaaagaaaaagattatggcatttggctacagggtagaggtgtgatggggtttttttatgttttgactttcagtctcttcagatgatcaaaaacagcagtcttgttatttagtaatttatcatattcataagaagtaactaacatctaagcattttactatttcattatagtgataatctaatattaagttgatttattttgctttaatagaatgtttggaatggttttggaaaaaattattattcctgaaattcagaaggtatctggaaatgtagagaaaaagatctgtgcggttggcataaccaaattactaacagaatgtcccccaatgatggacactgagtataccaaactgtggtaagtacttcattttaatatttttgtaagttacagcttccttcccatatgactgcaaaattaacaaagcttattctcttgggggccaagagaatcttggtctgatctcagcttctccacaatcagatccaagacatgatttctggatccttctgggcttagaatgatcttgtttcctgcttctttttcagggggattcatggacccctttaagagtctgatctaggtgatctctaagacaattttatgacagaagcccaactaaactgacttatctttaaggggaagaactgaataagccaagaaaagaaccatcttaatttcaaaggtccccttttattcttgagactatgagtctgtaattttgtgtctctgagcaattgctggttttaagtcttccgagtattttcttgacctttttatctcttgctttcttccaatccaggactccattattacagtctttgattggtctttttgagttacccgaagatgataccattcctgatgaggaacattttattgacatagaagatacaccaggatatcagactgccttctcacagttggcatttgctgggaaaaaagagcatgatcctgtaggtcaaatggtgaataaccccaaaattcacctggcacagtcacttcacaagttgtctaccgcctgtccaggaagggtaagtgtgttgtcaaagaactctgtgataaatggagactttaatgggagggcaaaaggatagtagtagttctggtgtctgttttcattggtgggcgtaataaaactaaatctcattgagttacagcaagcttattttctttaattaaaaacactgagccctttttttcttgtattatgtactacaaatatattttaagtgaatggatttaggagtgagaacaaaggaggaaaaatcccttcaatagaaatgtaataaggctgtatagttgcattttgtcagcactttataataagagtttatttcccagatcgaagtaatccatctattattaaaatgtggtagcatttttttatttttatttttatttatttatttttttagacagggtctcactcttatccaggctggaatgcagtagtacgattatggctcactgcagcctcaacctcccaggttcaagtgatcctactgcctgtcagccttccaagtagctaggacccactatgcccagctaattttttatttttttgtggagacagggtctccctat

SEQ ID NO: 101336 - DNA, 1068 bp, Homo sapiens
tgactggctgctcttcccagagctgtggcagctctcccgtagaagatggggtttgtattggcgcaccaagatctccaacagccagtgtgtgtttcccatctcttgtaggttccatcaatggtgagcaccagcctgaatgcagaagcgctccagtatctccaagggtaccttcaggcagccagtgtgacactgctttaaactgcatttttctaatgggctaaacccagatggtttcctaggaaatcacaggcttctgagcacagctgcattaaaacaaaggaagttctccttttgaacttgtcacgaattccatcttgtaaaggatattaaatgttgctttaacctgaaccttgagcaaattagttggtttgtgtgatcatacagttatgtgggtggcttctagtttgcaacttcaagggacaagtattaatagttcagtgtatggcgttggtttgtgttgagcgtttgcacggtttggataatcttaaattttgacggacactgtggagactttctgttactaaatccttttgttttgaagctgttgctatttgtatttctcttgtcctttatattttttgtctgtttatttacgcttttattggaaatgtgaataagtaaagaattacttgtgttacttgccaagcagtgcacatttcatagtttcaaatctgtaatcagcaataaaaatcctaaaatatgtacctaagaacatcttaagggcaggttttcagtgctctctcatgcttttataaaaatgaagaatttctttaaatttcttccttttcctttcctggactctgtaaaatcctaatttctaaatcatgtaaactcagattatttagtctttttttttatatgggggaaggggacattaatatagatttggggcttatttactagaattttctgtagcagttcctaggtggcagtgtgagttttgggtaggtggctcctctgggagaaatgctctgcctcgcttaatgggatggcggtcgagagtacttgagactgtggatgttttgatctctttcatctctgctgttccctggagagtggaggttactt

SEQ ID NO: 101337 - DNA, 1064 bp, Homo sapiens
cactctggaaaatcactctgcaggtttatatggactacatggagatcatatcctgtagtgtagtgaaagctaagtcctcaagagccatatgtatagatacacaatgttttttaataatctttaaaacagagatcaaagttcatttaagtcctgtttgcattaacaaaaataaaaatgaaataaaaatggaaccaaatgatcatctaaagtttaaaattcctaaattgtccaatttatacaactgtgggagacttattcaaggtttttgaaagtccaggactgtttcagctgaaccagagggcacacaatttgcatcactgaaactgtcctgggttagtcaatgaaataaaaatgtctaaccacatacacatggatatgatctttgtcggttagattattgataaagtcagtctcagacaagtttccaaactgtgctatttaactagatacaattgagaaattctcaaatgaaaattttatatagtgtcatatcaatcaaaagaaaataatgaaactaagaatacagatcactgttggaagagaaagcagtggtgatggtgtgggtactgcaggaggtggtggggccgtggcacactagaaaagttgggtcacgctgagtaggaagcatttgattttctctggtgcttttagctctggggccggtcaaaggcctctctctggcatggctgtccagggtttgtcccaatgtgtctgagtgagccagcttgagaaggggtcgtgccgtttcttctttcacacaggggaaaaaaaagaccaaacacggaggtgcccagggtgtggatctgctggtgtcccgggagaaccagctggctgggcagcccttcttccccacaggcagctgctattgcgtagggaccgccaggtcaccgagtggccatcacaacaaaccccagcacagtccagcccggccacagccgcctccttgtgtttctgttgtcttccctgctgctgcccacatcctttacccaccgtgtctctcggcccactggaggtatcagaaattccaaattttcaaagcagtttcagtattttcagtatatatg

SEQ ID NO: 101338 - DNA, 1071 bp, Homo sapiens
cacaagcaagatcaccagctcttttttccaactcagccccactgtggccatactaacacctgccctgtcagcccagaaccttccaggaacctaggtgtctgctcagaagcccaagactgggagaagccatatcctttcctaccagacagaaagtgtcagcacgatgagtctgttctttgaaatccaaatttacaaccactgctagtggttagaagcttttagggttggcttgcatgttgaaatcttactaccaaaggataaagatatttctcttaccacatatgcttacaatacttctatacctcctacccttccatcactgctccccagcccatccctggacagaacttgatttaagaaaaaagtacaaagttcaaagttcattttctgagagaagccaaaagatgactgtcctgaggcacagccatcacagctcaggccagacagttacctggaatccctggactctggaaagatagtccagttgctcagagggtctcgtgagaggtccatggggtacgtggcctgaagagatgttattctttaaaatggtctcggctgtgggcgaggtgcccccatacaacaactctcgggctatcatggcagttaccgtggccttggcaggattcggagctgccctggtaaaatctttggtgtgatgtccttgactaactcctacagcctgggcgacctcgggcaccatgggaagaattccagcaggcagctgctgatgacttagataaggcatcctgaactcatcctctttattacctgggagggacatacacggtaaacacgaatccacatccacagcctggaaaaacgcaatgacaccatcaaaccccacgctggccctccccttggcacgcatggcagcgcagggaatcagggaatgataaagacactttgcatgcgggacctcactggctgggctcctgctgttattcaggacccatgcaaatcccagaatcacgttcagaggaagacgatattaagatcacacttactagtcccattttcatccccagagccaggttcaaaaaaggttacttttcttccatcccctggttt

SEQ ID NO: 101339 - DNA, 1199 bp, Homo sapiens
acagcttttaatattcagtggccagacacggtggctcatgtctgtaatcccagcacttcaggaggccaaggtgggcggatcacctgaagtcaggagttcgagaatagcctggccaagatggtgaaaccccatctgtgctaaagatacaaaaaaaaaaaaaaaaaaattagccgggtgtggtggtgggtgcctgtaatcccacctacttgggaggctgaggcaggagaatcgcttgaacccaggaggcagacgttgcagtgatccaaggtcatgccattggactccagcctgggcgacacgagcaaaactccatctcaaaaaaaaaaaagttgagtgtaggtggaatatacctgataaacataaggaaatgcacaacagataaaatcttggatagtcctataccttgcctatttagcagtttcagccatgggttccttttcagatagttctaatctcagaagcaggactttataaattctttgacaaaataagcaataatgtgaagaaaaacagctctttttgttttgggggactttgctagataagctttgagcttatctagttcctcttattatcactacagcacagtataaaatccatgttatcagcacgcagaagtaagatccttgctcctctttaatctcatccctgattggacgactcttaagtgaaccttgttccaaagatggaatctctgcctttgttgaggagactttattagtttgcgccttgtatttttttgccaacagccgttgagtatgagatacatggcagttttgtaatgtgtttcatcgcatccttatttatttctttatttttaattatagagatagagagtctttgttgcccatgctggagttcagtggctgtttacaggcatgatcacagctcactgtagccttgaactattgggctcaactgatcctcaactgtcaccttgctgagtactggggcaatagtcgtgtactgccatgcgcatggctgcattctcttaaagtggtttcccgccgggcgtggtggctcacgccttaatcccagcactttgggagccgaggtgggtggatcatgaggtcaggagttcgagaccagcctgaccaacatggtgaaaccccgtatctactaaaaatacaaaaattagctgggtgtggtggcgcatgcctgcaatcccagctactcaggaggctgaggcaggagaatcg

SEQ ID NO: 101340 - DNA, 1039 bp, Homo sapiens
ctacttgggagactgaggcaggaaaattgcttgagcccaggaggcagaggttgcagtgagctaagtttgcaacactgcactccagcctgggcgacaaagctctgtctcggaaaaaaaaaaaaaaaattaaaaatttatcactgacttgaaatcctggcagtcagcctgctttagagaacattaaccaaaaatcccttggtccacaccctttctaaatttaggcattcattcagagtcttaaactctaagagccactcaggacacagttgggttgctctttctgggatgggggtagattctggagcagatactttactcctagctcattttttgaccttgagacctgtggttggtgttgtgaagtcgtacatacacaagtgacttttttgttttaaaaagtgctctcaagatagtttacaaaaagcaggaaaaggaggagtgagtgaataaatgaagagaggggaagagaggaggaaaaaagtgtttctattttagcagctgacggaaaaaaaacccaatgaaataaggtcatagctgacttctgaatggttctggacttgtttcttgacactggcgacttgtcttctaagaccattatgtagatcttcaatggaacgcctctgttattttgttctgattctgaaagtaaaaaggaacaactgcactcttggggaattttgttgaataaggtaatacttatgcctctgctatccagagtcacatttcgcttgagtttcttttgagttttgcagtcctttttgctctcagtaagagagaatgtgttaggactcctcaagtagcttaattgctctggtcattcatctctttcttgaggaccagctttaaaaatcattttgatacttaaaaaaaattaaagtaactgtttctttataatagaacttctaattagttggtttgctggtttctgcattggttggctatttcctgagagacctgtcatttctgttctttgttgccactggttatttttaagtactttgactcattaaaaacattttcagcttttaaaggatggcca

SEQ ID NO: 101341 - DNA, 1471 bp, Homo sapiens
cgcctcctccacggccactccgcctcttccctcccttcgtcccttcttcctctcccttttttccttcttccttcccctcctcgccgccaccgcccaggaccgccggccgggggacgagctcggagcagcagccaggtgaggcggccgggccgggccgggcctggtggggccctcgcgggcgccgccgcggtggggaggtgggcggcgggtggggcctaggcctcggcgggcccgcgcacccctccgccttctcccgggcctctctctagcccgcggggccttcccggaggaggcgggtcctcttgcgttccctcgcctcggggcgccctgaggcctggccccgggcgcccccatcccctccagccctcaccggtgccacaaacaggtgctgcggccgcctttcctcgtcccgcatggcgcgcgcggggatgccgaagttattcccggggctggggcgcaggcgggggggggggggggtccctgcttcaggtccccgagggctggagcctctcagtgtcgccggcccaggtctgtagcttagtggttaagagcacggcccaggtgtccaaaacgggtgccgaacccggctctgccccgttaggcaagacacttaaaaagtctttgtgtcttggttggaaaaggggctgctaataccgtccctgcctcttaaggttcagtgaaatggggcgtgtaaagcgcttatcagagtgccagacccacagcgtgtcccagtaaaccgtctgcataatttattagcgtgatatgaaggtataatttaatgggcagagtggatagaagttgacctacctatccgtttgggtttcttagaggctgcagtgttccgcgtgcccatgtccagagccagggcattgttttcagttgttaacatctgaaaggggcgtacgcttaattgggacactgtagttgacagtctgtaaacgatggatgctgtttctttccatctccgcttaggcaactgcaggatattcaccatctcccgcaggatgagcaacctgtccatttctccccgccccgccatcatccagcttcttcttgtcattccatttctgggaaagttgctggcagaagcttcccttgagttgagcaaacctatctagagcacttgctgtgtgttgggctctgaaggggggtgtacggagatggaaaaatttgtctgtcttgtcttgctctacacctcgataagttttttttcacggaagctttgcttatattcacccctccctgttggctgactttccttttaagcccttgccccgcctccgtgttgcagtattgcttgtgtggaagttttcttctgttccgcgaagatacgtgcttcagtctgttctgccactgttcttcggctgtgtggaagtttttaaggtcacacttctcttctgcttgtagctttcattgttaagagcgtggtggagttaaatcaggttcccggttgattttggcgtttcaggaa

SEQ ID NO: 101342 - DNA, 1016 bp, Homo sapiens
ctgtgctcagccttaccagcactgcattttcaagatcgtctggagaggattaaaaaaatttttttttttgagacggagttttgctcttgttgcccaggctggagtgcaatggcgtgatctcggctcactgccacctccgcctcccaggttcaagcaattctcttgcctcagcctcccgagtagctgggattacaggcatgcaccaccacacccggctaattttgtatttttttagtagagacagggtttctccatgttgaggctggtctcgaactcctgacctcaggtgatctacccacctcggcctcccaaagtgctgggattacaggcgtgagccaccgcgcccggcctaaaatttttatatatataatatgtatatgtattttcagagaaggccaaaattttttctttttcaagttaattatgaagagtttgttctcttattcgatgtttcaatgaaaatttctttttcacctctttatttttatctgcagagggcagccactacattagatgagaagattgagaaagttcgaaagaaaaggaaaacagaggtgagaagaaaagtggctatttttcgttgttagggcccactctttactctcaccacgaccccagcatctctctggaagcccttatagagcggggcatggctggggcaggcgcactcttctgtgtgtttgctgtgaatctgtactgagaatccccacagccgttcattcaggccggagagcttcctatcgctctacttaggttctggatttctagaagtttctcatcaccctcactttaatttttttcccaggataaagaagccaagtctgggaagttggaaaaggagaaagaagcaaaggaaggctctgaaccaaaggagcaggaagaccttcaagagaatgatgaggaaggctcagaagatgaagcctcggagactgactactcatcagctgatgagaacatcctcaccaaagcaggtagacgttacggcggaggtgtcagtaatggggacaggagatcag

SEQ ID NO: 101343 - DNA, 1042 bp, Homo sapiens
gtattttttctttttttttttgagacagagttttgctgttgtcacccaggctagagtgcagtggtgcgttctcagctcactgcaacctctgccttcaagtgaatctccttcctcagcctcctgagtagctgggattacaggtgcccaccaccaagcctggctaatttttatatatttagtagagacaggatttcaccatattggccaggctggtctcgaactcctgacctcaggtgattcgcctgccttggcctcacaaagtgctgggattacaggctcccgccaccatgcccagctaagttttttgtatttttagtagaattggggcttcactatgttggccaggctggtcttgaactcctgacctcaggtgatccgcctgcctcggcgtcccaaagtgctgggattacatatgtgagcctgaccatgtgatttgaaagcagaaaaaatattctatgaaaaataagttcctttattttccccaaccagacgtagtttttctgtgctctggtgaaaacctaaccctggagggagctaaacttcttctcattgcttccttgctgtccctccctccaggtaaaactgccgcctttgccctgcctgttttggagcgtctgatttataaaccccgccaggctccagtcacccgcgtgctggtgctagtgcccacccgagagctgggcatccaggtgcactctgtcaccagacagctggcccagttctgcaacatcaccacctgcctggctgtgggtgagtttctggccaagggctgccagcccctgagagactgtggtggggtggaggatggatgtgccccgccatctgttggtgttggtgacaggtgccaggagaggcctttgtgttgattgaatccacttaaaaactggaagacttttttttttttttttttttttgagacggaggagtctcgctctgtcgcccaggctggagtgcagtggcgcaatcttggctcactgcaagctccgcctcccgggttcacgccattctcctgcctcagcctccccagtagctgggactaccg

SEQ ID NO: 101344 - DNA, 1007 bp, Homo sapiens
gctgcttctcttagtccttgaatgtttcaggcattctcttttttttttttttttgagaggaagtctcactctgttgcccaggtgggaatgcaatggcatgatcttggctcactgcaacctccacctcctgggttcaagtgattctcccactgctttccaagtagctggaattataggtgtgcaccaccatgcacagctaatttatgtatttttaatagagatggggtttcgccatgttgggtaggctggtctcgaattcctgacctgaggtgatccacctgccttggcctcccaaagtgctgggattgattacaggcatgagccacctcgcccagcccatgcattctcttctgaagtgcttttgtgtcatcatcattgttgatttttgcacttagcacaattttaatgacatgatctgtctttcccagtgcgtttctgggaaacccatgtgcttgggcctttgtcagtcttactctctcagtggttttctctgcatctggcctgaggcctggtgagtggctggtgctcagtcaacacccatgagcagctgacctggccgcctggtggggctctcttctctttgcaggcggcttggatgtgaagtctcaggaagcagctcttcgggcagcgcctgacatcctcatcgccaccccaggccggctcatcgatcacctccacaactgcccttccttccacctgagcagcatcgaggtgctcatcctggacgaggctgacaggtgctcctcacagcctggggcccagggcactgtggggttccaaggcccagaacctggatgtggacctgccacactgcgttattctttgtggctctgggccatggctgttggtgtgcgataccagatcagccacttgtgctggggcctctgcccagccttagcccatgttttcctcttttttctctttctctattatggtggttaagtgataaggctggtcaaatgttggtcctgccacttcctaagggagatttggaaatatttagattc

SEQ ID NO: 101345 - DNA, 1161 bp, Homo sapiens
agtggcgcaatcttggcttactgcaagctccgcctcccaggttcacgccattctcctgcctcagcctcccaagtagctgggactacaggcgcccgccaccatgcctggctaattttttgtatttttagtagagacggggtttcaccgtgttagcgaggatggtctcgatctcctgacctcgtgatctgcccacctcggcctcccaaagtgctgggattacaggcgtgagccaccgtgcccagcctctatccccattttaatgccctgttctgtcctctgctggctcaggctcttgtggagcattattaggggagggtgtctggatgaacagctgtttgtgactgtttctaggcgttttaaggatgaacagattgacatcctcgtggccactgatgtggcagcccgtggacttgacattgagggggtcaaaacggtgagcagacactatcttccttggacttttggtggaagtctttttgcctcttcgcaccccccttcccttgccaggcctgacgttcatttttgaccttctaggtaatcaacttcacaatgcctaataccatcaaacattatgtccaccgggtggggcgaacagcacgtgctggcagggctgggcgctcagtctctctggtgggagaagatgagcggaagatgctgaaggagattgtaaaagctgccaaggcccctgtgaaggccaggatacttccccaaggtgagcaggcacccctgtggcagtgcagaatggctcggtgggcggggcaaggacagagtgtaatggctgagagcaggtactttgcagttcagagccagatttgaattccagccctgctgcttccttgccgagtgaccatgtgcaggtttcacctcacctctctgagcttgcctcctgtgtgtagaagggaattatgacagaattgtaaacacagtgccccatttaggtggaaattgagaagagaaggttgcttggggcaaaattctcactaaactcctctttcccttactgttggtggtggggaagagagagatcagtactcattctttttgggtcctttcattgattttgttcctctgatctgtgggggtcttataaagcacatcctctttaaagtctttttttgttttgttttgttcttgaattcctaggctcaagcaatccaccca

SEQ ID NO: 101346 - DNA, 1034 bp, Homo sapiens
ctctgcctcccgggttcaagcagttcttctgcctcaacctcctgagtagctgggactacaggcatgcaccactatgcctggctaatttttgtagttttaataaagacagggtttcaccatgttggccaggctggtctcaaactcgtgacctcaggtgatccgcctgcctcagcctcccaaagtgttgggattacaggcgcaagccaccacgcccagtcttttttttttctctctttttaaagacatagggtctcaccgtattgcccaggctggtcttgaatttctgggctcaggcagtcttcctgccttggccttccaaattgctgggattacaggcatgagctaccatgccccaatctgcttttgattctttgaggagacccagccttcacattggttgtcatagaatcctcacaaatgatcattcttctttccttaggatagtgaatggatttgcttccagcactggaagcattccatgatgctggagtggctaggtcttggtgtcggttctttcacgcaaagtgtttctccagcaggacctgagaatacaggtaagaagtgcatgtcttcctagaatcaaatcttaacgtagaatatagtaaataccagaacagtgagacttaaaaataattcccagaataaataaagagctatgagtcaatcagagaaagacaaatagcttaatataaggaaaagagataaaatactttttttttttttttttgagatggagtttcactcttgttgcccaggctggagtgcagtggtgtgatctcggctcactgcaacctccaccttccaggttcaagcgattctcctctcctgccttagcctcccaagtagctggcattacaggcaagtgccaccacgcgcagctaatgagataaaagacttttaacaggcacatcacaaaataggaaattgttcaatagatatatgaaaagtgctcattaaaaactagaggaattaaaaccacaatgagataactattacttacacaccagtttggcaacaattaaagtttgatataa

SEQ ID NO: 101347 - DNA, 1107 bp, Homo sapiens
ctcctgagtagctgggattacaggcgcccgccatcacacctggctaatttttgtatttttagtagagacaagatttcaccatgttggccaggctggtctcgatctcttgacctcatggtccacccgcctcggcctcccaaagtgctgggattacaggcgtgagccaccgcgcccggcccaacattatttcacattttggatttccagatttgcaatgctcaaccagtaagtataaacgcaaatattccaaaatctgaaacacttctagtcccaagcattttggataagggatattcaacctgccaccacgcctggctaatttttgcatttttagtagagacagtgttttgccatgttggccaggctggtcttgaactacagacctcaagtgatccacctgccttggcctcctaaaatgctggtattacaggcatgagccaccacactcaaccgatactagttctttggtttcaagaccacaataatgtgccttgggaaattggtttgttgaccagtctatttatttattctccctccttactgttcctgtcttagctttgctttccctcaaggtgaggactgagtttgggggatgatgatatttcctcatcatttctttccctctgttcttggaagatcatgacacagatgaaggagtcagagcaagagcttcatgaaggagccaagaccctggagtgcaccatgcgtggtgtcctacgggaacagtacctgcagaagtacatctcaccccagcactgggaaagtctcatgaatggaccagtgcaggtaggggtcatcctgggggacacaaatatgtctctggcctcagtactttgaggtagcctccaggagaagcatcagtccaaaactttacctgtttgataatctgatgctgccacaatgtgtaaagttcccttttgtgatgagaggcagctgaatatgctggtcaggaacaaaactcgaaccagcctgttgggttttagtctgagcttggctctggacaagttacttaattttctgtggctgtttccccttttataaaatggggataataataagcattaagttgaaccatatgaaattgccaacatctgtaatattgatttg

SEQ ID NO: 101348 - DNA, 1516 bp, Homo sapiens
ggcccagaggaggagaaggaggaggcgggggcccagggtggagagcacgagggcctggcccaggcacggccggcgcctccgccctcgaggagggcgtcacctcagctccccccggcggcggagccggcgggctcaggcgggcgcggctgaggggagcggaccgcggggggcgggagatgactgcgcccaaggcctttgcgggcctcagccggccccagaggaaggggaacccgtcgagcggtttggtgcgtgtgaagcgcgacatggcgaggaagcggacaagcccgggtggcccggcgtgtagagggaagggggcggggctagacgcggcctggacaactactagagcgcctcgggctgtgctgctcgagactacatttcccagagcgacgcgcgcggagcgggcgggaaagagagcgtttcgggtccagtgcgcaggtgcgaaagccatctttggttatataagggaggttcaggaagccattcgttctttcgcgtctgcggtgcccggagtgtggtacttctcctagttgcagtcaggcttcatacgctattgtcctgcccgtaagttcccgttttgtgtgtggtgagtggaaactccatgttcttcgttggagacctctggtcctcccttcccttctttgtgccgtcgtctctgcggccagccctaatctccttctcgtggcttctccgtctctgaccccaaataggccttaagggcgtgggagaaatgagtttctggagctggaaaagccactgccttctgcacgggcctgagaagcccttggctggtgtaaatgatgacttcacttttttccccatcagatcgacaatgctgacgtcttatattttgccagttagttctgatacatcggcctcaaaaggcccggccttgttcgtttctgaccgtgggaagatggcggttaacgccctttatttgttggttcacaggttagagcagccagcgggtacagaatggattttggaagagggagtcaccactggacctccaaggaagccacgtgcagacatctacaaccttcgatctcctgacgagtaagtctttgtctcctatgggtctactgtagaaaacacgtgctttgagaagctttagttttctaggaaaacgtgggatttaacaaagcactttctatcgagcatttattaggtatttaaaaaagtgttctgacggccgggcgctgtggctgacgcctgtaaccccagcacttggggaggccaaggcagatgggtcacctgaggtcaagatttggagaccagcctggccaacatggtgaaaccctgactctattaaaaatacagaaattagctgggcgtggtggtacgcgcctgtaatcccagcaactcacaaggctgaggcaggagaattgcccgaacccgggcggcggaggttgtagtgagttgagattgcgccactgccctacagtcggggcaacagagccagactccgtctcaaaaaaaaaaaaaaaagaaaaacatgttctgaatgttttattct

SEQ ID NO: 101349 - DNA, 1432 bp, Homo sapiens
ggatgatttattgacatattttggaaagccaaatgtgtttttctgttgaactagccactcaaaccagtgcccgactacataactaatatttttgctagagtccaggagtgaggcgtttacaaagtctgggcttcatgggaacacatgtgaagcttattgttccagattgttcttttgtcaggtaacttgtggtaacttgtgttaaaatgcaatctcttggtacttgttcacttcccaactcagtaaatgccaactacttcctcaactcttccagccacactggcttctatcatgggcctgtactcagagtgtaagcactgaagacaggggtgtttggtttggctaccaagttattgccagctacaggatacaacacagaagtgctcaaacaccgaatgcaaatttgcaaatatgaagcataccaaccaaatcttactcctcatggctttcaaatcttactcctcactcaagaacttcctgctggcatatatgatgacttagcttttttccccgacagatcgactatgttgatctaacttttctaagccagtttctgtctgatatgccagcttgagcagctcctttgtcccagctcccctgggcatctagctgatgggagctcatttttctgttttttcatttcaggtttattgttggccaaaaccaggctttgattgaaccaggatgaatgcgggtgttggaagtagaatatatatatacatataaaattggtaagtggtgccaacacgtcttccctggctgagtagacacaggctctggagggggtagtagctgcttttcagtgtgggtttgtcaccctacttcttgtacgactcaaatgtggcctttgcagctgatgatacagcttctttccccatcagatcgaccctgttgatctctacactattggccagttttgtctgatgcattggccccagtaataactcctatctttgttttctgcttatctttatcagagactattgcttgttcatgggaactgggctttctctattttttccagcattcagatggcttcttttgacctgttaactttctataggttgggagccacgtgtaccagtgtgtgttgatcttggcttgattcagtctgccttgtaacaggtgaggtttctgctttctatctgccaaaccccaccgcaaaatttgtccaactgggcctaacctcaggacccatttccaagttgggtataaaactgggagaataagtcattaggactgacattggcctgttggtattactaggtctttgttggaaataagagcttggagttccaaagaaaacgagcacttgaacaaaagatttctcagcaaggcaaatttacttctgccgtagggtgctgctgctggcattcctggcaagagcacacctaacaaaagagagaaagggtttttattcctaacaagtagt

SEQ ID NO: 101350 - DNA, 1068 bp, Homo sapiens
gctttcatgtcactcagcccaggcaacccaaaccagtcctggctacacccagaaataagagttacctctgcattttctgttgccatttttctggctctagaagtatctgatgcgcgactatgtcatagaatgtccacgcatctcagagtagtctatttttctgttcagataaaatatatatatatatgtatttttagcaaatttataatagggcaattgagtctaatttcttcttttgtaatacagaacaatatcttaggagtttcattgttggtcattatcgtagctgatgttttctggtcttttgcagttcctaccattgtcccttgggctgtttgggttttcttccttttgattctgatttcttgagggtggggaaagactttggggtttgacttccttgtgtaggcatttcttgacactaggcctggactctgtcaatgctgtgactttcctcattcatttctgtgtgtttctcccattcgttgttcttaagaatccagggcatgaatgcaggaatgagacccagggaagcagagctacagatggccctcaaaatcaggatgggatgtgggctggtttcacttatatcccacacccctttagggatctgaagggactgagttttctcatccccagagatcttggaaccaaaaatctcatgcaagcaaactcatcactggcatttctgagatccagaacacatgtgagtccctcctggctgggctgctcccacatgtccagcaccctgtcggcctgtaacatcaatcagagctgaaggtcagaggtttttcaggttctcgtgaacctcacaagaacatgctgggcctccgatctcaccaacttgtttatcagttccttgtttcgatctgtttatttatttatttttttgttattattattttgagacaaagtcttgctctgttgcccaggctgcagtgcaatggcgcaatctcggctcactgcaacctcctccacccaggttcaagtgattctcatgtctcagcctcctgagtaactgggattacaagagcgcaccatcacgcccagctaatttttgtattttta

SEQ ID NO: 101351 - DNA, 1050 bp, Homo sapiens
acccacctcccctaagttcttaaggcagaactgtatttactccacagaagcattgactggaaaaggccccagtggtcaggaaaagtgcaaacttgagaaccacatctcccctgacgtccgtgtgttgccagggggaggagcccatggaagcacacgagatcagagcatctgaactgccctgccttggaggagagacttttgggtgaggtccaaagaggagagctgttcagcttacctgccacagagcttttctgcatgaactctggaacagaaaggccctgtaaagccctcagagagaagagagactccagagaaggctccctaagaccttgagagccatgacaggtccatcagcatgaagttggccaagccatagggcacagcacctccttgtaacaactctatagccctctttgggagatgacatgagtggaactcacagccaccactaccaccactttagacaggaccgaggccacatactccccattctctcgtggctttccatctcagcctcggagggcaacattgacagtcctcctggcttcagctagagaaggatgctggaacaagcggctggtgttgaaagagtgggttgaccaatttggtattgaatgttgcccagccacccctaggaacacctgtccatcacctcctggatggattccactgttagacagctacagggaatgattggtcatggggaagtctctgcgccataagccacgatcccagcgcaaaacccttactcaaatgtcttcattgacttcggtatttcatagtacctgagattttattttgagataccatcagggtgagttgcaccacttgtactcaattctaattgccccctggcaatctgggaagggttcagaaggtgggcacccagccaacagcatgaactcagagcattgttttagggttggaggaggaacacgctttctttacatcactagtgtagactcaaaagatatgcaagtgtcaaatatgcaaaagaaatagtttattcaaagagactgtgtgttactgaagaacagcataaaaatatga

SEQ ID NO: 101352 - DNA, 1039 bp, Homo sapiens
gaatgagacaattaccaagtcaagaaggaaatgatgagtgcttccaaaaccctgaaagagggtcatgagataatagatgaggataaagtggctagggtggccagggaggtccctctggggataacggatgagctgaacgctgaaagataagaaagacctgcagagatctaggagaggagcattcctggcaggaactgtaagtgcaaaggccctgaggctggacccagtctgggatattggaggagcagcagggccagtggctgcagcaggtttagctcagctggtggatgtgagtggagagaggtagccggggccagatcagacagggtcttgaaggctgtgtgaggcgctggctttcattccaggtgcactgggactccactgggggcttttgaggagggcagtggcaggatcaatgcatgctttaaaaagagtgttctgattggaaaacagactgcgggggtgagggaggacatagggacagcacagggacagcagtgaggaggccactgtaacagtcctggtaggatacatcaggggcctggcccagggtgatgatcggggaggcaggagaagtgctcagactactttgaaggtggaacccatgggatttgccgatgaacagaaaggagtcgaggagggctcttgggtcacagcctgaagatctgggaggatggaggcaccatttgccaaaaaaggcaaaacatagtacagagcaggtagtgggggatcaagagctctttggccttgttaagtttgagaagcccaagcgacatccaagtgtcaaaacaatcttcctcccacccagcaaggcccgagagcccagatagagggtggaggggagcctgcccggggtggagattaatgcacataacccagttctctctgcccgtggctatttgggtcacttggactgcaggtcctcacccctctgagcctgtcaatcacccccaccccaccctgtccctgtccttttcagtctctggaacctgctgccaggagaatgctcagggagggaaatgctcagggaggcacacct

SEQ ID NO: 101353 - DNA, 1092 bp, Homo sapiens
gaatgaagaggtccacatagggcctttggcactggaatgctcatgcctcagccagttgcttttacagatgcagaatgcacagcttaatatttttctttgttttcttttcttttcttttttttttttttttttttttgagacagggtctcactctgtctcccaggatggagtgcagtagcatgatcatggctcactgcagcttcaacctcccagcctcaagtgatcctcccacctcagccttccaagtagctgggactacaggtacatgcccccacacacagctaatttttgtattttttgtagagacgaggttttgtcctgttggccaggctggtctcaaactccttgggctcaagtgatccaccctcctcagcctctcagagtgctaggattacaggcatgagccaccacacccaaccttagtttttcgagataaattgaaaatttgcattctaaaacaaaatctctcaactttataactgttagcaacttgctcagttcttgaaacactatgtaaaccaaacaaaacaggtctgtgagttagattcaacttacaggccaccaattttcagcttgtctctctttgcttcgtacggatgggggaaactaagtcacagatatatgtcatattatacataatatatatatatatatatatttggccttatcactgaggctgaattaggtgctttctcctagggtggtcttggtagtgtgtctctgagaaggtgacatatgagcagaaacctaaagggagagcttcccttctgggggaagagctttccaggcagatggaggagcaagtgcaaaggctctgaggcagaaaagcaactgtatgtttgaggaacagcagtaagactagtgagctagagtagaataagagagggggagtgaaaggggatgaggacgggataaccaaatccacttctacatagggcctgtaggacccaggttctaattaaaatgaacaactgagaggacaaggtgatgaatggatttatgaatgaatgaatggattccaagctgctttcatgggatattcgtatttggtgttagtgtgtgggtgtggctgattcgccctaggttctgaag

SEQ ID NO: 101354 - DNA, 1041 bp, Homo sapiens
aaattttatttaatttagaaaatgaaaatgaagaaagaaaagaaaaccaagttcatccacttaccaggaacttgggccaggaaacccagggcttaataaagacaatcaggctaggggaaaatagaacaggcactagaatcagacatctgttcactcaagtatcatctaacatttaataggtcttgtttatatcagaatattcagcctgagagtgaaagagctggaaagaatcttaaatgagatcagacgcatgcaaagcatttagaacagggcctggtatacaggaagtgctcaatcaatgttagctgatattgtcattgttagcattgctactactcttcccttaatgagtacttactacttttaggcaaggtgtgaaacactttatttgcattatctttttacttctttcagcaaccctgagaggaagattccaccattatcctgtttttaattatgattatgattattattttggggtgtgacaaaagagagatgggtgagaagactggagtccaagctgatggaaaaatccctcaggctgctggtgctttgtctgggcagggccacagcaaagacccgttgtcctgagcgacatccactcagagatgtaatgattttccttgaggcttcgggtacccctataaccaccctcataaagcaattattcttacccaggaattcatgggggaagggggattaattagccttgctcagtgcccagatgtgccaaaaaacctaagtaggatactcagtgggattataaataaatgatgacaggtattatggagtccaagagaaagaaaaaagcttgacttcaagtgaacacgtctcttgccagcaccttttaaagggtatatcacttgtatttacatggacgaattgggttgacttgacctcactcagcctctgagaaaaatctgaacacttctcagcagaagatgtctgcagagaggattgagcagaaaacattttcagagggccttggcctagaagttgggtgctcgggtgttggtacttgcctccccactcactggctga

SEQ ID NO: 101355 - DNA, 1551 bp, Homo sapiens
agagagtgcttgttcttgcaaagttggtctatttaggacaattttctcagagatggcagtaaaatgtcttgagagcgatgcctgtttctaatctcacaaagacacctaagggttagcagcagtcctggccaagatagacagtgagggttccaggagtgtggggaaaggcggcaaagtgtgtgggctggaggatccagaggagtcgccgtattaatcagcacaggctcagctctgcacctgccgagtctcagtggcttttaccaacagaggtgtagttccactcacacggtatcagctgtgggattggagggcttccccactctgtgcacagactcgggccaggctctttccctctttcggctccaccgtctcaatgtgaagcctgcatggctgccaggcaggagggacagctggagagccacacactggctcgcgaatgctttgacacaggagtgacacaggccacttctgcacacagcccattcaccagaactcatccacgggcctgcctaaccttacagggggctggcaaatgtggtgagcagcaaatgcgtttcttctacttcctcactcctctcctcactttactcaaagttggagtcagacttaggaggcagccatggctcccctgccttgttcccgataaccccctgccctactcctctccttcacaccttccatgccatctctctgcagatttgtgttccttgtgctggtgcacttggacttggagctgatcaacgcagatgtggagatccctgagtttgacctcagcaggtacggcttcggtctgatgcagccggaacacgacgtgcccgtccgctaccgcatccgcccatgacacagggagcagatggatccacgtgctcgcctctgcccagcctgccccagcctgccccagcctcccagctttctgtgtgcacagttggcccgggtgcaggtgctagcattaccacttccctgcttttctcccagaaggctgggtccaggggagggaaaagctaagagggtgaacaaagaaaagacattgaaagctctatggattatccactgcaaagttttctttccaaaatcaggctttgtctgctcccaattcacctcgttactctcacctcgtgatatccacaaatgctattcagataaggcagaactaggagtcttcactgctctgcccccaactcccggaggtgtcaccttcctagttcttatgagctagcatggcccgggccttatccagtcaaagcggatgctggccacagaaaggccactcaggatgtcctttgtgtccattgatgtcattcagcagtcagtcccccaataatccttaaactagctaaaaccaaaggagtcccttagaagatctgcttccctggggccccatttgccagattgccccattgctcacactacttgagaaaatgcaggagagcttcccccaaggctgatgcattcccggtgcagaacaggggcaccctccaaacactgggctctgaggagtggagttctctgttctagagtgacaggcaccagatgggatgggctttctcagtg

SEQ ID NO: 101356 - DNA, 1015 bp, Homo sapiens
acctggcctgtctttcgctttagagggatcattctggctgcagcgctgacaagagactgtagggggtggggaagcagaggcagggagagcagagaggagcagcaggatccagacaagagagggtgctgctgggccagggtcaggggtggttagattctgaacatatatcaaagtaaagccaacaggatccgctgttggatgggaccttgggggaggccatcaaggatgaatccaggtttgggcctgagtgacaggagggatggcagagccatgggcagaagagggagatggcgggaggaggaagtttcagggagaagatcgggggttgggctttgggtatgttgaatttgagatggagatgggggagtggacacctggagaagagagtctggagttcaagtttgaggtccaggcttgggagttgtcagcatagaggagtttaaatcctcaggactggaggagatactgcaggcgagggtgggtgaagaagggggcatccctggggctctccagtggtgggaagggtgaggaggaggggccaggaaggtgggaggagagccgggagtgggaagctgggtcagatgctgcagagaggctgaaaaatggtagctgtgattgctgctgtcaggtcggagatgatgagtcaggaataataatctcaaaagatactgagcacttaccctgggccaagcatcctgttgagcactttgcaaccaccatctcataggatcctcacaacagcttcctgaatccagaacccctgaacctggaatcgagagtgatggaaggagcagtgggagtctcaggcatccagggaggactctgtgggccgagacctaaggtccaggcaaggggaagaggaggctgtaagggaaggtggggtggggtggtggggggcagacggaggagagtttccaaacacaggtcaggcttccctgccagctctgagcccactgatgctggtaatgccaggactgaaaccattgattgacatgatgtccctcagccccatcca

SEQ ID NO: 101357 - DNA, 1056 bp, Homo sapiens
attaggaaacatttcaactatacagaaaaagaaaaagaatacggtaagaagccccatgtacctataccttgatttgacagtcattaacattatttaaaaaatattagacataggctgggcacggtggctcacacctataattccagcactttgggaggctgaggcgggccgatcaagaggtcaggagatcgagaccatcctggctaacacgatgaaaccccgtctctactaaaaatacagaaaattagccaggcgtggtggcaggcacctgtagtcccagctactcaggaggctgaggcaggagaatggcgtgaacccaggaggcggagcttgcagtgagcggagcttgcgccattgcactccagcctgggcaacagagcgagactccatctcaaaaaaaaaaaattagatgtcatgatattccacccttgaatatttcagaatgcatataaaactgacaactacaattctattttcttgcctgagaatataaaaagataattcttaatgtcatgtagttcccagttcaaattcaaatttctgcaattacagcaagaattttcgagccccattcggtgaacatgagggtggtgagctgagagttaggagtatggcttgtgggccccttgaaactaattgatttgccttgtgagtatcagaagcattcttcctgcttcccaggcctcagtttatctgtacttcgaggtggctcatggaggtggtctctcaagccccagccatatcaccaggctactgcatctcttcctttgggcttgtgtgaccaccacagggagcactgagagagatctcttggttgggaggctccttttctgggggtccggaaggcatagtggcatcaagcgagggtcactgtggcccagtggctggtctgggcccttgcaggatgcagaatttgtaggcacaaataaatctgtctcattctaacatgcactgaccagaggtcacccaacagtggtccgtgactggattcagccctggatgggctgggtttgtgctgtgtgggacatggggagaaaattgggggattccatacac

SEQ ID NO: 101358 - DNA, 1485 bp, Homo sapiens
tggcttctgccctgtcttagctgcttcacacgtactctgaagccgatgaattatatgtctctcctggctttgctaaaaatggagtttgtggtttggttttgtatatttgtttttccattattcttgatgctctggtataatttctagaaggagagggtaaatgtggccttaggcagccatttttctacccccactatctaactggatcctctttagtaactccttgacataataagcaaagcagctatgactgctgtcccattttcaagatgagaagccagaagttctgaggttcttggggtgcttcagggtggcaggagcatcatcactcagggtctgtctgggtgacagatcaacatgggtctcttttctccttgccttccatgctaggctggctctcaggcaggacagcagggagttgaggagactgaggtctgacttcatcattttttccactacaaagtgccaaggcagctggttgggagccgtgaggccacctgtcccccgtcctgggaaaaccaaaggatgagaagcttgctggagtccctctcctgtagcacccaccacctctggcagatagcctgggaagaggggcaagaccactccagaacatcctctcacaggctaagacaaggtctaggtggaattagcctgggaacgctgaacgaaaggccgcctggcccagccatgtttgcatctgggtagctgccccacctctgggctcttagccaagcacattccctacataatcctggctctcctggggaaggatgctggaggatggctcccctgcagctgacatccttgcactttagagaccttcaaatctccaaaggcccaggcctgtgcaaattcttagagacagtcagcagcaaggcccagatggcagaaaacaggtcatttcttccaaccctctgcctctgattcagacctgctttctcttcatgtataaaaaagaccaagtgaagaggttttctgtctttcatttcttcagtaaaattcttgataaagaggcctgcacagtgttggcaaataaatacttggtaatatgtgctgaaagaattatgcttcatctcttttgttgttgttgctgttgctgctgctgctgtgttgttgttgttgctaagacagggtctcactccgtcgcccaggctggagtgcagtggcacaatctcggctcactgcaacctctacctcccgggttcaagcaatcctcccacctcagcctcctgagtagctggaattacaggcgcacgccagcattcctggctaatttttgtatttttagtagagacggggtttcaccacgttggccaggctggtcttgaactcctgacctcaagtgatccacccatctcagcctcccaaagtgctgggattacaggcgtgagccactgagcccagccttgcttcatctctctttcttttcttttttttttttttttgagacagagtttcactcttttgcccaggctgaagtgcagt

SEQ ID NO: 101359 - DNA, 1917 bp, Homo sapiens
agcctcccgagtagctgggactacaggtgcacaccaccacacctggctaattttttgtatttttagtagagacaggggtttcttccatgttgcccaggctggtctcgaactcctggactcaagcaatccgcccaccttgacttcccaaagtgctgggattatgggcgggtgtgagccattgcgcccagccttgaagtcatgttctaaattgtatttgaatttgtgcctctttgtttttccccaaaccaaagccctcaaattgtagtctctgtcggcttctgcagaattctggaaaatgccagttttcctcccccgcccttgttttccataaaacatatttatatattgtgatgaggagtactttctgaagagtacttcgtatttttttttaattgccttgtttgccttcaacttccttgattttcatagtttacatgggtgtgtgtaggggtgtgtgtgtgtatgtgtgtgggttagggcttttttcgttgcatgtgatggttctgtggacatatgatccccacaaactgtgggagtgattggccaggccttgttttgtttgtttgtttgtttgtgtttttgttcttttgaagaatagagtggtatttagaaaataaattgcattgcaaagctcttatcggctcatatgagagagcaggttcctgcccttgaaaatgccggtaagctatagcatatgttttttaagacttaagcatttcatgctttaaaataccttcacaagtgaacattacacacagaagttcatttggttttcctttgttttatggtgcatatagcaataaagacccccctccaccctgcaacccccatcccccaccgggcctttgtccctgccttggcttttctccccttctcattctcctctcccctttcctcactgaaggctgtgagttgctttcaatgtgacaacactatgatgtcatttggaaggatttgccaggacagactgattctgagtcctgggtgccgtatgtgtatgcggcagtgttgtcaggcgatcttgtttgaagctctatgttgccataattaccatcaagtacacactgttggcaaaaggctaacacctgactttagaaaatgctgatttgagaacaaaaggaaaggtcttttttcactgcttaaagtggggtcactttgatacctttgcggtcatgtctgtgtctgatgagtgtagaatctctggatgtgcactgtcagtcatgtgtccaccaggcctcgaatatcatatgggaaatgtcatagttaaaaacgtacagccaggcccgtgtgctgttaatagtgtgaaattgtcatgttaaaaaaaaaaacaggaaccaaatgtgaccttgtgcatatattggtagctgaaaatcttcaaggctactgatgggtggccccttaatcttgtctttgattgctgtgtgcagggaaaggtgtccccgtttgttcatgctgttttggggggtgggggggtatttgcaagaatactcattttgacataataggtcctcttgtcagagatcctctaccacagacattaatagctgagcaggagccacatggattgattgtatccactcaccattgacgatggcattgagcgtagctagcttatttccatcactacgtgtttttgagcttgctcttacgttttaagaggtgccaggggtacatttttgcactgaaatctaaagatgttttaaaaaacacttttcacaaaaatagtcctttgtcattacattatttactcatgtgtttgtacatttttgtatgttaatttatgaatgattttttcagtaaaaaatacatattcaagaaccaaaccttggtggtcatttctctttgtgtaggacagtttgggtccttgggggtctttcctttttcctttcctttcctacaggagttcaacttaaggca

SEQ ID NO: 101360 - DNA, 2748 bp, Homo sapiens
tttcttttcttttttgagacagattttctttctgttacccaagctggtgcaattttgctcactgcaacctttgcctcccgggttcaagtgattctcctgtctcagcctcctgagtagctgggattacagacctgcaccaccacgcctggctaatttttttttttttttttaagtagagatggggtttcaccattttggccaggctggtctcgaactcctgacctcaaatgatctgcccacctcggcctcccaaagtgctgggattacaggcacgagccacctagcccagcctattttttccgttcacataaaaactttaattcagttaaaattgagttttaactcagtttttaagaaatgacacaatgagtcagttaagcgggtgagagcttttgctgtgtgtgatttccagggtaagcttgtaacatgtcttgtaggctttggtcactcctgggctattaccgttgtatctaaaagcctgttctcttggtcttggacagagtacagaatgcaggctattctgtgagccggccagagggtgacacaggaaagtacaagtccattcctcatcaccatcgaggagaagtccagtttcttggaaggttggtggaatttatctctgtctcttagaagtatcccctatactttcatgtccggatatcttagagcatattacagccccttctcctactccccaccccgaggccctgttctgacagctgtttgacagctgttgcatgtattctaactctgaggcagaacagtgtggggatcagaccgttggtgaacattttcaatagtaagattcttcgaaggaaatcacttgtcctatgtcttcagccttgtggtctccacagtagcctttggggaatttgggaagaaacagcttggatgaaggtccctgaggtgacagagcagtggcgccctttccgcaggctcccgttccgaatggtgtcctgagcttctgtctgggtggctgcagttgctgtgttaccttttctttctttgtgtgtgtgtgtgtgtgtgtgtgtgtgtcttttctaaattgtggggaagactgtgctctagacaaccaattctaattgctgaaattctgttttcatgggagtaaaatggcactgaatacagagtatgaactttctcatctgttgtatttttaatgctttacctcccacttccccactctctgaccttgggcaagttacctcacattattaagccttggcttcctcatttgctagcaggggctggcgtgagcattaaatgaaataattaagtgaagcacctggcatgaaacacaggaggtgtttctgaccacagcactcagcctggcatagcagaattggccgtgcgcccaccttgtgctgcagaagtgctgccatgggttgcgtcctctgctgtgggacgccctgctccatcctctggctgcagaggcatggatcctcactcagagccacctcttctctgttccctccctaaacaggtatgctctgctgaggaagtcaaaagaacggcaagggctggatggcctcaacaacctgaactactttgcaaacatcacatacgacgccttgtataaaaacataactgtcaacctgacacccgagctggctcaggtgaacgagtactgagaggagagaatgtacgtttgctttacccaccgccaccaagaaagcagtccgatgagatttttttttggaggggggagggtctacacagcaagagaacagaaatactgtgtctcatgaaggatcacagagttcagggggaaaatgtgacagcacacgcacaaacgccttcactggatcagccgctggaactgagggagtgagcttggggacttccttcgtcagcactggctttctgttttcacaagacagacgtctgtcccgctgctctctccccatctcctaccccacatcctgtcttagccgcagtctccagaacccatgatgaactgtgatctgccgtggtcctgccgtggtcctgccgtggagcctgtccctacacatgaccttggagcctcttggccttcagagcagaggcaaacccaccacagggcagctgcgttttaggaagagcaaatgaaactccacaccattcttctagatctctggtgttctctttggtttcatttttttaaaaaattaccttctttgggtggggattgagggtggaggggagggtgtttgggaaagataaatagacataaatatataacaatcacttcttgaagaagtataattgtaaataagccatgtaaaatgcctttttaaaatttaattttctagctggctccaattcaaattgaggatttatgtattaggccacttacttggttggcaagtgcaggaactcagttaaaatgcagttgaagaatgtcatctcccgaattgctgtcactttggcgagggagtggatatagggcatgtcacaaaagaacaaaataacccgacctttattgctgggagctggcttctgtccctttcttcccccccccacgagtcttgcccttgacttctgctctggattcactcttccctgtcggccgcgcatgtgctcatcccactctccgctaagcgggaggctgctgttagagcaggctgcttcctgcctaaagcaggcccttcggggctcgctgcacacacatctctggctctccaggcttcgtgttctgtcttttcatcagcatggcggggcggggggcggggggcgggggtgtgtatgggaatccctccccctcttact

SEQ ID NO: 101361 - DNA, 1933 bp, Homo sapiens
ggagtcttgctctgtcgcccaaactggagtacaatggtgcgatcttggctcactgcagcctccgcctcccgggttcaagctattctcctacctcagcctcccaagtagctgggattacaggcatgcgccactacgcctagctaatgtttttgtattttcagtagggatggggtttcaccatgttggccaggctggtctcgaactcctgatccgcccaccttggttttccaaagtgctgggattacaggcgtgagccactgtgcccatgccagaggtccagtgacttctgagccacactgtgagttgatttgtggtgttggacctggttacactagcccagtgatcttttccagttggttctaataaactcgtctttaggcacaggaaagacagcaaagattttccttcaagattcttttaaagataaagttctgtttcttttaggttggtacccaaccctttaatcgagccatgcttttcaacgttggctttcaagaggcaatgaaagacttggattgggactgtttgatttttcatgatgtagatcacataccggaaagtgatcgcaactattatggatgtggacagatgccgaggcattttgcaaccaaattggataagtatatgtatctgtgagtatcatttcttcttaattaaagaggttaaatctgaaaggatggtgagcgatgtgaaaaggaaatctaattagctgcaacctagatgcccatcaactgatggatggataaacaaaatgtgtgtatccatacaattggagcactgtttggcaggagaaagcaatgaaatactgatacgtgccaaaacacggatgaacttcgaaaacattacgttaaagaagccagacacaaaggttgtgtatcatatgattccaggtgtctgaaatgtccagaataagcaaatctatagtgacagaaagtagataaatggttataaggggctaaggaggataggaggagcagggggtgattgctaatgggtgcaaggctttgcgggggacagtgatgaaacatgttaatatagattgtggtcatggttgcacaattcagtgaataaactaaaaccattgaatgatatactctaaatgggccaattgtgtatgggtatgtcaattatatctcactaaagctattaaaaatcagtttgcaaaaattaattttgctaatttgatacattcatatggttcaggtcaggagcacagagagcactgtttttagtcctcaaatgagaaccttctagggaaaacagttaccctgtaacacacagatgattgatgtcccacatctcctcctaggcttccttataccgagttctttggcggagtgagtggcttaacagtggaacaatttcggaaaatcaatggctttcctaatgctttctggggttggggtggagaagatgacgacctctggaacaggtacctctgccgttctttcggtgtcttctagaaatgctaccttagactgcagaccaatactatccgataggaatataatgcaagccatgtgtgtaatttaacatgttctagtagctacagtttaaaaggttaaggaaaaaaatgaaattgaccagctgtgatggctcacacctgtaatcccagcactttggaaggccgaggtgggaggatcacttgagcccgggagttcgaggccacagagagctgtgccactgcactctagcttgggtgacagagtgagacctgtcttaaaaaatacacacacacacacacacacaccacacacatccaagtttttagaaaatatctttaatcttaatttaaaaatatcttaatatcttaaaaaacaaactgtatatcccaacaaagcagctattttcatttttctcctttgacatgcgaaaatcaacaaattataatttagcaattttttcttctaataaataatacgttcattataaa

SEQ ID NO: 101362 - DNA, 1030 bp, Homo sapiens
cagaggcagaggttgcagtgagctgagatcacaccactgcactccagcccgggcaacagagcgagactgtctcaaaaaaaaaaaaaaaaaaaaaaaaaagctcagctactgttttacttaaagttttcatttctacctggcccctgacagaagcagaactctaaagtcttaattccttgatttgcctcttcaccttgaaaatagtgaggaactgaaatacggtgagatggaaagcagaggaagggacttccatccttgctaaaaacaaattcagctgaaaaagcattgcgctctccagagactaaaaccccaggcatagggaaacctatcattttctgacctcttaatcccttttccccgtctctgttcagagggcccaatagacataaacatgagtgaaattggaatggattacattcatgaactcttctccaaagacccaaccatcaagctcggaggtcactggaagccttctgattgcatgcctcggtggaaggtagggtgtgaagtcacagccaaaatgctgagaagcccacctggggtttgcctttggtccgaatcaccatgggattagctaaccatgacattttgtcattttcatcctaccattccatgcaaatgtagaaacattttagaggaatgggtttccacaaggactctttttgtagatacagaaatttgcattattctgatgaccgagcaagaccctttggtcttcccaccaggaatattaacaaagcaaggggatgagggcgttggtggtctctaatgacccatttgcagaagtcatctacagagtcagtgcttcattcctgttctccattggttactacaagattagtggattaaaaagcaaagttacctggcttgacattgagatttagtttttttctgcctgaccatagtcagaagacatcagtagttttcgttaagctgtgaccccagctgaagtccattctttcaacaagtatctattaaaatgcgtattctgtgccagcctcgttaagtgctgctgatgcagcagatctgg

SEQ ID NO: 101363 - DNA, 1035 bp, Homo sapiens
cagtggagtttgcaagtagaatatagggattacattttgacgtgtttgtgagcttctagttttgtatcatagagagacttcaggaaaatgcaagtggagatcactttccaaagaagacaagattggcaggttaatctgaacactcatttgttaagagcatgttttaattgaccttggactgtgctctttccctattgctttggacttttgggctgggatgggtggatagtgaggactgcaaatagtctttcgttactcctttttctttccaaatctcccaagggtaagtgattggagcctcagtctaccactttgaaaaggttgccaagaccagaccgtggcttcagaccatggcttcagtgcttctagcagtcagagagtcagtggtttcttttctctatgaagaaccatgaactaattctgagaaggtgaacttaaagagagcagaaacctttaaaaaaaaaaagttttaactaattcataaaggtctttcttctgatgatcagagtgctagaatacagattgggtatttggagaagagatggaatatatttttttttaagttgatgctttttctagaactgttggatattgacagaaattcctctaagctctactagctacccaaaagatgttggtgtcctgaaaggtatggaaaatagagttatggtcatgtagggttttaaaagaactaaaagaggctttaaaagtccaaaaagaaaaaaaaatccatagctatgtggtatgtttttttaaatgattgcttctgaatccacctctttttcccctttttgctttctgcagtgaacacctacctcttcatgatgcaagcccaaggcattctgatccgggacaacgtgagaacaatcggtgctcaggtttatgagcaggtgcttcggagtgcttatgccaagaggaacagcagtgtaaatgactcaggtatatttttagtaaagaggtggtctgattagaatgtctcctcccaagagaggtaaattcggttgcaataattattttcaatgggaaaagcgcatt

SEQ ID NO: 101364 - DNA, 1376 bp, Homo sapiens
tgcagaaataccccctagaacaaagaagtcagcaaaaacaaaacaaaacaaaaaacaccacttaagggtaagcacacaaacacatacaaatataaggacatacatcataggtattgtaatgttccaatcccataattttggaatgattacataggtggaatacagaagtatccctgcttttcagcatgactgcccttgatgactcatcaaaaaacagcagtgctagtcatcttagacacagaggatgtgtgccatttagacttgttcttttaaatagtgaaaattattgctttatggttttattctgtgccccccgccctcatgcccctatgggccagagaggcagttcaccaacttctctccagttgtgcctccccttccttcctgtgactttagggagtttgtacgcatctgctctagtcctagaaccatggggccttcatagcccctgcgcagtagccaagagcaatgggccttcttacggaaggaagagctcagttggcaagtatatcctgagctgagttgtgaaggcacacattcatacctctctttatttttaatggggttagcacagtcttcaatcaatagcttaacttcatctctgcttttatttctgctcctagcataaattatttagcacaaatgcagacataatctcagaaattacttagtattagtgtcctgctgtgagcatcattttcttgagtgtgttgtgttctaaccgcaaattagcaaaagacccttcaagaaagtctttctgtggattcatttagggggaatttagaaggttgtagtcagtgctacctgatcacttttattttcagtgaaattttgttttattcatagtatagttaatagctttcctgtaacacacacacacacactctctctctctacatatatatgtattatgtacatttttaaaagtcactttttacctggtaatatcttaatcccttaaggatttgtcagttggcccatcggtggactgagtcactttatgagtagggattccgaaaatgccaagctttgtctgggggggttgggttgggggaggatgcaataataaaaactctaaccttgaagatgcggggagggcctacagacatgttggaattcaacaattaggtatattttagtgtagcctcatagtgcagcgacccagctgtaaagatgaagtcactcattcctgtaatgatttgctagcttgttgaactaaagtctagagttgaaaattctgctccttttgaacagtgatctaattgtgaaacggacagttggctactgacagttttcaaatattagccagttgctgattttaaaaataactgtgagaaaggaagaccaaggtgagaagagactaaaaatcaaacagt

SEQ ID NO: 101365 - DNA, 2000 bp, Homo sapiens
gtcaggctccatctctttttggtttgcctctactctttggaagtaccctgcaggagttctggctaagaactggggcccttcccccatggtgtgtcctgaactttaatctttgtcccccacggtgtgtcctgaactttaatctttgtcttcttagtacatgggattggtgaagaaacctgctgtgctattcagaggctttctgcttggtttcagccttctgacctgtgcatctttgggattttgtaaaatgtcttcagggtaaaacactcagttcttttcacaggaatcctaggcccttgtctctatttttctttcttcaggcctgagacattaccatgagctctgctggtttctctgcctgtgaatagtggctctggtcatgttcccaggctgcttttctgtttcctcagcctccttcctggcacctagcattggcagattccctgaggggcaaagcagttgtggcatattggcttgctcctaaagggtttacccttccggattgtgtctcttcaagtcatagtagcttccacagttctccaaagtcttcagactttgaaaaaaaaaatttttttttttttaattttctctggctgttggagttgtttctctgagggatctctggtctgccacaggctctcagtcatagccagaagcagaggctactttatgcaaatcttgcacatgtgcattgttacttatgttgcagaaaaggtgatgctagtctgtgctccatttactaaggaagaaatattcagtttatagggaatcgaaaataaattatctgtttattttattttattttttattttttcccaggacagagtcttgctctgttacccaggctggagtgcagtggtgcaatcttggctcactgcaacctccgcctcccgagttcaagcaattctcctgcctcagcctcccgagtagctgggattacacgcgcctgccaccacacccggctaatttttgtatttttagtagagacagggtttcaccatgttggccaggctggtctcgaactactgaccttatgatccgcccacctcagcctctcaaagtgctgggattacaggcatgagccaccgcgcccagcatgtttattaatccaataaatgtgaaccagcaaatataaacttaacgtttatgcattactgctgtactttctaacagtgtcagtggttaatttaaaagtcagtagaagttaagtgatttgtctaaggcagagtttctcaaccttggcactgttgacatgctgctttgttgttgaggctgtcctgtgccttgtaggatgttttgcagcctctgtggcctttacccaagagatgccagtagcacctttctcccgcagtggtgacaacgaaaaatgcccccagatactgccaaatgtcccctgggaagcaaaagcacccctaattgagaactactggcctaaaggaagggaatagttttcctaatttgatataatgccagaaaagcagaattggattttgagttactcaagtcattgtctctgaccattggactatatgccagcttcattcttttttttttctttggtaaagatggggtctcgctgtgtcacccaggctggagtatagaggcataattatagctcattgcagcctcgaacttctgggctgaagggatccttccacctcagccttgtgggtctctggggctgtaggtgtgcaccaccacacttggcttttttttttttttttttttttttgggcagagacaaggtcttgctatgttgcctatgcaacatagcaagaacccttggcctcaagaggtcctcttgcctcggtctcccaaagtgctgaggttacaggcatgagccactccacctggcccagcttcattttttactgacaatttgatggtaaattctagggtcctaaaaatggttgtaagagtaaatgtattttttttttaaccattggcttgccatctgtgaattgggaacttaggtcacttggttgcttattctagggtta

SEQ ID NO: 101366 - DNA, 1039 bp, Homo sapiens
aaaggatatactcagcctcctaggcaatgccagcactacaactgagtcccattctagttgttattccaaggattttcaccagtttacatcaggaattttcataaagttggcattggatgatgatatggtgataccaagatattttctattgtttttgttttgttttgttttttgagacagggtctcgctctgtcacccaggctggaatgcagtgatgcgatcatagctcactgcagccttgacttcctgggctcaggtgatcctcctgcctcagcctcctgagtagttgggactacaggcacgcgccaccatgcctggctacttttttttttttcttttgtagagacaggctctcactttgttgcccaggctgggatgttttcttttggatgggagtgaaaggcttatgtataaatagaaacagcacactcaacatacctattgtttttataaggcacactacagtgaatacattaaaaaaaaaacagtaggtgagaatactctgaagatagtgagaaagcataattgtaggggacatagtttttaaatggttgaattactgtctgaggcctctttacagacatggggtaagtgggatgccaaggtgtgttgttgccaggagaatcaggttatatgtacctttgggtggcagcaaggataaatcaggacaaagggcattcattcattgtagcttcataatcacagtgtgataaaatcagtcatttggtgatcattacaggtcagtcactgcctagggttttgttttttccccggtatctttattttggattttaaaaataatacattcagtgtataaaatttgggaaatacagcgaagcataaggaaaataaagacaatctaaaacctcataacccaaagataacacactgttaacattttggtgctttttcttctggatctttttttaggggagtatgtgtaatttttcaaaaacgtaattgagcttacattatatgtacagatttatatactaactaaaaatgttaaaactgtagtctagaggcaaagtgactgtca

SEQ ID NO: 101367 - DNA, 1051 bp, Homo sapiens
taaaccttccaggctgtgctccctcaaaggcgccgctgcgcttgaggagcaggtgctgtggctgctgaagtcaggtgctctgggagcagacaacaactgcctgggtgtgtagcacctgtgtccttttggctcccctggccttgtcttctgagactctgttgttaatttctttagctgtttatgtcagctttgaccaaagcccactgcaaagcttagaagggtaaggaggcaacaatatccctttgaagacttattttggcacagattttgtgatttgtgaatagtaacattcctcagtagccacaaattaaacaacatcgatctaattttggtattaattagttgtataattaaaatagtaaaaccatctgcatagattgaagctatagtttcaggttgtattatatgtgtgaaaaaccgactcttcattgtgaattttgagtagacttcccagtagattatttatgtaagctgtgtcatcagaaacattccagaatgaatcacgtttaattaggatctaacaaatgttaccacctttgttctgttgaacaatatttttaaaccattaaatcaacttggttgataaaaggaaattgcagtaatttattcataaccctttcatcacaagtgttttcacttgtgtccttgtcattgtatacacagatatttgaaaattttgcacctcaggaattgctgggctgggagaaaaaggatggcagcaatttaaatctgtatttgtgctagaataatcttttacaatctctttgctataagatcttttcctggccagttctgttttccccactataacgaaacatcctgtcttaatataagattatttctggcaagggattcttgaaagctgtaaagaaaacatacctgctgtctttaccgataatgtggaaaacttcatgggaaattctagccccttcgatgtcaagtctatttaatctcattcctttactattaataaatttaaatagatgaatttcaaatctcattaaatgttacaacagtatgtctaattagtttttttctttctttgattgga

SEQ ID NO: 101368 - DNA, 1025 bp, Homo sapiens
atcttttctaaagagggatgaggaagtatttactttgtgaaattggaaaaccgtgtggttggtgtggaaaataagcatgttattaataaacagctagtcttgtgctccatactcttggatgtaaggtagaaataaccttgcctctattgctgagatttaaaaaaataaaaagctaggctactacccgtgccttcctcgtccacaacacaggcacagggtggcaggtagtgatgagaaacaggctgccaagatggtccctggatgactaggaggtgtgtgatgtgcgtccagttgtctggatggggcaactggaatccttcattgtgtggttcatgcttgtgtgtgtgtgtgaatgcgagagtgggaggaagttcaatgttttggctttggtgtgggattaattttctcttcgattgttaatttggcatacctgactttttcattctggtttaaagtattagaaatcttaagatttgtgtgaattagaagattgggatttatttgaatttcatttggcactagggaaaattcactttaggtaagagctactttttgggttggctttatgttcaaagcagttttttccttaagagtttcattttattatggaaattttcttttttctttttttatttttttgagatggagttttgctctgtcccccaggccggagtgtggtgccaccgtctcggctcactgcaacctccactttccaggttcaagcaattctcccacctcagcctcccgagtatctgggattacaggtgcgtgccaccatgcccggctaatttttgtagtttttactagagatggggtttcgccatgttggccaggctggtcttgaactcctgacttcaggtaatctgcctgcctctgcctctcgagtagctgggattataggcatgagccaccgcgcccggctggaaatttccaaacatataaaagtaaacttaatagtacagtataatggaccccatgaacaaaagtaatttttctaacctcaaaagcaggggcagtttatttaa

SEQ ID NO: 101369 - DNA, 1661 bp, Homo sapiens
ctgcaacctctgccccccaggttcaaaggattctcctgcttcagcctccagaatagctgggattataggcgcttgccaccactggctaatttttgtatttttagtagagatggggttttaccatgttggccaggttcgtctcgaactcccgacctcaagtgatccacccacctcagtctcccaaagtgctaggattacaggcgtgagccaccgtgcctggccgggagttgtgtttgtattgttaattttggaagtagtgttttatatcagcaatttaaaaggagaaggttgggacagaaagtgagagagtgaaagagagaaagtggtggatttgataaggagcaaggtaataatgttgcataaaaatgtgatgtcccttctcttcaaccctctaccctctggcctttatgattctcatttatttaatcacttgttttatttgcaatgttgaaatatccctattcccttcagggttctgcagaaaacttttgaacttatttatgacctgttaacttaaaaaaaaatccgagagctcagagtacttccgtactccagtctgatcaggtcttttaaaagataacagaagcgagctatttataaatatacatatgaggtgctgatttaaaatcttaataagtttatggtaccatcatatggcaaggttgtgtagaggttactgaccttagcaaattgtcgaaacagttatcggtttcaagagaggtgcctgtgcatggttaggggtaattgtttatgcattgatgactttttttttttttttttgagatggagtctcgctctgttgcccaggctagagtgcagtggcgcaatctcagctcactgcaacctccgcctcctgggttcaagcaattctcctgcctcagcctcctgagttgctgggattacgggcacctgccaccacacccggctaatttttgatggggtttcaccatgttggtcaggctggtcttgaactcctgacctcgtggtctgcccaccttggcctcccatagtgctgggattacagacatgagccattgcgcctggccgatgacattttattaattgaaattctgttctacatttaaactaatttttctctttccttgattactgaagaaaagagatggggaatgattttgacatttttggcctgcttagttccaagagaaatttgatttatggctggcttttggaaggcaggagccagtaattctaatcttacctgatttgatcgaatgaccttgagcaagtgacttgatttcaatgatctgatactttcaaaaaatcccaaagccctttgaaaaactagaactgcatcttagtcaatcttttagagaatttttaagaaatcatacctcaataaagctagtgagatgctttcatatatagaatgttgataattcatttacattctacataaacattggtcctaagattttaatttatttttatcttactattttttgagatgaagtctctcgctctgtcacccaggctggagtgcagtggtatgatcttggctcactgcaacctctgcctcctgggttcaagtgatcctcctgcctcagcttcccaagtagctgggattacaggcgcctgccaccatgcccagctatttttttttttttttttgtatttttagtagagacggggttttacca

SEQ ID NO: 101370 - DNA, 1396 bp, Homo sapiens
gaggtccacccccattcaatctcctgctaatcccctgagcgtcccatgcctcttccccatctcccccccccccacctcgcgtacccacaagggcacatccttgtcacctttgcccccagccccccagactttcagccacagcttctttctcaactgaagacctggggaaggggtgctgtctgtgttctttcttccacttctgccctctcctagccttgagggtagatggtgtggttcttcagtattggatagtgcctgctctgcggacaaaggagaagtttaaattgtccgtagagaaggggatatgattggggcctttgggaaatggtaccaggtgagaagggggagcatggaggaaagatgtaatgggtactccttcttttcaaagtcttatcctttaaaggaaaggcggtctctggagaaactgaccctcccacccctcccccgcctgccccaagcatagtcttttataagaccacagggcaccagttaggacaggaagagatcagaaggaaagacagcatgaaggttaagagcggaggacacagaggtcagacttggattccaatctctgccctgtatgaccttgggcaggttactaagcctttgcatttctcctctgtaaaatgggaatgtgagtcccaatctcatacagtgttaaggatggaagtagatacatgttctttaaaagcacttaccactgtacctggtgcttgaagagttttaaaaataagtaaataaaggcagctattacatgtaacttccaggaagaagggagttaggtggaacgcttaaggaatgtgtttgcctgacttggcatcactatgaggaaacctcagtttatggtgaaaaatgatcagaagatgctgctggggtaggggcagggagagtaaattctgctagaaaaattttggattatatggattttaggaaagggttgatggtttagctgtagggaaatgccttttaggattgtagcaataactagtgccattctctgttgacctgtcaacgcagaactagctgaatagagaaatttccagatagagcaggagatcgtctcctgattattttttaagcatattttacttgtggttaatgttgatgttttgaactatcaactagatctgggaagatagaacaggcagcatcagattgccttgtttacaaagtgtcatcacgaaaagtgttcctctaggaaggcataatatgtggcctgatggatttgatgagtagattgtaaaagggttgggattctggcagaacaagaagagataactaattagtggaattaactgagaaaagagttcattagcatgttggctattagactctaataaaaatgggtgtgaaaagatgggatttggacctagaggcagtcttagagccataatcc

SEQ ID NO: 101371 - DNA, 1085 bp, Homo sapiens
aaaaatcccccacaaaagatgctattctctaatttccccatcttctttttctttctttttttttaagacagagtcttcctctgtcacccaggctggagtgcagtagtgtgatctccactgcaaactctgcctcctgggttcaagcgattctcctgccttagcctcttgagtagctggaattacaggcatgtgccaccacacccggctaatttttgtatttttgtagagatggggtttcaccttgttggccaagctggtcttgaactcctgacctcaagtgattcacccgcctcagcctcccaatcatttctccatcttcttcctcttcttccacacctctgatataaaggacattattacaccttattaaaacttcacccagatgtccagacaatgctccatctatgtattcttctgtatttgcaagctgcatgttcatgtagccatctacagataccaggtagccctagtactccattccccgcttaagtttcaccatccttggctttcctgttactccactgaggaaagatctgggattgagacataaactcatcatcgtaaccacaggcaaatgctatgggcaaatgctgcaggccgctgaccaggctgaccaggctactgactacagcagctaccacaggtcctgagccactgagcatcaggagaaaactatgttcaagattttatagtaagaaatgtatttggtaacattccatgattttatgccatagaaggctcagccaacattccatgattccacatagaagggggtttagctaacattccttaagtctgtacagatgagggtgctctgtagacattccataacgataagcaaaaaggttctgcaaacattcaatgattttatacatggacagatgttctgcaaacggttcaaaattcatgctacaagaaaggattctagccaggcgcggtggctcacacccgtattcccagcactttgggaggctgaggcggtcagatcacctgaggtcaggagtttgcgaccagtctggccaacatggtgaaaccctgtcttcactaaaaatacaaaaaatagccggccatggtgatgggaacct

SEQ ID NO: 101372 - DNA, 1055 bp, Homo sapiens
ggctaaaatgtgggtggagacatgtaaggcacagtaaataaagtcttactaaggtcagccaaagctttttatcagtttattatattgcagtcacttttactagtttctacttgcctactgatggtatttaatttttcctgatcactgctgatgtttagaaattaactttcattgcctggtagatctttagtggagtagtaattctttcacaagatagttattgtttagattagctttggaaatgattgtttagactctgttcactagcctccccctcctcccatcaccccagcagtcctactaccttggttcagactctcctgtattttccctggacttcagtactaagtgccagatcctggcttgtgaggcttcacattgtcatctatctcatttatgccttatgacctccaggtgatgccgtattttaaggaatgggcaccactggatagtgttgacctcgagtacaggtttcaaaaccagttttactcaaaaagttcttgttctgtttttagcatgttttttagcaatatatcttggtagattctaacaaccttagctagtaagatagtcatagagctctaagaataggagccttgctcattaacattcctttctgctattaggcatattgaaaagaacctatgtgactaatacccataattctgggacattcggtaaaggctctaagaactactccaaggaatttacagttgtgtggtcagttttatagcttcttacataaatttgttatcaaaattatagttggtgtgtatttagatattatacacatgaaaattaaaatgataattcttataatttcatttggaatttcaagctcctcatgtttcttgaatgtctgggtaactgcagcttgctgaacaccagtgcttctattaggacttagagcagacattgttggtggcttaccaaagagtcatttcccccttcttccttgaaaatagaaccccaaatttgatcaggtatcttgccacagtgtgctcaaggaagatgggcccctccaagtcaagattggtctttgccatcatgttaat

SEQ ID NO: 101373 - DNA, 1066 bp, Homo sapiens
tatcctaatagtgtggactttggatgtgaaacacagttaattccttcagtgcctgtctgttgggcatcttccatctgacgggcattatgtcagggaccgtgttgtgcgaaagcaggtggggtcattgcccagaatgagcctgcagcctcatgggaaagtaagacatcagtacataaataagtgcaaaattgcagtcttgtcaaccgctacaagagagggtgactgtgcactgagagcacagactaggatctgggaagagttgaaatgtcctgagatcttgggatgatgaaagcttaacaagcaaagagggagcacaacctgctcgaagccaccagtgggactggaacccagagaacaaaggcgagcatggtgccagatgagcccagaggcctccccaggagtcgaatcattcagggtgggggctagctgcattttaagtggaaataggggtccaggtgaaggcagcacaatcagatttgtcttttgggaagatcattctggaaagacgggagagtggagggaaaggggccctggggggttgaggagacttgtgcgaagctatgcagtgtttcagatgaaagatggtgtgagtgacgggacactgcagtaagtgcgggggtgcaggaagactcccgggctcccagcttgccacacaggttgggcagtggtgccttttacagagaatcaagtctgcacggagggccaggtgtgcaggccgtgccttcactgacaggaatggcttttctaatcatttccctgatttctgctctttcaaacagggtaacttctttcaaaatattggttccatcaccctgtttgctgtttttgggacggcaatctccgcttttgtagtaggtggaggaatttattttctgggtcaggtaagaaaatcatctttgaaacactttgaaagtcttacattcttagagctagtgcagggaggtgggaaggtgaaatggggccactttgtggggcctgggtttcacccttaaggtaaattccttctggaaggaaatcctagcttcatatgaggcacagtagaggcgtgctaaattgtttcaaagtg

SEQ ID NO: 101374 - DNA, 2145 bp, Homo sapiens
tgcatgtcacattcttttcctttattgtcagttgcagaaagtttgcctgtctcagttctgaaaattaagttgagggtcaggtatctgagtgacgggcagatttctttaacacatcagctgctttcttctctcaatagccaaagcccattccattggattttcacctatattgcagctttgatggcaccagaataaatctgtctgtcatgcagctttcttcattgctcagcttctagtattaagtaagaataaacttaaggaaactacagttaattgggcttgaagaatgtagcattcttttccatactctcgttgcatgccgatggaatgcatgtttcaactaaggcttaggagcttttatttttcaagtggtttgggaactgaagattaatgtccttattagttttaataaagcactaatggacatttaaatcttggctgttctccagggttttttttttgtgtgtgtctgtgtgtttgtgtgttttattttacaggctgatgtaatctctaaactcaacatgacagacaggtaaatccttcatactgtaacacccatgcgactgcttttcagacaggggaaatgtttctccacattgcttcctgggtgtggtactgttctattctctctctgtgtatttatttttggtaaggatttctgccatagaatcttactctgagttaatttgtatctctgaaatgaatcaaaagtatcctaaagacttttgaagatccctagtggggcattgctgattggaatgatttagtttaagcttgggagggagtaactctgctcagctaactgccctgcctgtgtgcacgcgtacactgtaccattgtcttcttatttacaagacttttcagtcgccgtaacaaaaagtcttcttgacagattagagatggagagggggagtgacggagaaactttcctctgggattcccacgaagcctgtggtgggggaagcagggccaagacctctattgtggttattgtagaaagcccctccatctgaagccactcccgtgagcacttcccatgagccccatccaggatttcccagaattgcatagtgagaagcaacctcactaggttgaggcagttgtctctcagaaggtaccagatctagtgctgaaaaagtgcccatgctgagcatagtctgggttcccccctctgagagcagacagccttgctcagtgtgtctgcatttggtcttgtgacatggctggggagctgggcagcagggtcacatgttcgtccccagatccttgccatggggccagtcagagctttcaggatttagcagcagtttagcaacttgggactagaatctgggaacccttttcatgggaactgtgtctctgataacaaatccaattctatttctacctccactcaccacccaccccagcccaggacaattttggagcttttgttgtaagacagttttgatacataaacaagtagtcctattccatgagagctggaaataaagcagaactgatgtcctgtgtttggtaggtattttgcaaataaaaagaaatgcccagtaaaggaaggtatcacagtattcaaaccttccacttgttttgggggcaactggttagagatacagacaatgctggataacttcctgtgaagttgaattgaatcagtggttgggatgttcaggtggaggacaggaaaggaattgccctgtagacacactgacttagagccgggtagtgttttcctctccgtgtgcagaagtttcctttgctgttagaaagtgacgatccctcagatggggactgctctggggtcgcaaacccacacagccgcagggcctggcagagcacttaacagagggaagctggccagctgtgagtctagacatggggcagcggccagtgggagaacacaccctgtatgaagggacagccacttctcagcgccaactcatgattaccatgtggaaatctgggcccagaattggtggctattttaaatacttttttttcaaaaagatgctgggtttctagatttttatagggaattttccagtttttcaatgttgacaacttgctcaatttttcacaaataccatgcagaccaaacatgagaggggaccacagactttttgcaacctctgcactgtagaaaacata

SEQ ID NO: 101375 - DNA, 1386 bp, Homo sapiens
tgtgacatcctttccttttctttccctgcccctagttgttgttttcaccacatttgcccagtttttgccctgtttttgcccttcctttgcaggaggagcttaccaaatactgcctgatggcaagaggtgctcaacaggccttaaaaaacaaccaaacttataagtatttttgttattctaaatgtagtacatatattcttaccaaatttaggaaatacacaagcaaaaaagagagaagtatcacacacattgctactacctagagataattatggttgataatttggtgtaaatatatatacattttatttcaataggcttataccccaaatattgtactctattttccattgaacacaattgataaaacagtcttctggaaaataattttactggttacggtgtattcctttttctgggtttactatgatctacttaaccagtttcctactattggctttttcatgtttctcttggcagaaatttctatagctttattaggatattatccaacatcatgccacaagacctttaaaaaatccaatggcagtattttttcttatttaagatctactctgaaagctgcctagcattctggtttttacttttatctcgtatcctggctacacatattgaacatttgtgacaaggaattttgcctaacttggaggtgacatcatgagttatttttatgcattgggagctaaactcaattgctttgtctcttgatttttttaaagaaaaataatttttcagaggtaggatcttttctgagcttttccagttgtctctattataaaagccaaagataggagactttttctatttaagatgggaaatgatggagtcatcgttggtagccagaggttcttactggaaaagtgctttggaaacccaagatggggccaggcatggtggctcatgcctgtaatcccagcactttggaaggccaaggcaggtggatcacctgaggtcaggagtttgagaccagccttgccaacgtggtgaaaccctgtatctactaaaaatacaaaaattagcccggcatggtggtaggtccctgtaatcccatctacttgggaggctgaggcaggaggattgcttgaacctgggaggcggaggttgtagtgagccgagatcgcaccactgcactccagccagagcgacagagcaagactgtctcaaaaaaaaaaaaaagaaagaaaagaaaccaagatcgtctgtggtaacagttcccacagttggatctgtggagcatgcatgtatagtttccagtctcctcgtccaccagcagcagtgctactgctgaggccacggttggatctgtggagcatgcatatatagtttccagcctcttcctctaccagcagcactgccactgctgag

SEQ ID NO: 101376 - DNA, 1052 bp, Homo sapiens
tttattctttaaggtatgagaaacatgaccttaagaaacaaaatgtagaaaattaccaggccagaaagagtccaaattctactttcattacctggagttcagaaaccattgccccagccctggatctgctgttaaccctttgtgtgaccttacccagtgactcactctctttgggcctcaggctactctgtataaaaagcagtgaaaccagcctgggtacctgctgtggtagtgatgtgggctgaggctgggcactgtatgtgtgtgacctgcagatccatttttgggaactatgggtgatcatggccttcaaaagcacttttccaatatgagcccttgttggctgccacattcctcaaggtgggatgttaacctgtgatctgctagaaagaagggggattggggagattgtttgttcagatgagtctgcaaagctttcacgtgaagaaagttagatttcttttttgcaagacttctcagacctttattatgttattttgggctgtgaatttcctcgaaaggctttctgagtttatttgaccaagctaccttttcatcttattctgctttaaaatgataccaatcctggggcctggcatggtggttcatgtctgtaatcccagcactttgggaggccaaggcaggtggatcacttgagggtaagagttccataccagcctggctaacatggtgaaaccccgtctctactaaaaatacaaaaaaaaattagctgggcacggtggtgcgcatctgtagtcccagctacttgggaggctgacgcaggagaattgcttgaaccctggagacagaggttgcagtgagctgagatcgcaccactgcactccagcctgagcaacagagcgagactccatctcaaaaataataataataataaaatgatatcgattcatgacatggtgattgatgaagctgaatattactgttgactattctttgtttcatttactgagtcaacaaaaaggtattgactgtcttttgtgtgggaggctctgctttaagccccggacataaggcagcgaacaagatggaca

SEQ ID NO: 101377 - DNA, 1050 bp, Homo sapiens
aaagggtgggggggtagtgcagtgggccctcaatagccacaggttccacatctgccaaccctatccctggatgtcagtgatggtccacacctttttatctttggtgctgtgaaggggactttacatggcttattttcactcaccctcctaacagttctgtgagtggctactattagtcccactgtacagaagcggaaactgaggctctgatgggggatgtaatgtggctcaaggtcacccagctagtaatgaggctgccagagcgaagggacccatagtattttttctgaagcctctgggaggcttcaggaattcatttattttcctttttcttaaaccctctaatgctctaggccccagggccttgcaggcattgtgagatctgagttggggatcacacggcagtgctttctgttctgttctctccctctctaggcatcatggccatccttttctcaggcatcgtgatgtcccactacacgcaccataacctctccccagtcacccagatcctcatgcagcagaccctccgcaccgtggccttcttatgtggtgagttctgcttctgtgtggccgtgagcaggcccacccagagctgatcttgcttccttatcctgtttgagaagtcagttgagactttccctggcagcagggcagcagctcctcagagccagatccctcactcccttatcttttgtttgttcctctggctttgaaatttcataaagtaaaccaaacacctaataaatgaacatctggcgcctacaatttaaagaccaaaaatagtgagaaccaattatgaacatttgatacatgcatttttaatgtattaatgtgacatttccaaaaatgtattccttggaaataaaatattaatgatggtttggtgaaaatggctccatagtcaagcaaggcatggggctcacacctgtaatcccagctgcttgggagactgagaggatcacttgagcccaggagttcaaggctgcagtgggctatgatcttaaaaaaaaaaaaaaaaagaaagaaagaaaaacaaagcttttgtag

SEQ ID NO: 101378 - DNA, 1560 bp, Homo sapiens
cgtcacccatgctagggtccccaaagcactggggcaggggccagagcagcagcacccagtgctccctcctctactctgacctggggccccagcatcctggagcacacgctccacgcacacacaccccagccctgtcccaggggcctggccccctcagccatctcagggtgaggagctgccagtcatgtccagatggaatgactcccatcctctcctcatctcccctttgacgagcctcaaactgctcagctcatcaaagagccattgccaacttccgtatgtggttctgggtcccagggagccttggaacctggcaccctggggtggtttaattcatcattaagaagcattcctgcttctcaagggacacagtggcctgcatgggccagcatggaccctgggctgatcatgtgcattcctgcttctctggggacacagtgggcccacatgggccagcatggaccctgggctagagcaagcacatctccatctcttccacctcaggcagtgtggctccagatgtcaggagggactgacctcaggaccttccaggttcctctgtgccaggaatgagaggccaggcccgatcctaccacctcgccttgaccctgaagtcagagcaggccagccaagcaggaagcacactgtttactttttgcatgaaaagtaaatgtgtacttgatagagctaaaatatgatcttttttaatttctcaaccccataatttgagccattgccttgcttaattttggtttccaccatttccttttagtggagaagagaggaagtcagagggtagggacctttgcctgcccctgggcgagtgcgggcagggatctgagaccagattgttctcgcacccctgccagaactcactctcccctgaagtttagggtcccatctcccagatgtaagttgttttgcaaactcagtttgccaggatttctttctttcctaatcttaaattcacagataaagcaatgaaaagagtcagatcccatttccgtctgccccctcgtcaccaggtgtgatagccccagccaggtcacacctggcctcacactttgagctgagacttgaaaacgatgctgtggcggaagagcatgtggggcttggtggaggggccccaggatttgttgggggcaaagggggtggcgggaccgttcccaggaggtaccagcacctgcctcgatctcctctgagcctcttctgccccctgtcggccaggtgaggtcagcagcctgggagagtgcccccaagagatgagggcaccccgtgttccttggcaatcttggctcaccttggtaacaaaaggccatagaagtctgtttttctgggtcagttttttttgcctgagaataacaaattgctgctgtctacctttagcacacccaataattctatttggggcagtgaatgcatagaagatataaaaatacgcagcttaactatatcttcctgcgtgtgtatttattttcttctgggtctaggccatggtacaggagaactgtggcgtgtaggaggaatacttcaggatgagtgaaggctggagccagggag

SEQ ID NO: 101379 - DNA, 1003 bp, Homo sapiens
agatagatatatatatatatatatatatatatatatatatatatatatatatatattaaaaagagagccatagaagatttggaaaaccttaaaatcactcaactgagttggaagaacatcagcaaattcacagtggcctcaggattcagccagacttaaacttgctcaagagctgaataactttctcccagaaaagcccactgcatataaatcccttaacattgtgtacatcacaaacagttatggctaaaatatagttagttcacaaggaagcggctttattttcaaactcttgccccactcctgctcttgtacccccacaaggaaaatccaggggttggtaattcacatgagaagctgaaggggccttcaggcttggaagcgcttaggcttagctgagcatctgaggagccgtctctctgatgggcacatgccgactcctgcccacttttagtgcaaaaagattgcaaatgttgcagatgagtcctggaaactggtgaagagaagaggattgagatggaggggcagtaggaatcccaaatgattttccttctgaaacgagactcaagaagtgtgaagtgcaaggttcctgctcagcaagctataggtccgacaggtgaggtccctgaattgtcataggttagcagtctgcagacacacagacctcgacacccgcgctcaccccctaagtgcacactggaggtaggtgtatagatagttactgcagggaagacagtggctctccaccagctcaagaaaaggaggcttcatgtctgttcctccctgccccaaactctcctctcccctcgggccatagtgagtggaggatacaacacgaatgggcgcgaggccctcccttggaagactaaagaacccagggcatttaataaatagctacataattcatttttttaaccacgttgaaacacacagcaagttgaatatttatttaaaaataaatctcaaaaatatctattgacagtacagtaagaggggcatgtgc

SEQ ID NO: 101380 - DNA, 1802 bp, Homo sapiens
ggtgaaaccccatctctactaaaaacagaaaaattagctgggcgtgttggcgggcgcctgtaatcccagctattcaggaggctgaggcaggagaatcgcttgaacccaggaggcggaggttgcagtgagccaagatcgcaccaccgcactccaccctgggcaaaagagcgagactccgtctcaaacaaaagaaaggagctgctgggtcatttccttgcacaattcctgagtgcttagcaagccccagctcctgcgtcttctgcctcccgcagggtgaggctgtcgagatccttccctgccctgccctctccccgccgccccacttcagagctggacatcctttgctttgacatagtctctgtcttgtgtctctgacagaaaaccccacctttcttttctactccctcccttctagacctacacgggcccttttgtttattatgtcaagtcgacattactggaagaggacatccgagccatcctgagctgcatgggctacacacctgagctgggcactgcatacaagctcagagagctcgtggagaccctccaggtgaagatggtctcctttgagctctttctggccaaagtcgagtgtgagcagatgctagaaatccactcacaagtgaaggacaagggctactccgagctggacattgtgagcgagcgcaagagcagtgcagaggatgtgcgcggctgctcggacgccctgcggcggcgggcagagggccgggagcacctgacggcctccatgtcacgagtggcactccagaagtcggccagcgagcgggcggccaaggactactacaagccccgcgtgaccaagccctcgaggtcagtggatgcctatgacagctactgggagagccggaagccacccctgaaggcctcattgagtcttcggaaggagcctgtggcaacggatgtgggggacgacctcaaggatgagatcatccgcccatccccttcgctgctgaccatggccagctccccccacggcagcccggatgtgcttccacccgcctcccccagcaacggcccggccctgctgcgcggtacctacttctccactcaggatgacgtggatctgtacacagactctgaacccagggccacctaccgtcggcaggatgctctgcggccggatgtgtggctgctcagaaacgatgcccactccctctaccacaagcgctcgccccctgccaaagagtccgccctctccaagtgccaaagctgcgggctgtcctgcagctcctccctctgccagcgctgtgacagcctgctcacctgtcctccagcttccaagcccagcgccttccccagcaaggcctcgactcatgacagcctggcccacggggcatctctgcgggagaagtacccaggccagactcagggcctcgaccgcctcccgcaccttcactccaaatccaagccctccaccacgcccacttcccgctgtggcttctgcaaccgcccaggcgccaccaacacctgcacccagtgttcaaaagtctcatgtgacgcctgcctcagcgcttaccattatgacccctgctacaaaaagagtgagctgcacaagttcatgcccaacaaccagctgaactacaagtccacccagctctcccatctcgtgtacagatagaccggcctcgccccttccagctccaagggctacatcaaccgacctttcgggtttcacggtgaagaagtactaacgcattgatctcagaggcggaggcctgcacttgaccatgtaggtggcagagatcgtgggctggctgtgtccacgtgggagttcactt

SEQ ID NO: 101381 - DNA, 1061 bp, Homo sapiens
aaggaaaaaatggagattcaagaaaccccactgagatccttcagtggcagggcctaaggcttgaagcctcaaccttaacaccttcactgtgtctatcacaggagtttgcatttgtttctgtagttgtgtgttctttgtagtccactcctatccctcattttttctggcttggaaggacttagtatttgaactgggaggagagagcaagttgttttttactccattatccattgatgtctttttaaaagttgatccatatttgtcgtcttgtctccatgatgcgtgacagaggttctctgtatgtcttgttctagcttttgctctgcatgcctgcaggaatgtctgaagccgaagaagcctgtctgtggggtgtgtcgcagcgctctggcacctggcgtccgagccgtggagctcgagcggcagatcgagagcacagagacttcttgccatggctgccgtaagaatgtatgtggaagtgatgtggaagagtccatgtctttccatgataagttggggtaaaacgtacagctgccatgttgttgctgaagttagagcatgactaggtcactaacagcacgcgtgcatgccaattacctgtggtgatggctgggctggtttgttttcataaccttactggtttttgtttctttttttaagagttggttaagtatatattttaggtttgaaagccatagaaatcagttatcccagttttttcctataaaagatcaattatggccaggcgcggtggctcattcctgtaaccccagctctttgggagtccgaggcaagagcttgaggctaggagttaagagaccagcctggacaacatagtgagacctcatctttacaaaaaaataaaattagccgggtgtggtggtatgtacctgtaggcccagctactcaggaggcagaggccagaggatcacttgagcccaggagtttgggattacagtgatctatgatcatgccactgcactccagcctggctgacagcaagaccctgtctcttaaaaaaaagtcaatatgaaatcattggattgtaataacaatagctaaca

SEQ ID NO: 101382 - DNA, 1045 bp, Homo sapiens
aagagaatttagattttaaagattatttctcagaggctggtgatagatactttaaccagggttagtggcttttatatgttttacctaaaggatcacttttctctgctgcacataacagaatgtggtttttggcttgctgtaaggagactagtttaaatgctagtatagaaaacttttaaaaacatcctagatttggagcttgtctgtgagcagacagcctatcatgaataggagcaaacctctaggagagttattttagagtggaagtggatatcctgatttagtcgaataaaatagcagccttggtattaatgggaaatctgcaataatcagggtttcagccccatcagcgtagtcaggagtttggtgagattatttgccagggtggtgtaggtctagttttctttgtgcccttgtttgggactatattttgcctgttgcaaggtcctcactaacttatgggctctgattcttcctatttgagttcttcctgtccaagatccggtcccacgtggctacttgttccaaataccagaattacatcatggaaggtgtgaaggccaccattaaggatgcatctcttcagccaaggtaaatgactcagtctccccttaggtggaggtcatctcttgctattaatacaaagaggttgcatgcccaggggtttagttgtatgaattgttatgctggctaaagctgatacaagtattttgggaggagtatgcaagggaggactctggtgttcacttcagatgttagctgagctatattctttttttcttttttgagacagagtctcgctctgttgcccaggctggtgtgcagtggtgcaatctcagctcactgcaacctctgcctcccgggttcaagcgattctcctgcctcaacctcccaagtagctgggattacaggcacctgccaccatgcctggctaaattttgtattttttagtagagacagggtttgtcatgttggtcaggctggtcttgaactcctgatctcaggtgatccgcctgctttggcctcccaaagtgctgcgattaca

SEQ ID NO: 101383 - DNA, 1493 bp, Homo sapiens
gtggaagataatctagcttctccacctcttgtttcacactcattcctcccatccagtgtttgtctctcgggtccttcaagccagccaggaccttttctgggtcatgaatagcacaatgaagcaagtgtctcctttccttgtccccaaggtgtgcagactttggcagccgtgcacctgaccagagctgaagctcccgctgggctgtggggttgccagaagctggggttgccatcccggggtacatgtcaccagtcctcttggggttttgtaccatctgatgctggaagttttgattagtgatattttctactactacatatttagagttcactggttcagtcttaaatgcctgcatggtgcctttttaggataaggtataaccatacatttttggtggaagtgtttctgggttagggaagttaaagtctgtttatccgtaagtggggaggagggtcagctaagagaagtgggagggccagagctttttggttctgatttacaaattaatgaagtagtttcaaacaacgcggtcatgtttacctctccatttgggagcctgcctacattcttgttctagaagcacaaaaaatcctcagatgaattagaagaaagaggtttggggactcagcggatactagttcttttaccttctgcttggtaacttagattaaactgagcattgtttttctgtcacaaatgttttccttatgacactggtttcgacatgtaaaatgtgtttgaaaacctgctttgtagatgcagagagaagctataggaaacccagtaccacccctggtctgttctgacgagacatcgttcataaggcacagcacatcgcaagatgaacagttgttaataaaagctgttgctggaaacttgctttaggaacagctcaagaaccttggagttcatatttcacaaatattaataaatataagtccaagagctgtcagcctaatctgtaggagcagaacctctgattgaccaaaaggcatatgggtttaggttggttttttgatgtcatatgtctctgatggggctgcaagtgctacctcgcgcttgtacactgctgctgtggggctccgcgcctgccggtgaagagctgcagatgccgagaagccagcaaacacagggcccactggaaaaaaatagttttttcattagtatttctcgggaggacccaaaagttaaggtcagcttgttcactgtaatttctggaagaagttcactcagaccttcctgaattcagatcatctcagaagtctggagggaaatctggcgaaaccttcgtttgagggactgatgtgagtgtatgtccacctcactggtggcaccgagaaacttacttccttgtattaagtgcacttcttgtatttctaataagatgactttccagaaagtgagatttgttatgttctggcttttaaaaggtaaaatataaataaatttcataacttaatctaagtggtaagctatggttcttgttttcattc

SEQ ID NO: 101384 - DNA, 1052 bp, Homo sapiens
agggagagctctgtgtactttgctccttggatcctagcatccttaagaggcagataaaattatccccacttcataggagacaggttcagaaaatattcgctagatgccccacagctaacagcagagtatgaacttaaacacatccaggacctgaaacttgaccctgcggagcccctttactacaagccctcagcactgctgctgttacccgcacgtagcagaagccgcatgtctaaagccttgctatatggagcgctgccacttctcacctcccagagcctcccaactgtaacaagtgttctttttccagaggacaggcaccatgaggcccagctggtggcatcagctgagatttgacgccaaacaggactcagcaacaagcaagaacttcccttctagaaagggtaaccatcttctggagactccccaagcccatgctatggcaaatgtgttgaatgaaaacaagaaccatagcttaccacttagattaagttatgaaatttatttatattttaccttttaaaagccagaacataacaaatctcactttctggaaagtcatcttattagaaatacaagaagtgcacttaatacaaggaagtaagtttctcggtgccaccagtgaggtggacatacactcacatcagtccctcaaacgaaggtttcgccagatttccctccagacttctgagatgatctgaattcaggaaggtctgagtgaacttcttccagaaattacagtgaacaagctgaccttaacttttgggtcctcccgagaaatactaatgaaaaaactatttttttccagtgggccctgtgtttgctggcttctcggcatctgcagctcttcaccggcaggcgcggagccccacagcagcagtgtacaagcgcgaggtagcacttgcagccccatcagagacatatgacatcaaaaaaccaacctaaacccatatgccttttggtcaatcagaggttctgctcctacagattaggctgacagctcttggacttatatttattaatatttgtgaaatatgaactccaaggttctt

SEQ ID NO: 101385 - DNA, 1037 bp, Homo sapiens
aggctgagtgggtaacagggaggggagacttggccgagtcctgggtctgttttcatcctcaaatcttctcaggccgatttgagagagtgagacccctggggtcttggagccaggcctgggaaaagctacttcacgtcaggccaggggctgtagccctggcaacctccactccgcctggaaatcctccacctcggggcctctctttgcccagacctggcccaggaggagcacatgggagccgggaccttcccaacaatccttgccgttggctccacaaacctcagccagtcctgcaacctgggatgccttttccaccaggatgcctgctactgtcactgttgtcattagataattaatgaactataattagaaatcatatcaataaaatttcacagtctaaggctgttgaaataggtaccatcattatcctcattttagagctaaggacagttttgggcggtaggggaggtgcgggtgtcactgcctgaggtcacaccgtagcaggactgggattcaaacccccagacctccggttccagaggccaagcttttgtcaaagacatgcagtgaaacaggcttctcagaggttccagccagtcttcattgcaaaacaagagggaaaaccgaagccaggacaggctcggggacctggccctgcccctgcccctgcccccagtgcctagagaccccaaagcagcctctgctgagaggcccttcccaggatctcccacaggccagggctctgggccctgcaggaagtggccagggctgggacaggcctgctgctttgatcagctttacgagccagggctgtttacggagtctcaggcccccagccccctgccacccggggctgtgtcttgtcaccagcacttgggatattagcagtcccaggagagtctgctggccagacgggtcttggccccatttcctccagcctggcccgcaccttgcctcttagcctcagcctccggggacagggaggggcaggggtaggctgagagggtcccctcgggccagatacctcctgggctggg

SEQ ID NO: 101386 - DNA, 1037 bp, Homo sapiens; identical to SEQ ID NO: 101385

SEQ ID NO: 101387 - DNA, 1037 bp, Homo sapiens; identical to SEQ ID NO: 101385

SEQ ID NO: 101388 - DNA, 2127 bp, Homo sapiens
gggttactcagacctgccagctctcggagtccttggtggttgaacttggagaaagaccgcatgaagatacttgtaagcacacatgatccctctgaattgttttactttcctgtaactgcttttgcttttaaaaattgaagaagttttaaacagggctttcatttggtcatccttgcaatccattggggtctagtttggaatctgacaactggaacaaaaagaaccttgaatccggtgcatgccttggttttggtgctgctgctgcttcccaagatcctcagcagggattaagaaggaacccggtgtgcacagcagatccccgaaattggtgggcttgacctcctggcaaattgctgcgtctttccacttgctgttcaggaccactaaatgctgaaatgtggatgcataccgaaataaaagcaattcattgtgtactaaaggttttttttttttttttaatttagtatttgtgtaaaaccaccttttgaagcagcaactatcaagtctgaaaagcaattgatgtttccattaatctttttctggggggaaaaccttagttctaaggatttaacatcctgtaagtgaagtttaacataacagtattccataagcagcctttttattgtcagaccattgcctgattttaatataataaaaaaaaagtgtgcgttaatatttaacaggctgtacttttcttcctcttggcatattagggacagaatttaatgttttagatgctttgggattcaaattgacatcctaaagcaggggtcggcaaactttctaaaagggcctaaattagtaaatatatagactttgcaggccaagaggcaaaatctaaggacattgtgtaagtacttatattctgagagaaaacagatttcccaaatttttaattggtgaaattcaaagtggaattcagtttatttataatgctactggcccactaacgtgaggactggagttcttttaggagataacatgttgtttaactgggactcattagtgttccctgtcatcaagcctcttgcaaatgttcatctgtaaaaataattcttcatgctaaaagccatacagaatcagtcagtgggctagatttggcccatggatcatagtttgccaacccctgtcctaaagatggtaggtttttgttttgttttgttttgagacagagttttgctcttgttgcccaggctggagtgcaatggcgcgatctcagctcactgcaacctccacttcccagattcaagcaattctgctttagcctcccgaatagctgggattacaggcacccgccaccacacccagctaattttttgtagttttggtagagatgggggtttcactatggtgcccaggctggtcttgaactcctgacctcaggtgatccacccaccttggcttcccaaagtgctggaattacaggcgtgagccaccgtgcccagcccaagatggtagtttaaaaaagcgttcttcctttgatttaagtagcctcacaggtcttgagctattaagcctccactagaagccatttattggctggacttagtagtctattcagagaaaaaaaaaaatcatcggattgtcacatgtatttctgatgtttaaaaaaaatttttttttgatctgatgattaactatttgtctaccatctactgcatatgcagtgggaacgtgtctagtttttacccagagtttgaacttctgctgtagtcccaactacatacaggtacgatcttggtgccctgtggcaggagcaggctattccctctggctgttggggccagctcaggtgtgagaagagctggctgtaaggaaagggccaggttcttcccaacaggccaccctccagaaagccctgcccagatttctttggatggtctttggagtcctctgcagggactggtgcccttcagttctgaaagtacatacattgggccagggaaagctgtgggttcttcatcctcagtcagccctcccaagggaggagaggagaggttccaaaattatttcaggccagatatggtggcccactcctgtaatcctaacactgggaggccaaggcaggaggatcacttgagcccaggagtttgagaccagcctgagcaacatagtgagacccctgtc

SEQ ID NO: 101389 - DNA, 1057 bp, Homo sapiens
atgctgccttaacctgagaggtgctggctctgtggcaggcccttgtcactggagcaggtgtcctggccaccctttgccttggctgtccgtactgccctgcatgcacatctgtccccctgacctgggcgcagtgaagaggacaggtcctgagcccggcagccgccagcccagcagcggccattattgaagagccaagtagggctgggttgagtctcacccaagtgtcagtaccaccgtttccttatcccagatagtaatggttcagggcacaaaagggaaaggcaggctgactggagggagggactctagcaggtaggtattccgcatgtaaggtattaggattagcagcaggttcagcttaaaaagtacatcttactccagtttgcaccttagcttaaccccggcatatagctattttgtttgagagtctgagagtaatttgcttttgtttgccttgttgtaggtggacccaagagccatatcagtgctagcaaaatggcagaattcatatagcatcaaagttgtcctgcaagagcttcggcgcctaatgatgtctaaagaaaatatgaaactccctcagccgcccgaaggacagtgttacagcaattaatcaaaaagaaaaaccacaggcccttccccttccccccaattcgatttaatcagtcttcattttccacagtagtaaattttctagatacgtcttgtagacctcaaagtaccggaaaggaagctcccattcaaaggaaatttatcttaagatactgtaaatgatactaattttttgtccatttgaaatatataagttgtgctataacaaatcatcctgtcaagtgtaaccactgtccacgtagttgaacttctgggatcaagaaagtctatttaaattgattcccatcataactggtggggcacatctaactcaactgtgaaaagacacatcacacaatcaccttgctgctgattacacggcctggggtctctgccttctccccttaccctcccgcctcccaccctccctgcaacaacagccctctagcctggggggcttgttagagta

SEQ ID NO: 101390 - DNA, 1054 bp, Homo sapiens
ataaaagaaattgaatgtgggggatctgactgaagtgacccaccacaagctgctgccttttgagtttaaaacagtggggtcttcttgcagaatagcggagaccatgaatccttttactcgattttggtttcagctggaacagtgctgagtcaattcatttaccatgacgctgccccaggcactcccagaagagagattctgagtcaggccagactgctgggtaaaacttctcaccagaataacactcctaccgggtcgtaataaacgaaggggcccagtgtgctggtggtagccagcaataaggtgctgttgcagctcagccctgcttgcagtcactcggttggctacctacaatctgggttaacagctgcccggttctaacttctccagaccctgacagttaaaaagtgagtgcttcataaatggctatggtgatcagataaaatgtcagctgctgtctagtggaatacaagagcacttggcatggtttagataacataggacaggctttgaggtgccctaaaatggacttcccaaaattcttttgtctgtttattcaacagatatttactgagggcctattatgtcccatcgtggatagcaaacaaaatggacatagtctgtatccttcgggagcttccattcaagtcagggagagaaggctgttaaggagtaaataagacaatttcagatagcagtaagtgctatggaggaaattgtgtgatgtgatagtgtctggagaggtggtcaggaaagtgacatttcagctgagtcaaataatggaaagagctaaccctacagtgtcacaggcaggagagagagtgggctgttagtgcaaaggccctgtggtgggactctgcttggcatgttgaaataacaggataaaaggccttcatgtgcaagcaaggcttgttaaggagatgagttggagagacatggctttggatttgagatggtatgaggggaagccatcaaacaagtgtctggtatgaagtaggcattcagtaaatatttgttgaatgaatgaataagagtcttaaaaagaggagtatga

SEQ ID NO: 101391 - DNA, 1081 bp, Homo sapiens
gccgaagctgcccccagggggagccggctgccagctgccaccaccccaaagctgggacaaagaggcttctgtgtgcctgtctgccacccctgcccccattaaagcagcctcagacagcagcctggagtcactgccaccggcagaggccgcaagatcacggagccagggggagggctcctggtctcctaagatgattcctgacttctgtccaaagcagacatccctccctgctgggcagcgtgcaggcgccaggccttgaccattggacagatggcaagactgaggctcagcagagagctcacaggagctgcgttggggggatgcttgctgtgtcgtgggacccaccgggccctttacccagcagcccattttattaacttctcatagttaagggaggtaaatgtccccattctccatacctgggtgcgaagtctccctaaccctaaccctaaggttgcatcatcctgaatgactctagcgagtctctggctactcaccagcagccctgccttgcccctgccaccgtgtgaccttggggagttcttaccctcctctggaaggtcaggatggggtggggcctgttactgtggacatgaagtgagattgtccactttttgaaaaacagactttattttttagaacaagttttcaacttacagaaggatggggcagatagtacagagagtccccatatgcctggggcacgcagtttcctccattattcacatcctaaatcttacattagcggggcacatttgttacagtgtgtgccagtgttgatacattatcatgagctggagtccatggcttattcagattgccttagttcttccctaatgtccttcttctgttcctggatcccatccagggtatcacatggcctttagttgtcatgtccctttaggctcctcttgtccagttttttttgtttgtttgttttttgagacggagtctcactcttgccaggctggagtgcagtggcgcaatctcggcccactgcaacctccgcctcccaggttcaagcgattcttctgcctcagcctcccgagtagctgggactacaagcgcgcgccagcacgcc

SEQ ID NO: 101392 - DNA, 1081 bp, Homo sapiens; identical to SEQ ID NO: 101391

SEQ ID NO: 101393 - DNA, 1081 bp, Homo sapiens; identical to SEQ ID NO: 101391

SEQ ID NO: 101394 - DNA, 1081 bp, Homo sapiens; identical to SEQ ID NO: 101391

SEQ ID NO: 101395 - DNA, 1081 bp, Homo sapiens; identical to SEQ ID NO: 101391

SEQ ID NO: 101396 - DNA, 1069 bp, Homo sapiens
atcatggtgatccccaggctggggcggctgctggggcagtgggggtgctgcgtggctcaagagaaacagccctcgcctgagaattggggaaccaggagatctaggcccctgtgacctctgctatgtgacctctgttgaggtccttctccttcctgggcttcacggtcttcttctgcacaaaaggagccaagggcatgtaaccctggtgtgttccgttccccttctgagccttggtcttttcaaggggcaggggagggcagctgtcctggttctgggtcagggtaggtcaggagcagcttgctgttgtgtgacctggagaaggccttctctctccctgagcctcagtttccctatcatgacaaatggggaacccagtacttccttcccaaggtatgtcggtgagcggcacccagagacaaagccatggagttgtccgttaggattgtggttgggaatttgctcattctgcaagcatttactgagtgtcagggccctggtgagtgagccagacatggttctgggcctcccgacttcacatttaggtagggaaagacaaacgtagacaaggccacaggcatgagcaatgggcctcgtgtggggggagtgtggggtcagaggaggcatcatggatggcttcctggagatggaggtttccagggtgagatctgcaggaacagtgtcaggtgcacagggagtgaagagaacagcatgcacagagtcctaaaaagaagagagggtggacacaggaggagcccttctcacctgctctggccctgaccccttcacagggacctgcctggccccgctgcttaagtgggggcctgggctcctgacccagaatgtcgtcaaggtgatagggtgatggggaatagagggagggaccaggggcagcaggaacaggatagagcggggcgagagcgggatcttaggagccagacctctggccatggaattctggtctctgctgactagttgggtggctttgggctacttccttgaccactctgatggtcagttttctcatctgcaaaaggacatcacttcagcaggcgcctgatatgtagtaact

SEQ ID NO: 101397 - DNA, 1069 bp, Homo sapiens; identical to SEQ ID NO: 101396

SEQ ID NO: 101398 - DNA, 1069 bp, Homo sapiens; identical to SEQ ID NO: 101396

SEQ ID NO: 101399 - DNA, 1069 bp, Homo sapiens; identical to SEQ ID NO: 101396

SEQ ID NO: 101400 - DNA, 1069 bp, Homo sapiens; identical to SEQ ID NO: 101396

SEQ ID NO: 101401 - DNA, 1063 bp, Homo sapiens
ctatttggtttgattaaagtgcttggcccctcatgagcacccagtccacttttgttggaacatttcctgaggcttagaaaatgggagaggctgcctgaggtcatacggcggggcaccgggcagcagtagggctaggcctggaacccgggactgggccgggtgggggtgcgctaggttctgtgttcttactcttcactatggaagtcagccagccaggggtgagtgtgtgggaggtgggggcgagtattccggatcatcagaacagcatgtgtgcagggcaggtggcagagaatgggcctctgtgtgtagggagctgtgagtagttggaccagagcagcatggggctgagggaatggtgacaggtgcagcagggaggcggccacagcctgatttcgcaggccccaagtgtctggcccagaggttgagccctggtcctgcaggacccaggagccgttctgtcctgttctgggctgagtttcccagcagcagcccacctcatgccagatgtcagggtttgtgaagggcctggccagcttggcaggccagagggtgaggcgggtgtccagcttcccaggaggtcccagctgaaatctggccatgtgtgtgctacttctcaggtgccccaggcttcatgggtgcagcctcacggtccttgatccacctgtaccccacccaggccaactgtgggtgccccctgccctggggattacagaggctcttggcacagggggaagggaaaggtggagggtgtcaggagtactgggtgagagtcctggcctgtactcccaaagctgaacccaggggttcagtcccccagatgggctttctgttttttgctccttttgtctctgtttctcatctttgtttctttcggtttttttgtttgtttgtttttgagacaaggttttgctctgttacctaggctggagtgtgatggagcgattgcagctcactgcaacccaaaacttctgagctcaaatgatcctcccgcctcagcctccaaagtgccgagattgcaggtgtgagccaccacgcccagctaatttttatttttatttttgta

SEQ ID NO: 101402 - DNA, 1033 bp, Homo sapiens
aagccccaactctagctcttgcccctccctcacatccatgtattggccccttccttaggacttgggactggaacccccatattccccagaccagatcataagttggagttcacctctccctctctgtccctttccctcaggccacggtttctccctagcttcttcctgctttgctcactgtatatgctccagcaagcaccccccctacacccacttttgtgactcctacgtgagccctaggaattttactgtttggcctcaggagggccctatatccccaggagttaaggaagtgcctttgagaactcctggttcaggtgactgggaggcacctctacctgggtgtcaccatggaatgaagctttgtttgtcaaatatcctgacatccttcctttttctgtggggcagccaccaagcaccacatgcagcccttgcctggagtgggcctggggtcactagcaccttagctttctgccctcactggcctgggttccatgccgtctcttccttaaaaggcggcatggccacggaccatttgcatttcctcactgggtcctagaccactccattctctgtatgtgatttttcacacctgacttgggcacctggtccatgccgctatggtttcttcaggcctatacccaagacacccagcctatggacttaaaacctcctgctctcctgggggtaggccagggttaacatcctgactctgttattcagctgtatgacctggtccaagccactttccgtctctgtttccccttggtttccttgcaagttaaagtttatctgccccttcgtgttaggaagtggaaatgagatcgtccactggcattcagtaggcactccctgttgttgtgtgggtttttttgttgttttttgttttgttttgttttatttgttttgagatggagtctcactctgttgcccaggctggagtgcagtggcgtgatctcggctcactgcaagctcctcctcccgggttcacgccattctcctgcctcagcctcctgagtagctgggactacag

SEQ ID NO: 101403 - DNA, 1023 bp, Homo sapiens
gcagctcctcaggtctcagcccaaaagctgcctcctccgggaaaccctccctgaccttcccatgggaagtctaggccctcagtcactcctctcacacccctgcttcatttccgtcaccattctcattataatcagaattatcttgcctgccagtcttgctgtctgtccccacggccttcactactgtgtccctggtgcctagaacagagcctggtacatagaaggtgctcgatgaatggtgagtgaataaatggaggaggctgagaagaaggagaggttcctcgttagctgggctgtgtgaccttaggcaaaatggctcccctctctgaaccaaagcactcgcccacgttccctttctggattctgaagagatgcagggagatatgggggaactgaagctaattggaggatttgctgtgtgttcttaggccaaacttccaccttctctgaaccacattccaagctctttgcatgtattaactcatttaatcctactgataatttgtaggaggcaggtcttttttcttcttcttttttcatatttttcaatgttttgtagagatggatatgtctcactctgttgctcaggcttttctcgaacgcctggcctcaagtggccctcttgcctcagcctcccaaagtgctgagattacaggtgtgagccgctgcgccaggccacagtcttatcattatctccactttatagatgaggaaactgaggcccagaagagctaagtgtgtctgctccaggtcacatgaaaggatgagaaggaataaaatctttccagtctgactttccctcttgggtttgtcataacaggcctggcaatgtgagtcccatcttctggatagaagaactgaggcacagagaagggtagacctggggtcacacagtgcgttaaggtgttactcggaccttgcaggccagcccccaaagaccagactcagccccagcaggggtctaggccctctggcctctggggtggaacatgcttgccacccttccccaccctccaccccctg

SEQ ID NO: 101404 - DNA, 1023 bp, Homo sapiens; identical to SEQ ID NO: 101403

SEQ ID NO: 101405 - DNA, 1023 bp, Homo sapiens; identical to SEQ ID NO: 101403

SEQ ID NO: 101406 - DNA, 1151 bp, Homo sapiens
gagcccgctgtgggcggggatgaagtaggaagagatatgagctgtgacggaggctttctgggtgctgcccccagcactctgccacaagaacccaggacatacccattccttctctgggcttcagtttccccatctgtaaaaggagagatgctcattgctctcagaagcagacttggccctgccgaggggcctggcagggggtggggcaggcatggggttcaccagtatcacccgtccacccccgtcttgggggccagggccctgtctggatataaaggccggtgccctggggtgcagccggcttaataacaggttccaggatccaggaggggtttgaacccaggagaataggttcaaatacaattgagcagcccacgttcctgtctgtagctctgaaagccaatcgttcccacacccagagggcccggtcccggctctcatcaaacccattcaccccagtggagcccccatctgtgtacctaccatgtgccaaccttcccactgcgctcagaagatgcacactcctgactttggccatgagctctggacctgccccggcccccagtcccctcctcactcgccccttcacacaggccaagctgagccctgcatcgaggcctttgcacttgccattcctcctgcccagaactctcttcctgcagatcttgccatggcggctcgtcctccaggcctccagccaagctcaccttccagtgaggcctctgaccccatcctattgatccctgtcagccccctgccttgtttttctccatcaaagtcttcactgggatgtcctgatcctctgcctggcgtctgtctgtccctggatttggagctcttagacggcagagtctagggctgccctgggactggctctgacatcaccaggtccaggctggacccagcctggtacccacctcacagtgtaggttaaagaacaaatgaaacgggcatgggagattttgcacccacctgggggaccatcaatgcttcatctacacagaccctctcatctccacacacaggccagggggatgcatagacctggacacagattcactgcatcccgccccctccaaaacaccctgacacacacgtgtgcacacacacgcgccccccgtgcccacctcccctggcctccacaccagtgc

SEQ ID NO: 101407 - DNA, 1151 bp, Homo sapiens; identical to SEQ ID NO: 101406

SEQ ID NO: 101408 - DNA, 1151 bp, Homo sapiens; identical to SEQ ID NO: 101406

SEQ ID NO: 101409 - DNA, 1045 bp, Homo sapiens
ccgtgagaatatggggctaaagaaccttctagccaggaggcctgcggtacccactccattggggccatgatattattctttcaggcagggactcaggaaggttaacgttttaaccctctctaaaatagcatctttcctcaatgagcagcttagtctttggtcgtggcagagatgaccttgtcttaggagtcatctccttgtgtgttaaaaagttaggaaaggagggtttctcatatatctataaaacaagtagttaaaaacacaaagagctcttcctttcacaagcagctgaataagatacatactcccaattaaatgtcattgcgggggttgttaagattaactaaaaccacacttgcacagtatcttaaataagcgatatacagaatagagagattttgttacttgtgtaaagggagacagcagatgattctgttttcagcttataggctcaaaaggcaaattgtgagatccatcagctgtagtattaaaatctattttgagctccgcttagaaaggaaaaaaggtttaagcagttctttggtatgcttgactaacaaaagcctttttttttggcagccttgattttcatgtggatttacatcaagcttatttgacaggattctttttatttggactgtagtgtgtatattagtttctgctagactaatatttctaaccactgtaatctatatactaataagtatgattgatcagtatataaaatttgtatgccatatctggtctctgaattagctgaatgaattccataagggactttgagactgtgtagacaaattttctgcatcagtttaatgcagtagagtctaaaatgtctttaaatgaaaattgttggtctgaagtgttggagttgattatgatacaccccatcacagtggaagcattgtggagagaagtcttttccactgaaattgactgagttgacaacaagaaatacgtattgtaacttagttcttagttgaattttatttcttacaattttaagccagagtgggttgacctgtcacccaagcatggttaaaat

SEQ ID NO: 101410 - DNA, 1038 bp, Homo sapiens
aaagtttataggagctttgtgagtatagttaacaactcaaaagaatggggtgttttttcccgaggggcatgaaatgtttttgataaatagagttcatttgacttggtaatgtggaaaatgagtagccctgacacgtacgctatgcttttgcagtttttctctcaagtagcaattgggtggcttttcctgtaaaagatagaggaactgattcttgagaatttacgaaagcttcaaccctaactaggtatgcaaagaatagttgccctttatgttgtaattttaggaagaaacctacatctggtctaagtttcatttgaataatatgatagtttacacatctgccatatttgagaagaaagtacctaagtctccagcattttagaaataatgctttactttgtgtagaaatggtctttagagtttaatagctgctgccctctcctttttcaaagcagcttgacataatcatgagtatcttgctgacagcttgtaaattttgattgtatgaaaactgaaaataagaccatttcacatggaagattccctcctgccctgaaacagccaaagaaaactgtagccatcaaatctattgatctctgggctttggtacaagtcacactactacaaataaaataataccaagtacttataaatgattttcagtccttttaaagtttatttttttaatattttttttgagatggggtcttgctgtgtcgtccaggctggagtgcagtggcacaatcttggctcactgcaacctccacctcctgggctcaagtgatcctcccacctcaggctcccaagtagctgagactacaggcatgtgccatcacgcccagctaatttttgtatttttttggagtagagatgggattttgctgtgttgcccaggctggtcttgaactcctgggcttaagccatctgtctgcctcaggctcccaaagtgttgggattacaggtgtgagccactgtgcccggcccagccctttttttaagagaaaaacgtatgacatcgttcgatttactgagtgctta

SEQ ID NO: 101411 - DNA, 1085 bp, Homo sapiens
ccacagtgggtcacactgtccttgtcggtgtacactacctagcacttgagtttgcaacccctaccccaagctgagttttctcgtcaagcttgatgttaatgttatgtgatgcttggccttgtaggtatttggtatattatcgttagataaaattgaagcaaagggctaaagggttggtggcctgagggagtgcccttgacagtaaagtctaggataaaatcattggccaggtactccttcccttcccgcccttcctcttttctctttatcctcagcctccttctgctattttgaggaagttagaagccaccaccattttttcccacctcaggcaactgagtgtggctgtatttctgtcccatgttcagttatttccaggaactatttttgatgaccaacttgaagttacattgggtgggcctaatgggggctgataaaagaatgaggtgaccaaatatgcttgcactgagacggctacgaagtaaggtttttaatgacttgctttgtgacttggtcaggagtgataccatttgtcatgtgtccaacttcatgactaaatggttgctctaccttatcctcatagctataataaaataaaataaatacatacattgcagggaggaatgtatcttgttaaaggtctctcccttttagcaacaaaagtacatattatgttgtagaacatgctttttctttgatccttcttgaacacctattactctatagaggtatgttgtgtatggcaaattagaacaagcaatagataaggatgattctttaccattataacccagtcaaggtctttgtcctaagttttgtacctttctccagagggaaaggtatttgtatttatttatttatttttgaggcagagttttgctcttgttgcccaggctggggtgcaatggcacgatctcagctcactgtaacatccgcctcccgagttcaagtgattctcctgcctcagcctcccgagtagctgggattacaggtgcctgccacgatgcccggctaatttttttttttttttttgtatttttagtagagatggggtttcatcatgttggccaggctggtcttgaact

SEQ ID NO: 101412 - DNA, 1134 bp, Homo sapiens
tagctttatagaaattgcagttggaactcccaggcctggcattcaaggctctctgagatctgggctacccacccatgtcctccagccgtctgtcgcacctcctactgcccactcactgttcctggcatgagatgtgatctccagcccccatgcctttgctgtgcagggtgttccagagtgaattgtccctcctgtctgtctctctgccctcttcctcgtctttccatcttcctgccccacatcactgcctcctacccaaggcctgtgctcattcctcctcggttttcccccatggcctggtacatacctctgaattatcaccttgcatttcccatattgcccggctctctttgatgtctgtttctttgctgggtcttcctcagtgtctgacggtcagttaaatgtctttattcttttttgtaggatatccgacatgaagccagtgacttcccatgtagagtggccaagcttcctaagaacaaaaaccgaaataggtacagagacgtcagtccctgtaagtatccacgtggccggtaccagtcttgctcttcctttgctgcaggcctttttagtcaagactcctttcgcctcagggtttagtataataataaatcaatgtagcagaggtttatgacgcgattgtttcctatagtaaaggcattagagacttatagtaatagctcatttttccaccattatagaagggctcaggtttcagtttctggaaaattcagtgaagttcaaagcacttttcttaagctttgactgtttttgtgatgaatcattttcctaccagctgaagcagagtatagcaggcataataaaaccttttctggatgactcagcagcagcgtcattagggcatgagcactgtgttccgctgtaatgaagccccgcacaggcattcggggtgggcactgtcgtcccctgcgctgaatatgcaaggcagctctgtctggagtccccaccgcctccacccccgccaacctcatcatttttctccctctttcctgctgttagttcttcctaggattgtcagtgtgcctgctggcctgtggcagccctgtccgccttctgagtgattggctgtcagtctgccggtagctgaaaagtaaataacttaacatgttagaa

SEQ ID NO: 101413 - DNA, 1119 bp, Homo sapiens
agaacagatttcccagataggacatgatccatgttttaatatggcttactgctgttgcttcatagtgtgaagcttcagacacttctgaaaaccctttcagaaaatcccagtcgccccatactgatgactaatctcaactaaaacagggcttcagccagtgtgaatgccactaatgccaccaactcacctttgcttttctgtagggtgtgcacctgtatgtacacattcagcttttccgggattaacctctgagttctggtttgtctttcagttgaccatagtcggattaaactacatcaagaagataatgactatatcaacgctagtttgataaaaatggaagaagcccaaaggagttacattcttacccaggtaagcagattgtctgaattttctatttaatgtcaatttaagagtttgagagtgctgttatccacacctcaaataaaatctgccacatcctttagaaggtcaggatttcagcataccaaaaagcagcaaggaagggggaaaaatcatccttcaaaggttcagtttggttataaggaacgctaatcttttctgggaagcataagatgacattgctggaaatgagagcttatagaaaacaacattaaaatgccagagttgcctgtgtggtctgttggcagagacagcagagccatggctggaggagggtctgtacctgtgttgcttccagaagtatttgtcgtagagcacttgtgatggcaaatctaagaacgttagcagtagaccaggaatctctgtccagagccattcagagtagctcagcatggttctcattctttggccagaagaaaggcatcattggatcatgtgaacaagcatgaaaaatgacttaaaatttctgttggcttttggcatctttatggaaacaaaatcctgaaagtggtttaataattgagcctcttgtaaaacactcagtggcatgtgaccaaaagggtatctgggaaagaggataaaaagagtttctttttaattaatcttctcaagtcttaacttgttacctgtaagttggtctaaaaagactgggtttcttattttgtttttcatcataatttttgtttctcattccatgtcagctttcagtcttatatg

SEQ ID NO: 101414 - DNA, 1048 bp, Homo sapiens
gctgatgtttcattggatgttgctgtattctagggactgtgctaagtactttatagaaatgaacatacttcattttcacagttttatgaatagggactattattagtcaagtaagcgatggggaaactggggcagggagcgatgaagtgacttgcgcaaggtcacaagatgatgtgattggaaccaagagaagtgttgtggttggccacgcccccacactgcctctcatctgcaccaaggagttttgtcccatagcccaagggccttggggacgaatctcagtggaggcccttagcgggcctgcctgagccagaaagcagaatcggcatttttctgtccttggttggcccagccctgaactgagatgcggaaatcgcctttcgctgcctggtagaaaatggagctgcagttactgaccaccaggcagagagaggtgggtccctgtcccagcctcagccaccactctgcctaagctgtggggactgagggcgctgtcgttagctgactgcagaaggtgagcacacgctgtagcatgttatgtttcagatgtcacatgttgtgttattgtgtctttgcagggccctttgcctaacacatgcggtcacttttgggagatggtgtgggagcagaaaagcaggggtgtcgtcatgctcaacagagtgatggagaaaggttcggtaagtctcggcttcatttgctgtgtatgtgatcatgcataccactccatatagttaccattttcgtccagatttttaaattatttttcttgcctttgtatttcctttacgtagtatttttatttaaaaaaattaaaacagcagcatataaatgcatgttggttgtcaaccagttaatgaagtgaataaaagggaggaggcggaagaactgcacggacctcttcgcccccgccttctcctgtgtggtgcgtgtggcgctccgcccacctgtgctgcctgtgcggctctcatcacagtgtggagttgtgtgtggagttatggagacctgcttttatcttgaaaagcaagttcttagtgcatcttcatggtgt

SEQ ID NO: 101415 - DNA, 1070 bp, Homo sapiens
tcatcattgatccaggaaggtgacatggatgaaactggctaagacttcagacaggcttgtgtccagactcttgagaaagctctgttggcttctggtctggcactgtgaagtttgctgtgatgctggcaccacaacctggtgtttcctaatttgtttctcccacattttgctttggttttgtcttttgggcagcttccagctccagtagagcaggaccaataggcatttgtggttctatattcaccctcctcacgtgcttcctggctcctcattgcccccagatgatgccacaggtccctgggcctgctgccagtcgtctgtgatctgggcctctgctggccccttctccagctgctcttttcagcctcttatttgcagtcactgcctaggaaatcctagtcatccttcaaaacctgcctcttgcacagagctttctctgatctctcttttctgtaaccttggctgacctgaaacatttccctcttctgaattcctgctgcatgtccgtagcatttccccctcagccctcccccatagtccaccttgtcactgctgggcacagcagtgtcttctgacagacagctggccctgaagtggttcccttcacccacaccatcctttgccccagaggaggtattgagtgggtcagtgcacgtgaactgccagtgtcatttgccaaagagctgttgacacacgctgacatttcttttgctgaaaatcataagggctttgagcttccctctgtccaggcacatggtcaggctgacccggtagctctgcccctgctgacctgccatttttgtccacaacagttatccatgagcagaaacatttgtgtaactgaggcagaaacttagttcaagtaaaatgtcactaaattcgagtcagtttttgtcttagaccctaaatgaaaccaaattttcataaattttcttgttttaaagaaaaatttaatgagctacatttaaactgagaacatcagatagtgtctgagattatcaaaatagaacatcaaaagtatttttctgaatgaactgaaccaaaccagaatgaaagggcaagccctgggg

SEQ ID NO: 101416 - DNA, 1135 bp, Homo sapiens
tgtctctcccagttttatttttaattgcctgtgagttttctgtgcagggtaaggcacctacattctatgccagcagcctgatcaggtcctgggtaatgtttgaaatggctacacagaggagtttcaaagccttttgttcaatctggcttcacctcgtagacggtgagaaagcgtcagagccctgcaggatcccgttgccacgtttgaccggggagccgatgggtttggaagtctgagccctgtctgcacaacctgccccggtcagcagcttcgtgcccccacccccatctccccatgaggcaggcatctgtgctgaccatggcttccatgttcagaaacccccaggcctttgagttatcatgaagcttgtgggatgtgctccaagcctcctgccatagaaaaactgccatattgctcacaataattcactattatttgtttccccagttaaaatgcgcacaatactggccacaaaaagaagaaaaagagatgatctttgaagacacaaatttgaaattaacattgatctctgaagatatcaagtcatattatacagtgcgacagctagaattggaaaaccttacagtgagtatagcacacacttcagcacttcaggcggctactggttcacatgcctcttcctttatcccttgggtgatattacctaatgtcagtgttcctggcttttgtataccccgagcaagatgtggtttgggcactgtggtgagcggagcttacttgtgtacctaccaagtgcccagggagggtggaggccacagtgctctctctgacctttaacaacagttaacaccagttcttagggaaaggagagtttcttacccaaaagactggttcctgcttgtgcagctgcagagggactggagcggcagcctgcaagtcccagtgaagcatgctgccttctttgtggtcctcagtcttcgagtctgaagagagggaagaaggggtataggggctcactccagtttcatagctagtgaaagttttctgggccaggtcttgggtttttttgttgtgggaagagtttataacaccagctacttgcttggtaaaagttggtcttggaacatggcaaggcattgtggcaagcagcactgccgctgaacgcgctgctcct

SEQ ID NO: 101417 - DNA, 1017 bp, Homo sapiens
agcacaggttaccaggacgtaggcaaggggttcgggctgcctggctcttgaggatggtagcagtgcagctgatgtgagtgctttctgccctctggtggtgaccgcgccggagtcaccagccctgccatagccctgatggggcagagggttctgagtacggtggatggaggtgctttctggaagattctcaggagtaacatgggcagtgtgttggaatgtgctagaggatttatgcagtagccttttaaaagaatgctttttagcatttgcaagcctgacattaagagtgacttctgggaaactatttgcttgttgagggaaactgaatttcaacagagcagaagagctgtgcgctttttgcttggcagagtgaatacagccagctcagaggttttgatgttaggatctgtttgctccaacagactttgtttttaaaaggcttttctcagccatagctgtctgttctagcacaaggctggaatgagttccttgtgaaagaggtgagcaggtgtgagggagggtgtcagtgggcggtaacccacaccttcaaggattaaaggaaaacttgcatttggcatgcttgcttcttattcaattttaaaatacattttaacggccgggcacggtggctaacacctgtaatcccagcactttgaggggctgaggtgggtggttcacgaggccaggggttcaagaccagcctggccaagatggtgaaaccccatctctactaaaaatacaaaaaaaaaaaaaattagccgggcgtggtggcgggcacctgtaatcccagctactcgggaggctgaggcagagaattgcttgaacccaggaggcggaggttgcattgagccgagatcatgccactgcattccagcctgggcggcagagcaagactctgtctcaaaataataataataattttttaaaaatacattttaagtccttttcttccccacctgcctccacccaccaaatagaagaggtatttcttcttctttaatgtcattaaggttatat

SEQ ID NO: 101418 - DNA, 1049 bp, Homo sapiens
tcattctttgagaaatagttgaagtgtatatttacgaatatcagactactcactgaagcattttaagccctttagcagaggtggaattaagtcacatgatctgttttctggttaatagcttataatactgtactgctttttgcgcggagctggggtggtggtgctcacagacagagagacgaatgaattgttttctgtagcctttaggacgtgagagcccttttaggtaaaaactcagctttgcaggaggcagtatgtgccaggcacggtgcctaagccttgcccttggcttggtctgccacgggtttgctttctgacccctctctcggactcaatttctccatctgtaaatgcaggacctgatgagatcatctccacaaccccttccagctcataacattctatggtactccagggataatggagattgatcattatttcaacattaccagggatgaactggaatgaaaataataatctttccatcagggtcaacagacaggctgcagtcatcagccaaactattccacttcccaggaggtgttgatgaagatagttgatagttaacatttatgagacctaccaggtgccagaaactggctaagctgctatttacttatttgattttaagttgcatgaaataacttcatatttggaggcatcagatctttgttttttaaactgatagacatttatttgagtcgttgctctgctccttgctgtctgggtgaccttgaccctgttcacttaaccactcagagcctcagatttctcctctgttcctctataaacagaagtagacagcaatgcctacctcaccagattgttgcagggctcagatgaggaaccatacatgaaactgctctgcaaaccatcaagtctggtacagatattactgggtttcatttagcaaataatgttgcctaccaaagcctttgaaaggagttccttgaaataaaatggaaatgtgtaataaataaatgcttctttttgttttcacaccgggtaacctctcagtagacatccctcagagaggccaagagcaatca

SEQ ID NO: 101419 - DNA, 1022 bp, Homo sapiens
atataagtggtgcaggggttcaacattttaagtaaaaatatttttacacactacctctctctttttttttttaaagttttaacatcagaacttttgggggaaaaactacttcagggcttgactttttgtacaaattttaactgtaaaatacagatttatcttgtacgcattcatggaaatggaaatcaaagctgctattgctttttattttaattatcctgttaagggtatctatcaatggtattttcaagtagatctctgtttcttaaattattggtgaaataattgattactagatatattgtaaaaccaatagatcctggttatacgataaaatatcagctcattggtaggctgaatcaattatttcaagtgcaccttattaacaaaagtatcagtggatccaacataaaattttatagtactaaatgtcaagcctaactgtgaattttgttctgtatcttaagtaaatttatgataatgttctcgagctatcaacaaaatatatgtacttttgtgagctatgaattttctaattaaattttacatgctataacatgatttttacatgaatgatactttgtttataactatcaaatgtcagtattttactacaattttattataaagtgtacattatcactaaatgaacttcgattttaaaaatcaaattagctttagttgtatattattttttacaaataaagatagacttgtataaaggctactttcttgtttgaaattatatgaaaagttgcccacaaataccaggtgcccattatataaaataggtagggagaaaacccttgagttttaacaagatccttgcttccttaacttttaattgttaaaagatggaccccaaattgtatgtgcactttttgcaactgtgtatgaccatatggctatgggctggatggtaacttttaaaatgtggttaattctgatagtgtgaaaggttatgcaagctattcacccaaagttatctttaagattatttgaaactagtttgtaatgtgaca

SEQ ID NO: 101420 - DNA, 1080 bp, Homo sapiens
tcacttacacccagttaaagatcgttgctgagcacagtgctatttattaataatttttattataatattataataaatagcacagtgctatttattaaatgactaacaaatggcagctactaatgccatcatcattgttaccaaagcaccagaggggcatgacactgatgaagttatccacagtaaggctggatttgtaaagcctttcagctcagtgccctctggggtttgggtagcttgtccagtccctctgaaactccagtggccttcggcccaccttctgccaaggagcagagtcttacttcgctcacataaatggagaacatttcctgttggccttggcccagcagttgcatttggcgtgggtgcatgttcttgggtcaaatgcctttggctctccttcctaggggcctgaatcattctggacagatgactttcctctgtggtgacctcagaacctgctgcccagacttctgggttctggagaccaggtctggagaggtgggaggatagttgggggaagggtctggggcctccaggctagcacacctggttgggtgtttgtcctgggagaggctctagagcatggaggctttttcactgaaatctgtttgctcttctcagagcgtagcccaaggcgtgcaaatgtaaacacctgtaatgtaatgagaagtgagttggagatgagaaatgtgtcactttccttttgagtcctccataagaagaaagtgctcctctgggtagctatggattccatgttggggagactgtagggagtgatggggactggggttaacaaaagtggcagctgccactcagctccagctgattgttgccatgtggaacatgggctcagtgtggccaggtcttggctcagtgtgtccaggtctcctgatttttcacaagaagtcagagatctgggtttctaagggaaatatcctgactttgatatcttggcatctggtttggttttactttttttgttttttttaggcatgattgggctgacactgcctttgcccgatgaatgacatctgtagacctctggtgttaggaagggtggtctcaggcccatctgga

SEQ ID NO: 101421 - DNA, 1191 bp, Homo sapiens
taatccccatttttcagataataaaatggaggctgatagaagttaagtaacttgccaaaaggcacacaagtaactgttgagaggtagaatttggattctaatccagagagtctgatcatagctcactgcagccttgaactcctgggctcaagtgatcctcctgccccagcatcctgagtagctggaactacaggcacatgccaccatgcctggctaatttttcaattttttgtagagatggggttttaccatgttgcccaggctggtcttaaattcctggcctcaagtgaccctccctggcttcagcctcccaaagtattgagattacagtcatgaggtaccatgcccagccagaattctttttttatttattttaattttatttatttttaagtttttaaactttttatttgcatatttaaaaaattgtgcattccaataattaaaatcatttgaacaacaagaaaaaaatggcactctgattaaactgcattacagcctgcaggacaccttgggccagcttggttttactttagatttcactgttgtcccaccccacttcttccttcaccaacatgcaagttctttccttccctgccagccagatagacagatgggagaggcagtcgcggccttcgttgtcagtagttctttgatgtgaaaggggcagcacagtcatttaaacttgatccaacctctttgcatcttacagagttaaacagctaaaagaagtaaaataagaaggcaatgcttgtggaatgtacagtgcatattgacggcacacgcctcattacgattcgcctgcttgcttctcctgttcaatcgtttctttggaaggcagtggatttttctcttgcgtctctgtcttcttcagtttcgacttatcgaatttctcgatctcagccatatcggatttgtcagacatggttacggaggagaagcggagcgaggcacgcgagaacgagcgaagtctggtctgcgtagtggccaccactgagttgtccaattttatttatttttttgagacggagtttcactcttgtcgcgcaggctggactgcaatggcgcgatctcagctcactgcaacctccgcctcccgggttcaagtaattttcctgtctcagcctcccgagtagctgggattacgggcatgtgccaccatgtccggctactttttgtatttttagcaga

SEQ ID NO: 101422 - DNA, 2901 bp, Homo sapiens
tgcacatcacttacgagagaggcaccaagttattcagacggttcatccagttgagaaaaagctcacctacaaatgtatccattgccttggtgtgtataccagcaacatgaccgcctcaactatcactctgcatctagttcactgcaggggcgttggaaagacccaaaatggccaggataagacaaatgcaccctctcggcttaatcagtctccaagtctggcacctgtgaagcgcacttacgagcaaatggaatttcccttactgaaaaaacgaaagttagatgatgatagtgattcacccagcttctttgaagagaagcctgaagagcctgttgttttagctttagaccccaagggtcatgaagatgattcctatgaagccaggaaaagctttctaacaaagtatttcaacaaacagccctatcccaccaggagagaaattgagaagctagcagccagtttatggttatggaagagtgacatcgcttcccattttagtaacaaaaggaagaagtgtgtccgtgattgtgaaaagtacaagcctggcgtgttgctggggtttaacatgaaagaattaaataaagtcaagcatgagatggattttgatgctgagtggctatttgaaaatcatgatgagaaggattccagagtcaatgctagtaagactgctgacaaaaagctcaaccttgggaaggaagatgacagttcctcagacagttttgaaaatttggaagaagaatccaatgaaagtggtagcccttttgaccctgtttttgaagttgaacctaaaatctctaacgataacccagaggaacatgtactgaaggtaattcctgaggatgcttcagaatctgaggagaagctagaccaaaaagaggatggttcaaaatacgaaactattcatttgactgaggaaccaaccaaactaatgcacaatgcatctgatagtgaggttgaccaagacgatgttgttgagtggaaagacggtgcttctccatctgagagtgggcctggatcccaacaagtgtcagactttgaggacaatacctgcgaaatgaaaccaggaacctggtctgacgagtcttcccaaagcgaagatgcaaggagcagtaagccagctgccaaaaaaaaggctaccatgcaaggtgacagagagcagttgaaatggaagaatagttcctatggaaaagttgaagggttttggtctaaggaccagtcacagtggaagaatgcatctgagaatgatgagcgcttatctaacccccagattgagtggcagaatagcacaattgacagtgaggatggggaacagtttgacaacatgactgatggagtagctgagcccatgcatggcagcttagccggagttaaactgagcagccaacaggcctaagtgccaggttccctggcgttggtgacatgctgcagcctggaactctgatatccagtgtgactgcaaagctgtcttctcactggtactgccttgtgagtactggttggactgtggggcatgtggccgctgcagttccagtggttatttctaagtctatgacaggacaggctgttcttgcttcagaaccttctctgacagacacggtaactaaatgtgaaaaaccaataagctggtgactcatgaatacacacgaggaaaagcagaggtttattttatctgccttttcaacatttctttccctctgtgaaatgattggtcagatgtctttgagaagtgttaaactaattcacatggtagtgtagggccaacatacaagctaccagtctaatgtgtatagtagactttgggaaaagcgattttttttcatgtattcattctgaatagttgaaatgtatatttgtacagtcttttagacctattcaagtgatgctcatgatcctgttactgtgtgcccatcatagatttctttttttagtgttgcccttgctgtgtaataaacgctctatctagtttacctagcaaaagctcaaaactgcgctagtatggactttttggacagacttagtttttgcacataaccttgtacaatcttgcaacagaggccagccacgtaagatatatatctggactctcttgtattataggatttttcttgttctgaatatccttgacattacagctgtcaaaaacaaaaactggtatttcagatctgttttctgaaatcttttaagctaaaatcacatgcaagaattgactttgcagctactaattttgacaccttttagatctgtataaaagtgtgttgtgttgaagcagcaaaccaatgagtgctgcattttggatatttagttttatctttagttcaacaccatcatggtggattcatttataccatctaatatatgacacactgttgtagtatgtataattttgtgatctttattttccctttgtattcattttaagcatctaaataaattgctgtattgtgcttaatgtaaatatttgctttattacacatgacagtcctgtgtgtccattatatcttttgccatttaatgccataactctttcatcagagatggcagccacagtcacagaggaaacttgtggaaaacccaagatctgtcatctgcaaatagaatgctttctcttgaggcacctggtacaaaatctgtttttcttttttttttttttttttttttttttttttaactgaaaaacaaacacccttgagtttttcagttcaccttttgttaaggagcagagcctgcatatatatgtaaatgtctcaatgataaaaaaaaaaatgtaaacatggattggcattaatttgcaagcagaatcttaatagcctgatgggttttttgtttgttttttcttctagatgaagttaaacgttcgttttcaccttacgatgggaacaactgtagtgcaggcggctctgc

SEQ ID NO: 101423 - DNA, 1205 bp, Homo sapiens
accttgaactgtgaactttttaggaacaagtgggattttaccctaagacttttaatcttcctagtctggagggaagtggaccattaaatttttacatgagagtataaatttaacatcatactgcttaactttctttgaatagctttctttctgcctttttgggtttgaaatttgagttttcttcctgatctgatctcctgccccctcccctcgaaaaaaatcttttttttgcacagaaccagaaatcatatttgcagtgctgtaagcaaacattgctattttagacaccattccagtactgtaactgacgagttagagtacagtactctaatgaaaagtgctttgatattagtgtgtggctgaattttttacttaattagaacttccagcaatttccttggaaacctgactgaccatcaggaaagtggttggttgatataaaatgtagactgcaacttccatatgcctttttatatttaagagccttatcactcctagtttaagtccttgttgacgttggttttcctgtgcctctccccatcttagttaagaggtgagatttacatgtaagattgggttagcgtttataccactatgtttttgtaaacttatttcactgttttctaggattttaaacaatttgaacctaatgacttttatttgaaaaacactacatgggaggatgtaggactgtgggacccatcacttacgaaaaaccaggtaagtggcacaggagacttcctcagatggcagcatgcttggtatactcccttttcagctctaggccttttatagcggtgcagtgattgcgggcaagtgccaaacatcgaaagtgtcaaaattgcatttcatattttcctgaccagtgggaagactaagaaaaactttttgtccttttttgtcattggactaaaacttgaggtgtaagaagaaacaaaattttgttacttaaaagttacgaagcctgctgtatcccaccatttcccctaaaagtgctctggctctatttttctgcatctgtgttgccattcttgttttttctgcacagaaaaagacaagacccttccttacatttaagcttttcttatttccctatgttgatggcacccaacttctatgggaggcctggggaagtgactctgtaggatgtcagtgacagagagataaaacttcttacaaattggcattaaaaacaatattagcac

SEQ ID NO: 101424 - DNA, 2195 bp, Homo sapiens
aaacttctgttttaaggaacttgggaaagttgatatgaatttctaatttaatgtattaggtcattaaaataatttttgagttcccttagacacatacaggcttttcatttttttcaaaagtaccctccttaaagtctgtaacagttaacatttttgagtacctttgcccaggtacgttgcaggcaggggtggagtgggggcatgcattggtcgagtcacatatcattactgtatttagtttggggagtatacagaaacttaaggtttttttgtttttgtttttgtttttgtttttgttttaaagaataccgtagcagtaggcaggacagttccaattcaacaaaaacctctttaccctggcactcaaaactgtaatgatgatgaactggtaagcatttttctgttttcagatgttcaacatcaaaatgagaaaagcactaacacttgatttaaaaataattgattgctagtatttctctaattttcatcttgaagttcattactgaactgttgttaagtcttatcagaattatgccagattagactcatagtcaaaatgtcctgttaaaaactgggaaaatcagagagtacttattttgcctgcctgctttaagtattcaaaatatagtagatatgtgctcggctcagtggctcacgcctataatcccagcactttggggtgccaaggcaggaggatggcttgagtccaggagtttgtgagcagccttggcaacatagtgagacctagtctctacaaaaaaattttaaaaattagttgggcatagtggcgcactcctggagtcccttcctcttgagaagctgaggtgagaggatcacttgagcccagaaggttgaggctatggtgaatcgtgagtgcactgcagtcaatgaaccatgagtgcactgcactccagcctgcgcgacagagtaagactctgtcttaagaaaaggaaggaaggatggatggatggatatatcaagccatatgcacatgaaagcaggtgtgtgtctgtgtgtgtacacactagatgaggatatctatgcaccttttttgtcagatgggtaggttttatgatcctatcatcagtggaattagtaaatattacaagttgtacgtgttttgactttgacttaaatttttttttccaatagaaactatgttccaacttcctgtcaacaatcttggcagtttaagaaaagcccggaaaactgtgaaaaaaatacttagtgacattgggttggaatactgtaaagaacatatagaagtaagtagcatgtcatttttaaattttaacatgactcagcttctgatccattactttgtgtcagtggccaagatggctaaatcttagatgtgattctgaatttcagccacagcagtagcttcacgaaaacattctcaatagcattaacttgtgcctttctccctaaaatgggctttttcatttttgcatcctgaagcagaaggctaccattgaggacttaagcatgtcaggcgttgaactaggtgccgtaaagttgtctatacatttaatccttagaacaaccatggaggcgggaggcagtgtagcagttcttatctccacttcacagatgaagaacaaataaataggcccagccttgcagctgagaaagtggcagtgtctgtgggactcaaagcctgttctcattctgatacgcctgaatgttctggttgaccttcttctaattgttgaggcgtgcttgtgtgggtgcttgttgtctctttccttaggatttgagcatttgttgccccttttgacccatcatagactattactttcccccttgtataacagtttgggctttatgaactgtttttcaagctgttttattctatgagctttataacagctctgtgggatagccatgcagtggtctccttttcaacatctcactgttccaggtcttatggtttgttggtcagagcccctgattgaaaagaaatgtttgaagctgtttcccccactaacctttaagttctaggtggctagggaacatagctaccttgtttatccatttagccccagcacctagcacagtgttttgcacgtaataggtgatcagtaagtgtttgaatggaattggaagtaaaaaagcaaattcattcatacaacaggttttcttaatttgagttccactaataatacttgaagagtatggcatggaaacagaag

SEQ ID NO: 101425 - DNA, 1625 bp, Homo sapiens
ttgttctagtcattgacatagatgatagagatacagcagggaaaaaaaccaaagttccagggtctccctttgtaacgcaggctggagtatagtggcaccatcatagctcactgcaactcaagccattctcccacctcagcctcccaagtagctgggactataggcatgcaccatcacacctggctttttacatatatatatatatatatatatatacacttaaatatatgtattttttcaggctggtcttgaactcttgggctcaagcaatcctcccacctcagccttccaaagtgctgggagctgtgagctacacctgtgagatggcacccttgtcctgctgcatattttaagagttctgtttagtccatcaattgaggtcaggaaaatgaacgtgctgaaagataatatgtaatgataataatttgtagacataaatgccagccgtgtctgttaactatttcaggtgatattgtactaaatctctgaaatcacctgtgatgaacttttaaaataaataaaacttttaagtcacagtgtgattataatttttgtataattggtaggtaatgtgatgaaccaggctgtttatttaccattagattgttggtttgctataaatgaactacaccagcatgagagaaaacaaaacttccttaaagtgctaaaattaaatttttcatcattctgttacctttcaaaagctttccatttcatttttcccaggacctctcctcttgttcttctacttttgtagcggaaactgaaggtaatttgaaattttaacacatgggaattctctgaagatcttttctctactgccacatgctcaagtttgcaaaacaaggtagttgaacgtctcactgaagtaacccagctgtactaaatctattagttaaggcagagtgaatcagggccttcattgccaaaagtaatataatatcctgttcctggcctcttggagtggagcagatttgccaataacgtgaacactctaccatttttttttctttaagtacttaaaggttttggggccacctaggttccattaatgtattaccactcatattaaatgattatagtgtcaaaaatggtctggaaatttgtatagaccttcaaaatgctgtgttacatccacggtttgttctagaggttctctccttttctgggtaatattaacaaatgcttaagattcacattttggtaaagagatccatcagtgataaatgcccctgattttgaacccagaccaccctgctgttgaaattataagcagactttgtctccttccctaatcaatactgctgccttaaatttcccagtagccactttaaaaaaaaagaatgtgtttatttttaattgttgtaaagtatacataaactttaccattttagccttttttaatcttgcagaactgaaactctatacctgttaaacaataactcctcttttcttcctttacccagcccctggcaaccaccattttacttttctgttgctatgaatttgtttattctaagtacctcatgagtggaatcatacaatatttggccttttgtgattgattttattcatttagtataatgttttcaaggttcatgttggaacatgtgtcggtactttat

SEQ ID NO: 101426 - DNA, 1089 bp, Homo sapiens
accagtcttgtagtctgaaaatcttcctaaaagaccagtgactccacatattttttaaaacttaagatacgcaaaatctagatgacacctttatgtttctacataactgtaagtcacctgggtttatttaagatagttgcagatgttcagttgcctaaatattttaagtgtcactgagcttgttaagaatatgcaaacctgagtatgaatggctcacacagatgtaaaatattgtataaaaacactactgtgcatgatgcattgtaatgtgtacaggaacagatgttgttatggcaaccacatctgattctcagtcataatagtttgagctttttggagaggttatgccctggtgtgaactcagaattttgaaagtgattattttagtatctcatctggtttaaggtgataatggtaactgacttaagcattaacttgcatcatctcatttaatccttctgccattaaaacaatgagatagtgtccttctgcttatgccataagaaaacagacctctagaggttaaataacatgtgtaggatcacaaagcttgtaagtggcagagcaaggatttaaatacagatctgtctaactgtagggtggaccactgcatctttattttctagcaaagaaaagctttactgtgctatgtcaccctacctcttgttaaggaggtttgaagttataaggtacaaattttttacatatggctgataggtaagtttttgtccaggaaaatagtattattagcacaaattttgacttaggctataagcttcacctgtgaaccttttcttttcccctcgttttactcttaccccagtatcctattatctcatacctaaggcagtgatggtttctcagacctcttagattgagaagatgtggcatgggtgtaaggtccctcaggtaattctgagggttgggtaggtctggtatctactcttttacttaattgacttcctccaggctttttttttttttttaatggagtccaggctggagtgcagtggcgcgatctcaacctctgcctcctgggcgcaagaaattctcctgcctcagcctcccgagtagctgggattacaggcg

SEQ ID NO: 101427 - DNA, 7727 bp, Homo sapiens
agccagaaccgagcttctcccatcctggaactaatcccgtccgccccccacccccaaaaggagcccccccacgcacacccccatgccttgaaccagccttctgccaggtctgcccacccttacctgggggaggggggacggggttggggggggcggggagcatgcatggcatggagtgagtctttgcctcccctgtgcaatccttcttccccaacctgccagctttcctcttatcctgaccacagttcaccaccatcccttttccccaatctcagctgcctggtcagcacctctttcgaacattctgagccccaactttgcagtaaggtggtagaaaatggaaatccagagagctgcaaaaagatttttttttaatgtaatgaatggggagtagttttgtgaacacactcgtattcacctcttctttcctctgggaggcctgcctgccttcccctcccccccaaccttgatccctgtctgctggaaaaggcgcgattgcttctcttcctcttctgcccaagaccaagactctaggtctgatatcctttttagccacacacacacaccccccacacacgaagtcttcttaatcttcttgaatttaccagttactctggacacttcttgccataaccccatttcacagacaaaggcttaggagggaaaaagaaccaaactgtttctgtgtttgtcatgttaatgatgtccatccccacacacccagttcccatccctgatgcttcttgtgcctgtatcttgaaccttcagaatgaaaaaaaaaaaaatctcttggatagcttgatacagtttctttagaaatctgcattgttgcttctggtttatggccatggagaaaataccagcccccacccaaaatgcaccgcagccaagtcggctaaaggcgatgagtgttggagtcagtagggggcgcattctctgcactgggtaaggctgcagaggggggaagggcccccgagctagaacaggatgtgcttcacagcgccttctacagaccatgggaaaatgggcccagcaagacacactcgcactcttagttggtgagctgacagcaacatggcgaaggattaagtgagtcaagagcagtgattttacttcttttaaagagcccaccctgcattttagaagttttctccttttactttttcaaaactgttggcccccagtccatatttgttcttgacgaatcaccttggcacatccttggttcggattcccttcctctggagttcttccacctcaagttttgaatgtgtcaccatatctttcctaagtctggtggtaaaggagaaggtttgaaacaaagtaacaggtttgggggcatagctggttaactcccttcttcataggccaaatctttccaattctttgagagttaaaaatcattcttgagagatgttggattaagtgtgtagatgggtgtcatgatttgcaaagccttgttggtaaacatcaagcccatgttgggttcttcattgtcgaactcaagtgttgattgtaaaaatttcgtttccctccaaatttggacttgtaattgccattcattatctcagcagccaaccacctttacaaaaatgttgataccagtcttctgtgagcacccaccttcttagggtgtgttgatttccatagattttactcctcttgttatttccataggtgtgagatgcacaatgcgaaacctaggccccagcttttacaccatgatgcgcagggttgtactttttgtactgaactgataggtggcctagtggttatgccctgtactaccattttgaggatctggactccgtttcctgccttgctctttggaccacattgtcaattcacaccggtgggtatattcattttggagggtgggaactgcagcaacagggaagccagagacttccttctccttggtcaccaccaaaaccaacacttccaaaatttcagcctagccacattcctcaaggaaccggttagagctggttgcagtagtgggttctgaacacttattaacataagaaattacttacagcttttttaagagaaatttttacagatgctaatattgtaatcatttgcattctacacccctttgtataaagtataagtattcagttactattactttgataacccaatctctagagttgctaagcttctaaaagccttaaatgtctgatgaaaacatggttttccatgaacttgttcttgctaccaaagattgacagtggttgatgtttgtgggtacctttaagactttgtatgttacataaatacaccaagataagtttatggagaactgaatgggtgtattctttgatacctagttaaccagttggtgcttaacaggagaatttttcattggagaattgctaccaggtaacattttggtgagtgaaaaggaggccctttggtacaggtatttgactagagacattgcttctacaatttcttagtcattgtgaaaaatcacatatttaaatgggattatttaaatttttaaatactgtatagtatttgtaggcaggtatagtttttatctttatttggtgttttatatgcagttatttaagttctgaaaatgaccatataatttgaagacaacttatttgacggaatgtttgaaatgaagtttgttgaggggcttttgtttgatttagcgaatgggatacagtgttgaatgatgtcctaagtggtaacagccattttcccttaaaggaaaacttgctgtgagctcttagaaagcatgtattctactgtttcaaaggtttcttggttttaacactcaaaaaataaggtgaggccaggtgaggtggcttacgcctgtaatcccaaaactttgggaggctgaggcaggagaatcacttgaggccaggagttcaagaccagcttgggcaacataatgagaccctgtctctaccaaaaaaaaaaaaaaagtgaaacaattgggcttgaagactggaatttatagtaggtaaactatatacttcattaaagtatagtaaaaggttcaattaactagagtgtggggaatgggtattctgtttaactgaactttaagtagaaattccttttttatcttggcctttgttgaaaaatttcctgagactagcttattaggagctatatattgaaactaacctctttgattttggtttttatagttcctgtatagaaaatataggagattgggctgaaaatctcttaatgacccttggcccttccaaccttggaagtcattgattttatacatgcccactgtgaatttgctttgctttgcttaagtttatctttttctccttataccagagtgcaggaagagttttaatactatttatattaaaataagaacttcacaaccttgaacagatggttttggtaccacttgcaagtaaccaaccagtaggcttttatcaggcaaaaatggcttattatttatatttgattattaaaagtataggtatataaggcatactatgtgaagttgttgctttccttgtaactacttacacgttttgaaagtattaaaaagttagtattttgaaaactaaaatactcaagtttattgattaaataagatgatgctggctacaaattttattttgaaaattgcaacttaataaggaagataaagctgttttgtaaaggagaaagtagagattgatacttcatagggtaaaaaaaagaaaaacttcagcatttatgtttcttcttttgagaatcatatataagtaacaaaactgcataaattgcaatagacctaggtcacttgatttcacaattgggtgtgtgtatgtatgtacacatacatataaaatatatgtaggttttctagagctggaaatgattgtcatattattaaatacagatgaaaagttcaagtatcacgtgtagtttggggaaagtacatttagttttgagatgtagtttggggacaatacatctaagtgtagtaaaaaaataccagaattaaactttatgtatgtattttttccaagtaacctatttaaatcttagtgaaataaagatttttaaagtaatatgaaagaaaaaaataggaagtttttattttacaacattagaagcattattgtggtttacaccaaagtacccatgactgttgtgtaaataagctacttgttcaacctggagttccaaaggagtttttaaaagagcatcataaagtcagttatgtcttacataaggtaaaataactttcagtgggagtttaaccttcattctcttgactgagaggcatgtacattaagagaaacattgctcccctatgtgtaaataatttaattatagttggattcacagagcttgacttgttattagcatcgtataaacttaaagtttttcctcccctagtttttgtgtgttgtttgtttgtttgtttgagacagtcttgctctgtctcccaggctggggtgcggtggcccaatgtcggctcactgcaacctctgcttcccgggttcgagtgattttcctgcctcagcctctgagtggttgggattacaggtgcctgccacaacgcttggttaatttttgtatttttagtagagatgggatttcgccatgttggccaagctggtcttgaactgctgacctcaggtgatccgcctgccttggcctccccaggtgctgggattataggcgtgagccaccgctcccagcccctctcctagttttgtaagagcttgtgatagtaactggagtaaatgccgtattttgctgatgtacctcactgccagttaacaccttctatgttgttagtttggaaactcggtgtttgaaactagtataaaccaaagccccatgctaattaactgaattgatactttgaatgtaaaagctgtttcttgtttttactttggcactttccaccttgattgttgagatactttatttgataaaccgtccatgctttgcccattgtgggtggccattgtgatttcatggttttttgttgtttgtctgatcctgtttattagaaagtgaggagaggatgattatgttccttcatcctctcagtgtcttagtactccctacacctgcgttatgttatgacctacctttgcgatctgccagttttggggtcagcttaagtgagaattcatattctgcttcactggaatgagaaggctctcctcacatattatcatgcttctcaagttggtatatatgagccaacttgattatgtagtgtgtgtgtgtgtgtgtgtgtgtgtgtataggaagtcacagataaaaattgagccaactgtggaaagtgacagttttgattgcagggcacacgtttttttattctaatcaatgaaaaatgcaaaattcatattactgtttttagtcctgggtcctgtcatctctgtgtattaattcagtcctctgccttaaggagttccttgagatttcactcacaagctttggtattattgatccctaccttggttccaagacagcagctagagaaagcctggaacctctcaagaatttcagcagtgttctggaaataaagatttagaaaataagaggaaagcatagacaacgttggatggagtttacaaagggaagcctgctctgaatatatgccacagttttagatttaagttaaagatttaatttaaaagcatacacgtaatctaaaagagtcatgcattatttgaccagctgttagaattaaaaatgaatctgcatatcctaataccctcttcagtaagggtatagatttgtaattgagtcacttagctgtgggttgtgtttatatgtcacttctcatgtgactgtgatgactttaataaggatgtgctgcttaagtgtaaaggcccccttgctggcctttatggtattatagtattggtggcttgtctgttttattttccaagcactttataaactattcccaattttctcaggactatccttgtttcacaagtagggaaatcaaggcactaccacatacaatgatgaaatgagccacagagtatgtctgggctggttcccaggcctgtgcttgcaacacaggcctttatggtgctcttgtaagctgtttggctaatgggggctcacatgaatgcttcccatttcacagtgaggttttatgcttccatgtgagcttaaacccaaggattccaatggcgtctacatgtaaagaagctagccacacccccagcagggagagtatgggtgtaaattgtgcaggtggcagttaattggagtagcatatttctgctgggaagttaactgtataagaatctaaaaagaaacgttgtttatgttcccttttcttttcccagttttttagtttaagacagtcagtctgtcctgagcagttacttttttcttagataattgctggcttttaccctttctttttctgaatccttcatgctccatttaagagcttgtggaaacctgtgcttcagttgacaatctgtaaagctctgctcttctggtggaagctcatgacctgagaaccttttgagtggtctcttttgagaaactcctgtctagtggaaatatggtggaatttattaaaattttcaattcgaattataaatttaggttgacagaatccttgctcttgtgaaagaagtgagctgagactgggagtatccaaatgcaagaagtgctcagaatcctgcttcaagatcagttacacttaaaaacagcaacaagaggatgggtgcggtggcttacatctgtaatcccagcactttgggaagccaaggctggcgggtcacctgaggtcaggagttcaagaccagcctggccaacatggtgaaaccccatctctactaaaaatacaaaagttatcctggtgtggtggcactcacatgtagtctcagctacttgggaggctgaggcaggagaatcacttgaacctgggaggcggaggttgcagtgagccaagatggcaccactgcactctagcctgggtgacagagtgagactcagtctcaaaaaaaaataaaaataaaaaacagcaaccaaaaaaaatgcaaataaaacttctctgaggaaagtgtgaaaacttgagccatcaagtggcaaaacctggtacaagaacgcttttgaaaagctaccttcggtgaagccttgatcctgggaaatggcttcgaaaaacttgagaacatagtttaaatattctgttactcaagaatagtgaaagaaatatatttcctattgtgggaaattatttctgagtagtttcggtagagcataaaaatgtattattaggggatcaaaataacgttttatgtcatttagatacaaagacttggcatgcttctgaaataatttataaatggacatatctgcgtgtcctcttgtggtgttgtgatacatactggttttcatccaccacggttcctggctcataacacccataaccccattaccgtgttttgttataatatagggtacgttaggtctcagaaaataatctctgatcttctcctgctctccttacacgtgtcccaaggcaagattctgatctttacccagctttctgattgtaggtcttgagatcctctctagagagagggtgttggccctataccccggggaagggaagtaaggtttcctatatgaagcttttataaaaacccaggagggccaggcgcggtggctcacgcctgtaatcccagcattttgggaggctgggggcgagcaaatcacaagtttaggagtttgagaccagcctggccatcgtggtgaaa

SEQ ID NO: 101428 - DNA, 1009 bp, Homo sapiens
cgccccaggccgccccgcacacccctcccgccagatgtagtccaggcccagctgggcccgcgcagggatccccagcacggccacctgactgagtgctgggcgtgctgcggcccgctgcttctgcctccgccgccggcgctgcggccagaggaaggcgcccgccgagcacacgggccccgggagcgcactgcggccattatccgcggcgcctcctagtgggtcaatggcaaatccgcctggttctcgcgagagctcccccctcagtggggattatataatttccctcaagcgggggtgggggtgctgagagcaccctccctcaggaaaagttaggtgcaagcaggggtgggagtaagaggaaccccccctggggaaaagggggttaggggtgctgtccccactgcccccccctatttagctggacaatgagtcctcttatgctaatgaggcacttacgtcacttccgctctttctcggccgccattttggctagggcaggttcggggactcggtccgaggcgcttgtattgtctgctgaggggagacgcgggatcagccccctcccccgcccgttgccgccgccgcctccgccggcccggtctcccctccgccgcccgccgggatccatgagctgaactcccgcccccccccccccggccgccgccatcttgtgccccctccccctcccgcaggcagcgctaagggggattttggcgtcttctcagacacagctccctctctcggtccccgctgctgaggagcgagaggagcgcggccgccgccgcccgcgccggtgaagccgcctctcccacaccctccgtctcctccctccgcccctcctttgtctgcaccgctcgacgacgccgccgccgcccgccgctctgctgcgcccgccgcgccccccggcagcacccgcggccgcggcgcgagccggagtccgccgagccggagcgcgacgaggccccgggcgcgccctccccgctgccgccaccgccgtgccgccgccatc

SEQ ID NO: 101429 - DNA, 1517 bp, Homo sapiens
tagcataggttatggtcatgtagtatcttttaaaatttgagtaagggcatgctttgagcaagtaagtttaagttgactttcttctggaaataaaagtaagaggtgtctctaaattatttattgaacagtattcctaattactacattttcctggcttaacttggctgctgaagaaattgaggcccagcacaatggcccatgtctataatcccagcactttgggaggccaaggcaagaggatggcttgagcacaggcatttgagaccagcctagggaacatagggagatcctgtctctacaaaaatataaaaaaagctgggtgtggtggcactcacctgtggtcccagctacttgggaggctgaggtgggaggttcacttgagtctgggaggtcaaggctgcagtgagctgtgatcatgcctggacaacagagtgagaccctgtcttttttaaaagaaaaaaaaatgaaaatctgatttttcatttgcatttctctctgacagattctaccagaaatgaatcccagactataaaacctgtggtgtcatttcgaacattaaaaccaccccctcccacgcttctatagttgaacccatagtacacattccaataagggccactcttgttctgtttcccttatgtccagaactgtccagctggccagtgagggaactgctttccttagggaagaaacttctctcattcataacaagaagaaaattcatcagtgcttgatgtgaaattagttttaagctaagataatagaaatgtaatattctcagtttttttggagtggttagaatttattttttcttaacctaaactcaaagttgagttctcagtgtcaagtatgtggagcagaaattaagtaacaaccttagagaacctaatatagatagtactgccttctcagatactcactagagtagataatgtttgccttttaaatctttttagttattcacacaatcattatcacaacactgtcactcttggaatttaccatagagtatttgagcagtgaagactcatagcatttggaagtcatttagaaaagaatctggaatatttagatgcatttttgtagtaaatctggtgcttaaacactgtaaaattaaatatttacatctgaatccagcatcccattttgctttgtaaatgaggccaaagatgaaatccagatgttttcccttgtatttgtattatcactatatggaatctaagtatatctaagaaaaactaaacttaaacttactttgcttatttcatattagtttttatctgtcttctgcagtgtgtaattagattctttagttttctgaatcaaatgctttgccccaacccctttttccacgacttttttcagctgttttcccttgaaatactgacttggcttttaaagatacattttatcacaattgcagaaatgtgttgtataaaagtttgttaaacagggctaactgaagtcttagatgttgaacagctatgtgtaaccacaatttatactacttgcagcga

SEQ ID NO: 101430 - DNA, 1151 bp, Homo sapiens
taatcctatttctgttgtgttggtaatgtggtataccggctaagctgcctaattgtttttaaagactaacgttacttttttttttttaaactaggttccaatatcatttgtggatcgtgtttatggtgaatccaagttgggaggaaatgaaatagtatctttcttgaaaggattattgactctttttgctactacataaaagaaagatactcatttatagttacgttcatttcaggttaaacatgaaagaagcctggttactgatttgtataaaatgtactcttaaagtataaaatataaggtaaggtaaatttcatgcatctttttatgaagaccacctattttatatttcaaattaaataattttaaagttgctggcctaatgagcaatgttctcaattttcgttttcattttgctgtattgagacctataaataaatgtatatttttttttgcataaagtattgctgccttcattagagtatgtgaatgtagaattttttacatggggaataatttgaaatagtctttttaaaaactggaatcatagatctttatacctaattgatctcagaagtaagataatgttaactgatgaaatgtttatggctgtgtctgtatgaattgaaaaagaaatacacacctctgccctttccttaaaaatgtatctcaaatttcttaaactagaaaatacatttagagcaggcatttacagttcggttcttttcagctgttgaattgatgaaacatttcatctatcaaagcaggtctatttaaaatgcatattgtgaattgggaaacaatttgacagcagttgattacatagccgtttttttctcttttgagcaataacctctatcagtaaggaaaaatattaatgacactgaggcagaaacttagctgctacagtaatttttaaacatcttactgaattatataacaatttttttctcaaaagacttgttttcatattatttaaagaccctcagcaaagctcacatccctactaatttgaaaaatctctgccttaagctcttctctccatttagaaaagtgttctgccagttaaaatttgggctaagctatccaataaagccagggcaaatattatgtttacccactttctctaaagtaggtatttcagaagagat

SEQ ID NO: 101431 - DNA, 1795 bp, Homo sapiens
acattggtcaataaatatttattattgaataaatattgctaccatcagattctcctctctccatatttattccaaattgattcctttgaatccttaaggaaactatgtggataaaggattgcacacactaagctgtcaggtttttctaagggctgtgctgtcctatacccacttcatagtcaaaagataaggtcgccttagaagtctgagggaaaaaaaatgtggattcagggtgaaaccctgaggcacagtaggtccagatggccttaactttgaagagaacaaagttacaccaaactgcctcttcttgctttctcccctctccccacaaaaaaaggtagaaattgctgcctccctatgaactgagacactgatctttaaaaaaaaaaaaaaaaaagtgtgactctgaaaatacggagctccctgctatttagttactgaagaaagtgcttgggtctacccactggactgcccaactccgctgtctttgtaaatctggtgtttggcctgcagtccatctaaagttaggctgcacattcacccactgttaagtgtctaactgtgacctcaactggtgataggtgaatcccaccaggattgtttctatcctgtgatgcctcgttcctgttttaacctagcttcccaagctcatcctagagcaacttagtttatcctggggaatttataaaggaaatcatgagaaatcaaaactcatcataaacatttattggaaaatgactgtgaattatgaggttctttcttgtcatctaacatatatagttgcttcatgatcatctgtccaccctgttgttcaatatttggaacagtttctttcaactttaaattttagggaaatcttaaataatggatggttctgcatcaaatgattcattttaccgtatttcactaatttctgatagtatggtgggaaaataattctataaaaagataactgagaattcattttcacaattattctaagttatttagcaaatatttaatggcctttcttgcttaggacaaatgtatcataatcatcaagtgtgcgagcttttctgtttaccaatggccagtgaaagttttaggctttatacataccagtgaactctttgaaaggtcaggatacataggcatgtgtatttatccagaagttgatatatatttttaatttcttacagattataccgaaaagaagttctagagaaattaatagaaaaatgtgtttctaaaggctacgtcttccagatggagatgattgttcgggcaagacagttgaattatactattggcgaggtatgcaactgatgctaaatagtgtgtcatgttcctggtaaaggagcagtaaggtttagaatttttataataaaaagtttaactttcataactgctaaattgtggaggtcttctagttgtttagaatattcatgcacaaagggtaaaaattcatattagtacatttgaacagtaagatttaaaacattaacagtcagcattctcttttaaataattaaaagttcctggtactttctcaatcctagccctttcttctaactaatcagcattatggactgagtctctttgcttcttttccttttgtcaccgccaatggccaccatactttaaaatgaatgatgagttccatatgtccatttcctgttagtaagagaagaccaggaattacagagcaaggaggtggtgatctgtaatatttagggctcgttagtgagctcttagggtagggaagactctcctcatttaatagtaaaactcttattcagagcaagaaaatagctat

SEQ ID NO: 101432 - DNA, 1126 bp, Homo sapiens
aatttgagagacaaggtcttccattgtcacccaggctggagtacagtggcacaatcacagatcactgcagcctgaacctccctggctcaagccatcctcccattgcagcctcccaaatagctgagactaaaggcatgtgccactgtgcccgactaattttttttttttttttgagatggagtctcactcttgttgcccaggctagagtgcagtggcgtgatctcagctcactgcaacctgcctcctgggttcaagtgattctctgcctcagcctcctgagtagctgggattacaggcacccgccaccgcgccaggctaatttttatatttttagtagagatggggttccaccatcttggccaggctggtcttgaactcctggcctcgtgatccacccgcctcggcctcccaaagtgctaggattgcaggcgtgagccactgcacccagcctgtgtcgacttctcttaaaagttttgtttgtgtagctcatgaaaatgactgttgaaagctcagtggctttttctaattgacagctaatttattctacaggaagcaaaaggagggtaattttgatattgtctctggaactcgctacaaaggaaatggaggtgtatatggctgggatttgaaaagaaaaataatcaggtaggtacatgtgttacaacttctttattagtataactactggaaatgtattcatagcaagtatttggattagctatcatgctgcccgggatttgtgggatcaggttataacttccagtaaatactcccagatagtttcttacagtttttcctgtgattagagcctggatgttttttattaaggaaaaatcagcataaacctttggacctttggtagaaatggtctcattcagcaaaagttactgtactggaccttcagttttaatttatgtgacctgttctatacttttggtctaaatatgtagggtttctccccataattatagtgtaattttaattaagattgatttcagacagacctgggttaaagtcttaactcactgcaacctctgcctcccgggctcaagcaattctcctgtctcagcctcccgagtagctgggactgtggacctgcaccaccatgcctggctaatttttgttt

SEQ ID NO: 101433 - DNA, 1104 bp, Homo sapiens
aaagttgggactaggtaagtcgtgtaatctctaacccctcacacctgctgcttgcttggtgacatgatccagtgtgtattttcccagtttggaatagggccaaaatacagtaacttcctatgatggtttttaatgatcttaatgacatttaaatggtataacttgggtcgcctgtataagtcaagacccactcaggaaaacagaaccactgtaagtctttcagtgtagggaatttaatactgagtctctggttacacccctgaaggagttcctgagaaaccaaatggagcagtgaggctactaagattagtaacagctggaggtcactgccacccctagggatggagcaacggcaggaagagatgttagagcccaagaacctgggctgcccagagggagctagaatgatggggcaggggctgcctggcaggagctagaactgtgggaaattcccagtcagaggtaggagggagagtaacagagggaggaccacttagacttttcccttttcccctccctgcagtcttccacctgtacctcccaaagctgtttggcagccagttgacaagagaatctggaatatgtagttcacccaatatagcacagagtagggaagggccagagaatgggtctgagggcaaatatcttggaccagcatgctgcaaaccttggaacatcctttaagttacaagtttaaaaagttactcttcatttaaggctgggcacagtggctcacaaatgtaatcttagcactttgggaggccgaggtgggcagagcacgaggtcaagagatcgagaccatcctggccaacatggtaaaaccccatccctactaaaaatacaaaaattagctgggcgtcgtgacgcgcatctataatcccagctactcgggaggctgaggcaggagagtcgcttgaactcaggaggcagaggttgcaatgagccgagatcacaccactgcactccagcctagtgataaaaacagttattctttatttttaaaaaaggaagcttttccagcttttaaacatacagcattattgaaaagctcatatgagctcagtaattctgagaggaaactctgcctttatttgtgctaaaact

SEQ ID NO: 101434 - DNA, 1097 bp, Homo sapiens
aaccagccgttctggctgcggttcctgctcagccaaaagagccgacgccagcttctgcttcagcgaattcaattcctcctcacgttgggcaacttcagcttgtaaggcgagtacctcctcccgggaagccatggcgacctcttccggaagttgtcgtgaaaggcatttccgcttccgtcttctgtctcctagcgactgggataaactaaaaaactttatggagcttgggaaaaggtgatgaatagatatttacttcctgaagaaaccttcagattaaacttcaaagatgtataaatccagaatatttctaattgaaccacgcaatggccctagaagaactagcgatcaatcacacaggtcatcccccgcttccgaatttggtacggtccgacccgtccttttccgcgccacattacgtaattccgcttccggcatctggctcagttccgccatggcctccttggaagtcagtcgtagtcctcgcaggtctcggcgggagctggaagtgcgcagtccacgacagaacaaatattcggtgcttttacctacctacaacgagcgcgagaacctgccgctcatcgtgtggctgctggtgaaaagcttctccgagaggtagcgcaccaggtctccctccccgaagaatgagatgagctggcttccccggcccgggtgtcggcagctggctgcgcgaagcggccctgtccagccttctttgcctcacacaggaaggcccggggagagggccaccctgcgagggaagcagaggcggatgcttgttgggttttcttcgtgtcctgggttctcattcctgcccttgggttttgtgagactctcatttatctttattatgtagtactcccgtcccccgcctttccgtagaaaggttggccactcttttacttggaagcgaggctgaaagcgtgatcccactcctccctctaggcggtcaggatctgcggcaagagccgggagtccaagcgagagctctcactctccgctccggtgccgagtgcttacataagcatgaggtttggtgtgtgtgggttagggagctattgctgggcacgataacctttctggaaaggagaaagcagaag

SEQ ID NO: 101435 - DNA, 1048 bp, Homo sapiens
gtgtgctatgctggatgtaccatgccagctacctcactcatttcaggatgatgccgccactcaggtgatggttttcagcagcataacttgtggggctggaaactgcaatggattttccctgattccagccacaacccaagataatccttttttttttttttttttttttttgagagagggtctctcactctgtcacccaggctgcagtgcagtggtgcccccatagctcactgcagccttaacctcccaggctcaagcaatctgcctgcctcagtcttctcagtagctgggactataggcacatgccaccatgcctggctcaactttttattttttatagagacacagggtcttgctatgttgcccagtctggtctcgaactcctgggctcaagtgatcctctcgcctcagcctcccaaaaagctgggattataagcgtgagccactgtgcccagccagaatatcataatgttaaaaaatctacataactttctaatatcagcgctagctgtagtctgtttctctctagaaatgtagaacttgaaaaagaatttggttactttagtctatgaattgggtggcagttactcaactcatttcatacactagattattctctgtgctccttcccttcccacccttgataaacccattttggatcaagggcaaagctttgttttcccaggggaaaacccacaaagaacaaatgaaagccccctgccctgaagtagctgtggttgccagtcattcctagacttgagatttgggtgtgttttggtgtgtgctgccttcaagtaacattctggactctctttttgctctgaaccagttcaactttgttttagcaccaattttcctttagtttccaccctttcagaaaaaaaaaaaaaaaagaggggttttcttcctggggaatgatgaaaccatttatttggctcttctctgctgcatttttgacacctctttaattttttatggatccagggatctggtcaagttgtgcctgtgaatagacgcagggctggggcctgttttgcccatccagagt

SEQ ID NO: 101436 - DNA, 1048 bp, Homo sapiens
gagaatttcgcaccaggcaccaccagacctggcccgcccccggtcagtcaaggtcagaggctgagcccgggttcctaccccacagtcattcagcagcagaatgccacgagccaaagagccgccaaaaacggacccccggtcagtgaccaaaaggaagtattacctgcgggggtgaccattaaacaggagcagaacttggaccagacctacttggatgatggtaagacgcttgagttttgtcactgcctgtaaggatggtgccctgaagcatctctgcccaggaagttcactgcatggcctacggattccgtaatctctttgggcctcagtgtccccattttaatttaaggaggttgaataatatgaccctgaaagccacccctagctctgtgcaagaattacctcccagcagtagttgcagaggggaagcagtaacaatttcagatgcccccctccagaatcgcccccatagaaaaagcaaatgagggcaacccggcatcccctgggtcatgaactgggtccatttaactgcttccacactctttccaattgccagatttagactgaggccaagaaaataggaaggaaagctaacctcctttcattcctgtacagaaaaaaaatcccattttatagccctcttttgtatatttgagggagggagagggaggaaaaggaagaagaaagctcattgaaaagtggctttatcagaacagcttgcaggcaggctgcgggcacttctctaccctgtgctcgtggaacagagatgcgcattgatgggaaggaagcagtgggcttccgctgtggtgagcccagctgatgggtggtttgggccaaggaaaagatgcagaggaggctttgtgtgagtctgtaggtgcccgtttgtgggcaaggggtctgcccagagggtagtcttgtggagaagctgtgatgaggtgttggtccaggatctcagggaggaaggacaaaccgcattgctaagactcacctgggagccgcaaggtgcattgggaggtcggagagggtgggatgagcagagcagccttgc

SEQ ID NO: 101437 - DNA, 1042 bp, Homo sapiens
tgagcgctcataagactcaggggtaagaatagtgcctggagaggcaggaatgagggtaggagccaggttgtgcagggccttgagggccacagtgaagcttccacggtatcttgagggcacagcaaagcagggaagggcttgaaatctgcatctgcatgaatctttgtggtgagtgaccctacaagggtcccacccacatgagatctttctccagcctcccaggaaccttctagcctcacaatgatctggtaagtttctctcgtgtaacaaccttgacctgtctttgaagccatctcctttgttattagattatgtcagttgttgcttaaaggctgtgatttaataactactgtgggtctttgcacagccgccttgcttctctgggcctcagttgccttgtctgccagtgcagggctggctagtttctaagggtactctcaagaacctgtgtgctggaattctatggctgtcagtgggtagagttttgtctgccatgcacacccaccagaggtgggaaaaggtctccttcttcgtgttgcgtcccttgacccggagaggacagtccatgagaactctcctcttggtgatgccctttttgttggaccgccattttgtattttctgtttcatctgccacttattggtgtgagcctggaagacagctgggaatggaagctttatggatcctacttaatacttcctgaccacatttccagctactattttctccctttcttccccattatgaacttctgaaaatgatcttttttttttttttttcaaagcaagctcatataagtggaaaaagaaatgatgctgttggtagcagaattcaagaattcaattcaggcaaggagaggctatgggggagggtgacaaaccaaacatcaacatgttgccatttccgctgttcatttcttactcagtcttcaggcttcaagctcactttgcaggtgtggatgaggacccactttttgatgaagaccctaggttggcctgtacagtcacgctcctggtggtgacctctacctgaaaaggggaca

SEQ ID NO: 101438 - DNA, 1024 bp, Homo sapiens
agttcacgctgggaagtccaggctgttcctgacttcagtgggaaccctggcccttggccacagggcctcaggcggagtcgggggtcccagcaaaacattgcaaaacaggaaaaaatctaaggacacaaaaataaaagtgatgtggcagcgggaaaggggttgccatggctttgagcgactcgctgcgcctgggtgggatccaatgttttggaaggttccttcacatgacacagagttttggaatttttcggctggtaaatccttcttaattcaggcccccaggcttggccaactagctccctggctctgtgtgtcctgcgggggcgtaggttggaaactggcctgcatcagattactcagctttgaaacttaaattgtttgaagagaattttttgttttgttttgctggacgattttcttggaacggtctgatggcagaggctcccatcacctgtccagaggacaaattgattttttagaaaggacgcgtgggtggtggaattccctctttcccactgagtcatcatatcctgacatgagtcattttattacttggaggtccccaaaggttgtattttgagctttgtttaataaatataaatgcatatgcttaaaataatttttttttttctaaattaagtatttttccgtgaatttgtgccctggaacaatcggaaccatcttagagcagacacctgctcttcccacctgtttctctccctgggtttggttgtacccggcgtgatgttctctgaaacaatagacctggtatgggagtctctagatggggcttccctctgggaaatgtcagactccagacagggctggggcatgactaaggctctccggacctttgccctctgtgactcatgtccctggtgtcagtggccccccgggctggagcccatcacttacccacagctttgctgggacacgaagctgctctccaaagatgcgatccagattgcaactccgaagctgccgtggagatagagaaaatggtctcgttttcagggatctaaat

SEQ ID NO: 101439 - DNA, 1090 bp, Homo sapiens
cagtttgaattctctagtgtgtttccggcatcaagaggatacatttctgacccttccatgcctaactgaagaatcccaggtgaatgtagttcctggattaacgacaagagacaatcgggggtgttagggacacggtgggcttctctgcgggggatgtctggctctgagggctctctgcagagagggggctcgccttgcatttgctggtcctgctcttttgacctcaagagctcacctcccagcccgggacgccttctgcagggggaatccctgttgctcaacttcttttttccaaaactcatccccgttcccatctccatggacatttggccagcaagggctctgcggggcggggcggaacagttgaagttttccaaggaaggggaatcccagctgtttctcacattaaggaaaggtgacagcctcctgggctaatcttagccccgagtttggtcatcggcaccaccagctccaatgttctttttatagctgtcgactaaaatggaattggcagtttccactccagcaagatgacaaattggagagcagtggaaaaacagtaggagaggggcagcgtggtgtttcttaagttagaaaagcttggtgttttggaaaatggcatcttatttatagcagcaataataataatgattattatattatttgtattactatttttgattatttttgtgactttcaagagcctgtgtgatctggctctgacctcagcttttttgactctctccctgccacttggccatagcaacacctggcttccctctgtcctcaaacaccccaagcccatttctgtctcaggaccttggctttctccgtttgctcttagaatgttcctccaccatttcttttcttttctttttttttgagacggagttttgctctgtcgcccaggctggagtggcgtggcgcgagtgcgcgatctcggctcactgcaagctccgcctcccaggttcacgccattctcctgccccagcctcctgagtagctgggactataggcacctgccacgacgcctggctaattttttgtagtttgtttagtagagacggggtttcaccatgttagccaggat

SEQ ID NO: 101440 - DNA, 1051 bp, Homo sapiens
gaaagtggattttttcacatgctcttttccctctctgcctctctttgtgacatatatatatatttttatggaggtataattaagataaagtagattgcatagattgtaggtgttcagtgatttttgacaatcgcatatacccacgtaaccaccactcaagacagagcactttcttcactcttgaacgttccccatgtcccttcagccaaggccgcctcctcaagcccacacacggaggcagcgctgttctgatttctatcacggttgattaatcttccctgttctagaactttatagaatggaattaatacagtgtgtacccttctgggtctggctgtttttgctcagcatgttatttttgagatctgtcactgctatggtgttattcagtaatgcattcctaattattgctgagcactactattcaattgcatgaatataacaattgtttatttaccattgatagaaatttggtctgttcccggggcttaggtttatggataaggctactatgcacattcctactcaagtccttctgtgagcaaatgctttcatttctcttgggtaaatgacctaggaagggacttggttgtgtatgtttttatttatgtattttcaacatcatagtccactctgaacaaggatgtatgagagttccagttactctacatcctcaccaatatttggtattgtcagtcttttaaattttaacccttctaatgagagtaaaatgggatctcattgtggttttaatgtgcatttccctaatgactaatgattcaggtgcttgttggctatctatgtgtcttctatttttttattttttttgagatggagtctcactcttttcccctaggctggagtgcaatggcatgatctcggctcactgcaacctctgcctcccagcttcaagtgattctcctgcctcagcctctggagtagctgggattacaggcgcccaccaccatgcccggctaatttttgtatttttagtagagacggggtttcaccatgttggccaggctggtctcgaactcctgacctcaggtga

SEQ ID NO: 101441 - DNA, 1015 bp, Homo sapiens
ccccacgggactgacattctagtggggaggcagcaaagagcaaataactatcacatgtggggtcaggtggagggaagcgtcaggtggatgatgcaacttaaggcagggtgtgtggagggacagtgggaagggcgtggggtgtcacattggggtgcggctgtctgggaaggcttctctgatgagaggtcacctgaggacaggttccaatgaagagtggggtgagccctgcaggtcatggagggagagcatttcaagctgagggcatgataagtgttgggatgcagggacgggcacctgcctggtgggtgtctggctctcttgagggtgacaaggccagtgtggctgtcatggggggcagcagggagggaagaagggtgggtgggagatggagaagcagggccagatcatatgggatcttctgagtcatggtaaggactcgggctttttgatgcaaggaagatgtttgctgttggggcgattttagcagaggtggcaaaagctctaacttaccattttaaggatctttctagctggactgctatgtgaagaagactgtgtgtaggtggagggagaggggtgggtaaggagactgggccccctctttgaccagggcactagagtggaagtgatggagagtcacaggtggcaaatttgagtgggatttagggaatggaattgacagggctttgagatggatctaatatgggatggaggcagagagagttaccaagagttagggttgttattgaagtgattaacacacagtcatggcttgttggaatgggtgagagtcaagtcacggacgaagtgtgcctggtctgcttgtgtgtgtgtctgtgtgtgtgtgtgtggtgggggggagagggtggaaggtggggttaggatggcaggtacgtgctgcaactttagcaccccaaaatagatactgaattgggatccatgtgtgtttgtaaaaattttctccccatgtgctgcatggccatggggaattgcagtcctcttccccggtaccctc

SEQ ID NO: 101442 - DNA, 1041 bp, Homo sapiens
aactctatttcattgtaatttttgttttctttttatcattgtatcaaactatatggaaatcatatggttagatgtgagtgattatttgataatgttagtccatttgaatccattttcgatatttcaaaattaaagaatatgaaacttcaaaaaaaaggactgcagggtaagagggatttcaggaggcaatgtggttggaaagaaggggaggagatttgcttgcacagggaggatatgattataagttggatgaaatgtttaagttggactctggcacagatgaagtttatggaggtgctaccccctgggctccccttggtactgctgtgatagagaagacatagaattggctttattgcaagtgcttaaccaagcccagctgatagtgtcagctcctagcagccctgagctaactgggaaaaaatactctgatgaatgatttctgccatatgtgaaaactcaggacatggtgacataaatccatagtgatgcttttcaaaattcccaggggaaaagaagggacagcagttagaaatatgctagaactaacataagcttcattaattgagaagttgctcacactgtctttatcaaggtggaagagaaagcaaagaggaagatctctaccctgtgaacagttctacctgtcatgtgtaagaaatatgtgctgcctcagcattttgttcacatacaatcatgccccccatgatcacattttggttagtgatggaccccatatgtgggggtggtcccgtaagattataatactgttttgtttatgtttttttttttttttgagacagtctctctgttacccaggctaaagtgcagtggcgcaatttcagctgactgcaacctccacctcccaagttcaagtgattctcatgcctcagcctcctgagtagctagaattacaggcatgcaccaccaagcccagctaatttttgtatttttagtagagacagggtttcgccatgttggccaggctggtctcgaactcctggcctccagtgatctgcccacctcagcctcccatagtgt

SEQ ID NO: 101443 - DNA, 1032 bp, Homo sapiens
gccacagcacttcaacctgggcagctgagtaagacctcaaaaacaaaacaaaaatcaccacactcccctttggctggagttcagagagagggaggggagagagtgaatgcaggcgagggtagatgcacaggcagggcccagccaggctgcctggcgggggtcatttatttttacctaagagctgtggggagccattttggaagtaggggtaccatatggaccctaagagatcagcttggctaaactggacagtatttcctctaggatagcccagaaagggaacaaggaggctgaggctcactggggtggccacctggggtcccccaaagcaggaagagggcttgtttctggctggcaggccccggacatggttcttatatttacttattctctcagccactcggcaaatgtttatgggggcttgcaagtgccaggccctgtggtaggtgcttggcagacaatgctgggccacagtgacacgggcccaacactgacggagctctgggtcgagtgtggggttgtaaaattctctaaagggccaaggagtaaatatttcaggctttgggggccattcggttcccagactaccaactctgctgttgtagtataggagcaagctgtagcttgctttgttcaccctgtgtcaataaataggctggctgtgttgtcataaaactatttacaaacacaacccatgggccgcatttggcccatgggctgtggtttgcctgcacctggtttggcagaatgagattccctaaacagatacctggtgcgacgggagctgttagcaggcgtcagtggagaaaagatggcagggaaaagggaaggaggggatctttttgatgggtcgatctcaggaggtgcgggctgagcagatgcaggaaggaaccaggggaagtgggaggatctcgcggggagggtttccaggcagagggaacccaaggcgtctgaggcaggagctgcttaagtacggcgaagaggttggaggggttgttgctgactcagcttggggagaagtggggagtggtg

SEQ ID NO: 101444 - DNA, 1029 bp, Homo sapiens
ctccaaggcaggagggccccaggaaatggcttgaaaccagcaagagacagttcttcccatccagatttgaagatggagatgagtccttatgtgtgccacatgcctgggccctgctgcccccatctaaaaggtgaccttgaggcctgcgggttgcagattccatacatttctccacccctatccaaaagcaatacgtgtcagcgcgtgggttcgtgtgtttttgcaagcggtcatgccagagccagtctgcaagcctcattgcttgtggatcacctcagtcctgtgtcctgggcgcctggccttgcggcagcctgcctggaaggcaccactgagtccttctttcagccccgtctggggaaggcagacagctgtcttagctggggcaaggtcagcaaagacatcgccttcaggatgactttttccagtggttccatggacgagacaggatggcaaatgtcctccctttcctttttggcatttctggacctgatttatccagatggaatttctcgactttcaggcctgtgtctgtatgtgtcacctccgaacgaagggtgtgacaacctgactctggtcattaatacacatgattcattgattgagaatctacttactgttaggtggtgtatgtgtgtgactgggtggggcgtgggcagcagtggtctgggggcttgtcagaaagtttgctgagtgtcagatttgttatttggaggcaacccattgcttttcaaaggggttctttctctaggttgtgcacacctgccggatgaagaatctgtccaccttcctgctctgttttgggattctttgtggcccctgatgggcaggaagttatgagagttgtcggggcgagtggcaggaggcgaggtttgcctctctgtctgctcccctttcctccggctacagatctgcggtgccagctgtggcatcctaagtgctgccttggcgacagactgtcatgtcccaaacccaggccctgggactcacgccacctcggcatcggggtgagctcatcaagccgtgggtcgg

SEQ ID NO: 101445 - DNA, 1003 bp, Homo sapiens
ctggctaaggtagaaatgagaaatgacagggagctctgctatttttctgtttctttctccatcccggtggatggtcctgcctgcctcctgggcatttggatctaaagccctgcacttgaatctttaatgctttttccctctgtggaagaaatataccaaaggcagactgtaagccacatgcagagtggggagattgcttttcctgggttggtatttgggaccctcccgaccttgtaatctgaggttttggaaaaagagcatttcttcagctgggtctgaagggaagaaagtggccagcaaagctcaggatttatgaaggtccttatcaaaacagacctgcttgggcatgcctgcaaaagtgagaatgttaaatgagggggaaaaaaaaccccaagtctgaaatgcctgctaaagttattttaaaggttatggaaaggggctgtttacctgtataatcctaagaaggtgcgctgcaggtctaaaatccacaatgggtgacatcacctctgttgccatggagtagggaggaatgtcttaataaccagggggttggcaggggccactgatgaagtgtgcccacccccaggaacatggcactgaaatgaaagctcctggggaaaagtataaataaagaagctgtcagtcaagaaggcattaattttaaatctctgaccccggccaagggttacacaggccccactgtcttcaagggggaagtttccacttggattttaggttggctgaaagaaaaatggaaatcagcctttcaggctgtgcgaggggatgtggggatcagtaagagaccaaactcgcagaggtggctggtcggagagagggactgtttgctaagttgggcagaggatggaaagaagggatgttcccctgctcatgtcatcttctgcaggcctttgacagagtgggtgggtttagccctggcgagtcctgttgcaggaggattatctgaagtctatttctggggaactcttctgaccaaatctttcct

SEQ ID NO: 101446 - DNA, 1041 bp, Homo sapiens
ctgtgttaggcagataatgaagttttcgcttccatcggtgtcctctctggccacgttaggtgaggggtttgctttagctttgggtatcctcttcccttggatacccagagatggtcattagtaataattttgtgtcttggctggagatggaaacaattagccaacagaagagaccagtcttctagagttgcaatctggaggacatcttttgctttgaaaagatacaattaagaatctgcaaacgatccgcactaatatccgtggtctttctgttcattaagattaaagtcatgtttttcagggaacgaatactcacacccctcccagattggtaatcagcttttattttccttgtcgggtggggtggggggatttccggggaaatagtttccaagccaaatctgaagggaggtactttttatggtttttcttggcaagtgctgcttggtggccaccagatgggtatctaaatgaccacaatgaaagccctggaatctgttttctcaaaaaaaaaaaaacaaaaaaaaaacttcagtttttggaacagtttcagatttacagaaaagttgcaaagatagcacagagagttcccatatacccaataccctgtttccccgtgttattaatgttttacattagtatggtgcatttattgtaaccaacaaaccaatattgacacattattaactgaggtttatgccttattcagattgggaatgttttatgtgaccttcactgttttgaggagtgttggttgtattgtagactgtcccttcattagactagggctctaggttttcgggaggaagcccacaaagataaagctcccttctcatcacatcgtatcaagagtatgtactatccagccaggcgtggtggctcacgcctgtaatcccaacactttgggaggctgaggcgggcggatcacctgaggtcaggaggtcaagaccagcctggccaacatggtgaaaccccaactctactaaaaatacacaaattagccaggcatggtggaaggcactgtaattccagaaactcagg

SEQ ID NO: 101447 - DNA, 1050 bp, Homo sapiens
ctttgcactggtggttccttctccctggaatgctcttcctcctgggattggcttggctggccctcaccttttgtgggtgttcactcaaatgttctgttcctcagcctctaaaattgtaccatcaccccctacacacacacacacacacacacacacacacacgtcttatttcctctaccccattatatttttctctttagcacttctctaacacacatagagtttacctaatttatttgtttattgactcgctgaccgggatgaaagctcttcagggcagacatttttgtccatttttgctcatgggtttctggtgcttacagccagccccggagcataatagacaagcagtaaatatttgttagaggcatggttgggacttgggtgccggaggctggcacagcacatagctcctatcgcgtcagccaggtcttacctatggcggttttctctcccaggtactccacaatttacaccatgtttcctgtgttttctctggtcctggacaaagatgtcaaatcggaagttgccatgctgtatcctgagctctacaaggatcttctcaaggttctgttagcttttcagtccctccttcctcctttcctcctttgcttttcccttccttccctccctccctgctttttttctttgaatttatttcacacagaccctccaattctgatttgaacacacttgaactggtagcttttttacttttggggggaaggtgtgggagtttacattttttcttaaagcagtaatatattcactggtataaagaacgtgaaaaagtacagtaatagataaactgaaaacaagccaactcacgacttgcaaaaagcccctgacagttccgctttgcagttgcaacttaacgtttgctcccagagatgttcttgtgtacagttccaaaaagtgtgtgtggtggcgtgtgcctaggcaggtgtataattttatttgtcttcagggttttttacccaagggaaggtttattcccatgtaatgttaattttaatgttaattctttttttttttttttttgagactaat

SEQ ID NO: 101448 - DNA, 1027 bp, Homo sapiens
cagagctgtggccacagctgggcttgagtcccatagggctgtttacctgctcagcctccccttctgtaaagtgtgggtgatagtagggcttgatcctgtgggctgctctggagatcagctgtgctcatgtacaaagcattcctgggtcctggaacttaataaatattcacaacaggctgagtagaccctggagctgtgatacatcaccctacccgggaatgattcctagatttgctgcttaggaactgtgtgggcttgggcaagccacgtaccctctctatgcctcactttctgctttgcataatgaggatgatgagaatcgtacctacttcatagggttgttgttgatgttgtgagaatgaaatgagcaaatccatgtaaagtaccttacagcagtgccggcgcgggtgttatgtaagtatcaggtgttatttttattctgtaaatgtaagggattttgtcatgacttttggtgacatcctcctctctccttggcacaggctgtcttttcctccgtgttttactttgcctccgtccctctctatcaaggattcctcatcattgggtaaggaaatcctgccaaggaattaattgtttacaaaaccttcttcaaatgctgcaacagagagaagaaacgtggtggaaaaattcttgggttcccaagccacattggattcccagccccagcgaatgcaggcccagcaccatggtttagaacctccttcaattaacaaggttttgagctgttaagcccttaaccagatggaggaagtggagttggagatgtgtgtggtgtgttgcactttgccatttgtacctggtcttgaaaaaatactccagagttatcagttgattgaggagagcaaggtggaaggtttgcagacttggtgatttcactggggtcttaataaaaaggggtgggggatctgaaaaatgccctcctggcctgaactgagcccagtagaagtcccatccttggagctccagggagggccagagtccactgcctcggggatgtgcaagtaac

SEQ ID NO: 101449 - DNA, 1021 bp, Homo sapiens
gttagtagctctgggtttttgcctcttgtttaattagctcttaagggaactgaatgttttaaaatatctatttttaaatgattctttgctacttatggggtgggctgaactcccaaagtattagatccacttgacgtccaaattataactatatgtgattcggaatggtttttatttaaataaattccccttttaaaatcaaatttagacttggaccaccaactgcatatagcttgaaaccaaagaatttctttcttgaagttcttcaaagatttcctacaatgtcttgctttttcagtgaaagaaaatgtgtttgccctgacctcttgtgcttctgatggtgcctaattttattggattttaggaaggaaaacaggcttcgttggctgcagacttctccatcactcaatttaagcatcttggccggttgcttatggtgcatggccggaacagctacaagcggtcagccgccctcagccagttcgtgattcacaggagcctctgtatcagcaccatgcaggtgagtggacagctggcccctctgcacatgtgcctgtggctataccatgtaggtgggtgggcagctgctccctctgcacatgtacatgtggctatgtaattatcatggaaaaagcctgggaattagattatgctttggagctgtcacccctacctcgccagtttaaatcccccacctggctgcattccagctgatagaccttgagccagtccctgaacttcttggtgctcaagattcctcccctgttaagcggtgctggtcattcctgccatgtggtgaggatgtgtgcgttagcagtggtgacatccagtgcctggcatggggcaagtggagtgtacatgagttattttaattgtgggtacgttgttataatttgtttgctggagtgaaagacgcagagttaaatgctgaatgactattcaggccctggtttttcaccttttgcagaggtaagggccatcagagaacaaccactaaagaagaatgtactttgcttgtgtg

SEQ ID NO: 101450 - DNA, 1111 bp, Homo sapiens
aatgagtaacactggttattctctcaacattttttctgtgtgtatattactggttatgagtgtgtatatatttgctatctatacaaatatcttacacatgtatatatatgtaattttcatgtatttttttaaattgaaaacacactgtacattttgttgtgcagcttacttaaatctgctacatcatggatttgttcctacatgagagcatacagagccatcacttcttactctgactctacctttttattttgaaaaatgtcaaaagttgaaatacaacaatggaaaagttgaaatagaacagtgagcattcatctacccttcactttggccaattgttactatttgctacattatctttctttctttgaatcagtagaaagtaaattgtatgtaatgttacccctaaatatttcagctggatctctttagaacaaggacattctcccacacaaagaaagtaacatcataaccacgccccaccccccgccccgcccccccaggcacccccaccccatgtaacatcgatacaatgctactatataatattcatgctcaaccccgtgttaacattgatatataatggtactggataatattcatgctcaaattcccccatctgtcctctgagtgtcttcacagcttaagtaataaaagctccaggaaggattgcaaatcacatttattagcatgtcctcatgtttctgatcttctttattgtagaacacgtttctctctttttgtttggtttggttagcgggtgttttgtttttcatgtcagtgacatttttgaagcattcaggacagttgtagtgtctcacggcacacagttcttgaacccatcagattgattcggttccaattctggtttggcatgagcactgtacaaggggaattggtgttcttcctgttgtgtcgtatccagaggctctcatgtccctctgtccctttattgctggctgtcactgccttttaaaatgagagaattcggccaggtgcagctgctcatgcctggaatcccagcactttgggaggctgaggtgggcggatggcttgagctcaggagtttgagaccaaactcggcaacatggagaaaccccatctctaccaa

SEQ ID NO: 101451 - DNA, 1043 bp, Homo sapiens
aagaacctgactcatttacggtcagcgttttataagctgagttaaaccccagaagggtctgtcttgctcatccaactacatagaaagtccacagcgtcaaaaatgagtgtttcctgtaggacagggaagtgccccctcacctgtacagcctttcccttcttttaggatatttatcactttaagaaaaatcctcagaaggggaattatgcggtccaaggaccgagcttcatagtacctcctgtagtgtgtggccaaatggccctttctagaagcatctgccagtttttgctgctaccagcagtggttgcttggagtcccagagcccttcagccagggcgcttgctgtgttgtgttggggacagcatgagtcggcaggaggtaaacggaacataccaagttcagctccatgttgttggaaactcagctgttgcagatgacaggccggcctcaaaaactaataaacaggacctctgtcacgccatgatttcaggtttggatgctgacaggggacaagctggagacagctacgtgcacagcgaagaatgcacatctggtgaccagaaaccaagacatccacgtttttcggctggtaaagtgtcctctgcgttagggccatgtggggatgatgttcgatttgtcctataacctcctaaccttgagtgggccccttaagaagggaggggcagcatgtgaattacctagggtggggagcatcaaccacggttgctttggatgggatgattaatgacccaggcgccggctggagagtttcttccagtagtggtttgggagtacctccttctagccctgtgctaatgccatgctcttaaccttttgggggtcgtggtccctttgagaagctgatgaaagtcaggcactccccccgaaagatgcagatccactcatacacatgaaattatgcatgggattcctgggatttcacggaacccctgaaagtcaagtccttggataagaaagaaattccaggccacagatactggtccatctgccctcctgagaggggaagcatttaggaccattga

SEQ ID NO: 101452 - DNA, 1079 bp, Homo sapiens
gggcgcggtggctcacgcctgtaatcccagcactttgggaggctgaggcgagtggatcatttgaggtcaggagttcgagaccagcttgaccaacatggtgaaaccccatctctactaaaaatacaaaaatgagctgggtgtggtagcgtgcacctgtagtcccagttacttgggaggctgaggcaggagaattgcttgaacctgggaggcggaggttgtaatgagccgaaattgcaccactgcactccagcctgggcgacaaagtgagactcctcaaaaaaaaaaaaaaagaaatttaggatgggctatagaggaaatgggagagagttttatgtatttcctccaaaatcagtaaaaaggaaaacagttgagctgagctgcaaatgcagagaaatctgaggtggaaggagcaatgttggaagggcttgtcagtcttagtctcagagatgagcaatactaattaagtcttcacttatcacttacttttaattgatgaagtgttttgctgccattctcttaacttggtctcataacattacatgaggacatttaatgggatgaggcactgagtctcaggttaagcaacttgttcaaggttacatgccttggagaggtcatctcctgggaggaggagagtggaaggcatattggcatcttgaagaagaaagatatttcagacagttcatgggagatgccttgtggagttaaagatacattttcacttgtctgaattcctctctgtgtgctcggttattttggggggaggggtgcggtaggggagggagagcacagcagtgatctgatggcattgcctgccctgcctcttagtgggtgtatgatttggagtcagtatgagcagctgggcattgactgcttccttaattggcctcagtttcccctgcatctcactgagtagacatctaattgccctctgattctaatgtaaacccaagccatttccttctagttctcaacgccaggaacagccagcaagagtcatcttaattatgtgagatttcacttctgtgttccctataggctgtaactcttgcctctcggttaacaggtctgctattatc

SEQ ID NO: 101453 - DNA, 1003 bp, Homo sapiens
actaacttctgatcaaggactaaatgaagcaagcggacaattagccttgaaagaagtgcaaacagaggcataattaacacaattgctgatgcttctttcctgctggggacatctgggcaggctgaccataagtcataagccaaagatctatgctcttttgcgtatcttcagctttctcctacatatgtggtataaaaaatcgacctgatatctttccttttccacttctttctagatagttgagtgatgctctctgcttactctttctcatttacagaatcacctgtaacctcaaggatctcttgagtaacaagagacaacaaatttttcagtgtagcacaaaacccatgttgtaccattatctaggattgcaattaatgtgacttaaatttcaagacctaagaatgcacctttttcttttttggagttgtatgtcattgtggttaatcagaaggtataataatgtagggaaggtgcattcattaatggggaattgtttagctaataattaaattgaaactttatattcctaaacccaagtactacttatgtttcaaagtataagctctgtccagacatggagaacactaagatatgcattatgatttttttttaaagaagagaatggtatggatagacttttcaatgttactgcagcaaaactgctgcaaagatccttcactaaggacctcaaagacaattcagtgagcaaagaattcccttcccaaatttcccttgtctgagattcagagcatcagcaggtacaagtgaatcttacttataacagattttgctgaatactttttcatactgcctggtacagatataaagttttttttttgtttgtttgttttttgttttgagatggagtttcgctcttgttgcccaggctagagtgcgatggcgcgatctcggctcaccacaacctctgccttctgggttcaagcgattctcctgcctcagcctcccgagtagctgggattacaggcatgtgccaccatgc

SEQ ID NO: 101454 - DNA, 2190 bp, Homo sapiens
ttgttgctatgctgctttgcaaaaagttgaaaaaataaaaaaaaaatgcataccaaaacaaatacagactctttttttttgagatggagtctcgctctatcacccaggctggagtgcagtggcatgatctcggctcactgcaacctccccattctgggttcaagtgattctcctgccttagcctccagagtagctgggattacaggcaggtgccaccacgcccggctaattttgtattttgagtagagactgggtttcaccatgttggtcaggctggtctcgaactgctgacctcgtgatccacccgccttggcctcccaaagtgctgggattacaggcatgagctaccacgcctggcactttttttttttttttctaattttggaaagaagcgggtcttgcaaagtagctttgttacttgtaacagacgtatacatagaacctttgtacaacctagagtgactttttccaaagactgttacctatttcaaggtagaatcgttggaacttactgaacaacagtggaaaagacaactacacagcctcattgaggggagatgggtactgtatacttactggtaactggacacgggtaaaaggacaaggtctgtcatctctttagggacctgttttatatgccccaaccctgtccccatcttattgtttttttttgaatgtacttaaaaaaggaacaacaaaaaactagggttgtagaattataaaactgcttcaaccttagaaccttaagtaggaggccctcaaatggacttacgttagtccttagggagtcaatgtgtgtgttgctgcttatttaaatacagttcagttggagccccgagagtgccaatgttttccccacacctcttggatgccttcctcttcccaaatcccagaagaggtgggcacctgagcggggaatctcaggtgacttagtttgccagtgcctactctattgaagaactgggttttcatgctcgagaagaaactcgtggaagggcgtgtttcccatcacaggttcacatactgattgcttttgttgaatttccttggtgcgacttatgccaagtaattatgacgattttttgttttgttttgtttccttgctgaatatttcatgaaggctacgaagttagaacaggcacgtcctgggtgtgaaagctttaatttatctacctcatttattttttattttttgtagccatagtgtctattttcctattttaagaccgctgaagtattcccaggccctgtctaaagcctaagagttgatgtattggtgggaagaggtgaacgttcaagatgattttgtgatgccttttttttttgtagtttcctttgtaaatgtgatattgagcaaacgaaacattgctcttggtttaacaagaaagaaagaaaaaaactctaatttctgggagaaaagtctttcccctctatgtggaaggtcctgacggaaatatgcatccaagacgattagccaaagtgttgtctcttcatcgttgcacctgactttaggattccgccccccttttttttttttttttttttttttgccaagttgtgcctttccttctggaattgtaagtgaacacgataatagtacctgtttacactgtgaagtggatattgttacagaaaacacaccagtggctttctcactgttgagctaataatgccttgtgaatgtatgatctacggagaaacccctgtagttgtacctgctgatgctgtctgtctgttggaaaataaaatttgaatgtttttttttctcacccaggtgtatataaatttttctggtactttctgctctatacctgagaatctttacttgacaatcactttcagctgccttgtgacactcttgttcctagcgtcaaaaagatgcacacctggctatgtccatacttgcctcactttttttttttttttgacagtttccctcttgtttcctaggctggagagcaatggcatggtctcggctcactataaccttcgcctcccaggttcaagcaattctcctgcctcggcctccggagtagctgggattacaggcatgcgccaccacactcggctaattttgtatttttaacagagatggggtttcactatgttggtcaggctggtctcaaactcccgacctcaggtgacccgcccacctcggtctcccaaagttctgggattacaggagtgagc

SEQ ID NO: 101455 - DNA, 1753 bp, Homo sapiens
agagaaaacggttccgtggagagcgatggcttgaccaacgactcatcctcgctgatgggagaccaggagtatcagagccgaagcccagatatcctggaaaccacatccttccaggcactctccccggccaatagtcaagccgaaagcatcaagtcaaagtctcccgatgctgggagcaaagcagagagctccgagaacagccgcactgagatggaaggtgatagagctttggatttaacttatgtccattttgggctcaaggtcatcaaaaaggagcctgggttgaactttacaaacggagagtatgacttgaagcagccccttctatagggcaattagcttttctttacttctgggtagagggcaatagtaactgcctctatcctagtaacgaacatgcttttaatttatgatggttaatgcaaaatgggtatggacagcataccttttttgttggtttttatttttgtctttgagccccttgggacataggggtgggtagtcgttctattttgttatagtttttttctttttgtttctccacactatgattctgtatatgggtgtcttaagagtatgtttgaggaagtggccactgctttttgaccactgaaataagccgtggttccctgactctgaggccccactgcctgatgtaatgttcacaaattagccactcttgaagcagggaaagatgaacccattttaaatgcacatatctattgagaggtttgttgatgtcattaatggtaaaataagggaaaagctgtatcaaagaatcaaagaaagatggtgtctgggcatatgctttaaaggtagtttcttatgcagaaatttgaacttaaattacatatgtgtttatatgttgcccatgcctttaaaaaaaaaaaacccaaagtgataccttttcccaagcatttgaagctttattctttgtgcagataaacaattcaaaggggaaggtgttaattacttacaaagccagctccagactctcaaactagcaggcagttatttttaaagatctcttttgctttgaagagaaagaatgaaggttggatgataaaggtctggcttttttcccctctgtgtactaggtcggagcagtctcccttccacgtttatccgagccccgccgacctatgtcaaggttgaagttcctggcacatttgtgggaccctcgacattgtccccagggatgacccctttgttagcagcccagccacgccgacaggccaagcaacatggctgcacacggtgtgggaagaacttctcgtctgctagcgctcttcagatccacgagcggactcacactggagagaagccttttgtgtgcaacatttgtgggcgagcttttaccaccaaaggcaacttaaaggtgggtttgtgtgggctttcagcaggatgggggctaggcaccaggtgtcttcttattggcacaagccgtgatgagttcttccatccttccattcctcctttgggaggccgaggtgggaggattgcttgagtccaggagtttgtttatttatttatttatttttgagacggagtctcactctgtcgcccagactggagtgcagtggcgccatctcaagctcaagctcactgcaagctcctcctcccgggttcatgccattctcctgcctcagcctcctgagtagctgggactacaggcgtccgccaccatggccggctaatttttttgtatttttagtagaggtggggtttcaccgcgttagccaggatggtctcg

SEQ ID NO: 101456 - DNA, 1629 bp, Homo sapiens
ctaatttttgtgtttttagtagtgacagggtctcaccatgttggccagactggtcttgaattcccaacctcaggtgatctgcccacctcagcctcccaaagtgctaggattatagatgtgagcgacggtgcccggctccccccacatcttttacttgggcagagtccttagctttttctgtcttgttacaggtgctccagtgaaccacccagggaatgacgaggtggcgagtgaggatgaagccacagtaaagcggcttcgtcgggaggagacgcacgtctgtgagaaatgctgtgcggagttcttcagcatctctgagttcctggaacataagaaaaattgcactaaaaatccacctgtcctcatcatgaatgacagcgaggggcctgtgccttcagaagacttctccggagctgtactgagccaccagcccaccagtcccggcagtaaggactgtcacagggagaatggcggcagctcagaggacatgaaggagaagccggatgcggagtctgtggtgtacctaaagacagagacagccctgccacccaccccccaggacataagctatttagccaaaggcaaagtggccaacactaatgtgaccttgcaggcactacggggcaccaaggtggcggtgaatcagcggagcgcggatgcactccctgcccccgtgcctggtgccaacagcatcccgtgggtcctcgagcagatcttgtgtctgcagcagcagcagctacagcagatccagctcaccgagcagatccgcatccaggtgaacatgtgggcctcccacgccctccactcaagcggggcaggggccgacactctgaagaccttgggcagccacatgtctcagcaggtttctgcagctgtggctttgctcagccagaaagctggaagccaaggtctgtctctggatgccttgaaacaagccaagctacctcacgccaacatcccttctgccaccagctccctgtccccagggctggcacccttcactctgaagccggatgggacccgggtgctcccgaacgtcatgtcccgcctcccgagcgctttgcttcctcaggccccgggctcggtgctcttccagagccctttctccactgtggcgctagacacatccaagaaagggaaggggaagccaccgaacatctccgcggtggatgtcaaacccaaagacgaggcggccctctacaagcacaagtgtaagtactgtagcaaggtttttgggactgatagctccttgcagatccacctccgctcccacactggagagagacccttcgtgtgctctgtctgtggtcatcgcttcaccaccaagggcaacctcaaggtgcactttcaccgacatccccaggtgaaggcaaacccccagctgtttgccgagttccaggacaaagtggcggccggcaatggcatcccctatgcactctctgtacctgaccccatagatgaaccgagtctttctttagacagcaaacctgtccttgtaaccacctctgtagggctacctcagaatctttcttcggggactaatcccaaggacctcacgggtggctccttgcccggtgacctgcagcctgggccttctccagaaagtgagggtggacccacactccctgg

SEQ ID NO: 101457 - DNA, 1128 bp, Homo sapiens
tgagtcataatgcttttatcaagatatacaggttttactttttaagcatttcagtgtctccagaatttgattggccactagtagatgaactttcttcctatacaatagtaagagtattttctatccatttggcagtgattgaatctaagacccctgctgggtttactgcattcttccaacttattggataactagatgctgcaagataacattcctaaaattcggggtgggggtggggtggagaaatggaagaactagttgctgtgtaatccctctgaactttgctttttttttttcctttttggttaacttaagcatgcccagcaattgttcataacagaatcttcttactccttggcaaatacagttgcggtatttaccagtggtggcctggatgtagaagcactttttactgcacaagcaaacagagctgctgctgttttaagagtcaagtgggatgttgctggtggaggctacagaagaggcaagcttgtgtatacagcaaaggcaagctggtattcaggctgtaaatcactctgggaactgctggatccttctaggggagggagcttaaccttttttgtgccatagatcccttctcaacatagtgtataaaatacatagatgaccaaggaaataaattgcattgaaatacagtcatcaaaaatgaaaacatttttaacttagtaatatcagctactttattaatacaataaataacaagatctagtagcctgtcagataacaagaatttccaagtcataacaacttgtaacactatatgaaaatatctgtggtctccactgatgacaaagtcacaagttctattaataccactgtggtatgttgcttatattcatcattgaaagaaaggttgaattttagttcagcttagtgaaaattagtatttttttcttatctaatttcatagaccccctgtttaaaaatgcctgtgttaaatagaacatgcattttcaatcaagtgatattttcaccaatgggatgaaaacgttttattgatagtacagtggtttgtggccttccaaaggagataaatgtatataatatgtttgtgatattagaactttataagtggggagctattagggaaaaataacttaaaagcct

SEQ ID NO: 101458 - DNA, 1007 bp, Homo sapiens
cgaggtcccaggcgcctggagggactctctttgtgccttggttgggggcggggtggggtgggggttgaggggagcgtgaaggcttcgtggcctggcccacctggaacaaaagggttaaccctcagcccgcctgcttcctccggagaggaggggcgagctcctggttctgacccctcccctggtcctacgctgacctccccttcccccttcattttgggtgggcgcacacacgtggggcttttggtggtgtttggcacctttcgggagggaagcttgttacgagagggcttctgaaattaacgatggttggagtttggaatcagagtcaacctgagctgagctaaaacctcgggcctggccgtgcgctgccactgcgatttgggagggaggggagttggctattgatcaccagggttgtcgcggacagcccacccggcttgcgcgcgggcgccccctggaggcccagcttgaagcctagccctttgctgggaggcggggtcccttcgcaggtactggctcacacctggtgggtgggacgggttgtgggggtgaatggagagtgctgggctgggccaaggatgggtaccctaggggattcgtgccggtcgcctgcttgatcgtcgtctgtgcccgctgttctttgccaagtgtggaattcttggtaataactcctggcggctagaatgtgtttgcagagcctccaattgcctccttgggagagaaggttgttttcccaagcagtgcgtttttaatggctgcgtttgggttgtttgcatttgagctgcctaaaattatatgtgttaggtatataatgtagacatacatatctaacttagatgtatgtatatgtctcacataattttttagaatgcagattgagctggtcttattttgcaaagccattcgagaatgcagtttttgagggaggaaaatgacgtctggcgatcaattagcagatcaaaaaatctgcaggtggtcgcagggctaacactacatacaggaaaaat

SEQ ID NO: 101459 - DNA, 1082 bp, Homo sapiens
gccgaaggggggtaaatttcccaactccaggaatttgtggcggagagggcaaataactgcggctctcccggcgccccgatgctcgcaccatgtcgaggcgcaagcaggcgaaaccccagcacatcaactcggaggaggaccagggcgagcagcagccgcagcagcagaccccggagtttgcagatgcggccccagcggcgcccgcggcgggggagctgggtgagtggggctggggcgcccgcccggggaggggagcttcccggacgtacgcgggatcctcgagggcgcaggcttcggggagcgggcggcgtccagcgcaaattcaggagccgagatttgggggctcagtgcccgggaggagaggtctcctcctctccccaccaccccgccttttgcacatttcacacttttttcctcttctcccctcttgtgtaagtttcacccccagctttctcccctaattgtaaaattgacccccactcgctcctctgttctcgctcccgaaaggttcccttctccttgtcctctgcccctcacttaattggttccactcccctcactggtgttaccccccccccttgtaacttaggtccccctccctcgcgtcgctctcaaaagaaagaaccccgggggatccccaccctctccaccagccccttggggcttttcttggaggctggaggaggggcgcacccctggaagaccccccggaggaggacgatctgttgcacgcgcccctcccgggccaagtggggggagggggcgcgacctctccccaccctcaggagctggggtgcgggccacccgcgctgcgcaggggattggagggcccagagaggtgggggaggagggctcaatgtttccctttaaaatttttttcttttctggatttcgccttttctgcccgggctgcgccgcctgccgatcttcgccctaacctttcggggcctgacctccagccatctttgatttccgacttcctaaaaataaccgcggcaagcccgagggtgcgagcccccagtggccggggtggcgggcgcgcggcagccccactggggtgcaccggcctcccgttttgcgtg

SEQ ID NO: 101460 - DNA, 1056 bp, Homo sapiens
aaatctagaattgcaaatgtaaaactcccgccttccgacaaagattatgctgatgaaactgaaagctcaaacacaagcagaaatgatcagatacgggaatatccatgaaggaaaatgccaggggcaagtcacacgagccatcccccatcccctattattattctgggaataataataccttcctcaaagagatgtcctgaggattaaaaataagaccgtttttcatgtcaggcactgagcaacccctccatgcttagggagggcttaacccaggttcgtctagttcccttcccccaagcaaattcctcctccaacgtttccaatctgtccgagaaatccctgtggttactgtgtacattatctggatatttagctagtaggcttacccaggtggcatattgtaactttactccgacaatttggaaaaacaaacagagcagttctgaccttttccactggttttgcttctgcatcccctcaaagcctgcccattcgataggatcctatttaaagatgatagtctttaaactgggaagttccaaactgcacatggggtgcgggtttggccaagaggttccttttttgttttaccaccttaaaatgctaactttgctaatggccgagattgattatataaatgttcttgcttttgtttgcacttatctgatcttgtcctatcaaggggcttaatctcactcttactggaaattacaatttagtccattttaggatggccccaatctttcacagctgtttaaaggctgtgttgtgaaaacaacccaaaatggtactaggtttgttctggttacacaactgtggggaggtgggaagtgaagcgtgtttgaaagtcactcatttaaatgtcctcatgaaatatatatatttatttatatttatatatttatataaatttcatgaaatatataaatttatatataatataaatctataatatgtatatactatataaatatatataatatataaatataatatataatatataaatataatatataaatataatatataatatataatatataatataaaata

SEQ ID NO: 101461 - DNA, 1024 bp, Homo sapiens
aatcccaagggaaagactgtctcaagctttaagtttataaactagatggtaacaccaacaattcagttctctggttggttggttggttggttgggtggttggttggttggttggttggtttttttgagacagggtctcattctgttgcccaggttcaagtgcagtggtgcgatcttggctcactgcaaccttcttctctagggctcaagcgatcctcccaccacagcctcctgagtagctgagactacaaggcacacaccaccacacccagctagtttttctatttttagtagagatggggtttcaccatgttacccaggctggtcttgaactcctgagctcaacctgaccacccacctcagtctaccaaagtgctgggattacaagtgtgagccacgacgcccaacccagttctctattttaaactatcacttctcccttatcaggtggtgtggcatacggaacaacctttgtaaagatctggtcaaactttgaaagtaaagtaatgagaggaaagcgtactttgtatatttctgttaagtctctgtaaaccaagaagacaagatggcatttgtttgtttgtttttttaaataattagattctgaactcctgacatccatgtctagctacttttaaacagacagaatggtctcaggaagaattttatcccagaagacagtaggttcaggctgggcgcagtggctcatgcctgtaatcccagcactttgggaggccaaggcaggtggatggatcacttgaggtcaggagttcaagaccagcctggtcaacatggctggtcttttctttttagctcccgcatgtgtgtgagaacgtgcaatatttgtatctgccttgtctgtgcctggtttatttcatttagcataatatcctccagttccattcatgttgttgcaaatgacagaatttcatgcttttttattgctaaataatatttctttatttctttttctttcttttctttttttttctttttttttttttttgagacaaagtctccctctg

SEQ ID NO: 101462 - DNA, 1048 bp, Homo sapiens
agatcgtgacgcagagggccttccgctgtgagacctgcggcgcctccttcgtcagggatgactctctgagatgccacaagaagcagcacagtgatcagagtgagaacaagaactcagacttggtcaccttcccaccggaaagcggtgcctcgggacagctcagcaccctggtctccgtggggcagctcgaggctcccctagagcccagccaagacctctagctcagccgaagagggtggtcagctgtcggaacttctgaccagtgctgttgcccagccctccagaggtgaggccactgagagacaggctttgggcaccacttctggggctggccgctccaacttcacaggccttcagaggcgatggctgggcgacagtgacgaaagcaaagcaaagcagggctgtggagacactcctcgcatttgtctcttccctccaaggattatctgagcaagtcgacttgttcattcaaaggcggggtctgccaagccctgctctatccaatggggatagcttctacgtaacggattccaattttaaaactgatccatctctgatggaattattaaacttagacgatatagaaaactaaaactaatctctagagtggaaagggttaaagtgaggaaggtgtacgtgaagggtctggggttgctggaaaacttctatttcataacctgggtgatcgttctaagagtgtttgccttatatgtttgtgtggtttcttttacctgttgtcttacaataaaaaaggcagactcatggtagcatgatgtaaggaacactcaattttgcagccctccacagacagttacggtagaaggttctccatccccagcccgcgccccattcagtaacttaattataaacgcacattggatttctcaatgagttcctactgtagtaaaacgaaatgcagtttgatctggaggtggcgccaaagatcaagctaactagcccagcctgtgcttgtctgttgtggaattcaaaattctgtttaattctatttggagagaaaagtccaggggcccagtgggccctgagcttg

SEQ ID NO: 101463 - DNA, 1021 bp, Homo sapiens
tgtgataattgtgagatttgtcatttttctgttgccggaacaacaacttttggtaaaatatgactgacagctgggttttatatcttgactatatagaatccagctgggagtagatacccactataactgccaagaagccaatgatgtatctcaagtcagacctataaactagatgtttcagtaaatgtatacactgattgcatggctaaatttggaatgtagcaggatccattaagtataattaaaaatcacaaacttttaatcttaggaacttcctttatgggaccctactgaaatgataggaccaactcatcgtggcatggaaaaatggggtttgagatattcataaagatgctcataagttgaaaattttcaatgaattcctggaaaatggtgagcagacaggaacatagtgatgtttaaaactgagtatagaaagctgtgtcccagcagacaaatgggaggcagctgtacagttggaagccaaagtttccagccaatatccaagggccctgagggctctgggcttggaacaagcatgtagacagccagggccacaaagcttgggggactagccaaggcctggcaaaactgcccaaccaacccagtagcaggtgaaacctctggcatccatgtctaatcattaaaccagtctactttcccaaatatagtccaccaaggatcatgagtcatctataggaaatgaatggaataaaatgagccaagtcaataactaatcctggaagtaagagtacttgggtaattttcacattctaattggtgtctacccactggcagaaatgttgcatccaaatagagacctatgaagagataatgagaacaaagaagtatgaaataaaactaggattgctagctataaaattaatgtcccagagattacgggaaaaaaattgggtgagtgaactgagaataagagccagtcctgaagtctggtttctgaccaggtctaggaagaaaagaaaatggaagtgagaagaaaatagagtgaaaatagaaaatc

SEQ ID NO: 101464 - DNA, 1280 bp, Homo sapiens
catccacgagcgtatccactgcaccgaccgccctttcaagtgcaactactgcagcttcgacaccaaacagcccagcaacctgagcaagcacatgaagaagttccatggggacatggttaagactgaggctctagagaggaaggacaccggcaggcagagcagccggcaggtggccaagctggatgccaagaagagtttccactgcgatatatgcgatgcctccttcatgcgggaggactcgctccgcagccacaagagacagcacagtgagtacagtgagagtaagaactcggacgtgaccgttctccagtttcagatcgaccccagcaagcagcccgccacgcccctcactgtgggacacctccaggtgcccctccagcccagccaagtgccccagttcagcgagggaagagtcaaaatcatcgttgggcatcaggtgccccaggcgaacaccatcgtccaggctgccgccgctgcagtgaacatcgtcccgcctgccttggtggcccagaacccagaggaactcccagggaacagccggctgcagatcctgcgccaggtcagtctgatcgccccccctcagtcctcgcggtgtccgagcgaggcgggcgcaatgacccagccggctgtcctgctgaccacccacgagcagacggacggagccactctgcaccagactctcatccccacggcctcaggtggcccccaggaaggctctggcaatcaaactttcattaccagttcgggtattacttgcactgactttgaaggcctaaacgccttgattcaggaggggacagcagaagtgacagtggtgagcgatggaggccagaacatcgcagtggccaccacagcgccaccggtcttctcctcctcttcccagcaagaactacccaagcagacctactccatcattcaaggggcagcccatccagctttgctctgtcccgccgactccattccagattagtgcttaaaaaaacaaaaggagtgggggaaaggaattgagaaaaagaaatcttaagtagaattctctaaaaggtttgctcttaatgttttctttgttttgttttgtttttgagacggagtctcgctctgtttcccaggctggagtgcagtggcgctatcttggctcactgcaacgtccgcctcccaggttcaagcgattctcatgcctcagccctccgagtagctgggaccacaggtgtacgacatcatgactggctaatttttgtatatttagtagagacggggtttcatcatgttgaactcctgacctc

SEQ ID NO: 101465 - DNA, 1023 bp, Homo sapiens
tgtaatctttccctggtgagccatgaactctgctgaaacttaggtattctaaattttacggtgcatctctgttgtgaaaaggaaaaaggagagagtgaatacaagggaaaattaacaaaactgttactattttacgtacctatactttaaaattttaattgccttctatttttaatttataaaaaatttataagaaattcatattcatcattttaaaaattcaagtaataccaataaggaacatggaagaaacttcccctctcccaagatgttagctctttgccaatcatccacccagtgttttagggtttttggaatattcttcggtggttgtatatgacttttttcgtaaggcagtgggaaataagccttttccttttttaatcttgtttcctgctgccatctgtgtgtgtatgtgtttgaaggagacaaaccccataagtgtgaagtctgtggcaagtgctttagccggaaagacaagctgaaaactcacatgcggtgccacacgggcgtgaagccctacaagtgtaagacgtgtgactacgccgctgccgacagcagcagcctcaacaagcacctgaggatccactcggacgagcggcccttcaaatgccagatctgcccctacgccagccgcaactccagccagctcactgtccacctgcgatcccacacgggtgagtcctgcctgttatttgctctctacgctcctcactttctatggcataaatcataagcaccttaaagcattcagccacaatgtaagaaatcgagttggaacctttgctcatcccgttgtttgcagttttgtttttttttgttgttgttgttttgtctcgctctgttgccctggctggagtgcagtggcgctatctcagctcactgcaacctccacctcccaggctcaagcaattcttgtgcctcagcctcccaagaagcatgttgcaccacgtccagctaattttttgtatttttagtagagatggggttttgccatattggtcaggctggtcttgaactatt

SEQ ID NO: 101466 - DNA, 1051 bp, Homo sapiens
gacagggtttcaccatgttggccaggctggtctcgaactcctgacctcaagtgatctgcctgcctcggcctcccaaagtgctggaattacaggtgacagccactgtgcccagccaaaatgctgatctttaataaacttttagatgtattcttaaatcccaaatatttatttatgacgacagtgatcagctttggctattttagcacttggctagttacgatttggtgaaaatacatatttgatatataaagtaaaaaaaagaaaatcctgattcacagccacctccttccatgaccaaaagtcagctctcctaatagacctctatgtctcattctgaaatatttgcatgcctagaccaggtctaaaaacacacacatttaatttttccatgtcttactaagttaatatgatacacgctatcagtgcaacttgcttcttttcatttactattgcacatcatttcacatcagtatgtcatatcgacttactctttttcatggccaagtaaggaatgggttcagtaatttatgcacatccatacagtgaaatatttcagccttaacaaccgcgttgtgggtatgtaatgatatgaaacaggtgatcgaaattaccgtacatgcaagaaagtagtcaatagggaggcagtgcagtatttggcaaaaaaaaaaaaaaaaaaaaagaaagcaatcacaagacggtcctgggttctaattccagctgttgcaaggattaactaaagtaattcaaaggcacagtgccattcaaaaaggaagtatttaaattgatgttagccaggaatttttatgtaccaaaaacatacacacacagagattggaaaaatatacatcaaaaagttagcagtagttcacagatgtcaagttgacatagcattagtgaggttcagattaagctgctgtaagaatgaaactgaaacaccagctcaaacaagatagggatttgtatctgtcccgtgtaactgtccggaggtgagcaggcaggctaggacaggtgggcagctctgtcctagggaccagccaggcacttaagttcc

SEQ ID NO: 101467 - DNA, 1030 bp, Homo sapiens
tccagcctggaaggtcaaggctgcagtgagctgtgatcatgccactgcactccagcctgggtgacaaaatgaaaccctatctcagaaaaaaaaaaaagaaaaaagtatagatttgggtggcttcagagctctgactcagcatctgatttccatgtttacccttatggttacagaatggctgccacagatccaggcatcacatcatcactccagcatatacaaagacaggaagtagggcagccagggcagcaagatgagcttttctcaactgcttcttttaccatctgccctgcccaccctgcccccccatgctattttaaatcagggaggaaagtcttttgcagaagtctcccagcggatgctctctagtgtctcattagctagaactgggtcacatgatcactgtgaagccgcaagggaggctgggaaagcaaactagtacatgcattctctctacaaaggaaagtaggcagacaccatagctagcgggcatttatattaagaaaattaataatcaccatatcttttagtttcagctccagaatttgtttttgaacatggctatcaaacttacctgcccacggaaagtaatgaaaaccagacagccactgtcatctctctccctgccaagtcacgcaccaaaaagcccacaacaccacctgctcagaaaaggcttaactgttgctatccaggtaaaggcagcattatgtcctacttgtgtagagggtgtgatatttaaccaggctccagggctcctcctcatgagttcctgacaactgctcatggatgtgttccaaactacctggcataaaaatcagagccccctggcatttacatcagcacatacaacctatctcccactgtctgtggtcattctgcctctgggttctaagacttttctagccataggcctttgaagtggaactcgtgaaaatttcaggttgctataaatttttttcctatgctatagcttaggaagatatccagtaagaattttctttccttactttggttttaatttattcagaaa

SEQ ID NO: 101468 - DNA, 1019 bp, Homo sapiens
ttgtatgtatacgtcaagagagagttaggtatggccaggtgcagtggctcacacctgtaatcccagccctttgtgagggcaaggctggaggatcacttgaggccaggagttcaagaccagcctcgtcaacatagcaagaccccacctctacattaaattttaaaaattagccaggcgtgatagcacacacttgtagtcctagctgctcaggaggctaaggcaggaggctcgcctgagcccaggagtttgaggctgcagtgagctatgatcgtaccactgcactccagcctgggtgacaaatgagaccctgtttcttaaataaaataaaaaagagggatttaaacaaataaatatcaaagattccaacaatggaatatgacttagctttggaaaggaggaaagttggatctgtgtgtagtcacagaaagattctcaaggtaagtataaaaaaaatacatatgcctacatattatatggtcttatattccagggaagtttctagaacagggatggggcggtaatgtaaatgagagaagttatctttgggggaggtgttagagagtggtggggactgtggtgaagtagagaaatcacacatgcctcatccaaaagtgcagctgttctttggatccagccagttagatatttcagtttttcagagaagctgaaaatgtgaaattttccaaatataaaactttgttgccaaacaatacatctctgagcctgactgagtccataagtttcttctagcttattctcagagaatgtttacccaatagtctggagctgaagagtgaggagcatcagacgtcagggccaggcgcagtggctcacacctgtagtcccagcactttgggagaccgaggcggatcacttgaggtcaggatttcaagaccagcctggccaacatggtgaaactcatctctagtaaaaatacaaaaattggccaggcatggtgtcactcgcctatagtccgtgctactttggaggccaaggcacgagaatctcttaaacccagg

SEQ ID NO: 101469 - DNA, 1084 bp, Homo sapiens
ctcgaactcctgacctcaggtgatccgcccgcctcagcctcccaaagtgccaggattacaggcatgagccaccgcgcctggccaattttctgaagatttctaagatatttacattatgtccaattttccccaagtttaactaaggcaagaaatctctgtgtggaaatatgataccttgctgctagggcacaattaggatgcagttcgcaggaagaggaaggtggagtggatactgggccactacccagccatgtctgccaccatgccttttcttcctaccatgaatctggtctgcattacaattcaaagctgtttggaattaatccgttactttccctttgtcccatggagttccaggtggcacaacggtgctggtggagctgactcccgacatccatatctgcggcatctgcaagcagcagtttaacaacctggatgcctttgtagctcacaagcaaagtggctgccagctgacaggcacatccgcagcagcccccagcacggtccagtttgtatcggaggaaacagtgcctgccacccagactcagaccaccaccagaaccatcacctcggagacccagacaatcacaggtacagctggagcatgggggagtcggccagaattggcctggctgtgtctcaaacacgtccatggaacttgttaaaaatatagattcccagagcccaccccctagggttgctgattcattatttttaacaagctccaccaggaagccagctgcccagccaggtttgggagctgctaggttaaaacattaactgttagcagttataaatgttgtcacgttacaaaaaaaacagacaaaaaagagatttctgaaacaaaaatctatatactataggaaaaaaaaaaggctggcagaaaatacgttgcaataaaaaaaaaagtggttgttttgggtggtggaagtatgggtacaatccttgagtttgcattacttgtgtaaagggccaaaaagcatgttgttgttaaaaaaaaaaaatctataaactggcattggtatctcctcccccttgtgctgctgatcaggaaaacatccctgttctctgttgtgtacactca

SEQ ID NO: 101470 - DNA, 1007 bp, Homo sapiens
ttcttcattatctaatgtgctgattcaggctaatttcatgtcttccaccaggagaatgagggagccacactgtttttattcataatgccatgctctttggaacctgtttgcattgagacaatgtaggccttcttgcctttgcaatccccagtgccatttacatcatcagttctgatggctgcctcattcattggactggccatgaaccctggcttctgatgactctctcaaaggtcatgactgtgtgtccatgatggtgaccacaaatggaagtctcactcagcatctgcagggagatgtgaatggtagtttgttttctggtcttgttaaatttactgtttggaactttagagtgtaaacgtagaaagcctatcttctgagtatatcttcttttggaatctttaggtggtagctgcaagaactcttagtatgttgacctcacctctgccttccacataccactaccagtgaggaattaggaatgcatgagaagagtgtccaagaagagtgtcctcattcatgcaaggcttaagagagaatgcaggtcaacatcaccatgtcaatcagaggtaggtgagctcaccaattggaaaggcccattggtgtggggatgaatggtcttgaaaaagcccttcaggagataggtgtgggcacccaagaggattgcctaatgtgtggtatgaagctagtagaggttgtcgggtgactgcattaggagacacaatgtatagaatgtcagttgccacccccactatcctaagatgctgtagaccagaggtagcatggtgaggggcacatgggtgggtgagagcctggcatgggcccacagtgtttagtttaatagtagtccagaaatctgatgttgtcttgtgccgcgcttgagtgagaatcatcaaaattggtgtgttagccccattctacttgtcaatcttgtgcaatcacatgaaagaaatgctgtgccagctggcagggagctatctgctggtctcctggaattgggatctccc

SEQ ID NO: 101471 - DNA, 1061 bp, Homo sapiens
tgagccgagatcgtgccactgcactccagcctgggtgacagagtgagacttcatttcaaaaaatataaaataaaataaaaagtaaaaatcttttcccgaacttcactcaggtggtataaacagagaccaactatgatgaatggttatgtaaagatcgccagtcctgggtgcttttttgagattatgctgcagcaggctttctcagaatctctccattctgcctagagagggattttaatttggttgttattgtcatctgcatcaggccacaagatgacatcagcagatttttgccgaagcccaaaaaagataaatatttaagaagtatttaagagggggtagatgtgttcccatcttacaatcatttggggtcatgcttgcattcaaggatttctaaacaaagggtggtattttaataagaaaagtgattgtggttccagttttgatgtgatttgagatgaaaacgatattttaaagactgaccaaaattgcatttaatagctgaaaagaataaacacttaaaaaaataatgaccttaacaaagaaagttgtgatttaaagcaatacattctaagcatagtctgttttatccataccaaatgtgagatgcaatattttctggaaataggtcaaattctgagtattttgtataaacaatatattccactagagggcgctatttagttgtgtatttaacgttctttttctttttataaaaataaaaaaggctataagatgatgaattctgatatgattcttgttgagcatgttatgaaatttcctcccagacattgttttattttcagcttatatgtgtgaaacttcactttaagaagtatacatgaccctgaatctttcaatatgtatacagtcccagcggtattatggtacaatagaagcaaaagacataagtttaaattattgtaatcccagaggtcttttgactgttgtttctctttatatgttacctcatgaagaaaatttattgtaaatattaatattgtctgtttagatcttatgtgaaaagacaaagagagggagtgtggctctgggtgggtgat

SEQ ID NO: 101472 - DNA, 1127 bp, Homo sapiens
ggtggcctcattaaccagccctggcctgtcaacttccagacttcctgttgcataagacaaatacattctctactttttaagcccctggcttagagttttctgttatttgcaatgaaaagcattctttttaaaatatggaggtgaaattcacagattataaaattaaccatcttaaaaagaacaactgagtgacctttagtatgttcataacattgtgcagccactacctctatctagttgcaaaaccttttaaccccaacatcaaaagagttcttaactgacacaagtgttaggccaatattgtcttatggaaccttccaacagttctaataaagcaggtattggtggtggacattttttctgcccagtgtgcatcctcccttgtccaggtaacagacatcatttccctctggggaactctctcttccttgcaatccatccctgtggtttgagaagccctgatgtcatccatggctccaccgtgcatggacaatcagagcaccactgaatggggagagtttagggatggggacatgatacaatttgggcctaagtttggatggctggggagaggagttctatttctcattagaaagcagggaagccaagagcagctggccacggtagggagctggtcagcctgagggtgaagctgatgtggtgagggctgtgctaagagatctcaggtagtggtgagagttcggagctcccaaatcgggctgtgctagcagccagctctttcttcaatactttcaaatatttgagtcaattaatctcctttttcttttcaaaatcagtttgaattggattttccgtcaattacaatcaaattagtattgcgattcattagcagtactactgttaaatagtagtagtagtagttgaggtagtagtagttgtagtatttccctgttttacagacttgagatttgatctccaggggtatgtaatttgcccaggatcacccagctttgaactcaggccggcatcattccagggctcgtctgtatgactactgagaaatcacattcccacttctgttccatgctggctgtttccaaagacagggagtcaaactctaccatcttgttagtgaatgtgaatctgtacttctcctggatcccgtg

SEQ ID NO: 101473 - DNA, 1088 bp, Homo sapiens
gcaaatcaaaaccccattgaggccgggcatggtcgcttacaactataatctcagcactttgggagtcagaggtgggatgattgctggagcccaggagtttgagaccagctgagcaacatagcaagacctctacaaaaaataaaaacacttagctgggtgtggtggcatgcacttgtagtcccagctacttgggagactgaggtgagaggatcacttgagccagggagatggaggctgcagtgagccatgattgtgccactgtactccagcctgggcaacagagcttctgttttgagactgtctcaaaaacaaaaataaataaatacataaaataaatagtataaacaatgacatattacttcagactttttaggatgacagttacaacaaaacaaaacataatgagtgttggcaaggttttggagaaactggaaccctttgtgctgtttgtggggatgtaaaatggtgcagccattatgaaaaacagcatagaggttcttcaaaaaattaaaaatagaaccaccatatgatccagcaatcccacttttgggtatttatacaaaaaatttgaaatcagaatcttgaagaaatatttgcacgcctatattcattcagcattattcacaatagccaagatgtggcaacaacctaaatgtcattgacagatgaatgaataaagaaaatgtggtctctacctacgatggaatataaatgagccttaaagaagatggaaatgctttcatatatgacatgaataaaacctgggtgaaataagtcagtgatatggactaattatggatctgtgtccccatccaaatctcatgttgcattgtaatccccagcgttggaggtggggtctggtgggaggtgattggatcatgggtgtggatttctcatgaatggttttgcactatccccttgctgtgatagtgagtgagttcttgtaagatctggttaagagtgtgtagcactggccgggcacggtggcttacgcctgtaatcccagcacttggggaggccgaggcagacagatcatctgaggttgggagttcgagaccagcctgaccaacatggagaaaccccgtcgg

SEQ ID NO: 101474 - DNA, 1012 bp, Homo sapiens
ttggaaattttactatgagatttttcaaaaggctttatgtaaaaaaaattgaaaggcttgcaaaatataataaaaccacaaaatacaaagctataatgtggctttcatttgcaatttttttaatctagaatacagttcctcctatcttgccccattttccacttctgtcagctcccacaagaaaggaaagaaatggagtgaggatgacaggtagcagttaaccaggaaaagatgctctcctaaagccagtgttattgcacatttgggggttgaccttagcactcgtgaattctgaccttgtgaaatactcaacaggaaaagactcaaagaaagtcatcaagaacagctcaatcaagatgtccgagcagtatgatacagcagtgaagagagacggggaacggatggacacattaaaaatgaataggaaggatattaaaggacttccggttaaaaatggtggcttgaattcacccgttcatcttctctccttctccaaaccccactgaaatgacagtaaaggaactaaagaggtataaattcacaaggacaaagagagtgggagaataatgacaggagagaaatgtcagccaaattttgaaagacagaaagtggatgtatgagtgttaagcgattgaggtttcaatgttttcccatctgctgaggactgggtggtgggaagagaacaggaagccagtttaagccccaggaccctagagagctacaagaaccggaggctccagttatttctgaagtcagggatgaagaacaggagtgaaatcagagattctaaggagcttctcccccaccttcctcctacagagaggagacaatagacctgagttgaaaggctggactggaggacactagaaaatgaaaagtgcaactgacaaagacactcaaaccctcctttctctggtttctgggagtcctggttacctggttcatactcacctccctcttaactgggaaatccactgtttcctaaaaaaaaaaaaaaaacaaaaacctggcc

SEQ ID NO: 101475 - DNA, 1383 bp, Homo sapiens
caggactcccagaaaccagagaaaggagggtttgagtgtctttgtcagttgcacttttcattttctagtgtcctccagtccagcctttcaactcaggtctattgtctcctctctgtaggaggaaggtgggggagaagctccttagaatctctgatttcactcctgttcttcatccctgacttcagaaataactggagcctccggttcttgtagctctctagggtcctggggcttaaactggcttcctgttctcttcccaccacccagtcctcagcagatgggaaaacattgaaacctcaatcgcttaacactcatacatccactttctgtctttcaaaatttggctgacatttctctcctgtcattattctcccactctctttgtccttgtgaatttatacctctttagttcctttactgtcatttcagtggggtttggagaaggagagaagatgaacgggtgaattcaagccaccatttttaaccggaagtcctttaatatccttcctattcatttttaatgtgtccatccgttccccgtctctcttcactgctgtatcatactgctcggacatcttgattgagctgttcttgatgactttctttgagtcttttcctgttgagtatttcacaaggtcagaattcacgagtgctaaggtcaacccccaaatgtgcaataacactggctttaggagagcatcttttcctggttaactgctacctgtcatcctcactccatttctttcctttcttgtgggagctgacagaagtggaaaatggggcaagataggaggaactgtattctagattaaaaaaattgcaaatgaaagccacattatagctttgtattttgtggttttattatattttgcaagcctttcaattttttttacataaagccttttgaaaaatctcatagtaaaatttccaactgtgcagaggatcagcataatcctccccagtctctctctcctttaatcttgtgctttttctcctatgaatttggtgtgcatctttccatatcttttaaattatgcttgcactagtgtacaatcatttatttattcaacaaatggcttttgagtccctataatgtgctaggcattgatgtagggactggcaatatgttggtgaacaagacaggctaaatcccttccctcatggggatttacattctagtggatatataaaactttaaacattcaacacatgcacactgcctacccaccagcatcactggccatatcatacacagtgatctgtaagatactttttttcccacttaccacctagtgtatcttttcatgttagtactatggatctttatttttaatggttgtgccatttcaccatatgaatgcatcatttatctactcttctagt

SEQ ID NO: 101476 - DNA, 1010 bp, Homo sapiens
cttccttctttctttctttttttttttttgagacagagtctcactctgttgcccaggctggagagcagtggcatgatctcggctcactgcaaccttcacctcctgggttcaagcacttctctgtgtcagccttctgagcaggtgggattacaggcgcccaccaccacgcctggctaatttttgtatttttagtagagacagggtttcaccatcttggccagggtagtcttgaactcctgacctcgtgatctacccacctcggcttcctaaagtgctgggattacaggcgtgagccgctgcgcctggcccagtaagccttttcaaagaattctgtgcaggttacagcataatttaattacaaatgaatatgcattcttagatataaaaatgagagatgtctgagtatgataactaagatagacagtgttagaacatcatgatttgaaggatcgtcactcactgttacttccagaagttatgtccaatcagctaccttcgttttggataagatagttcctgtagaattactcacattggatctttcttcctttaatctatttctctgtaagcacatgcaaattatgcttgacttaaccaagcagctctacttcaatttgttgccatgatgtgatgagtaaccagaatggatttttaggctcatcaaatgtctatgctatgtggttcaaaagcagagtgacctttacagcttgcattgtgcattgcaaatctaaaatttgaggctaagataggaaattctcacatcattttcctttcattagaggagaaaacagaattcagctggacacatgcactaaaattagatttttaaataaacagcacaggtcttaataattcatgcaaagatgcagaaaaaaatgaggaaaataattgagcaatggcaggcaaatatcatgtcgttttgtactgcctcaaactaaccctcagtactgtatatctctgatgtacacgtttattaatgaaacaaaaggcatctactatggataaataat

SEQ ID NO: 101477 - DNA, 1429 bp, Homo sapiens
gccaggggttaagaggtgggggcaggagagaaaggtgcaatccaaactgcaaaactggattaaacagaggtttaaaaaaaacaaaaacaaaataattagtggtataacataaatagatgtcattagctgtagtaatgtctatgacaaataaataagagttgaaaacaataaaactcccggtaatgtactctgttgtaatatcgatggcagcatgtggggaacatctgacagctgttaaacagatgtggcaattagcaaaccttatggtcatgctggtaaaattatcatgcaacacgctctccagcagaattagatgacttccttctttgtgtggctttatccacgtggagagttagactaatcctccgtttaagcaatattgttagctgatacagtctaagccacatatgggtgtgtgtgtgtgcgcgcatatatagacatatattttttgatgtcttctgaaagatttagagaaattcagaatttaaacaagaacaatatcaattcagctgtgtagcagatacttcaattataatcgctaatggacaaattgagagataaaaagacttttctatcacgttgaaattcaatgaacagttttcaattaggctttggatgtaaaaggaaaaaaagaaagtgacttttccttgatgttaacattgctgagagagatgagaggaactttgctttttcattatactgaagagatgcatataaggctgcatatttgaattataaatcaggtcgctatctgccaaccgaaagcaatatcaattagaacttaggtggattaagctttaaaatgccttatatttaatgacaaaagtatgactgttaatctccgcagccatcaaagggataatttaaggcagcaagaaatcagagaatgatgtcacaaaaataggcccttgcagctttttggatagtattatcgtaattaatgtacttcaaatgactttttttgtgggttatgagctttcacaaaagcatttattgcgggcataaaatataaaactctaaagagtgggtttgactaaggttgactggaggggccttagcctttctgctacagtaattcctgtaaaataatagtttcatttacaggcataatttataatgttgaatttatgccagttcatctggtataaatcatggtaatagcatgatctattgtatgtcacttgagcgaatgcaaattaaatattgttaaattaaagaaaaactgttaaaataacattgggttgtaaccagaactgctggaatgaaggaaatgtgggattaaggatgaaatttcactgctgtaggtcttgagctgatactggaggttgttgccaaaagcaaatatacatctaaataagtaaataaataaataaactgtactgtgttgttggggacaaagtcatacattaccccagagtgttctttcatt

SEQ ID NO: 101478 - DNA, 1789 bp, Homo sapiens
ctgcagaattgagtagctgagacagagatcaaatggcctgcaaagccaaaaatatttcctatctggccttttgcagaaacagtttgctcagccctgctccactgcttttctcttccagctttgtaactgattagtggtccctttactaacctctgtgagtctcagattttgcagatgtaaaatggggataaatcactgctcctgtatagttcttgtgaagattgaatatacgaggtaatatttgcaaagttcctagcacagagttcacctcttgcaaatataatagccatttctactaaaataaattttatgaaaatattgttatctcagttgttcccgagcctataaaatcccttattcagtaaccagcagatttttctggggcgttggcatgggagagtgtttgcattctataggtaatgggtgggcctaattgcctgttagttgcagatttctttaaagttgggcaagacatggaaaagcagagaaaacaaatgaataaaaacaaagcagcatgaaaaatgtcaggggtagtatgtgagaaactggaatcaatattcaaaatgcatgcatgtctcaatttttctttgttactgtgtcactgttttgaaaagtctaaattatgcttgcaaaaacttaacgtatgcatacatatgtatgaatgtatacgacgtagcagggttgagacagacaagcacaatagtaggttttgctcagaataagaggcagaagtatgcggtaaaagtcgtttctgtacacagttgagtggtgggtcattccagcagacccttctcagggacgtgcaaacagaccagtaagaaacttcaaggctgtttctccatttttctcaaatccatctcctttcctccatttctgcagttaagtctgcctttatctctctcaggtttacggctccccaacctggctttctttcctccagtgcttctcagtgggagccagttttgctccccaggatatattgttttgtaccataatcaagagtatgcaaagggcatccatccatgggtacaggttaggaatgctgatgaaaccctacaatgtactggatcatcctcccgctcagggaggaattatcctgcccaaaatatcaatagtgttgtggttgagagtccatgccagtcttttcctctgatgggttctcaattcagcagccagtatgatttctattttctaaaatgtaaatattttattttctaaagtacacttctttgcataagaccctgtattgcattctttttgcctgcagggtaaaatctgaacctgaatccttataacatgttaaaaaaacctgtgttgcctgtttcttgcctgttttccccctcatctctctcctctttcgactcatactttataaatgcatcgaggtgttgctcacctgtaggactcggcataaactattttcagactctgagtccataacccttttcacccttttctggtcaacttttatgtacgagtgacatgaaatatcagctcacaggttaccttccccttgatggcagctaccatttaacatgataatcttgtgttgtaattgcttgctcaattatttgtattcctgtttacaggcttacctctcagagggcagggattgtatctttctttttcactaccacatgtgcagtaaaaggcacacagtaggttctcagttaatatttgttgatgactggagtgcttatgctagtttgtttatatggagcaacttatttagaatgttgttaagacatttataaatgtaaatatttttattattattatttttttgaga

SEQ ID NO: 101479 - DNA, 1094 bp, Homo sapiens
ctctctgctcctggaaagggagtcacagataatgctggagctggaaaccacaaggattttgtaaaagcacagaggaaactttattatatgtgtgctccccagtgtctcaactcgactttattcaaggcagataaaatgtagtttttggacacttctgatatgttcaaaataggtgcagacagttaatgatgggaaagttcatgactcagtaaagattactccctagctggtagcttaggacagaaaactataaaatcaaattatgataatcataggagtcaggagaaaaaagtaggcccatggagctctatttactgaagttttgaattcattatataccacctactgtggaagtataggaaacagattttttgatcatctcagtagatttacaaagtagaactattttgtgattaccaaagtgaatttttaaaaaacttaaaattgtaagagagagaaccggggctagaagaaacatgcaataatagagaataaaaataatcgacatgccccacaatacacttgcacacatccagactttaccttttgaggaacagttggttggacattaaaccagtgaaaacagatgtggctgtctcagtttttaccactaaaaataatttttttccaaacaacatttccatcacatagcagtgtctacctgtcctgacataagagttaaaccattgatctagggcttaaataggactttgacctgcagtggtctattttatcacatgtaacttagttgttgagtcagcaaggccaaatacgcttctactagatatcaaatctagacagctagggtgtgcaagatttttatttttttaccttcactcagatctgtgttttagggagaaagtcggccttttctacctgatattaagaatatctatctggacagtgcccttgagtgacaaatctcattgataattttctatgcttgccatgttaaattacatagctgctagtgttttatatgataccttcttttttgtatgcttgttagcatttataggattcttatgatgtgcttagttttttttgtttgtatttaaaaactttaatacagttctgtaacatttagctattgc

SEQ ID NO: 101480 - DNA, 1039 bp, Homo sapiens
atctatttaaacacgatctatcaaggaaagcatttcgacgtctttgtttcttattctttcttgtttacggagaccacattcccccccaccctcaatttcaaattgccctctcttctcgtctgcaaatgctcatggtatagatatttcctttattattccctctaaactttctttgttcccgtccctgtcttttattatttctcctgtgtcatcagaaactgactgctggatcctgccaattagcctttgtctgtcagcaccagcctcagcctcccgaagagcgagtgtgcacggcgaggcggacaggccctatttcgtatgcagcacagtgtccccacacggagatatgccattactgacaaaagagcagtagatgggctcagattagctgctgacaaacttcctgtgtgtgtgtgtgcgtgtgtgtgtgtgtgtgtgcgcgcacccggtaggaggagatagtggggggtgggcaggacagggcaggaaagagaaccataccctggaacaccaaacagcaaatctaacttgcaaagtaacttatcaattctattccaaaataccaatcattctgaaatggtttccattataaatgtggtccatctgtactggtgggcacaaatgggcaggtcgcagccacaggaataatccacagatttctgcctcttggtcgcatctgctcggccctccactgtgaactgcttctctccttccccaggttaatatttctgggcagcttccagggtgaggcaagggaggcgctcaccttgggtacgaattgggcgccaaaaaactcagtagtcaaaacaattataatatctatgatttaattaaaaaataaaaatgaatgccaaaaatccatgatgaagaaaatattaaaatttcagataaagaaaggatcagtgttggtgatgtttccgtatgcatcgggctctaatatggctcggcacagtgctgtgactgatcctgtctttatatacagcatcatatatgtatgtgtatatatatatatatatcatatatatatgcattgagcgag

SEQ ID NO: 101481 - DNA, 1063 bp, Homo sapiens
catgaatggggagcgtctccagcagtgtggccgtatccatattgctcattttgtccgagaaattattttgtccaagggtatcagactgaggtccgttcaaagacattatatacatacacagagacacagaagagaaatctgagatgcgagtgggaattgctgatatatttgtttccaaagcaaactccatgaatgaaatgattcaataatttggaggcatttgaaagtcattaaaatggccatttggaattttcagttgttgcctccctcaattttttacgtttcccctgtagaaaaagacatcctctgggcaccctcaaatattctgggatgctaaagtcatgctaaaattatttacaattttagaaattaaaattcaggaggcacagcaagataatccgattattaatatatcagtattatttagctatgcataacaacaggaaaacgcacaatgcaaaagttttagagataatgagcttagagaaattacatggggggaagaaatacctggatcatatttgaaagcatttgtcttgaattctgctcatctaaatgagagctctctttctacctgtgtcatttaaaaaacaatttcaatatcctcctacctgctaccccagcctgaagcagggactaatgaaactctctctggacacacagatgtaagacactatattacacaacactttttaaaaaattgtttcagaaaaccaaatgtgggcatgcaaaccaaaagaaaaacctcaaggatcttcgtaagatagctagctcagggttcaagatcaagagaactttgttgcggcaggataagaagacaacagcattgcgttttagctaaacatctcttcttggcaaatgagaagcggtgaagcagggaagatttttttaaggagctttttagctcttttgcatctctctccaaagactaatttaattgaaaagctgtagtgtccatttatgattaaggaaaggcctcatgtttccacaacactgctagacactaaggtgggtttgaagaaaaaaaaaaaaaggccagcattctgcagtttctgttagtata

SEQ ID NO: 101482 - DNA, 1048 bp, Homo sapiens
tgaagtttgcctatgttcagatctgtgctcattgctttatgtgcggtatctcattgaattttcacaacagctctgtggcatacagggcattgtaaacctccttttctgaaatgaggctcagggtaattagtaacttacccatcatctcacctagtaacttacagagctgttttgatccctagtttgcttgactccacagcccatgacatgctacaagtcgtactgaaataagtcctctctgtctttctccctgaggatctctcaaagtgcagtggatgtaattctggtgtttcacaacatgattttacatagcatacgggccaacattttttttctttaacagttgatatgtatcgtaatgtgtatgtgaaaaagatataactcgtggcaaaatcatgatctaatagatgttattgcttaagttgaggcttaactgaatttttaagtttaaaaatagtcaagtttttaaattaagtaaatataatagggaaaaacatgaaagcagtacacaattaatggaggtttgaaaatttgaatcttttcacataaacaatccatcaaacagcctaatatttactaagattgtctgtgggctagagaatactttgacatcacccgctttgggaagtatttatcatcccttccttttaatgcgtcttcaccccaatggttaagaactttcttttctgtgcttcagaagtatcttgtatagtttaggaccaatcacattgtatagtagttacctaacatgtctctctttcacaatagactatgtaactttcatgggattttattaatcttggtattttcggctactgatccaaatagatattttacaataaaatcatggaacttacctaggtggagtatgcaatgcagtgaaagagacgaacatcgcatcaataggattctgctacaagtaacaaggaaaacatcacattcaaactggtttataaggaattactggctcatgtaattgaaaaaccccaaaatcatgtatacatcagggaaggcttgctctagcagctggacaatatcaccaagaagg

SEQ ID NO: 101483 - DNA, 1035 bp, Homo sapiens
actatagatactaattatagtctgaattttaaagaaaaattcaggcacatctactctgtgccagggaaggtgctgaaggaactagcatgtgtattactcgtttttcaacagagatatgtattgttagtcccatttaacagatgaagcaattgaggcttagagaagcaaatgacttacttgaagtcatccagctcatcagaaagaaccccaaccctcccaaggtatttgaccttgcaggtcagtgtttttcccactcaaccacagatgttttatgtcctcttttgtcgctgacgtttcctccatgtggaaagctttgaaagtgctccagtcacattttgaaatttcatgacaaaaaattgaatgtcatccaaagcatagttgaggatttaaacatccctgtcaatcctggctgtcatcaccaaaagatttctatcccaacgatagatcattgtgacgtgcttggcctaaagggccctgggctgttataatgagtaagattggaatctactgagtaatgcaaataaataaaaaagagacaggtagtctcagactttttcattattgccttctttgctgtgaagctcatggactgctctgtgcaaaggatctttctttttaccattttaatagcctgtgcaatgggattaagaaagatcttgggtttttcattcaacagatattttcatcattaaaatgcttactgtttttgagcacataagtgactctactggaatggtagtaggaaaatagggacacgaaggggatttgaagtcagattatgaaagcactgcatgccaagctataaaaggagcgacaaatcagggaggttagtttctgatactaaccttggcaaacacagagaggggagaagcaagtgcaaaagccctagatgaaaatgagtttggatagtatgttctagaaacagaaggcagcaggacaggtgagaactaaacaaggcagagcgtgataagatatgagaatgaaggtggaggaaggagtagggtgatcaccagcccaggctgctaggagactgag

SEQ ID NO: 101484 - DNA, 2940 bp, Homo sapiens
tctagttagtcattctcctaatactttcatagcaaaagttgaacttaaatagaacccagggccaggcgcagtggctcatgcctgtaatcgcagcactttgggaggccaaggcgggcagatcacttgaagtcaggagttcaagaccagcctggccaacatggtgaaacccttctctactaaaaatacaaaaaaattagccgggcgtggtggtgcatgcctgtagtcccagctacttggaaggctgaggcaggagaatcgcttgaacctgggaggtagaggttgcagtgagccaagatcgtgccgctgcactccagcctgggcgacagagtgagactgtctcaaaaacaacaacaacaaatagaacccattgcatttctaggtcagtttggttctatgtattacgcttttttaaagaaagaattttctaaactgtattcagttttgatcttaatcatttaaaaaatgttgttttccttaggtcttggtggatgtcagtgcttactccccatgaaattaaattttacttcatcctttgagaagcgaatggtgaaagctactgaaataagctgtgattgtactgtacataaaacatatgaggaatctgcaaggaacactacagttgtgtaaagttgttctgttaacttttgtaccaaatagcaatacaaactagttggaacagttggaacttacatacatggggactggaaatctctattttgtccctgaataatatttttcttagaattgaccaaataagaagtggaatttttgcatacttgagcgctgctgaaaagaaatcatttgggttgggtggggcgggatgggggaaaagtatataatgcttgcacctcaggtaaaaatctgtaaatatctaagttgtaaacctgcttgttcaaatactgtgtgtattccttttctctaatgcagctcatcacttggagcagtttctgctattgtgctctttcatttaaaatgtatgtttttttttttttaaactgtcaatgattttgtattatgttgaatccacccaaatctattgttgtcttaaaattgttaatggaagtattgaccctctatgatatgtgctgcagatatcgaggtcagccattcggaagctggcagcattttatcgcaactttgagcatctcagatggggaaggcaccttcttcctcgcctctccagattgtcctggaacctccaggatccttgactgagggcgttgggatggcttgtaggatttttaagagagtgtgtctacagacaagcattttctctgtagagcagccacacgttgtataaacataaactgtatgtgcagttatttaaatttgtttctgtcaaattaatcatttttgttggacgattcagtggcgggggggttttgcctaaattagtatataaaaacaaaaatgctaaattatatctgtgaattgcaggtattggggaacagttttaagggaaattttggggggaacattttaggtttgtatttggtagtcttaatgtatctggcatttgggtgaactgtggacatactagagttgattatagacacattgattttgaataaggaactgctggccgagcccgctgggagtctagaaagagaaaatctgtttctagacctcagttattttcccatttttggttgttttgaagcagtaacatttttctcagtgcacatgcaatttgggttttagagaagatggccaccagctggcttcctagatattttaaacttttgttctttaatatgctgtccatggctgagtttattagtacatgggcttagtgaccacaaaatattttattaagaaactgtttcaaaaataaatttgcactgttcatttttctggcctcgctgttctccatagagcaagggtaatcctagaaaaaattttttttttttaaattatgcaacgtaagatgtcctccttgatagaagtcttagctcctgtgttacaagggagaactcatttgagatcagtctgttggcattgcaatgaagtgctttgtatcaggaaagtgtacactattgaccttttttcctgttcacaagctgagccatatgtacataatctagattttgttttcatagttttgcacttttatagcctatttttgaagattaacacatttgcaagatgattgactcaatctttgcctaatccaatgagtgttacagagagcttgctgtgactagaaccataaatcttaaagggggtatgtgataatagagggctggaatttaaacctgtatttaaaaaaaagaatcaccaaatctatttgaaaacaagtcgatttgtattatgctggaattttttgggctttcagatttctctttttaaccacatttctgaatgtataaaaataccaattattttcctacagccctttgtacttcaaaatatgtttttgtgtccatcagtattaactattggtatactactggttttatatttttttttctttgagacaacagtacatataatagaggtacaattcgttggatttttgtttatgtatttatttcattccagtttgatttattttaattgttgatacttaagttgtcgaacagtagacattacttgttttatttatgatatatttcagcttaaagttatgttattatatgtggaagtgtaaatatagatttggtgttttgcaatcttgagttttagtgtttattgtgtttctggtttctgattttgttttatttaactttttagttttctttcttttttttttttttgagatgtgctcctgctctgtcactcaggctggagtgcagtggtgcaatcacagctcactgcagccttgaacccctgggctcaactgatcctccagctctcggcctcccgagtatcgagccatcatgcctggcttataaacacaattttaaggccagcacgtggctcacgcctgtaatcccagcc

SEQ ID NO: 101485 - DNA, 1032 bp, Homo sapiens
gggtatgattgtaagaaaaaaaagctggccattctgtatttggggaattgattttcctaaacttatattatcttagtagtctagatttatcatattgtactatcatcctggcttttttaagacttaagaagatcaagtaaatttttttttctttctttagacactatatagatcatcaagggtgtctgtcttacaggtggatagtgatatgatctacagtgaggggacatttatttaaaacttaaacattcatgtgttttgggggtggtattttaacggcagcacctctgattgtcttttggagggctggtgtgtgtttgaagttctgtcctccttccagtggactctaacttctcctgatgcacgtgagacacattgtcctattgtcctgcagaaactaaagccaaacactgtcatttggggacaggttttcatttgtcagatctctttcgcccacatgagtgtttgtggacaatacagcctgctttccaaaactttgctaaattttgacagactttcctaggtgcttgcccaatgccagactttcttttctgttgaagattaagttgtgcttgctgccctctagtggtcagttgtttaatcctaaccttaaacggcttatttttcccctggtggttgggaagttgacggtttgtaattggctcatttttctaaattattctgaagaagataatttttcccgccagtatgtatgtccaccttcagtttgccagatcctgcctgctcagagacactgagaaccggaagctgcccgggcaattcagtctatgaaatgatctttcttgtgattaaggcaaacgaagaactgaatgtttaatagtgtactctgctgtacccagaaaaaaacaaaacaaaatcatgttataacactctaaaacttcaaacaacctccaacagcatttggtgtgtgtctagccgttttgttctaacccgatgttatataaaagaattttttcatgctttccaaaaatgtttatgtcaagaatatttaagtcagcatgccttattcag

SEQ ID NO: 101486 - DNA, 1035 bp, Homo sapiens
taaagaaagtctaattgagcaccgcaaggtgcacaccaaaaaaactgctttcggtaccagcagcgcgcagacagactctccacaaggaggaatgccgtcctcgagggaggacttcctgcagttgttcaacttgagaccaaaatctcaccctgaaacggggaagaagcctgtcagatgcatccctcagctcgatccgttcaccaccttccaggcttggcagctggctaccaaaggaaaagttgccatttgccaagaagtgaaggaatcggggcaagaagggagcaccgacaacgacgattcgagttccgagaaggagcttggagaaacaaataagggcagttgtgcaggcctctcgcaagagaaagagaagtgcaaacactcccacggcgaagcgccctccgtggacgcggatcccaagttacccagtagcaaggagaagcccactcactgctccgagtgcggcaaagctttcagaacctaccaccagctggtcttgcactccagggtccacaagaaggaccggagggccggcgcggagtcgcccaccatgtctgtggacgggaggcagccggggacgtgttctcctgacctcgccgcccctctggatgaaaatggagccgtggatcgaggggaaggtggttctgaagacggatctgaggatgggcttcccgaaggaatccatctgggtaagctgccctgtctccgtcccgtgctgttccgcctgtgtctgtctgtctccccgtctccccctctctattcccatctccagacaacgctggccaggaatggggtttggagagccagagtcaagtccaggctctttttggtatcactctgtgtaagtcatttaacctctcagggccttaattttctcatttctgtaataacagggttgagttaagaggtctccttgttctgaaaatatatatatattttttaaacgtgtatcgttttgctcacaaaacacactttaaaaaaaaaataacttgtgcatccagcccaaatgcactgcttcttaactggggcgattttgtt

SEQ ID NO: 101487 - DNA, 1003 bp, Homo sapiens
cattttagtggcatttaaaatgtattcagctgaatttaacaatttctgacctaaaacttgacattttagatttaagtcggtaaagcactgatttaaactggattttaactggatgaaattctgatttaataagtgtactgactggataaaatgccaatgatttaattaacaagcacgtttaacaggatgccctatatattagttaaaagtgaagcaattgaattaggtaccttctctgctgcgtggaaaagaccgtatgactcacccacaccagccttctcttcgctctgagtgtagctaaccgtttctgttttttttcctctagggtttggaaatcccttgtctccaggttgctgggattgacttcttgctcaattgaaacactcattcaatggagacaaagagaactaatgctttgtgctgattcatatttgaatcgaggcattgggaaccctgtatgccttgtttgtggaaagaaccagtgacaccatcactgagcttcctaaaagttcgaagaagttagaggactatacactttcttttgaacttttataataaatatttgctctggtttttggaacccagggctgttagaggggtgagtgacaagtcttacaagtggccttattccaactccagaaattgcccaacggaactttgagattatatgcaatcgaaagtgacaggaaacatgccaactcaatccctcttaatgtacatggatgggccagaagtgattggcagctctcttggcagtccgatggagatggaggatgccttgtcaatgaaagggaccgctgttgttccattccgagctacacaagaaaaaaatgtcatccaaatcgaggggtatatgcccttggattgcatgttctgcagccagaccttcacacattcagaagaccttaataaacatgtcttaatgcaacaccggcctaccctctgtgaaccagcagttcttcgggttgaagcagagtatctcagtccgcttgataaaagtcaa

SEQ ID NO: 101488 - DNA, 1018 bp, Homo sapiens
aggccatcctatagtttaaccaactgcgttaaatagataatagaaagatgtggtatgtggcagtgacaacttgaaggttgtgactagaactcgggtctctggagtgttctattatatcacaccaagctggtcaccagcccatgtgttgatcctccattgtgatagcaacaaagaaaagacttcaggacattctttcctttaccctaatccttgatctgcagtcttatttagaaaagcttaatgttaaagatctagtttattcaaaactaaagataacaaggagtatgagaatttctatttcggagtgtaaaggaggagatgtttccttggcttctctgagcctgcaggccttccttgctctttaaggaagtagagagagggaggaaagtaaagtatgcttttgttttttaaggttactttgctgggagtagtttgcatgccttttggttttcttgggtggaattaactgacttaagttttaagtagttgggactatttaaaaacaatgcctatccaatgtttgccataaaggcagagggtattggctttagaagttaattcttctccaggagtgaaaattagcttctaaaccagaagcagcagagctaaataaagtaattttccacctggccagtgcatgatgtgaaaggtagattaaaaaaatgagagggcccattttctgatgaaagactaagccatgttgaaacagccctgttgaggattttattttaaatctatacattcacaaaggagctttgtgtatgtctttccctatttgttgtttggactaggaagccccacccagtgcttgttgaaggcagaaagtcgttgaaagcaagctgggatttgaacagtggattgaggtttcgaatatccagtgaaccaaaatatatcagggttcccctggccaagatgagtgaccattctgaggtgttaagtatttcttgaatggggattttaggaaaagtttctgtatttctgtgctcattttgttgacctctgtatgtgcaaaatctct

SEQ ID NO: 101489 - DNA, 1130 bp, Homo sapiens
cgtaaaagacagaggaaaaactttcagagaaaatgtaaacttctagccaggtcttggagataattttgtagttttcagggtacaaatgcattggccagagaatagcaatttaagttgaattttttaataactccttatttggacacctcagtaacttgggaaaaagtagctttgttagcagtatgacaaattgtgtataaatataatttttctgtgtttttgaggactttgaataccttattcaaagctgtattatggtagatgcatattccatatcaacaatgtaagataacctgttaatcagaagaaacagaggctgtgctgtttctaaaagttaacagtttgagtacatcaggatgtaaagaaaaatattcccaagttacagtaattgtcagcaaagtggctgttgtacctagttagttgtacttaagcacagattactgtgctttttattaagcagtgtagaatgtgtcctatttgctgatttcaagatctacaggtagtggtagaattcatggtagctttagtcacaaatcagtgtgtaattagtgacctaaagaacatcacacttctattccagccttttctagcaatatggttcctactggatttcaaagattacgctctggtaaattttaaaagtatctactgaaataatcccaatagaagtttctttcaaaatatggctatactcaatagcccacttgccttaggtgttagggggtatatgagttaagttctgtcgtttacctgagtaaagattttaaaatgtttttaaacattggaaaacatttttgtgaagtacttttcagtaagcttagcgtgttcataacgctcactttcttgcaagctagaagcatttagattatagtgttggattataatatcctgcttttctcctccagttctttgtcaagaaagacaatttactttatcagcagtgccatcggtttactgctgccttctgtgtgcaggagtgtggagagctggaggcttctgggaaggcttgtgtttgtgcacacaccccattcaattggaacggtgatttgctgttagtagattagaatttctattttgctgtattctgttattaacgtctttattgttacaaccactttaacgattactga

SEQ ID NO: 101490 - DNA, 1024 bp, Homo sapiens
aagttgtatgagagagttagttggattccttacttagcctttgttcttattaagctttacaaaacttgtttctgacctccacatgactgtacttcctatagaaaagctcccccagactcagaagctaggtttttaacagactcgtgtagtgtttctgtattggtgttccattattttctggtgtgtctggaaacctttggaatttaaaatgtagttaagtggactggaaatgtagactctagacatttcttgaatcagcgttaggagtaatagttacttttacttctacctctatcaaataaggataacaaagcatctcagttatactgaagtgtttttgtttcttttgtaatcaatatagagtttttcttcagtttataaatctactgaacaatgattgtattactaattgaaaggagacttttccccttgattttgaaagcaaacaggtgactggaaagagccagatatacaactttagtatgtagtcagcaaaagataggatggggaggggaatatttaaatcttgcagaagaacgatcttatgccttaaaaggcattgcctaagcttgtatttaactaggttacttgaattgtgtttaattgagagcgctcattggaagaagtggtatggtgtagtggtctagtagtgggcatagttgtgtgtgtgtgtgtatatatatatatatatatatatatatatatagatagatgtgtgtatacacacgttcagtgttttcattacagagagttagtgcaggtaaagatagaacagtttattaacagttaattaatttgctgaaatcttttttttttggtgcagttaggcctgtcaaatttttacagatatttaaggttgtactggttaagtagtagtaataggagaaacggatagcaatgcttaatcttgcttaattaaagtttttaaaaattcactttccttatattataactttttttcagatcaggatgtttttaaaaaccactttgcagatgacagtatctgttaatattgaaactaaaa

SEQ ID NO: 101491 - DNA, 1050 bp, Homo sapiens
aattaaggaatataatggcctggcaatgactaagtccttctatctcctcattgcagatacatgctaatcacttttttctctcttaacaacatttattatgaaatggcatgtttttgccacagcagggtagccatttcccaaccctggagcactcttaattctgagatgcctgattagagcctcaggggtcccaaaagatgtgctgttttcccactttataaaattacattcttttctcacagttgtcacaaacatgatattggttgataagaactttggagtagttttaatgactcttgactgcctgaaagatgccactttaaaaaaggagctacttttagctgactctatttgaaagtaaatgattggaccctttttatgttttatatgaagctttgtttccatttgcttaaaaaaaaaattcaaattgtcccatctcctgtatgcccatatggcctgtatgttatagattttgaggttgctgggtatgatttgttttaaatcgttccttcctaatttcccatttcagtttaatccctgagcggaatgtttaatgaatgaattgggaaggtgaagctgaaggactgagcaatggctgttttcaagccttagaattagaaagtaggaatgaaaaacatgagacagttgcataaactgagtattccactaataaaataaatgtaataagattttaaatccagttactacaattgaaatctaaaaacagaatagtttttagattactgggatgttaaaaaataaaaacctgaaaggtatttacagaacagctaccaacatggaattaaaggaatctcaatcttgttaaatattctaaagagggaagggtttggttacagcatgtaaattaaacttgagacaatggcgggcgggggggtcttgatccgcacacctcttctccagattctgcgggggggaggggtgttaaaatttaaacgcacatggaagaaaaaaaaaatgtattacacaaagacggcaggaaatttcttaaattcgggtgaaggaagcctgattattgaatatcacttaatg

SEQ ID NO: 101492 - DNA, 1030 bp, Homo sapiens
tttgggggtcctgtattattggccactgtgtgtcctacagcgtagctaggtttttcagttttctagatcgtttggaagcattaagctgtatgttttaagaagcctaggtctgatttagttcaggttgattcaattatgtcttcattgcttttgagttggttgaatgacttgacatgagattaagctcaacaaaagaaaaggcgaggtagcaacagctgccgtccaggcctggccactaggtaggggtcttaggaggccttttaccttctcttttgtatatgtcaagaaggagatttacaatgttcttattttactgtacttctttcccctgaagtggatgttctttcttgattgatatcaaacaagacttaaaatgctaagttttatgatacttagacaacgagtaatagatgtagtttctaaaagccttgatgtgtctgcagtgacaagtgcagaggaataacctcattgctttttgtctgaaaatataacaggcaagccactagtttgtgcttacttaatgtgtgctaagaacttttaaggtgtgtccttaatggtagataacttttttccttctgggaagtcatatttattttagatattgttttgttcagggttctggagactaatagtgtttcgttttgtttcttaaccctgatgttgctgccatttttaatcggttatatttaaattcaagaggcagtaagttatttaaaatacagttgtcagtagttccaaggcagattcatcatttattttaattgttagaataggattaataatctgtttgtttggaattttaatgatttggcgtgatgaggaaagctagtcctttagaattgtctttatttgcctacagaaggaggaagtagaggacaagatatgacttttattggtgaaggacacacacttttttctttagtgtcccactcttttaatccttttgtcttcacaacacttttctaacgctttgcagtttgacctttgctgttttttagtaacttgtgagatcgaagtttagcagttgtgt

SEQ ID NO: 101493 - DNA, 1024 bp, Homo sapiens
tgaaatatcctgattagattttaagattctggcttgagattataatgatgattgaatttcaattaatgttagtcaccctcttcttcccctccgtccctcattccaaaacttcctgtttggaatatctaatgaaggcagaaaactttaaagaggcgttcccagtgttgtgttttgtgtgcaatttttaagggagtttttacattaacattttgagtgaaggtaatttcagaaaactatccagaatattagaggagtcatgagttgtgtttgcagtgggggagggcactcatcgaataggacaaatccagttaaaaaatgctgtcaaccttatcaagattgactaatccaatcaagttgggagggtactgaaacctttatttaaattaagtcttattcttgacccctccctttttgctgtgcttataaaaacccgcaatcacatctcttccagtattgtttggagccaggtagagtgaagtcctacagagttatcaggttccagaccctgccttctcttctgaaaggtaagttctgctatatatatatatacatatatataaatatatttttttaatagtatattattgtgatactttacagaagagtgacttgcatgggatcaagaaacttaatagaaaagagcaatgtggtgctccttcgagctgtttgttattcctacttacttgagtgcatttagtcttgttcaaagggctgtccctgtttccttctcaaatgtcctttgtagtttgcagatgctggcaggtttgcctaactttttcatgttcttttcctgctaactcctcactgcagtttttcaggttttcctgctctgaacactgaattcttttacgtcccgtatctatgttggctctgtttcagctccagggatttacacacagtttccaaatagtttttctataatagttccacagtaaaataacgtcttgtgaaataagaagatcctacctcattctgttcttctaattaaggctgagtctcaaaagaggattccagtaagtgttaa

SEQ ID NO: 101494 - DNA, 1003 bp, Homo sapiens
caggaaggttgagcaacagccctcctaatctttatgcttcttcctttctctcaaccttcccttcccccaccccgcacacacaggagaaagtattccgatgtctttgattgccaccaacctacagtggagtcggctgagagatgggtctctctagagagttgttcctgctactctctctggtgacgacaaagaacaaagcccaggccatcacagaaggttcaggagcagtgaggtcttgaaaatttgggagagagagagcaagaacatttttttgaattgaggcaataatataagatcttcaatgtacacacaccaaacttaaaaagagaaacaggctgtggcaaagtcaaaatgccttcccggggccaggcaggtggcaaaagagaggccggccaccaggcgggggccgcggcaatcaaagggggagggggcaggtgtcccttgcccacagcccttctatggccttgcggcttggagtttggacctggtgtggccagagctcacattttgttaaggaaagccagaaatcccaatttttatgtagaagctttagaaatgttggtgactatttcaaaatgtttgaataccatctgagccaaagaaaacatgactgtagcaaacccaacacttgtccaccagtttcctatctctccttaggaagaacataaaagtccagaaaaggattatttaaaacacactggacttacaccatcagttacctattaatagcttctgaacaactggctgattagataaactgactgataagacagacgctttactttttaactttgtaatatgccatttattcattcaacttttttttttttttttttttttgaaacagagtctccctctgtctcccaggctggagtgcagtggagttcagtgccaggatcttaattcactgtaacctctgcctcctagattcaagcaattatcgtgcttaagcctcctgaggtagctgggattacaggcgtgcgccactgcacccggctacttt

SEQ ID NO: 101495 - DNA, 1039 bp, Homo sapiens
ataatattacagtcacttcttattcagaggtagtgctcaacttccccattatttattgattttcccccaaagttatcaagttctaaagcctaattattggtgtaatagctgagatgttaagagaattgtaagcccctttagctaatgcatggcatatgttgaagggattcagctaattcacatatctgtctgcactattaatagagaaggttacatgccaattatccaggcttcaatcagcctgtttggatacaatagaggcagtgttcacacacttgatgtgccacattccttcccgacatcagaagcagctggtccagataaagaccgctggggttttgatatttaggaatcacgtccacggaagagctggagttgagacttgattgcttcatggacaaattccctgcaggtatctttaacctggactcttttgaaaaatgcctagtaggtttgcagttcactgggctttacacttttcctgctcagacttgttgggtgggtgggtgggtggaggtgctgaggaagaggagaaagacaaaggagcaaatagctccaaggacaaagcagggaataataggaacgggcaaatggattccaataaaataaagaacccgcacacattcttgtgcccagttttagaaccaaacaggctaagacattttcctcctaagagctcaacttcgtgtgttgaaaaataggtggatggataaatatctctgtatatttcacctgcattcttttctttttatttttttcccctttcatttctttttttcctctgattcagaagctggactggaagtgttgtaatatcatcagaaaatgctgcttccggtggtatttttaaccaggaacagaagctgaagtgtctgaaaccaccggagaaagcccctgctctcctgagagctgttctctaattttgctggcagagagcattggatcagtgatcagaaagttaaaatggcagatgttggggcttctagggggaggggaggcagatacctgatactctccggcatttgtttttttatccttc

SEQ ID NO: 101496 - DNA, 1087 bp, Homo sapiens
tatgtttatggttcctttgaatacagagttcaacatgaattattctgatttgtctctgcaaagaaaaaagaaagaagggtagaagaaaaggagggaagtgagggagagagagaggacgagaggaaggaaggaaggaaagaaggaaggaaggaaggaaggaaacagttgttattaataataactgctgctacagaagtgacttcagatggatttaataagattctaagtgtaaacccaaacttcagtcacctttgcatacatacagctttacatgcctcaaaataagcaataaagaaaaatcactgaaaagtttgagatactctctctctctttttttttttttttttttttttttttaagaagttgaactttgttgcagtaatctccctgacagcctggaggtctgttttcatgattcatgatgtcagctgagatcagctgctgtcaacacagccttctgattcaatcccaattcttctccaagggctctcaaagaaatggggggaaagaaagcaaattgaaaccttaaattgacagagtccctaatgaatgccaaattgaaacaactaacgggaagtttagaattcctgtctcctagggggcaagtgagagaactttattctctagaaggtggtggagtgctcatgcgtgactcttcatgtccattcggtttttgcctaaaaagccattttgtgcatttgtttgttttttgctgctcaacattcccaaaggttgacagatatgatccaaagccacagtgtaaaggccacttgggaatgggcttgagtaggaagggctcttacgacacagcccgaatttggaggctgaatgaaatccttacgtgtccaaagctttgggtgtgatgggaaggctgacagagctggttatgaggagggaagaaatagccaacagttcatttctttttctaaaccttctcaagcaagactggcctttgtagaacaatgcacaaggcacggaggaaggaaaaacccactttccatgtagacagatctaaattttatggagaggacagtctgatctttgtttgtcaatcttagtgaaacctgcaccaatgatgttcctcagt

SEQ ID NO: 101497 - DNA, 1031 bp, Homo sapiens
aggaagttttggcacatagtaaattcaatcagtgttagctatttttttattatttcattggtactttatgttatccaagtactctttatttgcaaatttgtaaatttaatcacattaaatattaatttttaaatactaaacattcaattttcatcattttttagtaaagtagaccttattaagacatttaaacaggtcctacattataaacataatttttgctgtgaatggaatagagccactgaaatgtacagtgaccctttagccagtaagctcatgcaagttttagctctaagaaaaaaaaaacactactctgagacatttaccaatatatttgaccatgtaactttttgtttcctgggtcatcttaatgaaagaatgctccaacttgagaaattctgctctgtgccaaaagttggctttttttctttccttttaaaaggacttattaattgttctttatgtttgcaatatgtttatagcttaggaattattttatggagtatcagaaaaggttatagatttacaaacaaaccttaagcttgtggagcaaaaaataaggcatttgttatgttctgtacttcttgtgattcttgactatatgagtgcaaatggcttattgagttattgttgagaaatataaaaagctaactgataacttctccgttaaaattttacaaaaacttaaacacttctttcaggctgcagaagatgtcaatgttactttcgaagatcaacaaaagataaacaaatttgcacggaatacaagtagaatcacagagctgaaggaagaaatagaagtaaaaaaggtattgaaaataattattagaagaataaaatttttttatactatagctactaaaactgaactcagttaacaagtgaatatatatttctctgggctgtttgttgcagatgaatgacgcgatccactctagttaagcagaaagtcattttttttttaagggatatgcgataacttacagagttgttgaggagcttgagtctagaccgaggttccaggaacaagt

SEQ ID NO: 101498 - DNA, 1031 bp, Homo sapiens
gagtcagctgtcttcccaatgaggaagccacccttgcagacttaggaacaccaagctgctgctgccagtgccacctaccccagtaaatctggggcctgtgtccagccgtcccccttgagttgaaatccagctcaaatgcatttgattggtggaattgaagttattatcacttatgcatgctggcagaactttcattacccgcatgatttacttacaccctatcagcaagcaaggctgagaaatgtaggctggtttttttggttttgtttttgtaggaaggcagaattcacaaagtcaaaaattgttaaaatagaagaaattttgagtgaccatgtgcctgctgtccaccacagggcgcttattgtccagaggacaaagctttaggtagctctaagtgcttgcttgtgaaatgtcttctaaaaagttacaaattaaggtcttattctaatgtggtaataatacctttgtgagagggtccctcagagagttgctgtccccaaattacaattggcctttagcttctatcagagaactttgagtacattttctttgccattttgcatttatagaaacaactccaaaacctagaagatgcttgtgatgacatcatgcttgcagatgatgattgcttaatgataccttatcaaattggtgatgtcttcattagccattctcaagaagaaacgcaagaaatgttagaagaagcaaaggtatgttaaaggttaattctgaaattagaatttatatcactataaagaacatgtaattatagatgtagggaaatagtagatgctagctatagctaatatttactgccttgttatgtcccaggcatgctccgaatgctttgccagcaggattttgttgaatcataacgatgacctgttatcccaatttagggacaaagaatagaggcttagagaggttatgggatttattcaaagtgacacatagacagtggtcttctgactccagaaccttgctcaaaactaaaagtatttagaaggtatagcatatattgaagcagaaaa

SEQ ID NO: 101499 - DNA, 1056 bp, Homo sapiens
aggatgtctttgcaaaattgaaagcatgccactcaagtaaaattaatggatgtaaatatgaactcttctggacaaattgcaaagacaaattgtgggctagtgaaaaatcttcaaagtatcttgcatgtttgctagaagataattggaatgacctagctacagggatgttttgtaattgttgctactgagtagtctctgagaagtccaataatatcctcttaaaacacaccagagagcaaagatgaacaccatctggcctgctttccaaaacagttggtcatcacagctgatgttaatttgaacattcatttcttctgaaatgaggtgggggctgtattcttgctctccaacaatgtccttaagttccagtctttgattcatgcatcagcctttctgttgctgccaatgtttattttgtttaaacatgaatttaatttagcatatttgtaataactaagtaatttatgctcataaaaatattcagataacaaaggaaaatagaaagaaatgaataaatactatccataatcccaccactcaggaataatgttctatttttacatgtccatctataggcctatgtttatctttctaatttaaatataatttaaataaaaatgaaattacatttactggttttttgacttatctttacttaatactaaatatcatgaatattttcctgtcaataaaaataaaatagtaattgttatggttgtataaagtatatgggtggtttggaatatattaactaatctcatatggatatgcattaggctatttttaaaatttttctatattaggcatccttttctaatatttatttttaatttattttaatattttaagttccagggtacatgtgcaggatgtgcaggtttgttacataggtaaacatgtgtcatggtggtttgctgcacccatcaacccatcacctaggtattaagcccagcatgcatgagctatttttcctaattaggcatctttttcttaaagcaaaatcagctctattgagacatgtacaaaccacctattaatatttgaagcatagaattt

SEQ ID NO: 101500 - DNA, 1044 bp, Homo sapiens
ttgcacatcaatgtttacagagatgacttacttgtaataaagcttaactggaaacaacccaaatgtccatcagtagaaaaacagatacaccaattcatataatggaatactaatcagcagtgaaaaaggaacaaactactgttacatgcaatcacatgttttaatctgaaaataaaacagaaaacttttggtgagtgaaaaaaaagacagacactaaagagtacaaattgtgtgactccactgacagaaagtcctagaataggcaaaattcattgatggtggtagaagtcaaataatggttactcttatcaaataaaagtgggagggcagtgattgagtgggaataggcacaattttgggggctaatggaaataatctatatcttcataagttgaaaggtttgaggattatataaatatatacactgaattgtacatttcagctgtgtgtattttataatctgtatagttttctattaaaaataacacatggggttgcataactataatatatcctttctatgtgttggctgttgctgttaattatgggatagtttcttgctaatttatatatacaaattataaagtatgaagtaattatcatttgtataattgcatataagttatgagttatttatttactcacatattaatgctttaaaatacatggattgttaatatatgctactaacattgcctaagttcaccaacagtctgcttagttgtgagtcagcttcatacactctgaagataatacctaagacatcaacagcatataaaaatgcatttcactcaatagcttttcataagttcaacagaatcctatttatctagctgttaactgaatcttctttttacaaaaacttatctgttttgtaatggcaaataagtgttattccatattttagtatcagcatcacccaacctttagtagttgtcgggtgaaaggccaggactgagatctggaggaaggagttccctgatcaattaagaatggccgcagtgtgcacctgagcagaagcaggggaaatggcagggctgaaag

SEQ ID NO: 101501 - DNA, 1100 bp, Homo sapiens
ttttagttcatttgttctgaaactagaaagaagacacttaatattggtttctgacttttgagcaaattttatttcctcggttaatactctgaatgtaatttacttgctatgcttgctaacaatggaaagcattgaatttggttttgtggcttatgctctttatcaattatatgccattgataaagttgtctacctccactgcaatactgggaaggttaataaagagagagcgtgctcatttgagtcagttctgtactgacagaacgtgcatctctggctatttgtggtatgtatatggcctatcagaaactacaataataattgagaccaatttaataaccattataccagtgacctagtcattcttgtagtttggtatatttaatgcatttacattcatttgtggatccatgtagaccacacattcattcatctattcaacgacttttcattgagtatcttctatgtataaggtaattctttgtaccaggagataactggtgaatcagagtaaaccagaaaatagatgaatggttagtatcgttgctctgctatgcactcatttaatgagtcattttaggattactatagcaacactattaaaaattttacagtcattcacatggctcgaaattcaagaattaaaagttcaaaagggtatacaggaaagattctctcacccgtctacccagagccaccaattctcctcaagagggcaatcaattttatagtttcttctctttcagccatatttcaagcatatatcagcatatacatatataggtatatttgtatatatgtcatgtgtgtgtacaccgcattttttccccacaaaaatagtatatatgcgctatccattattctctaactaccttgtgtcacttaataaatttcaaaaagctcttttaattattacttaaagattggccacatttcttttttattcctgtcagcatggtatttcattgtgttagatattctattaattttgaattcttgttgattatattttatcattattataaatagtactacaatgcatatctttacataagttgctttcacttagatttttttccttaataactagaattgcaaat

SEQ ID NO: 101502 - DNA, 1041 bp, Homo sapiens
gggtgattggagatggtgtcatgctatccttggccttatctgcatttctgcttcttaaacgaatgaaatgatgaactagatgatcatatggtagacagaagggaaaagagtgattttatttatctgtagacagagctctttgaagacctgtcatgggcacacatcaaagacaaatgttgtgtgcatcaaaggcttgttggcttttgaggtggtaggtgagaaaaaagcatagtttggctcatatctgtgaaaggtgttttggccatctcagtacccattggagaattttgtgtagctaaagagacctcatgactttgagtttctggcagacctactaactgtggatggaagcaccaggggctggcttctcactgagatgcttctattcatatctgtcccggtggcattccccaagtggtgtctcctggatcccctccatccttgaatctgtgcctcatcccacaccccactgctcaggtttgaattggttctgcagtttaccagtggtttgaccttggggaagtcacttcaagtccctgcaatgtagggatattataggctccaaatcactgggtagttgtgaggattaaatcaggggttggtaaattatgatccaaaggccaaaatgcccctctctcctgcttgtttttgcaaataaactttcacgggaacacagccatacccattagtttacatgtaatctgtggctgtttgcacacctcgcagcagcaagttgagcagttgtggcagagaccctgtggctcacaaagcctaaggtatttactgaaaaagttagctgacccctggattaaacaagtgaatacctataaattcaattcccaaatgtttatgggctgctatattgaggtattgagcctataagagtgaagaaacacagacaaaagtccctgccctcatggagcttacagttcaaggagggaaacagataataaagcaaaaagaaaacccccaaaatgtaaaatatatgtaaagtgatttagtggtatggagggggaaatgcaggaaataaagagaaagaga

SEQ ID NO: 101503 - DNA, 1071 bp, Homo sapiens
tgtgtgttccccttataacatcctgtgctaagtgctcatgctccccaaaattcaggtccctctaaatgatggtgatgggaatccaactctgacagtttgaccccagatgtgtgctttacactgacccaagatatagcctagcaatatacgatgtaaaaattaacattaactcattgactcaactactaaataggtactaaaagtcaagctttttgctagacctgagaatatagaagttgaatttagctcttgccctcaaagaatttacagtctagggggtagacctgctcctaaactagcaattaagtctttaatatctatgcatttattctgcaacactgaatttaaaacaggtttttctcagaagcaattttgtttctacaaactgtctcctgggctcagagtccctcgtgttaccgagttccttgaaagccatgcttattgcttttaaatgcaacatatctcgggttgatgtttttgttctatagtaatcctttcattcccttttttatttgagagtttgaaaataatgttgtgtgcaaaatccctaaggaattagcagagctgatttgattcaaatataacttcccaccctgtgtgcagtgtcatgcccctgagtttcatatacatgagttctaaccccttcttgtctcttgccaagatttatcagcaattggttaacctatttgggttagcttagcttcattttcttcatctgaataatcggcataggtatggattctcacaagaatcagatgctattttacagaagttttataacaagcttaaattttgaaataaaactaaagcatcatgatgtaggcaacatgggataaaattgtagcctaaccactgtgtatgctggagtcacgcaatttgaattatacagtctttgaggtttcatatgttttagtttaaaggctgactttgccatttgtaagctgggtggctttgggtgatttgtttaatatttctctgttagtttccttattagtaaaataaaataataatgttttcttttataggctttataataacgatgaaggtgctggtggagatgataaagtgatg

SEQ ID NO: 101504 - DNA, 1049 bp, Homo sapiens
gtgattgatacccctgttgtttccactctaggtcaagatttcatatataatcacctgggctattgcaatcaccttctaacttgtttccttttctacccctgcccatttttgattgaggtgatttttgagactgtaagatcataccactcctctgctcaaaattctgcaagtcttggccaggtaaggtggctcatacccataatcccagcactttgggaggtgaaggcaggaggattttttgagctcaggagtttaagaccactctgggcaacacagcaagatctcatctctactaaaaataataataaaaaattatctgggtgtggtggtgtgtgcttatagtcctagctacttggaaagactgaagcaggaggacttgcttgagcccaggaggttgagtcagcagtgagctatgatcatgccactgcactccagtctaagcaacaaagcaaaaccctgtctcaaaacaaaccaacaaaaaacaacaaaaaaacctacatgtcttatattttacgtataataaaatacagagtccttcatggcctctgaagtttcccatgattgtgtgtctgcatccttctgtgatgtggtcttctatcacccttccctttactctgtaagctgacttgctttttcttaattatggtagacacacttgccccagggtctttgcacttaccctctcctaagaatgatctttccctgcttgtggctcggcttgctcccttacatcacctggccttctggttgaatggtgcctgcttgagggacctgtgagcaaccttcgaggcagcacctctctccctcatggcacttaccatctgttatctggtatcatgtcacttttcaccagctgtggtatcctttttttaatgacatgacttctgacatcacatttgctgttctctttttccataccaattctccaataataattagtgctcagcaagttaattcaatgctggtactaactcctggagcttgtagagatcccgctggttaaaggctcaatcccacaagactgtccctacttcagacgccaaccacaa

SEQ ID NO: 101505 - DNA, 1033 bp, Homo sapiens
aggatgggaggtgtccagtggggcctctgtgggtaactgagatttaaactgagacccatgtgggaatgggagtgaggtaaggagagatagagaaggccctgtgccaggagaaccacagtgtcttctgggaactgaacaaagtccacggtggctgagacatagagcacatgggaaaggtatagagaggacagtggtgagatagcgtgggcaagaccacagggggtcttggtggtcattctaaggatgcaggcttttgtcccacgtgcaatgggaagtcactgaagtgttctgtttatgcacagtaatatttcaagacttatgttttgaaaaaaaaatctgctatgtgcagcatgcattaatggggattaaaatggaagtggaaagatcaataagtagttgtgacaagatgatagtggcttgaattggggtagtggcaaaaaataaaaataaacaaacacatcaacagttgtatctggtgagtcctgaggcacttggtgtagttggagaataagatacatggtgctgagtcactgacgtgatcggtttgggcactttttgaggagaagtggtgtgacatttcatgctaagaaatttgcatttatactatgaaaagggctgatggagattaagaagcagagaaatgaaataatcagattagtgttgtgcatggaggatatttatttcacttcccacctactgcttgagctaagcatttattgaatttagagtaacagacgagagaaacggaacaacatcattgcaggcaaagattgatggaaagtggattcttttgtataacagcacaaaagagatatatgaaagggaggttaaacttgtcagtgtgaaaagctattgatcttgtaaatacttaccctgaagccacctaaggcttcgctcaggcatgacccaaatattccaaacctccaatgcagctgaggatgcggatgtaactggatgagagatgaccactgtggaaatataatgagccaagacactttgtgggaagggaggggtttacaaaagtgttaaagga

SEQ ID NO: 101506 - DNA, 1050 bp, Homo sapiens
tccaaatatgcaatgaatatttctttccactatttggctaaaggaagttctttgttgaaactagttcaaatatatgcattggcattttcccaaattgttggccagttaagtgcatagtattactgtggcattttgtttaaatgattgaaatacagttttattcatttagttatagaaattacaagttgatcaatataactttaataacatggaaccatgacataattgttttgcacctgcatcttttgtgagcacaaaagtgtggatctagttaatgtgttcttggcaggaaaaaaaaattgcttttaatggttgtattgctttagtcttttattggcatatacatttttattatgcaaatttaaaaattctaaaaatggtcttcgctcatgtaaatagtgcttagtgtatgttgacaggctgtatcattattatgttatttaataggatctgcatttaagaaattattttctgggactgttaattaataggaaaggtttatctttctgaatatgcaaccgaaatctagaatgtgaacttgaattgtttttaaatgcctctatgttcctacaatgtctttgatgttttattcctggggattttagactaaccttttgtttttctcccagagagattcaatgtgtatttgatgccatctcctaacttagatgtacatggcgaatgtgccttgcagattacatatgagtatatctgtctttgggacgtccagaatcccagagtcaaactcatctcttggccgctaagcgccctgcggcggtatggacgtgatactacgtggttcacttttgaggcagggaggtgagtttaatgacttttaatgactatttttctgtttgtgtgtgtgtgtgttcatttttaccatgctcgcatcatatgaggcggtaggtttacatatgagatccagctgaagtacacttgaggaaattcatagagttgcgattacataatatgaggggtcttgtgaaatatttatatactcaacatggcttttctcccctgtggaagattttaatgtttcacacacatggt

SEQ ID NO: 101507 - DNA, 1196 bp, Homo sapiens
actccatatttcaagtggcataattgcctaaaaagaaaatcagcctccagccaagctagtgagaggcataatgataaagcctgtacttttagaacagctgataaactcttatgcctatgaaaaactggggtccaagaggccattcctccatgatgagagacatccaatgttaacctgtttcttgtgtgtgtgtgtgtgtgtgtgtgtgtgtgtgtgtgtgtgtgtgtgtgtgtgtgtcaaatgatcctttactgaaatattttcctttgtgcttaactggctgggcattccacagcaccactgttgatgtcatctatgatgtcatgagggtggcggccatcaacattacagcccacagactgggcagtccccaggatctctttaatggttccagagagttctctggctaaggatcggtgccgcatctgtcgagcaatgttgacgatctcatcaaaagtgatattcccactgtgtttaatgtttttctgtttctttctgtctcttggtggttccttgagggctttgatgatcagggcagaggcagaaggcaccacctcaatctgggcctgtctgttctgaatggtcagtttcactgtaatcctcaggcccttccagtcaccgttgccttggcaatgtcatcaccaaccttttttggagacagacacagggggccgatcttgggggccagggcagaagtggcaccgacttcacctccggtgcacctcaggtatacgactttgatctcgttggggtcgaacttcggcggcatggtggaggcggctggtgtcggatgaacccggattcgggacgaccgaagaaagtcgcaccttggcctcctccgagcccaaagccgaaagctaaccccctgtttcacagaaagaggttttgctgcttggaaaggaacttcactatctccacctgtgcctcttggtgtcatgtcacagtttctctacaacaagcacgtgcatcccactgcactgagagagagtatgattcagtcttcactgtggttttggagtgtctggagtctcccacctcatgtttaatgactcttctgtcatttgccaaagtcctgccacacctgattttcactctgttctctgtttttcaaacacactggttctttcctttctcagaaaatgatttttctctacctgaatttctcttagctttgctgatttcttttcctctctcaa

SEQ ID NO: 101508 - DNA, 1043 bp, Homo sapiens
aaaagggatcaaaacttcctggaattagggaaattcaggacataattgcttaaggatgctgcattgcagtttctgaatttatccaaggtttctctcttatttgttcatattgagttacagaatctctgactctagggtttatgatgcctcaaatgaacctttgtagaccaagcagtttgatatacataatgtccttctttcttggaaatctcaactcaacagcactgtgttcagggagttacctatgagaatgttaattacaggtgactcccaaggaaataagttatcaattatatctgagtgtttcaatatttcctctgaaatgataataatgcaccttacgtttcagtattatctgatagaatgctgtaaattcagctaacacttgtcaagaggcttgtggcatctttaaatcacagatcttaatgaaggtttgtcaaggcccaagctaagtaaatgtgtttcatgtatcaaagggaattacatttccttttgtccctctatattcaggctaaaaacaaaggggaaattaacttgggaagtaaattacttgttattgggttggaacaaaaattctagcaatattctcctaaacacctttttggtaaccatttaaagatatgaggctaattacaatctgtgtgcaaaatcagatttataattagtactgaaatgaattactgcatcaaaaaattgaattcttgtggtcaaagtagattcttcacacaatagatacactattttgatatacaaatagaaacatttactttaggaacaccaatttgaaaactgagtgttttttgtcatgatactttctgccttttgctccttctgcaaaaggccagatttgttttaaagagggaacaggggcatgatctagtctttttctaccttgctctactacctcttgactgctgttcttctgccacgttgtagcagagagaagttaaaatggcaaagccttcctccagctccctcctgggttgatttttgcagcttctagggctttaaaggaccagttcacatggccctttgtgctttat

SEQ ID NO: 101509 - DNA, 1053 bp, Homo sapiens
aatagttcagtttcccttcgctttctccctcttcttttaaaaaattaaacacttgattaaacaaacagaaaatcatttctttgcaaatgccagcctgcagaagtgtcttcggcagatagtttttccagccagttcttctctaatttttccttgaaacacccaccgttcatttccgctacccctgcgctttcccctaacgcccacaacttggtaataattgggaggccagcgccagactgagtggattcaacagtcattaagcaaaatgcaaaagttaaaccagagcctcgctggatcgcacagctgttcctacacctgaaggggagccacttttattaaattatgcatccggtgtgccttttatttcctcaatgagaacgtggttcataagtggttatggggattaccttaaccaattaatttcaacaatttatagccttgaggcaatttcactgcagtatgtagtgggtggattgagcatttgagcttatgaaagaataatgatttgttttttgaactctggacattccatgggtcagggaacatgtcgtttggtatgctgtacctgcccagctctttggaggcgttctctcactcaagctgggttaccccctcaggaaacagagtcacaatgtccctctttgcagggttctaattgtgtctactatccacaagagcctcatatgttcaggaataaaaataatcaatagcttcctggttagactgaccaggataatgggaaatgggcttgaggagggagagcagatgccaggagcttggcaggcaggtttctggaaaggttttgctttcaaaatcatatataagtagctgggccaggcaacctgacctgttgagaaaaagtcctccaaggccaacagttaagagtctgacaagcatttcttttggtcctactatgcactgagggcagcacaggatgtaagaatgaatgagacctggagcctgcctgccctcaaagggcttacagtctcccaggaacaggtattggcacaaaataggctcccatttgtatttgagtacagaaatcctacaatt

SEQ ID NO: 101510 - DNA, 1014 bp, Homo sapiens
ctccagcctgggcgacagagggagacactgtctccaaaagaaagaaatcccagcgtagatccaaactgagacactgaggcttcgtccttatagtagtcaggagcaggcgattgaagtaattctgtcctgcggggttcagcatcatgcacgttccccctgggccattctctgatgcagggcacttgctccacactctgggaacccagattcaccagtctgccctgtcacgtagttgaaggagttgcatttatctttctggctcctaattcctttaaaattacatttgttgcagaacctccacaaggctaaataaaattacatttgtgaccatcagagaactgaataaaccattaactggccatcctggttttgcagagatcaggttgttgacagttcctggttgacccacagctacccatgtcagttatctccactaacatatccaagaatctttgtaggacaatttctccacctgcaaggtctttcaggtagaactcttcttttaaggcaattagcccattgccaaaaggttttactgtcttaaagctgtctttctgagatctaattccaaggacttctccacagctaagtgagatgcctcacaccattaggtgatgctttggacagaacagagtattttcatcttgtgtttaaagcaattccttggcttcggctcctcaccactttctatgccagtctcccatttatgtccctagtaatgcctatgcaaaaaaaaaaaaagaaaaaaaagaaaaactgatggtgaaacctacaggtttaagggcttaaatctcaaactttgttaggagtaacaggagcgtgctgagcgggcaagcaataaaacaaatcataccaaaaagccacattgctctctcctaagccccaaccccactccactcctgtggccaggggtccaaacagaaaataaccggagaagacaaggaggtcaaaggatcagggaactaagcattatgtgaattcaccagcaagatgtacagaacgcctgtgtttaca

SEQ ID NO: 101511 - DNA, 1860 bp, Homo sapiens
gcagcatgtgtctacatctccaccccagtgctgttacagtgggacagtttctagtgtattgtcattgcgaccaggcttttaagattcttagcatatctgtaatatccacatgcagatgtagaatccaaatcgtatttacagagaactttgcatggcagcttttatatggtagtgatacattcagtttcttacattctagattattcagggaggttctggagttggacagatttggggttaagcctgatggctagctgtgtgaccttacacacctcgcttcatctgtttcctatgggaatttataatagtagctacttcctagggcacaggatctggcccaggggaagacctcagtgttagtggactctttaatgattgttagcagctgttgtgatcataaaacgagaagcacatcaacctgagcctccctccgttttcaggaggaccactctctgtggcaccctggactacctgccccctgaaatgattgaaggtcggatgcatgatgagaaggtggatctctggagccttggagttctttgctatgaatttttagttgggaagcctccttttgaggcaaacacataccaagagacctacaaaagaatatcacgggtaagacgcaactgaaaaggacccagcacatctgctggaattctttccttatcagcctgaactgcaggccaagatccgaacatctatactatttgatctctctaacctgtgttttgtgatattttatcatttgttgtactccaggttgaattcacattccctgactttgtaacagagggagccagggacctcatttcaagactgttgaagcataatcccagccagaggccaatgctcagagaagtacttgaacacccctggatcacagcaaattcatcaaaaccatcaaattgccaaaacaaagaatcagctagcaaacagtcttaggaatcgtgcagggggagaaatccttgagccagggctgccatataacctgacaggaacatgctactgaagtttattttaccattgactgctgccctcaatctagaacgctacacaagaaatatttgttttactcagcaggtgtgccttaacctccctattcagaaagctccacatcaataaacatgacactctgaagtgaaagtagccacgagaattgtgctacttatactggttcataatctggaggcaaggttcgactgcagccgccccgtcagcctgtgctaggcatggtgtcttcacaggaggcaaatccagagcctggctgtggggaaagtgaccactctgccctgaccccgatcagttaaggagctgtgcaataaccttcctagtacctgagtgagtgtgtaacttattgggttggcgaagcctggtaaagctgttggaatgagtatgtgattctttttaagtatgaaaataaagatatatgtacagacttgtattttttctctggtggcattcctttaggaatgctgtgtgtctgtccggcaccccggtaggcctgattgggtttctagtcctccttaaccacttatctcccatatgagagtgtgaaaaataggaacacgtgctctacctccatttagggatttgcttgggatacagaagaggccatgtgtctcagagctgttaagggcttatttttttaaaacattggagtcatagcatgtgtgtaaactttaaatatgcaaataaataagtatctatgtctgtgtggagtgctgtgtaattctttccaccatctgttcattgttggcctggaaatgagcaggggctgagaggagcaggtctcgccctcatctagtcctgcctcttctggtctctcctgttgggtgtactcctaatacttcattatatata

SEQ ID NO: 101512 - DNA, 1031 bp, Homo sapiens
agttgatgtgtgtgtgtgtgtgtgtgtgtgtgtgtgtgtgtagactcctatataatttctacaatccttgctttaaaacctgcaaaatgtattttttgttttgtcttttcctttttgagacagggtctccttctgtcacccaggctgaagtgtgatcatggctcactgcagctttgacctcctggtctcaagcaatcctcctgcctcagcctcccaagtagctgggactacaggcatgcaccatcacgctcagctaatttttaaatttttgtagagatggagtcttgctatgtttcccaggctggtcttgaacccctgggctcaagtgatcctcccacctcagtcccccaaagtgttgggattataggtgtgagccactgtgcctggccaaaacctgcaaaccatgttaaatctatgttgtgttcctttcggaagagatgtctaatattaacttgtgttatataaaatctaaaacataggctttcaatattgttttaacagtatataacagaattggcaaatgccctgtcttactgtcattcgaagagagttattcatagagacattaagccagagaacttacttcttggatcagctggagagcttaaaattgcagattttgggtggtcagtacatgctccatcttccaggtatgtaactttagaggtggaagttgtttggtttaccaaagccctgggagctaaccgtgagctaaatgtaaaatatttcagtgtagattttgtgctgtaagaggggtaggtggctaacccagaagtactttggagtaatttaggcttaataataaactagggtttgcaagaaagtgttattctgtggagatttggggctattagcagtgttctaggcctagggttgaagatgcttaatgtccttagaggctaatgaagggatgaatgagtcaacagataggacacgtatatgacagaggtgaagtgcccacatgttgagtgggaggaactcttcacctctgctgcttcctggatgaggagatggggagatggttcagagga

SEQ ID NO: 101513 - DNA, 1021 bp, Homo sapiens
gaaacatgcccccagatggtctggaagcattcctccctctctggtcacttatcctttttgtggtcttcagcgttgtcatggccctgttcctctgagcatagtacgggcttgggacatttcccatagagtgcttcaggtctaaaacccgagactgctccttgtcactgactctcacacctgacggcagctagggacgtcagggtttcatgtcgtggcagctctttgatagtggttattgccttggttcttgctgaggatgcatattgagtgaagttggaatacgaaattatttgtagaatgtgtctgctactcattgaaaatttgttagaaaagctttgttttcttcacattctaaagtgttcaaattcctcctaggaggcagtgggctttggaagactttgaaattggtcgccctctgggtaaaggaaagtttggtaatgtttatttggcaagagaaaagcaaagcaagtttattctggctcttaaagtgttatttaaagctcagctggagaaagccggagtggagcatcagctcagaagagaagtagaaatacagtcccaccttcggtgagttttcaggttcatgttcaaaagaatgttcaccaatgctgcacccctccccctcctgtaatgtcagcctcccactgcccaggtcccttcactccctcttacgaggcactgccttcaaatgcatggccccgttcctcacctccccctcccctatgaaaaagattagataagcttctgtactgcactgggttataagcattctcctgtgattctcccatgctctgcatgttaaaataaaattgtattcctttttttttttttaagtataaatttattttttagagggcctgcttttcatagtaccacaaaaaatgattaaatttgtcatctttcaaagagcacttaagtgctctgatcctggaaaaatcacttgaggatttaatgttttgttaatagaatagtttatatgggcaagtctttctggtggacagtgaaggggaatggcacccct

SEQ ID NO: 101514 - DNA, 1013 bp, Homo sapiens
ttgaagtcagatgattaaagcctacatggcatcctgagctactgaaaggaatgaatagagaattgggggcggggggcgggaagcagctctaacacaagttatgggacggtgaacggaggaaatgtatggtgaatcaagtttgttatgcagacagaataggtgatcttctgggtggtgtcagcctctaatctctcatgtgatccgagttaatcttccctggtttataaggattcgtgacaattgaggtatttttggagggtcagactttaggcaggtaaggaaagcacagggaaagcctcttcccgcctgctgttctccaggtgccctcagttcaaggtaatcagcccgccaaagcatcttgttttgggctggcatttcctgaactccttcagtggttaagctcagggatctggagttggcaattctggtgtgctttaaccttggacaagtaactcagccactttttacgttgagtaggtgtcctgacctccttgaacccatttcatcatctttatttgtgtcccaggattttctactcaagcatagacctactatgttcatgtactacttcatatacttgaatacattgaatgattttattcagtgaactgatgcttacaaagtacttagcatgacggtatctggcatgcaggaagtgcttaatgttattggttattattaacaccatcagtgtcatacagtgtgtaagaaatcaggctctgggccaggcgcagtggctcgcgcccgtaatcccagcactttgggaggcggaggcaggcagatcacctgaggtcaggagtttcgagaccagcctggccaatatggtgaaaccccgtctctactaaaaatacaaaaattagcctggtgtggtggcgggcgcctgtagtcttagctactcgggaggctgagacaggagaatagcttgaacccaggaggcggaggttgcagtgagccgagatcgcgccactgccctcaagcctgggcgacagagcgagactccgtctcaaaaagaa

SEQ ID NO: 101515 - DNA, 1105 bp, Homo sapiens
tttggatctagaattttatcttggcctttttaagaaaaaacacttgttttgttacgcccttaattttgatttctttcaggaatggaaaacgatgacaccgcagttcagtatgcaattggtcgttcagatactgttgcccctggcacagggattgacctggaatttgatgcagatgttcagactatgtccccagaggcttctgagtacgaaacatgctatgtcacatcacataaaggaccatgccgtgtagctacctatagtagagatggacagttaatagctactgggtctgctgatgcttcgataaagatacttgacacagagaggatgttggccaaaagtgccatgccaatagaggtaaaaattccagtcacatacttattgattgccttctgtttttcatttttggaaaaatgagagtatggttgaaaccagctttagtttgctacagttgtggattgtgcacttggattcagacacattctgtgccttgagcatctcttcttgttggtctaggtcatgatgaatgagaccgcacaacaaaatatggaaaaccacccagtgattcgaactctttatgaccatgtggatgaagtcacgtgccttgctttccacccaacagaacagatcctggcttctggttcaagggattatactcttaaattatttgattattccaaaccatcagcaaaaagagccttcaaatacattcaggtaggaatctttagaaaggagctttacattttttcttaaatacaatgagctattgtacaactattctctttttaaaagtagtctcagtgatcatcctgtaagatgcgtacagaccaggatgcatgcccgatggcacatggatcagattttgttggcacatagatcacatgctatcatgtacctgctccctctggctggtcagagtttataatctgaccctttggagggtttggaatccatatcactctctaaaggttgtagatccctgttataaacaaaacacgaccagcttcactaatatataacttagaggaataaaaaaaaagttcatttgaaagtattaagtatttcctggcaaggtgacattcggtaccctattttgaatatgcat

SEQ ID NO: 101516 - DNA, 1736 bp, Homo sapiens
tgtagctaaactttgggaaatatcaacgggacgaacactggtcagatacacgggtatgtgagacgttgatgttacttaacatttctgtagtgtttacactttccagaactctcttttaagacctcacaatagagcaacacaatatctatgcattgagcaaggcagatgttaccctttcttagataagaggaaaccaagacttacaggttaagtcatttagccaaggctacacgacttggaaatagaacggtgctttctttgctcttctgagcacctcacaccgtggactagggctggattccatgcaagtaacatttgagaacctggtgatccatttgtagactggcatgccctcttcccacagaaatgtgaaagcaatccagagaaaagtttccaatagtagatctcagtattattaatatatgtattcatgaaagaatggctgagagggaagatcttatcccattcctaagagagcagacctagcccgcaaaggaaaccacgttaattctgaatgcagatataaagtaggctcagcagacagaaaaaaattgcatccactgaattctcatttatgtatgttggtctcattggtaacagtagtgcctgtggagtctttttataatgaaatccatttaaatttatcctatcactagtagggcccaagtctggttatttgataatgaatgttaaaacactgtcttctgttccttgtagcagcaaagactgttgtttggtagaaaacctccagaaaatttctgattgtttcttccattgtgagatatgtttgtatcatacactaaaattggcatgagcataactcaaaaaaaatcacaagaaaacagtattggaagggactggattgtgtttaagtttgcattgaagagtcagtgacatctgacccactagggggcagcataacttgccttagatttgtctcattgtaaccaaagttcccttccccagccatctttctggcttctggtaccactagcaaatcttaggaagagccatttttatcataattcttggtgacttcattgaaacacttgtataaagttgttctgaaaagtatttattataaagaactactttataatagttgtgtttgttgcaaaaagaagataaaaaagtgatcagggtaaatgtgaaagtactccccctatagaagttataactgttttaaggagtgtgctgtatctggacagatacacaccagcctactgacaatagcttatatatttgctctaggaatgttttgggtgttttataatagtatgaggttgattggcttgttttagtggggaatagcagtgtggtttttcaaaaatgtgattatgctgaatttatgcacagattccccttttccttttttctcatttcacaggtcaagcgcctgtcatgtcagcatgttaagatttctgttcccagttttaataattagttagaatttgggccaggcgcggtggctcacacctgtaatcccagcactttgggaggccgaggtgggcagatcacaaggtcaggagtttgagaccagcctggccaatatggtgaaaccccgtctctatgaaaaatacaaaaattagctgggcttggtggcgggcgcctgtagtcccagctacttgggaggctgaggcaggagaatagcttgaacctgggaggtggaggttgcagtgagccgagattgcgctgctgtactccagcctgggcgacagagtaagactccgtctcaa

SEQ ID NO: 101517 - DNA, 1275 bp, Homo sapiens
tgtggcaggcgcgggtttaagtggacgccaggtgcaccggacacaggctgtgtttaaccacaccgaggactatgtgttgctgcccgacgagaggacgatcagtctttgctgctgggactcgaggacagccgagcggagaaacctgctgtcgttggggcacaacaatattgtacgctgcatagtgcactcccccaccaaccccgggttcatgacgtgcagcgatgacttcagagcgcggttttggtaccggagatcgaccactgactgagccaccctctccgtagggttctttctcgaggactctaccctcctcccccacgtcctgtctcagctgcagtcgtaagtccgtgcaccatccttgacgttttgctgccacctctgtccacattcttcttggatttgtataaaagaatctttttttaccttgatgtagaatcatggtggaaaaagttggaaacacagatctgtgcagttctacattcactgattattacagtgtgattttcatcggttttgtaagtacaggacttgccgtttcttttgatctcttgattgaaggaggatagggcattaaagtgcttttgacatgaggaattttcatttggttcttctgtcaactttcttgcttattctgctgaaccctctgtgtatttcccttccaggtatatttgaacagataagcaggcatgcagctctgagactcctgagttttatgccattatcaaaagcattttcaagaatccctcaattctatcctgaaatgatgttattctgataataaagctcagatctgcaactttattgttatatatttttcacttctgtaaaattaatggccagtttttcctgacaatttataggaacagtatctttcaacatactccctacattatccttcaatatctgcaatacttgtctttagtaactgtatttctggtaagattatgatttcatgagaaacaattgaaaatatatccgatctaattaaattaggtcagcctgctattgctctcaggtgttgcctgtcttcacgaatgattagtatcgattgacctctttcttaggtggttttaagtcttcagttctcgtcagcatgaactaacttctcatcatggaggcacatagtaactgcattctcagaagatttatgcagttaaccaattgatacaagttttctttttcttgaatttttttttttttaattgaggcacagtcttgctctgtcacccaggttggagtgcagtggcgtgatctcagctcactgcaagctccgcc

SEQ ID NO: 101518 - DNA, 1144 bp, Homo sapiens
aaacataaactttgctttatatttatcccaaaaaacaaataccttatgatctgcataggagtacctagaaatataatctgggatcatttgataaaaatagtaaatagattgaagtaaaagtcattgctttatattataggaagttttgttttgttttgttttgtttgttttgtttttgagacggagtttcgctcttgtcccccaggctttagtgcaatggcgcgatctcggctcaccgcagcctccgccacctgggttcaaacgattctcctgcctcaggctcccgagtaactaggattacaggcgtgcgccaccatgcccggctaattttgtattttttttagtagagacggggtttctccatgttggtcaggctggtctcgaactcccaacctcaggtaatccgcccgcctcagcctcccaaagtgctaggattacaggcgtgagccaccacgcgcggccccatcatacgaagttactgaagttattgcgtaaacattctgttttagtcatccttgaggatcgttttaactccttgatctgtaaaactgtcttaagcatcttaacatgttacatcacagggttttagctcagatttccaaagagccatattttttgatgcatatttccagttgaattccagtgtgaatttccagttgtactttgcattctgattctttgatatttgaacttggccatctgtgggtgctactctcgtaagactaaaaggcacctactaaatacgaacaaggataaccagttctaccaaaaacattaccaaccaaacctcccctgttcttttttcagactttccttttgctttcaacctcttaaactgtaaaggagagatttaatgtttccctattattctgctttgactcacatactaaaatgaccacatggcactccattgaatcttttcagttgttcacgaattaaaataatgcccatgttttacagtttttcgagtagtctcagcaatggatctgtagtttcaggacctgtttttaaaagatcaagatacttttatgtgtttcagaagtagctgttttttcattttttgtgggtttgttttttttgtgtttgtttggttggttggtttttggtttttttgctttttaaaggtcacagtgttgtgagcctg

SEQ ID NO: 101519 - DNA, 1061 bp, Homo sapiens
cgtgagctgaggactcagctacaaggagaggaagaggaggtggtttgagttgaggggagctctgtgccactttcatatctgtgcccaatgatgggcatcctgtccacaccacgccttcctgtctgcaccaccacaggtgatggctttgttttccagcaccaatccggtgcctaagagcagggcctctactccatctctctgcagacttcagggagaagcactggagtgacaaaagtaaacatcggaggcttcacttgggtgacacagatcaaagacttttccaaaaaaagaatgctgcaaatgatgtttaaagtcatgattatatttaatattattagggtggtgcaaaagcaattgtggtttttgccattactgtctacggcaaaaaccgcaattacttttgcaccaaccaatataaattgtaacagatttgagacaaaatataaaatttttcaaattgagcagaatttatcaacccagaatctataatgtatgaaataaattaatagagaacccaacagatcatgttatgttgtaaatataacatctatctttaggttaaagtaacatagcaaaaatatatatttatgggtgcaagacacatacataatttgtaccaatctcacagaactaattcaattcaaaacaacaaaaaacttactctattatctaatggatgcaataaaaattaaccatttgaagataagttctcttgcacttcccctacttacgtttttcctggcacctgctatactgtgtatgtatttcttcaccgctttactgcctgactcccctactagatcataagttccaagagggcaagccctctgaaacactgctatgtctccagcacctagaacttggcatgtagtaggcatccaatacataagtgttaaatgagtgaatttaaaacacgtacatgccaggaatggtggctcaggcctgtaatcccagcactttgggaggccgaggcgggggatggcctgaggtcaggagttccagaccagcctggctaatatggtgaaaccccgactctactaaaaatacaaaaattagctctt

SEQ ID NO: 101520 - DNA, 1039 bp, Homo sapiens
ttaccacatccttttataaactgtcttagcctgcacacggctgtacgtggttgatttgtatcaagtcttccccgctagacggtaagttcctgatagcagaggctgtaccctttttttctctgcaactagcatggttcctggcacactaaatatttcgaataaacaaatgagtgaataatccctgatctcacaagtaatcgaggaaattataataatttctttgctactgacggggacattgagtccagggatattaaggtgactaagatcacacagctggtaggtagtgaagccaggattcccatccacttatttgggatttcaaagttagcacaagtaattactttttaatgataaaatatttgtaaagcacctagtagagacttctttacaaaaatatttgtaaagcacacgtggagacttcatgtattctgattcaggagctggagagcttgtttaaaaggtaaaccccttaagtcactattgtatttgaagcattccagtggcttcccatcacattaagaataaaatctcgtcagacccttgagcagaccttgcctatgtttctgacctcatcttctgcccctctccacctctttcatactgttctagctaaacaggcctcttgttcttcaacctggagtgtgagttcatcaatctgaaatactcttcactgagattgtcacatgatgagtttctttacttcattcagttttttactcaaatgtcatctgtccactgtaactgaaatgtgcctcacttccaatattctctcttctcttcttaacagtgcctaccactgtgttgtttattgtctctttcccacgtagacaggaaccttgtgtgtcttacctctgtaacccctaccatgtgtcagccacataatagacacctaataagtatgtgtgaatatgggaatgaatgaatacccaagaggatgaagtgtaccctctgatcatacgtacatgtaaacaggcgaatgctggataattagcattcatgagtggttttttggctttcaccaaaaaagtgtttagct

SEQ ID NO: 101521 - DNA, 1096 bp, Homo sapiens
atgggcgtttatttgatgtagtattaattacttgtgacttttaaaatcctgacttcagccaggcacagttgctcatgctttcaataccagcagtttgggtggctgagatgggcggatcatttgagtccaggagtttgggggcagcatggcaaaaccacgtctctacaaaaaatacaaaaattagccagccctggtggtgtgcacccatagtcccagctactccagaggctgaggtggaaggtttgcttcagtccaggaggtggaggttgcagtgagtgaagattgcgccactacactccagcctgggcaacagagtgagaccccgtctcaaaaacaaacaaacaacaaaccaaaaacccaacttcctatgtcattatctttgatttaaaaaacaaaaatcattacagtgcggtattactgaatatacttttatatgtagaattgtgaaccatgtgtctttcagagttgaaaattaattgaattttttgttttttattaggtcgacaaagatgctgaattagtggcccaatggaactattgtactctaagtcaggaaatattaagacgaccaatagttgcctgtgaacttggcaggtatggtttttacacttaatcaagatgagtttgttaagtgattttgagaattttgatgtgtaaatgcagttttccattcatcaagcgtggattatcccaagcaaatttgtgaggcataggctgtcgttccctgtctctgaacatagttctgtactcttctagtcagtttggtttatttaatccatggtttgaaaactgaggggctgggctgagcgcagtggctcacacctgtaatcccaccactttgggaggctgaggaggaagggtcacttaagtctaggagttcaagaccagtctgggcaatgtggtgaaaccccacctctacaaaaaaattaaattagccaggcacctggtggctggcatgatcctgtagtcccagctgttcaggaggctgaggcaggaggatcctgtgagtctgggaggttgaagctgtagtaagctataattccaccactgcaccccagcctgtgcaaaaaaaatagcaaactcaggggccaataga

SEQ ID NO: 101522 - DNA, 1045 bp, Homo sapiens
cttcacggtatgtgactgggtgtaccacgggttgacattggaatgaagtgaaggcaggcttatgttttaagtaacttgaaagatgtaatcttttttattgttcctttaatggggtttacattcagttgctattgagttataaaataccggggacataatcgtggctaatctgagctttctgaatgaacagcctgtcagcatgtagccagctatcgcctttgggggcgccgtgtttgcctgtagaaatgtgtgggaaggtggtggtgggctgtcatggggctcttgtgttctttttgaaagtcttaatattttccatatgtgctttccttggattagatatccaaggggaagaaagatttgtttaaacaaaggtgttacttttctgtggttccttgatgtttgatttgtgggatctgtcttccaaatcccttttccttctgtctagcaatgatgttttcccagggctatttcacacagtgacttgacttcatttctatgcgtgggaagcttccatttactgaggtgcttacactttgcgttggaattatgtttctttaatttcctctcctctggttcctgtgttcccatctttaaatctcttgtatgttgtgctgtttaattgtcacgcacttcagtttcatatgatgctgtatgaactcttttagagaaggaggatatatataaagttctccacaacagcagcggcagcagcaaagtcgtggactttctaagggaggagacccagatctgtgaatagagataatcatggccattcatgtctcagatctgtgctgttcagcatggtacaattagccacatgtgcctatttaaaggtaacttaaggccgggtgcggtggctcacgcctgtgatcccagcactttgggaggccaaggcaggcggatcacctgaggtcgggagttcgagatcagcctgaccaacatggagacaccgcgtctctagtaaaaatacaaaaaaattagccaggcgtggtggtgcatgcctgtaattccagctagtcggcaggctaaggcaggagaatggctt

SEQ ID NO: 101523 - DNA, 1050 bp, Homo sapiens
catactgaagctagtgatgttaagaactttctgaagtatttacttttagggaatgaggactttgttaggatttatactaactagggtttttttcaaacattgttgaaacattctgatttcattgagaattctgaatcattactttattattgatagtatcaaccctttatgacttcttataccatgtgcacacctgaggggctcctgttttcaggaagaatctgagccccctgctttttctgagcatttactgactagtcctgacaaacccaagtgtgtaatgacagggagcccctgctttctaaagaaagggcagagctcttgttaacctgttgtttacctgtcacctttctaccatgtgaatggatccctaattgaatcatatctgcttttgaaaaaaccccttcactagaaaattgttccagctctctaacctggtccctctgcttcaggagggtggctgtgcacattggcagcaggatttacttgtctttgaactagtctggtatttgatttacattttttgtttgtctccaatctgtttattttaggccagtcttttaaacagctgaaaaactgggtaaacctagtttatttttaatatctagtctactgtattcaaacccaaggtctctacccaaaatcactgttaaaatcagttattgtatctctgtgcagtagttcctgccactgggtaggaagctgtgtggagacatatggcagggcctagctgttggtgcagagggtatatttactttgggaaattttatcaacctgtattttttgtgatttgtgtacttttctgtatgaatcttatataaaaagtttttttaaaaaattgactcaacctatactaattggatcatcactaattccagattactttaaacatgatcctccgtcttgcccactaggattgaggcagcagttttatagttgttgtaaaatttgaagccttttttgttttgttttgtttttctttttacctttacatccatcatgaacatttccttcctcacttttccgcttaatggctcgaacatttccttc

SEQ ID NO: 101524 - DNA, 1023 bp, Homo sapiens
cccgcaacgaaactgcaacacgtgtgatgtttttgcccagggaagcaaatgagagactcagtacccagagttttggctgagggctggctttataccctcggcccagcatgttccagaattccacactcccataagcaggtaggtgtcagcatagaccacgttgttcatacaaaagggtctaggcacggtgagccaagctactcttgtcagttaaaaaatggcgggaaccctcccaaaatccaagttcccagacaccatccaggcaccagccttgcaagtgatagcactcttaacctgctacgctgacactttgctgtgtgcgggaactttccaaaccaaggctttgaccagaaagccggtaataggaatttactcggagcctgggggccactgcttggggctgagagtgggggactgaagcgtggcctccccattgactggtgatggaatctgccctctcttgtttgccctctccagtgtggggctgccttccaggaggatgatgtcatcatgctcaatggcaccaaggaggatgtggacgtgctgaagacaaggatggaggagagaaggctgagagcgaagctggaaaaggtaatgggagtcttcaggttccgcccagcccccatctctgctccagagccgactgcaaatcactgaactgagctggcagctgcttaggggtttgcatgatcaaggcgatttttataacctagaagggcctggactgtagaagcagattccagctgaggcccaggcactgccttgctgtggtgagcacggcggctctgctcttccccgccgagctttctcatcagtgaagtggggtagtgacagcatgcgagggcacggagctgtcagcaggctccagagaccatggccataaagcactgacactgacacggcctcagcaagcccttggggaagggcagccaccaccgttgctgctgctgtcacttactgttgctgttgatttaaggcagtacatactcaggtctcatagcttgtaaaacaaaggaaaaatga

SEQ ID NO: 101525 - DNA, 1157 bp, Homo sapiens
atcttcactaattaacttcccaaggtgttaacttgtgaatttcagattagatttgtctctgaagtagggggcttttttaaaaagtcagccatggccaggtgcagtggctgacacctctaatcccagcactttgggaggccaaggtgggcagatcacttgaggtcaggagtttgagaccagcctggctaacatggtgaaactccatctctactaaaaatacaaaaaattagctggatgtagtggtgggcacctgctggagaattacttgagcccgcaagctgaggctgcagtgagcagagatcacaccactgcactccagcctgggccacagagtgagactcttattattttttttttttaaataaagtcagcctgcagttgatcgtggggtgtgcaatgatgcttgtctaaagatcactttcagctttggttattggttttgaaaaggtctcttttgctcagagagagctcttgtgactgccagctctgaccttcattcacaggtcccatttccatgaccaagaaccctctgaacctcccctgtcagaaggagctggtgggggccgtaatgaaccccactgaggtcttctgctcagtccctggaagattgtcgctcctcagctctacgtctaaatacaaagtgacagtggctgaagtacagaggcgactgtccccacctgaatgcttaaatgcctcgttactgggaggtgttctcagaaggtacttggggcacaattctaggcatagtggttgggtagttgaaggtgagtgtatcagaggcccaggaggtatttttaacatttatgtgactttatgcctaacactgaattctaatcgggttagagttttagtacatttcttctcctttagaaagtgccaaatgtgggaggaagtgctaaaacgacgctcacaaattctcacttggttagaatttgatcccatgtatgaagtgatagcatctgtattgaggggaggtggggggagcaccctgggtttgttccccagggagtttttgtggggccgttgtagtttcacaagtgaaaatttgtctgctcccatacaatttgaaatattcggtgatgcagagttggatgctaggaaagattgattttgtatcttacggggactaattgaaagaggaccctgctatcactttt

SEQ ID NO: 101526 - DNA, 1917 bp, Homo sapiens
gcctgattacccacgggtttggcagccaggccatctgtgccgcggtgtctgccctgcagaactacatcaaagaagccctgattgtcatagacaaatcctacatgaaccctggagaccagagtccagctgattctaacaaaaccctggagaaaatggagaaacacaggaaataaaattggaacgaagaaaggttaggagagtagggaaggaacaggactgcaaaaatccttctccaccgcacagactgggaacccctcctggcctgggggaagagtttgttacctaccttactatttaaagagccttcactggttctgcatcacccgcccctggacttcttagttgtttctctagcgctgagctatctcctaactttggacctattatcagaaggtgacaagtactggctctttattcattaagctttttttttttgaaccccattctttccttctctgaaagtggtgctataagttttagaatcttttaaatacattccctgggccaacagacccacacacttagccattgaaatgtcaaattgatgtgccctagatcaacagatcaacaataccttttttttcagtgttaaggtaatggttggtttttgtgtccgctaaatatttaccttgaaaaaaagaaaagtgtgtatctagcttcttcagagatcaagtcctctggtaggaggcaaaggttctatctgcttagcaactagttaataagtggtatctgacacactctaaaccccgtgttcaaacgggggccttctggttttaggaaacttgtagaaacgaagcctgctgattgatttttttctcctttttttttttttttttttttaactttgaaagttaactcttcaaatgggagactctttgaaatgacatgttcctttaaggtactgaagctttatttgcatatttatttcagatgtttcgagtaaacttgaaaagggtaggcacgaagcaatttgttgctgcttgtcacccccaagtccccgtggaggttctgtattttaagaaacagtgcgttgagtgtacagattttatttatgcgtaatttaatggggtctgtaaatactggtgcacttcttacgacttttttgagacatgggatccaattttaatattaacttttaatggtgatggggtaatctataacacatcataaggttttattcatatatatacagggtattaagaattaagaggatgctgggctctgttcttggcttggaagattctatttaattgaaactctctgttcagaaagcaataactttgtctcgttcctgttgggctgaaccctaaggtgagtgtgcagtacagtgtgtgtgggtgaaatggagatttggaattgaactctctgcctgtaaatgttccccaaataattgttgtgtgtatgatacgtgtataataaaagtattcttgttagaatctgaaagtctggctataggtttttgtttttgcttttgttttaaagtcttttgggtgaatggaattagggcagagctgatttatggcttgactgtggcttggttaatgccctgagcaggcaagttttgtgtgctgttggggaggaacctgaagtttcaccttttctccctagcgacactgttcagctaccccaggccttatgctgtcatcagtgtctctcaactgcagagggatagaatcatcctccccaccctggaggtgttgggaaatgtctgagggacagtttattgacattaagaggggccaatgttttgggaacaatgtctcatggaaggttactgtattgaggacaggtacactggcatactgtactcagcatactgtatagtggtcaagaatggaagtgaaatgattatgggtgttctttgggcagatgtttctctcttttttttttttttctttttttaagatgaagtctcgc

SEQ ID NO: 101527 - DNA, 1529 bp, Homo sapiens
tgggcgttaaattctttatcttgtaaacagggataatgacacctgtgccaccttctcctaggctatctcctcctcggtgttgggaaactgaatggagatcgtgcgatgggaggtgaaagctttgaaagggaaaagatatcatcagtttctacaggtggggtgggcgtggcagcaggtggcagagcaggaagtggcctaggtgagccagaaccctggtcaggcgtgagtgcagccctgcacccacataagctcacacgtttgcacaggctccctggcacatgcatgcccctgcatgcatgtacacacaatcatgtgtaccccagtaatgcacccactcacaaccaccagagcaaaacaaagacaaggagtggagctgtctgtggtgcacctggggccccagctcccctcccagcccatgactacactgtggagggctgaggaatggggttgctgagaaggagcccaggctgggggccatgtgcatgcgggtcaggctggcaaagccgtctgcctgcctcttgttttaggctgccaggctgggcaaaggccacgtgctcggtggaagagcccaagccaatgtaaatgggcccctttggaagtagggctcatctggagagcaagcaagcaaaacaagcttagcttttcatttagggaccgtcacagaaaactcggaaatgcaccaaagagttaatggtatttggcgctgatcagtggcattgagggtgctttctatttccgtccctttgattccactcatttttctatgtcaacatgcattagcattgaatgattatcaggatcgtcagtgtgggttggctgaagatatttgttgatggtgtttgtccagctcctttccctgcccccagcgcctcagtggccctcctgtgctctgagcggttctgctaggactgtgaattgtgaaagcttggacccggtgctgtgaggtgggagtgtgggctgggcctggtaatctgcagccctcgtccccaagtccatgggaattgtcacatggcctgtgctgggctaatcagaatcctgccttgtcatgttataggctgaccctggggagataagctctccctgaaatattaacattgtttctggccatgttccctttcccttcaccaccgagagaagcaggagggagggagggagagagagagagagagagaaagaatgattgtaagatatgattcattattttatgtacaactgtgatggttaatttcatgtgttgactgggctacgggatgcccagatagcctgtagaacattagttctgggagtgtctgtgagggtgtttccagaataatttagcatttgagtcagcagacggagtgaagaagctctgccctcaccaacgtggccaggcatcttcccatcagttgcgggcccaaatagaacagaatggtggagggagaactagttccgtcttctgcagctgggatgctcatcttctcctgcccttggacatcggaactcctggttgtcagggttttggacttggactgaatgacaccaccggcttt

SEQ ID NO: 101528 - DNA, 1024 bp, Homo sapiens
tcccgggttcacgccgttctgctgcctcagccttccaagttgctgggactacaggcgcccgccaccgtgcctggctaatttttttgtattttgatagagatggggtttcaccgtgttagccaggatggtcttgatttcctgacctcgtgatccacccgcctcggattcccaaagtgctgggattacaggtgtgaaccactgtatctggtcctttaaagaaaaactttatcttcccatgatctaggtccaagaagaactacagagaatttaacttttggcatttccattttttggctcaattgactgattcattcattagacaaatatttcttgagaatctaatatgcattaagctctgagctaggtgctcaggatacagagatggacaaggcagacatgtatgtgcctgtccccaaggaaagcagaggagatggccactgtgcaagcagctcacacattgttagttacaattgtgctgagtgttacaaaagagagggtggtgtgctctgtggacccagccaaggggacagagacagcttcctggtgagagtaatttgtcagctgagaccttgaggatgagtaggagttagccaggtcaatgggctggggagagaggatggagactcctctagacagagagcccagcctgggccaggcaggacagagcatggctccctccaggagtagagtgaggtcctgggaggaaacatggaggttgagcttccagagatgagccgtcactctaccacgactggatctgatgagggactgggattgaccccttcttcctcaagacactgaggtttctattttccctatgcaaatctcagtcttcttcttcttttttttttttttgagatggagtttcgctcttgttgcctaggctggagtgcagtggtgcgatctcggctcactgcagtttccaccttcggtttcaaggattctcctgcctcagcctcctgagtagctggaattacaggcacctgctaccacgcccagctaatttttgtatttttagtagagt

SEQ ID NO: 101529 - DNA, 1134 bp, Homo sapiens
gatccaacaggcctattttggctgcatgggtccaaaaacctaattgaaggaaagaattaatgacttacgtgacagaatcataagccagaggtgaatcaaatctggctttagggaaagctggatgcagggctctagctgaacaaaaggatgaggtttctctctcctctgtattggccccacattttcccatctcacaagatggcggccaggagctccagggccacatgggcttcctgattccagaagaaggaagcagcaagaaccttccggggatcccagtgtcagtctccttgtgagtctttgggttagactgggtcacgtgcttatccccgagctcatggaacagaacgatctgcttggctccggctctcaatattccgcatgggctgggccaaagaaataaaggaacaaaataactgaagggtcaacaaattgaggaaaccaaggaacatggagaaagctgagtggacgctgggtatggaacaagagatgtccaccataacgaattcactcaaccctctagggctgggctctgggggcaacagaaaacaagctgagccctcagcctgcatggagcttacgttctattggaaggaaacagcctcatcccgacggcccttctctccctcccctggggagactggagacagagcctcctctccctcctggtctgagtccagccccaggaaaggagtgaaattaactgtccattgttttagtgacacttcctgggagcaacaaagggcctttcacagtgagaaagtgaagcaagtagatgcgggatgacctggaagtcacagaatgtggttgtcgaggtgccagatggaaaatgcccaacaggtcatgttcagaaattggagctgaaacagacacactcttgaaaaaatatccatatatggttggcatttcagatgcactttgtgaagtcaaggacactaggctgggtactcagaaacaggaagcacctagaaggtcttggaaaaatcagtgagcaatgggatccaagttctctttcaggtccgccctcactcttctgggttcatgcagctgtggaccaagggagaactgaagcacctggcatgtggcctcagtccccatccctctccctgccatgcaaacccctctcaatggaga

SEQ ID NO: 101530 - DNA, 1021 bp, Homo sapiens
tggccactcctaaacctcttggctcagcgcgtgggcaccactcagaagctgatgacagccctccatagaataaataaccctccctgtgagctcattcttcaatcaggcccctcctcgtcactcactctggcccacggaccagggggattgctggggacatagccgaatgtagcatccggtggctcgggggccaggaccgctggcgcagtgatgagcctcctcctcctcgcttgctctctggggtcacagccagacacgggggcaggggcaggtcttcagggctagggtctctgacccaaaatgctgggagggtttcctccattgcagttcccttcggagctcctggcgactcagagataaagaccacagaggctgcccttgggctgcctgggtttgcctggaatctgggtgcatttcttggggctcccaggacacactaacatgaacttggtggcttagaacaacagaaacctattgccccacagttctggaggccagaagcctgaagtcagtatcattgtgctgaaatcatggtgtgggccgggctgcgctccctccggaggccccaggggaggccccttgcctggcctagcttctgatggttcctgatgtcacttgacttgtggccactgcaatcttcaaatcccacgtctccatctctccttctgccctcctcttcttagaatgcatgtgattgcagttagggcccccttggctaatccaggatcacccccatctccagctctttaaccacacctgcaatgatcctcttttagaaggtaacatttacaggttctggggattaggacctgctacgtcctgggggggcttttattctatttcctgcaaactccttcacttacaagctgtgtgggcaagacacttatcctccccgtgcctcagtttcctcatataaaaatagctgatactctgctttttgttttttatttttttaagacagagtcttgctctgttgcccaggctggaatgcagtgatgtgtgatgaccgctcactgcagcc

SEQ ID NO: 101531 - DNA, 1032 bp, Homo sapiens
cgttctatagcgtgaggattgtattcaagtacacagcgagatcacaatgtgtttaactccctcctgctgtgtaggttattttcacttaaacattattttgaattatgctgtggcaaatatccttgaagctgagtatacacttgtataataaggatttatttcttaagacaggttccttgcactggacttgctgggtcagtggtctcgccagattttaaaggcatttcacctaattgcccactacaagcaaggttctcatttttacccctccagctggtgagggagacattttggctccctacatccttgcatcctttcttaaggagaaaactcctgtcccctgaagctcatctcaggcccaggactgctaagagtggacagaaaggggaagagagcagaggagccacttgagcatcagtgagagaggggacggggcctgctctctggccgggctctgcagcacagggtcccagtttagatggagaattatgtgacaaccctaccgataggacatggggaaggagtagacccttctctgccttctccttctcagcctcctggacctcttatttcacttaaaagacatcatcacagtgcaggggtcacaggcatagacagggggccggacagctcgcagaaatggtgatggaaggaaaacatgcccccactcctttctcccgagacactcagccctcttctccagcgctctgcctccctccccaggctttcacagaggcaagagcactgcgagaaagtctctttccccttcaccaggaccgcccagacatgctccagcttcagggcctttgtctctgccggtccctccagctggtgggctcttcccgtgctcacccctccccttctgcaggttttccccagcgccaccttcccagtgaggccttccttccttacccgcccacagcactcttaacccattttcctgctgaaattttcctgttagcgtttatcaccagccacaagctatgcattttatgtattcatatatatttgcaatctgtttttttctgtttt

SEQ ID NO: 101532 - DNA, 1055 bp, Homo sapiens
gagtctcattctgttgcccaagctggagtgcagtggtgcgatctcatgtctgagtctccccagtagctgggattacaggcgtgtgccactatgcccagctaatttttgtatttttagtagagatggggttttgccatgctggcctcaagaaatccacccgcctcagcctcccgaagtgctgggattataggcatgagccactgtgcccagacaataatataatttcttgttagaggccgtcactcctggatttgagatgagttaggtgtcaaaaccggaagtggagatttggtagagtgaagaggcatttccagcacccaaatgggccttgagaatcaagagacctcattgcaaggaaatggtcttggatgggaagtgcaggccctgccaccggtgtggctcactctccccacaacgccaaacagcagcccagtctcaacgggggaacctgggtgtgttggggtttttgtctaacatcttggaatgattcattcatcttctgctctcaatcaaatccactggccttgttgaagaccttcccatcatcacagaaccctgttttgtataaaataaattggaaccactggcattgaatggagcaaaaaatagaactctgtgagaaatacttgctgtccagtaagccgggggcggcttttctttaccaatgcctccttccctttgaaaacaggaagtcaccatggccaaaagtaaatgagtttccagccggctgggtcaaaatccagactccacctcccactcccacctgtgggctccatgtcaacctgcccaactttctctttgggtcttgacaccagcggctgactaagcccctgtcaacgcagccctcctctttgatctgaactttctggcactgtctctgttcttgttcagagggaagcttccatcttcctcctcatgtctcctcttggccccctttcctaatccttggagtgcaggcaaaactctgaatgtgttttttcctcagataaattgtaaaaaggggcaggtgccagagctgtccagccagcactcagtattcttacccaccctggctt

SEQ ID NO: 101533 - DNA, 3867 bp, Homo sapiens
ctcactgcaacctccacctccagggtttaagtgattctcctgcctcagcctcccaagtagctgagattacaggcatgcgccaccaagccaggctaaatttttgtatttttagtagagacgggggtttcactatgttggtcagactggtctcgaactcctgacctcagatgatccacccacctcggccttctaaagggctgggattacaggcatgagtcactgtgccaggcctaattgattgtatttaaaatggatatgcaagaacctatgttaacagccttgatgttgcctctgacctttaagaaaaagtttgccgacccctgtcctggatgcttaataaactcttttaaagatttgtttttcaagtatttaccagcctctccccatgtgccaagcactggagatgcagcagcaagctgccctcatgggggccctggctaggacggaacagagataagaaataactagtgaaatgtagttaactaattacagctgtgcttcctgctatgaagaagtgttaggtgttacaaatgcatatgatggggcagctaatctatttaaggcaggccaagagagggctgaagaggggctgggtagctgaaatccaaagcaggtgaagttagttagcttgattagcccttgaagtgagtgctggggaggagtggagagttccaggcacagagaagaacaaggatgaagaccagaaggtgggaaagatctgtgttgtctggaagtggcaataggccagtgtgttgttgttgttgttgttgttgttgttgtgtaagagtgaagggagaggagagaggcaacatagaaacgaaaagctttctctcctggagctgcaggaaaccattcacattgccatttgcttccgtctgtttccaggagcctttcaaatcccatgaaatagccatttctaaattgtacccactgccctcctttcttttcatcccccctgcctttccctaagtcttttagaaaaaaaaaaatgcagggattccagaaagactggtccagccgcatggaaagcggcccaggaaactgcctggtgatggttgcaaatgccgtgagaaggaaattgtcctgtaattgaaggggaaattctttactaggattgttaaagagttcttctacaagctcctttcatctgtggcttgttccatgccttaattaattttgatccgggaggtttcccgagcctctggttgcacccatgtctcttggagatcaggccttctgttgcaggtggagaaactgaggccaaagaggccctggggtgtgggggaccttgggggaacaagtcctgcatcagaaggctggtttctgaacattttgagcctcaggctttcaggaaagagcccaaagccagccatgtcaaacaagagaaagagtttctacctttaaaaaatgtgtttttgttataaaattggtgaaatcacattttataagtgattagaaaaaaccaacatataaacacaggaatattcatgacctgtttttgtattgtaactggctaaaaaaaaaaccctgatattgcccactgggttattctcctttttcttgattcttgactgaaacccaactgaaactggcttaaataaaaattgtacttcgttggctcacataataataaatcctgaggtagatccaccttcaggcatatctggttccacgggcttaagcaatgtcatcaactttctctctcagccttctttgctctgtggctctctctctctctctcacgctttttctctttcgctcttcaagttttctctctcctctctgctttccagactcatcatgaggtggtcttaacagctcatagagcttgctcagttttgcaacttcaaggggaacgtggtgtcttcttctcaagagattcaggaaaatcccaagagggaacaatattgagaggcacagagatagtaaagaggacttcaaagaattttgcttattgctctgacaatatttctcccttggggatgtttaagtgacgtttgtaaagtttccaattgctttcaactgtggtttttttttggttactgagctgtttctttgaaatcatgtagaaaaacagacacacacaaatcatcacccattattttaccatcactgttattatttgggggtgtcttgttgtctgggtcccaacgcatttctgtgctaagtgtaattggggtggtgatgggaggggtagggtagtgtatttaggctttggagccagatggacttggtctgaattctgcttcttttattcttattaagtgcatggtcttaagtaataagcacggcatggggaaaggaagaaagagaaggcgtccctcgagtcttggaaccaaagccctgagctcgatgctaattggattaaccctgaccattgcctgtggccaggagaatgccacgtgctgactggctcaggttgtagttacctgagccaatcgccgtggaaggcagggagggggggcaccctgattggcttagacaggtgaaggctgctacaatgatggactggactgcagatgtgcggaaaactaccgcagagctggtgcaggctcccgggaggcggggctgcggcacctcctgggccggtagggtccttaggcgcggaggggaggggaggggaggggagagggtcctgtctgggcttctcgccgggcatggctctggggctctgccctccacctgttccctgacctgtgtccctctgctcaccccgcccgtatcccaagccagggtcatgccacgtccccaaccctcgcctttctcctgggcgaagggagccctaaccgctgcagtttggaggccagacggttttttgtttcctccttggcaaaacatgagttctctttttctaagaaaataaagggacttaaaaaagaagaagaagaagaaaatgggaaaatcgtataaaaataaaagcccaaatcccaactccagtagcaaattatactccaaataactcttaacaaactaggcttggaaccattctataggaggcaaccagacccatcagaattaagtttttcataaaggcagagccaaaccgagaaaggttctcaaggaaaagattgctcgaggcttctgaagcagagattttaataattgttatcaatacccacgacttactgagcgcttaccctgcactgtgctaagtgtgttacctattatctataatcctcccgatgaccctgttttacagaagaggaaactgagacacagagttaagtggcttgccccagggcacaccgtttgcaagccacagggctggcacccaatcctgtctctttttccaaagctccgtaaccactgtccttccctacctccctccacatctgggatttcagaatgtttgcagagtgaggttgctggagtgagttggggcttgaggcaggtagagcctcccctcctggtccctggattctgttgggttttggcttggtccttgtaggactacttcaagctggctggagaaggggcttattctttctgatttgttaccccctagattcttccacaaagcgaattagctccagccagcctggagttgcctgtcttcttgttttttagatgagagggaagcaaagcataatgaactgttgcaataggcaagatccctggacttaagaaggaaatagtctcctctcctgctgactttgtgaggcaaagcagaccagaaagggtcaaaattctttcaccagaagtaagtgctaaaaagacaagaagagcaagctaaagtggagaggtactggaggtgctactttgggtgggtgatcacggaaggcctctctgaggaggcgacatagaagcaaggctctgaatgatggaaaagaaccagctgtgggagaacctggggagagagcattgcaa

SEQ ID NO: 101534 - DNA, 1050 bp, Homo sapiens
gggattcttggggctgccttcacccttgggtttagcgacctgcgaaggaaaacagcccagggagggagggatgtggcctgcctagctgccaggctcagagtgctggcaaggaggaggagcacgctttgttgaggaagcatgagtcgtcacttacaaaatgcttgcttgcttctttctttcttttcttctttccagttcagagcaaatggcaccgccttatcctggaggcaacatcaggttgtttttcaaaagtgaaaattgatatttgctctctgcgttgtgttgactttcattttagtagccctccaggcaagcaaataagaaaatatcagtttccaggatgggaaagcagggagatacaatacttgaggggcaacaacccaaaatttaatatggatgatttgcttaaatattcactgggtctgtttaaacattccagataaccaaaattatatcctgaggaggcagcacagcacatatttaaaccagccgagtgcatgagtcctgataacttgggtttcagtctaatttttgcttcttaccagctctgagaatttgaacaagtgccttagcctctatgagcctcagtttacctgcctaaaaaatggaaataactttctcatagtattgttgcgtctctcagtacaggcttggatatacaggaaatgcttagcatagtgtctggaacatgataacagttcacaacatttaaactagttgtctaataatgatgattagtggaattcgtatttgtagtaatagtgatgaatggtagattccagagtcagactttctgggttcagttgcctggctctgccacttaccgtctgtgtgaccttaggcaggttagttgacttcactgagcctcagttttcccatctacaaagtggtgatgagagtaaaacacagtagtatgagaactaaatgtataagaactaagaaccaatcttggtatggggtgagcattatacgagtgttattatattattaacagtcatctattattattctaaggctagaaagtattcttcctgagagcaagggcttggt

SEQ ID NO: 101535 - DNA, 1016 bp, Homo sapiens
cccaggagtctttctggtgtgtgatgatggtgatggactagagagttagtgggtgagtccagccggagctcctgggctgctggatcacaactgtggcctctggaaaatggaagcggcagcttggggccccaccattccaaatcccaggggtgtttgaggcacagagactgtggggtagagatgctgtgtccagcagcagtggactgcttttgctctttcctttcaataacaatttggaaaagaaaattggagttagccatcatcacgggcaagcagagacagatccagggagctaaaccctctgtgtcgccttcctggaagcatttagagaattcagacctacacgttgaagtgcctatagaccaggggaagcccgttccgacgtggacaaaacttcttgagtttatcctaccgcagtgacaggagggtgtttgtgcatcatgaaacaggaaggagattgtgggtaagagagaaagggccactcctactgtctggtatgagattaattccaaggtaaccactcaccctttagtaagagtgagaggaacaactctattgaaaaaggagttttccccactctctaccgtttcacccccaatgccaaccccatgagtcttccctgtctcctgaggtgagaaagagcagctgagagccgcacacactatttttagaaagaaaaccatacagagggtgctgtgttggagaaacgctttgggtgcatgaggttggggagaaggacctgagaatgtggggaaggggcggggcaggaaagtgactgaggataggacagttctatgcctctgtttgggagctgggggcctctgaggggtcccccctccatcagcatcttgaccccaggttctggagagtgccaaggctttgggcaccagatggaagttgctgatggttctgacgaaagccaatggtttctttgcaaagagaacttttcttcataaaaatagaatttgctggttttactagttagaaaagacaaacatgggtggacagaggggagg

SEQ ID NO: 101536 - DNA, 1106 bp, Homo sapiens
ttctgttgcttactgtggggttggcgctgtggaacgtcccagcctcctctgaattcatctggaaaacgggtttaaaaattcttacttccctgcctcctgcctcctccctagaacggacgtcagttgggatgaatcagagcctcggtattttggctcagccgttgttttggcaataagaatgattaaacagatagtttatttattttactctcatcttctgtacccacatctctggaagagctgtgttcataggtgtggagacaagtaaagagctttctgacgagtcagaagctggtcatgggaaggaaatgagggcatctcctaggtaaaggaatttttattttctcactggatttcttctcactttaaactggttcttttgtgttcttacttggctgggaatgtctggaagtcagcactccagctgctgaactccagaactcagaaaagatgcacataaatagactttggttgcagcatgaaatattgggttagacatcaagagggactttctagtcaatgagattgtgtaggcagaggaagaaatggaggaaaatcataaaactttctactctgtgggaaaggtagttttctgggaggcactccagcgcctttgggtgagaccttgtgccacgttcccggaggcctgggtggcagcaatgaaaggaggaagtgaatgcagccctgatggcaggctactgaggacaacgcagcactgctctcccattttacagctgcagaaaccgaggcaagatcctgcaacaaatatttacagaaggtgtctgcatgccagccttattctgagttctgaggacaccgcagtgagggaggcagagtactagcaaacaaggtcatgaatatggaatgtgatattgtgcaatgatggggctggacaaggaagtgagcggtagggagggatggaagctgctgttgaaagaatggtcagggaaggcctctttggggcagggtcatgtgagatgaaatgactcacccagggtcatttagaccccagatacaattgagtctgcttccctggctcctagtcaggggttcctccagggtgtttttgggcctaagtaacagaaaacccaactcaaaaaggctta

SEQ ID NO: 101537 - DNA, 1053 bp, Homo sapiens
aaaaaaaaaaaaaaaaaagtaagttttgggaaatgctggtctagccctcagattctggaagcagaaagacatggattcaaatctcagacccaccccacatgtacagtgaagctttgggccagctgcttcacctttctagccctcagttttctgaccagtaaaatggggctgagaatgggataggagcagtctcacgggagatgttcaggaatctctgagatgtggttatgtgaaatgcctcttctccaaggggacattcagtaagttaactctccataatctggattatttttcccaggaaagaaagaaaaaaaaaaaaggccgtccagctacatgtgcaggaagtgcaagggccagaggtgggaaggaatgtggcaggttagggagactgctgcagtggggtggggtggtccctgcaggagagagcagggatggtgttgtgtcagggaggagaggatttgcaattttacaggaaacctatggagtaaataagcctcctctgggactacatgtggtaccttggaggacgggcttacctgtttcacccaaatctctttttgctcccagcagacctctgagcgccactgtccaccgcagcctggggctgggctcatctctcccccatccagagctttctgtgcagacagattctggtgaacctgggttgggctccatagatttaatctatgttgtttatcttttaaacaccattaaccacaaattagctgattcttttgtggctataaattaatagattccattagtgaacagcaaattacaggatgattacttttcctccctgaacttggagcttttttttatagctttttgagagggtttggttctgtcctcttcctgctgccgctttcctatctaggttctttgttcattggaccaaatcttctgaatggcccgggaggctgagagtgggtgacatggactatctttgtaatgaggttataagcctgttcgctttgcagaagcaaaactgactggaggtttgttttcaagagaatttttgtttcaatcacagaccaaaccagcaaagttgcc

SEQ ID NO: 101538 - DNA, 1006 bp, Homo sapiens
ccccagggggagttgttcacacaagcgtcagtggaaacaactcctccagggtggggcagtgcagagggggccctggccagccctagtctggggcatctgatggcaggaccaaccctccctcacaggacccagcccttgtcagggcccagcccacactggggttggtgcccgtctatccctgacaaggacactcacagtgacctccttcggacatgtttttcttcttgcctgtggatcaattcctcctggctcagacccctccaggactctggcactgatctctcttggtctcggatttgaggaaataaaaatagaagaggaaaaacacagaactctccaaagctttggagtggctgcagccatctggatggaggcagcatgcgcctgggctggaagagccacggtcccttgactgagtctcggtgcttctccccgtccctctcagacacggttctcatggtggacgagatggggccggatcttaggcccgggattctgcagaatgcaaggctcagagcttgcctagctctgagtggcttggagactggtgtgaggactgagggtgtccacagatcaccaacccacaccggcagcctgagttggaagacaggtacgaactactggccggccaagagtccctcaggttctgtgcgcaggagggcctggagtttggtttcatgcttttgttcttgctgtcgtgaatttattcataccttttgaacaagggccccgcattttcattttgccctgggccgcgcagattctctagctggtcctgtgcccaaaggacagagcaaggactcagagtccaattcggcgtctgccacgttcatcattcaacaagtccgtcttgagcacctgcgagctgcaggcagtgttctgggcagagggatatgctggggtcaggagggaggggtgcccgggctctggagtcagtggggaggaagcccaggctctggggtcaggaggaaggaggctccgggctctggggtgacatgtccccctg

SEQ ID NO: 101539 - DNA, 1148 bp, Homo sapiens
ttgcaactcaaccctgttgttaagaagcaccaatgggccgggcacagtagctcccacctgtaatcccagcactttgggaggctgaggtgggcggatcatttgaggtcaggagttcgagaccagcctggccaacatggtgaaaccccatctctactaaaaatacaaaaattagccgggcatggtggcacgcacctgtaatcccagctactctggaggctgaggcaggagaattgcttgaaccccagaggtggaggttgcagtgagccaagatcgtcccactgcactccagcttgggtgacaaaacaagactccatctcaaaagaaaaaaaaaacagcaccaatgaagcctagttctccacgggagtggggtgagcaggagcactgcacatcgccccagtggaccctctggtctttgtctgcagtggcattccaaggctgggccctggcaagggcacccgtggctgtctcttcatttgcagaccctgatcagaagtctctgcaaacaaatttgctccttgaattaagggggagatggcataataggaggtctgatgggtgcaggatgtgctggacttacattgcaaatagaagccttgttgagggtgacatcctaaccaagtgtcccgatttggaggtggcatttctgacgtggctcttggtgtaagcctgccttgccttggctggtgagtcccataaatagtatgcactcagcctccggccacaaacacaaggcctaggggagggctagactgtctgcaaacgttttctgcatctgtaaagaaaacaaggtgatcgaaaactgtggccatgtggaacccggtcttgtgggggactgtttctccatcttgactcagacagttcctggaaacaccggggctctgtttttattttctttgatgtttttcttctttagtagcttgggctgcagcctccactctctagtcactggggaggagtattttttgttatgtttggtttcatttgctggcagagctggggctttttgtgtgatccctcttggtgtgagttttctgacccaaccagcctctggttagcatcatttgtacatttaaacctgtaaatagttgttacaaagcaaagagattatttatttccatccaaagctcttttgaacacccccccccctt

SEQ ID NO: 101540 - DNA, 1081 bp, Homo sapiens
tcagtggcactcacgtggcactcataggcatttgagtctatgtgtccctgtcccacatcctctgtaaggtgcagagaagtccatgagcaagatggagcacttctagtgggtccaagtcagggacactattcagcaatctacagtgcacagggcagttccccaacagagaattacctggtcctgaatgtcggatctggccccttccttccccactgtataatgtgaaaacctctatgctttggttcccttgtctgcaaaacagggataatcccagaactgagttgtccatgtaaagtgcttagaacagggagtgcttggcttggggagtgtcacctgcagtcattcattatgcccagacaggatgtttctttatagaaacgtggaggccagttagaacgactcaccgcttctcaccactgcccatgttttggtgtgtgtttcaggtccacttcatcaacccggaaacggtgcccaagccctgctgtgcgcccacgcagctcaatgccatctccgtcctctacttcgatgacagctccaacgtcatcctgaagaaatacagaaacatggtggtccgggcctgtggctgccactagctcctccgagaattcagaccctttggggccaagtttttctggatcctccattgctcgccttggccaggaaccagcagaccaactgccttttgtgagaccttcccctccctatccccaactttaaaggtgtgagagtattaggaaacatgagcagcatatggcttttgatcagtttttcagtggcagcatccaatgaacaagatcctacaagctgtgcaggcaaaacctagcaggaaaaaaaaacaacgcataaagaaaaatggccgggccaggtcattggctgggaagtctcagccatgcacggactcgtttccagaggtaattatgagcgcctaccagccaggccacccagccgtgggaggaagggggcgtggcaaggggtgggcacattggtgtctgtgcgaaaggaaaattgacccggaagttcctgtaataaatgtcacaataaaacgaatgaatgaaaatggttaggacgttacagatatatt

SEQ ID NO: 101541 - DNA, 1076 bp, Homo sapiens
tagagctgatgattgcctcacaccggaggctccttcctgtgccgcgttctgtccagaagacacagccatggatgtccattttaggatcagccaagccccgtggggctttccttcatttttattttatgtttttttagaaatggggtcttgctctgtcacccaggctggggtgcagtggtgtgatcatagctcaccgcagctttgagccgtcttcccactcagtctactaagcttggactataggccaagactatagagtggtccttctttccattcttttgggaccatgagaggccacccatgtttcctgcccctgctgggccccctgctgctcagaaggcatggtctgaggcttccaccttgggtcgtgagcctggcgtggtggtttctggccagcatgggggttgggatgctgtggctcaggccttctgcatggtttcccacactctcttctcctcctcaggactggatcatcgcgcctgaaggctacgccgcctactactgtgagggggagtgtgccttccctctgaactcctacatgaacgccaccaaccacgccatcgtgcagacgctggtgggtgtcacgccatcttggggtgtggtcacctgggccgggcaggctgcggggccaccagatcctgctgcctccaagctggggcctgagtagatgtcagcccattgccatgtcatgacttttgggggccccttgcgccgttaaaaaaaaatcaaaaattgtactttatgactggtttggtataaagaggagtataatcttcgaccctggagttcatttatttctcctaatttttaaagtaactaaaagttgtatgggctcctttgaggatgcttgtagtattgtgggtgctggttacggtgcctaagagcactgggccctgcttcattttccagtagaggaaacaggtaaacagatgagaaatttcagtgaggggcacagtgatcagaagctggccagcaggataatgggatggagagatgagtggggacccatggggccatttcaagttaaatttcagtggggtcaccaggaagattccatgtgataatgagattaacgt

SEQ ID NO: 101542 - DNA, 1015 bp, Homo sapiens
cctacaggggccttgggagcctgattcagtaggagaagttgtttcgacttggagtggtgcttcttgtctcatctgttaattgttgagaatcgctaatggttcattgacaaccttggtagcttttcaaagccaggaaagtcatccaggcaaactggagataagacagcaggaaattcttgtttataagtttaaaatctgtgtagacatccccgaagccagcctgaaactacctctaaaagagcatggggaagaagaagtaaatgagtcatgaaaaataatctcatgactttaattcagtttggatgtgaaaggtaaacttagggtcttcaaagtcctgtgtggctctaaaaagacttccttgcttctgtcatctctctgtgcttgagagaggaatgagtcctttacaatctttaaaaacaaacaaacaaacaaacaaaaaacaaatacctcattccttatagtcctggagactgggaagtccaagatctaggcgctggcagggtcagtgtctggtgaaggctgccctctgcttcaagatgacacctcgttgccgtgtcctcacatggccgaagatggaaaaacagaaagggtccagactttctccctcaaacccattcataaagacaccaatccatccccaatggcctaatcacctcctaaagggcccacctcttaataatgatgcattggggattttcaacatgagtcttgggaaggacaaaacattgaaaccacagcaataacagaattaagcattttctgaatcaggttctgggggtcattgaatattacttaaaaaggagactttgaggtggcatgggaggaggtgactcctgcgcccatctgtggtcctggtgatgcgtccattgctgtggggtgcccaccctcccatggctaggagtgggcacatagattgactgggccaactggattctgtcccccagagttttggatggagagaggcccagagggaaaagcagctccgattcgttccttctgtgcttgtgcctgagaa

SEQ ID NO: 101543 - DNA, 1184 bp, Homo sapiens
gccagccagggcagcagaatctgctccaagggagtcggccgccaccaaggtcgagatgatgttggcagctggatgaaaatgtccctgggttcatctcagtgattttggctgccaggagggtgacctcagcgtggtctcgagggccaagatttggatcagctgcagcctgagtcactctgaggaagagggagctgccccctgcctgtccccaccacacaggatggattggcagaggaggcctgggctcagtttcctgggtcccttcagcccaggcagaggctcttgccctcgactagccctgggatgggggccctgagtttctgcctttctgagaagctccctggggacgccgtgatgattttggtccataaacctgagaaggtaggtggggctggatgtggtaggaggaacgatgcagccccctcacagggcggccctcgggcagtgggccaagggctccttgcccagtcctctcctggggatgctggggtggtggcaacttatgatgtgcggattcatgacttggtagcaagactctgggcgggttttgccctgccgttagcccccatgagcgtgtttgggcagagagccatggtcacgttccagagcatgtctccaccctgtggttgaggcttcttgttgcgtggtgcttactgtttatgactgtgctggacacttcagctttgtttcatgccttggaaaggttcctatgaagatgtatcatccccattttacaggtgcggagcctggctcagaggtgggaagtaacttgcccaaaagcacacagctacaaagtggcagaggtggggctcaaacccaggctcttagatttcagcagtcaccatcttagccatggccgtgcctcagtgattcccatagtgctgattccctcacctggggctcagatgggtccattgatgagtcctgagctggttttcagccttggctgtgcaatagaatcacagaggcttttaaaactcctgatccgtaggggttgaactgtcattggtgtgctttaaaagctcccaggtgattccctgtgtgctggggtgtgaacaggtggctaagatctctctaatttctcacccatgagctgtcttacatgcccaagaggaaggaaagagattccttttttttttttttttgagatggagtctcactgtgttgcccaggctggagtgcag

SEQ ID NO: 101544 - DNA, 1027 bp, Homo sapiens
ttcttgaaaatgacccgaggaggtcaggaattattgtcccctgggaggaagcagaggctggggtggagcttggtttgagttctgcttgtgggacaggcggctcctgtttcccctgagtggaggatgaacagagcaagagactcaaagcattttaagaatctgtgtcagtgtttgttagccaagggtggagagctgcttgaaagaaacgcctgcctgccctggtggaatggtggaacctcatgcttacactgggagcctgatcaaatgttttctagtaaagggttctgggcacctatatgccttctgcttattcccgtgggagactaacgtgatagggtctgggtgcctccttaagcccgttggttggaggagatgattaggggagaagctgagaggtggttctgaaaaatattttgctttctattaaatggctgctgagcaaacggaactctctgttctcgtccccattgtcttgccttgaatgtggttttgtgaagacatgttgcttggaaccacagcagccatcttgtgactgtgggacaagaggcctaagaattaagtcaacatgcagacaatgatggagcaaagaagacagaagaaattggggttcttagtcatatgtttgaactactacattcaactacaattgttggggggaggctcttaagcagtttgaatcacatgttcactcatgaatcagttgggtctagagggtagaccaggctgcatcaacacagttgctggagtcagcctctggccctttgtgcctgggctggggtgtggaggtgtgtctactatctgattacagctatgttagccattgtaataatcatcccagtagtgaacatttgtcaaaggcttactatgtgccaagcaccctttgtcctcttttggtttttttttgagatggagtctcgctctgtcacccaggctggaatgcagtggtacaatcttggctcactgcaacttctgccttctgggttcaagtgattctcctgcctcagcctcctgagtagctgggagtaca

SEQ ID NO: 101545 - DNA, 1059 bp, Homo sapiens
ggccccttagagacatttcttagtccaggcaggatcttgcataggctgaatctagacattaaattcagagaccccttcatcatctaaatgcatcactgaaatggattgtagacctcagagggctaagacctttctgtgtagcagcaatggattcagagtagccatctttatggggccctcatgcagttctctcagtattctgcagggtaagcagtgtcatttccattttagagaggaggatgctgaaggggcccaaacatgcacagctaggaagtgtggggcagatgtgtctgtccagctcttgctgggtgcagagctgcccattctttcctcctgaacctgtggggtatcgaataggtagcggggagcgtggaggagatgatgttgagaccattaaaacagaagccgagcccatggccttgactctgtggtcccgtgttctgataagtgacatagagataagcaggcacacacctttcccttctgttatccaccctgcttgtgatacctcccctctcctcggtctttatggtttaaaaataattgtcagggcatagggccctgagtgcctgtggggggcacctacatgtaccccataacccttccatggggaaattccatagccagccagagattggtattttaatagcaattcctcaagatgctgtataaaaaagaccacagaaacagtttttttccgtatgtcccagcatgcctttgtgtacggtctgtagtattgtaaactccccaaaatcaaaatgtgcatgaacaggggattcgagagagaagcaggtgtagctctgggaggggatatggaatagtcgccccagcgcagggacttctttttgtttttgttttttgtttttttttttttactgtatcaatgtagactggaaacaatgtcagaaggagaaagcaagtagcagaaggatgtttaggatgtaaccatttgttaattacacacataggcacccccgcccccaacctcccacacaaggggaccaactcataaatgtattgtttgtgggttcatacacattgcagtaataccatggacac

SEQ ID NO: 101546 - DNA, 1659 bp, Homo sapiens
tcacgctcactcttcagtcttagcgggggggctgttggcacactggtttcttggcaagccactgcaaggcttcgccttaatgcactctggcactgtcaccggggttagggcacaggcagggatgtgtgggacctgtcatgttattgtcagaaggaatgtgcggattagcctttacagcgtagtggtgggagagcactgcagctgtgtacacttattataaaagatttaagtcccactggtaaaatcaatatattgaattgcacaaccctctgcttttaattagtttaaatcaaatgcgccggtgccattttgccttctctcgccttcatggggtgaggaactaccaatatttacatagaaactgttaatttgtggtgaaaatgataacacatttagctttacacactcaaattgctccaacttgatggatcccagatcaacgtggagttgagctgaggagatgacgtcaccaggagcggggaggagacacccgtgatgtctgttgcttggaccctggattccagatgcaggtggacatgtgtgtagaggcagtgactggggatgctggtccttcaagaagcgagctggttctttctattgcaggtcaaaaacaatgagatttacctacatcatctaaaatcctttctcggaagcattcttacaaaattgcgaagtgggcacttgctcttgggtcattttgagcctgttctcacagcatgcaagggtcatgtactgggcagctcaaggcacggtgctttatttattccagagcttcacatgcttttctttccaatccctgaaacagtttatagaggaagggcgtttgttcactgcaaatgatcccatgtacgaccgcggctattagtgagccgtttggtattagctgtgtgttcaagctgggattgaattccgggttttgcagcaaatggcatctgacaaataataattgacaaaaaatgtgacttggtatttcttaatatggaacagatagttcatttaagcttccccggcaaaaaaaaaattgctcaaactcaaactgaaatagcaatgccagggaatactaggactgctgctgtgtatttttttccgctccaaagtagagtgtttatgatttggggggatattagagtgcatgaagtttgacacttacttatgcgaaactcaggcaagcatgtgcaataccgccttttcaacatttgtgtcggaaggcattgtggggagccgcgcaaagcctgtgctgatccgcgtggagtggattgaattaatgacaactccgagagcaccagctttagggtaattgctttattgttttggagccagggtgcatataatccggttcctgtgcaaacatgttgaacgtgtgttaatgcatttccaaaccagagcctctcacacaaccctgcttttcattaattgatgtcggtagcatggtacagtatttcaaagggctggccaagtataaactgtgtttccaatttccttcctttcctgtgtttggaatgccaatgttaatttgttcccatgcaggagcgggggctgccaaccgcggctttctataaagggcttcacagtgaaggcttccagccctcgctgatgcttggggctgcctggccaagtctcctgacactttgcagctaattctgggtgatatatggggtg

SEQ ID NO: 101547 - DNA, 1067 bp, Homo sapiens
acagcactaggtttgctccaaggcagggatgagcttgttgtgttcagcggagaaaggaagccagcagagctaggagggctggggtgcagcaaggcgggagagagcgggaagagattaggtgggtcccacagatgactgtgccttctgaactttggaagcttcccagtgctcagcataaggtgtggtccacactgactaacacgaacgattctcacctaccatgttctttttcctaagttcatccctaatggcagaaatgttctctcccaacttgaaggttgaggtagaggaatagagtgaaagtaatatttattaagaacctgtagtgctttaggcagtgtgtgtgtgtggcttcatttagttctcataactctgtgaagtagatattagtgtctctgttttacagatgagaaaatcaaggttaagtgacccgtccaaagccgtgtaaccagcacctggactgattgcagaagccttgtcatgcctttgttcgttcatacagccaactggtgtttcaagtacctctgcatttgagggcagaagtgtggccggcaaggaccacatcccctcacgttcactaaaatgtacatgtgcttgtagctgttgctctgaccttttgttctgcacttatttttcatgaagctgaggaaactcaaatgccttccccaaattccttgcagtttctccgttctgtgttgtcttgttagcaaggatgtcactcagccatttggctccctttggagaggtgactggtatggaggacttttcagcgtaacaggtagtaggattgaaatgtggtttcagtgtacgtaactcctcggggagttggaaggaaaaaagaagggaaaagtcgtttattgtacccactatgaactagatactgcattttctacataatctgatttgatccccagagcagccctggagaatgtgttaatgttctctatgtttgcagagcaggaaaatgaagactggtgagattagagtcccaactcctgagtggcaagaggccctgaccaaaccctggtgggcctgttagattatgatattcaagaaaaaacccaggg

SEQ ID NO: 101548 - DNA, 1015 bp, Homo sapiens
ccacaggataattggcaatagttatcaaaaatccttcagcttataccctttatctcactgatacccttctgggacttgagtaggaaatctgataatgtacttcatctgcattatctaaattaacctttataacagccaaagcactgtgaacttgtgaaaattttgaaaattttaatatccagtagtaatggcaatgtatagtatgtttgtatgatggaataccattgtaagtttttggaaaagcttttgaactgtagcctacagcacaggggcagcaggggttaggagaacaggagggaggatggtagtcaaggttgagcaagcttgctttctacatgtaatttttagaaagatttcagattatttgctgcttaaaaaaaggatgtttcaagttgaacaggctagtgatgcaggtgaggaaagctgtagctgcaaaagtgaagacactgtataatctagtgtcttccagaaaatatgcgtacatggaaagaagactaagagcacacagaaccattagctgtggttgtctgtggtgtgattagggtgatttttatttttttgccatatttacaaaatctctaaaatgtattacttttttaacggaggggagattatataaagtattcagaaaagaggtaagtttctactttggtcttgattctctgaatggtaatgggtaagtgatattctactttaaaagacatatctcatagatgcattgagaaaattatctgcaattttatgtgtaagcaatagaatttgtttattttaatagcttaggcgaagaaaacagttgctttcatagatattttaattcctttgttcttgaagttagataattaggttgctatgagaagtctatgtatggttaaggtgtaccccattagtttttaggtgttaaatgcaagcaatacatcgtaattgctttgtttgcattgaatttttttgttactacaggttcgctgctgggaagttcaagacagtggacagaccattccaaaagcccagcagatgc

SEQ ID NO: 101549 - DNA, 1047 bp, Homo sapiens
aattaagattatagttatgtgttttgtatatagagagaaagataaatgtgacagaatgtttacaattgatgaatctatgtgaagtgcttatgggtattttttgtatttttgcaacttttctgaaggcttaaattttatcaaaataagaaaaaaattttaaagtggtccatggttgctgctgagaggagacctgggatcagggacaagagaaagagtttgttttcactagtttgtgatttctgatttttaaaatcctgtttatatgttctcgcttagaaaagtaagtcaatcatgaaatagatgaaaatgaattttttgtatgatgctgtagtttgcagtacactggtccccaaacaattggaaaaataaagattgccaaagtttgcctcaatatgttcaacgtagtatctaaatatatatatagttaaagatttaatttttcttaaaatgcaaaattttctccattttattttaggatgggagcaaagtgtttacggcatcgtgtgataaaactgccaaaatgtgggacctcagcagtaaccaagcgatacagatcgcacaggtaacagaagcctctgcagaaaggctaggcacaactggtacccaggactgtgatggctctttaagtgaaataattattataattataataagaaaacgtgcagttagactctgtcaaatcaattagacaatataacagaaacctctttagcacaaaaataacaattttataaccattctcattcttaactagtgttcacagattgtcttgtcatggatcttcatatatgtatggatggagtcataaggagttagtgacattaaaatctatgaaagacaggtcataggtggtccttgccattcacaggttggacgttgtgacctcgtgcatggctggtcttctaccaactgcatttggtcacttactcattcagcaagtgttctgtctatgggccagtaatagagcagcgagtaagaggggcatttccccacacgtgtggaacttttaccgttactcagggaccactggcaggtactgtgtgaaga

SEQ ID NO: 101550 - DNA, 1055 bp, Homo sapiens
ccgtgcgggccactgtctgctgccgcctgccggggtggcagagtgagttgtctcaggaccccgtcactgcgacgttgacactcctctcccttcccttcctccccaactccccaaacactgtggaaggggagaaggaagtgatccacagcattcaggccacttggggtctagaccatggtggtgccagcctggggggggcagtggccctcagctctgcccgctggagcggttgagtgcagaagggtgcgcctcttccctctacccccgcaccacctgctgtgtgccagcctgagacggttcctgcctgtcttgggggttggtggagggtggaggcagttctgccagccgtggcagggctgctatggggcatccagggctgtgggggtctggaggaggggacatgaggtgagaggtatcctggccgagggcggggggcagcggggggtctccctccggacctacctcagggagctgagcgtgcaggcgctccagggcaggcctgggacagagtcaaggctcagagaataaaggtagctaatctcatcataatatttttattagaatgttctgatgataaaaataaaacttgttttctttaaagaaaaagttgatctaatttttctcaaaacgcagagctcccctcgtgcctgtgggcatcacccatgccccgccctcctggctcaggaacccaggatttcactggcagccgtgcatagagcgcctggcctgcaccggccgctgagcctcagtagcagaacagacgcagcccctcttcacacccgctaatgcaggggaggcctggcgtcccagccgccgtgcatcatccagcatcagcttcagacccggagaggactgcgcttgggttacttcttggcgctgtggctggggaggggcctggacgtggattgtgattggcagccccaccagatccctgtggaataggaggacagttcccccagagaaggggggttgccaccagaagaccctgaatgtgggttcctgagaggacgttggcaggtgtccaggacagctgcccttagggtagagttgggagg

SEQ ID NO: 101551 - DNA, 1044 bp, Homo sapiens
ggcacgaggcggagggctctgggctccgtggttaatgtgtaccaacgtactttttatctatagctggctttgccaccctaggcctgctttcttcccaagactttcccctggcctctttccagcaatctgtccgggagttatagactaagctacccttcggcaattagactggacttcagtcgtttttgaaagatgaatttagaggtaattttctaattactagcagttgtcaaataaactgagacggaagactgctgagtctttgcctgggcagaaatgagccctggctacagcaggagctggtcctgtgccttggtgatgaatgcagggagacaagcagcttagaaaccaattaactttctgcttcttttgctaatgtggggacagtgaggggaagagtttggctgcttgagaatggagttcaaacagggccagctgtggaagttaagctagcagaactgatgaaaggaacacgcttcaaggacgtctgcgttcttagcaatatcaaaatgttcatcttcatttgatggaacacttctgagtctgaattgtcagtacaaacgttaaagatgtaatagctattgacgcctattctagataataatgcctaaagatatcactgggacattttttcatgggaactttcaactgtaagtgaaagttttcctttcagttgctatctgcaaaaatgtcaaacttatacacagtaatatttataaggtggcttttgtgttttcttctgcaattgtgtgacattttgcttggttaagtgttgcatcttgtcatggtttgatgtcacgtggcaaccaatgtcacagaaggcctgggggtcacctgggagctgttgcttgggcttggggtctggtttgcagacttggaggccaggaacctggtgctgtcaggaccctatggcagagccagacagactcagaagcactagtgtatcaatcagggggccaatgtcttagttcacatcaaaagcaccacttttctggggagacagaccccaaatctgccacccaagttgccccactccttgcagct

SEQ ID NO: 101552 - DNA, 1332 bp, Homo sapiens
tgagacagccgccctccctcactcccgctctgcttcctccagccgcaggtctacgccccgcctcggcccaccgaccgcctggccgtgccgcccttcgcccagcgggagcgcttccaccgcttccagcccacctatccgtacctgcagcacgagatcgacctgccacccaccatctcgctgtcagacggggaggagcccccaccctaccagggcccctgcaccctccagcttcgggaccccgagcagcagctggaactgaaccgggagtcggtgcgcgcacccccaaacagaaccatcttcgacagtgacctgatggatagtgccaggctgggcggcccctgcccccccagcagtaactcgggcatcagcgccacgtgctacggcagcggcgggcgcatggaggggccgccgcccacctacagcgaggtcatcggccactacccggggtcctccttccagcaccagcagagcagtgggccgccctccttgctggaggggacccggctccaccacacacacatcgcgcccctagagagcgcagccatctggagcaaagagaaggataaacagaaaggacaccctctctagggtccccaggggggccgggctggggctgcgtaggtgaaaaggcagaacactccgcgcttcttagaagaggagtgagaggaaggcggggggcgcagcaacgcatcgtgtggccctcccctcccacctccctgtgtataaatatttacatgtgatgtctggtctgaatgcacaagctaagagagcttgcaaaaaaaaaaagaaaaaagaaaaaaaaaaaccacgtttctttgttgagctgtgtcttgaaggcaaaagaaaaaaaatttctacagtagtctttcttgtttctagttgagctgcgtgcgtgaatgcttattttcttttgtttatgataatttcacttaactttaaagacatatttgcacaaaacctttgtttaaagatctgcaatattatatatataaatatatataagataagagaaactgtatgtgcgagggcaggagtatttttgtattagaagaggcctattaaaaaaaaaagttgttttctgaactagaagaggaaaaaaatggcaatttttgagtgccaagtcagaaagtgtgtattaccttgtaaagaaaaaaattacaaagcaggggtttagagttatttatataaatgttgagattttgcactattttttaatataaatatgtcagtgcttgcttgatggaaacttctcttgtgtctgttgagactttaagggagaaatgtcggaatttcagagtcgcctgacggcagagggtgagcccccgtggagtc

SEQ ID NO: 101553 - DNA, 1593 bp, Homo sapiens
aatgttcctgaaggatgggctattaaatattggatcctcaggctggcagatgcgtctgcgctgtaattgggtctttcctggagtaattaaaggaaaatgattatattaacccaagtcaccaggccagcatggcatagagaactgaatggcaacagtattgatgtttccctccaaaaactggcctctctcagcacatcaaaaacgcacccttggcttgagtttagggagctttcctttctttgcactttttataattgatcgcgtgtctcctggccttctttttctttttaaaaagcagtgggggatatccgtgccctctaacgtgagcagcctctacctgctcagggagatctgagcttaaggacaagtgtggcgtaaatgcccccggagactgcggcgtgagagatgacattgaaaaaggtctggcttttagagctcaaacctgggaggcttggactcttttttcttcttcttctccttttctgaagagttggagaagccggagtttcaagaccgtcttggtgtgctgccttatttaggaggcgagctgctgctcatttgtcaggcaaaacagatgtggtggggagacaacatctattttcataattcgaaacaaatctggcgagccgccttccttttcagcggggcctgctcatgcagaaagcccagctcccaggcagcatctagcagaaatatttatagctcatccattgaactttccttcctccaggaggagttggtttctgctggcgatggggacacagacttgacagggagtgggtgctgtttcagggattttttttaaatcaaaaactggaggagtgtgggtcacagccagcgacgcagctgtgcctctccttctcgtgtcctttcgtcttccaggtgtggggcggtgggcacgggagcctgctctgtagcattcagcagcctctttactgggagggcagttaaaggctgactttgaaactcctctgggccggcgcctaggaccccgacactccagggagacccagaacctgggcccctagttaccagtgactttgtgcttaggtatgcaagggcagcgggctgtcatttccccattttatggatgaaaccaccgaggctcagagaacagcttgcccaaggtcacacagggaaccgctggtggagctggtcccccgctctgagcaccattcacactcagctcaagccttcattcccactgggagcctttgctacgccgtcacctcccatcgaaggtagctgtgtctgtctgtgtgtaatagtgacctaaggaaggaggacagacccggtatttgggcgaatcacccatcttctgttcatttatccagtaggtgagctccttccctgtgccactggagatgggaggacctggtgaatggaacaggcctgagcctgccctcagggagctactagtctggtgcagatgggaaacagagtcagatactgaacggaggaggagattcgacagtgtcacatgactgtgcctgggggctgctttattggtctgagagggtctctcagcagggctgaccttgtgctgagaatgagggatgagaaggagtcagcggtgggaagaccttgggggga

SEQ ID NO: 101554 - DNA, 2001 bp, Homo sapiens
gtcagggcccgatctagatgcaggttcagacttacttccctggacagggaacccatagactagagagagctcatggctcaggagccctgctgggggcccttgtgggctggaaatgagtttgggcaagcttgggtcagcttggagttgagaagggcaggctgagcagggccctgtagcacaggtgcagaggctggacattgctgtggatatttctggtgactcctggagcccagctgtgtcagttgctccccaaatgcccctgatcttgtcctgctggatttctcatctttcttctgagtattttatcctttcttttcaggtcaaccaccccatgactatgtttggggaagagttggccaaaaaagttgtatttgcctgatggatagagccttcctggtgcagtggggagaggaagctcctggaggcagggctgggctctttgagaaggagtgtggcaattgattagtaatgtcagtcgtggttgccagaccagggagtggctgtaggtatgtgtaggggaagtcacacatgcaaaaagcacctgggttctttcctgacctggttgggttgctctgggcaagtcatgtcccctctggccttggggtccctctgttaaatggcagggctgagtcagtggcttctgggtcacttcactgatgtgctatcttgcggagccttggaccagccccaggcacaggtgccccaggcacaggagatcacctggagaagaaggaagtcgctcagttgaaccccttaacggaaaaagaacattgctccacatcttgaactcattcctccgcgttggcagatcggttctagaacctacacatccacgtctggggcagaaccagaggctgtgcccacagacggcagagcttgtgggctgcttgctgcaagaggagcgaagattaggaacagtcgtttaaaagcaattattaaaaatgagagtgcggaaaccaaaaacagaaatgggggaaaactctgcagtcctctgacatagcccatcacccttttgggaggctgctgtaaggagcagctggagaagtcctctgggtgtatctccctggtgcactgtccttcccacgggattagtgtagacagctgtttttggtggggatcctaagcctgaccatggttttgtttgtggggtgttcactgcgggtccagcactgagctccactctttggtgtgcactgtcatctcctcttcattgcatgggattgaggcaggtacttctggtcactccatctcacaggtgagggccttgaggcccagagagggggaaggagcctgcccagggcctcgctgttgaaagaggccggtggatgccgtgttagtggctggttagtgggtttaatgcacaagggcatttaatcctcacaacagctctttaggacaggtggttgagaccccatttcacagcagggtaaactgaggctcagggaggtgacttcccttggaccacacagcctgaaggtggtggagatgggctttgtctggttccagcgtctgggctttacaacatttgagagagaaaaaggaaggaagggaggacaggaaggaaagacagaggaaggagagcagaccagtctcatatagaagctgccatgagcagggcaggcatggaaaggaagtgaccgcttggccggcaccccatcagagaaaggtcgctggagtgaatgagccctcactgggcatctggcaggcagcaggtctttctctagattggaagctgacagtcccaggggaagaaactagttcccccatttaggagaaccacccctgtccggctgccccggagtgtaacctgaaggagaggtcagcgcacggcttgtgttgaggctctgggagctcctggatgctgttcttcctcccttggaaccttggctgcatggaggcccactccccagtttagagggtgtttgggtgtcaccctgagtgtgtccccgggccacacccttgcagccagcccacctccaaccctgtctttctttcctggga

SEQ ID NO: 101555 - DNA, 1557 bp, Homo sapiens
tgggagatggagttctgtggtccaggctgtggccctgctgcagggctgggaggtggagaggtgtggacagagaaggacctcccatcctcaccggcagagaaagctcagagatgctcccagctggtgatgaggctccagcctgaatctcagcctgctgctgatgatggagaagccagcacttcactgagtacttccttggtgccccgtcaccacccaacacctcctcacaaggcttgcagaagagcctgctgagactcagagtgtctgtatcctgccccaggtcgcagctgtgtggcatcctgatctctgtgtattttaaccaagatctcgatgttccctttttgtaatggaaaaaaaaaatctccttaatttaattgttctgtgatgtctgaaatgggtggatattctgcagaataggtctgtgacttattatttagcctcctcatgtacctttttagctctggggagaaagacaattggaagcaagtgaagaaaagggctcaggtgtgtcccagccccaggccttgcagttacacctgccacctgctggccgccaccgtctgctggcccccaccttcgacttttactgctaggaaaagtcccggggcggggaggtgttggggaagttctgccgcctgtctggcttgtggtttggcagaccttcctggatgcaggtctcggatcctgggcttgagtctcatcctacaagaactagggggaaaggtcgaggaggcagctcctgagcccactggctctgacttgtgtggggcagggagggcacttggcactctgggcctggtctctctgctcatcctgtgggcctgcctcctacctgactacctgtctaggaatttttatggcagcccgcagaggtactgcaggtcggctggaatgtgagatcctggccctgggaggcgtggggtaggcgggcttcagacacagctcctggctgctgggcaggaacgcagagcgaggcggccactcccggcctgctcacaacataagcgtgaacatcgtggttttgccacttcgggacttggctgagttttgccacgtttccttatgccctgattctgccaggttaattctgattaggtttcggtttgaccactgcctgggacaccttgacccacagcagggattgagataaacagttgattatcatgagttgtgaaagatggaaaatagtcctattaccagcagcacttaggcagccccctgctccctgagacattgctgagtgctgtcctgtagaacagaaccctcccacttagcctggcctggatctctgccttttctttccacaatgaagagtatccaggcaagaggaggtggacggaggttcctcaggctccaggtgaccatggcttccacaagccgccctgccagtggcacccggctggcatggggtgggacagccacttggcctcctctgcatctggcagcctcagccctcgaggaattgaatcctcctggggccaaaagtggccgtgctcgtgacccgccagctgcaggccaggtacagacctgggcccttggaaggagcagtggcctggc

SEQ ID NO: 101556 - DNA, 1026 bp, Homo sapiens
cagccccagccagggggcccaggatagtggcagagccttggagactggacagactccagcagctctggggctgggttggcccatcagccgctgttgccagccccgctgggctccagcccagagccaccgcctgcccgcctcacctggcctgcattcctttgcagggaatgaggatgtgggtgaccccagacaggtatgaatcatgtcttggggaggtggttactcagaggcggcaaacgccgaggctgccttcctcccagacagcgtggacctcagtgtggagcttcgtgtcctgggcttggggcatggctgctgaggtgggtgtttgaagggcctcattggagtgagatgggctgacaggcagtggtccctctccccttgactctagcatgctctgaagaagaagaagaaaagagcagtgtggctgtggcaccgggataccaggtcacagtcatggcagcctcacttaccggctttgtggctctcaggcctatttttcatctagagatagaagtgctgggaagcagtcctgacttcctcctgttgtgagggcagcatggacccccctccccttatttcctgaatgcctaccatgtgccaggcacagcaccacatgcagccctgcaagagctactagacttgtcttacatggcgctacatgcaaccctccaagagctactagacctgttttacagataaatagactgaggctcagagggcagaagtcaattgcccaagggtgcatgactcgtaattggccccactggatgtccagcccactgcacccatctgtgtcctagccaccctcccatgtcagttccaagaaatctataaacccgaagcaaacggtagcacatgagaaaactggagatggcacgtggatggtcatttaaaatttaatagttccgtactcatgtgaatgtatgttaggaaaaatataacaagcacattgtcgatttcgtgagtattattgcttaagatcgggttaagtaataagtaaaccaattgaatattttatttcagttg

SEQ ID NO: 101557 - DNA, 1049 bp, Homo sapiens
aagactagtggggctgcagaaatcctggtgcatgcagccaccaggaccaactcccatctgctcctccttgtcaccctgtgtgagtcccaaggcagttccttccatgagttctaaggacgttccccatctgtagatggcccagccccacacttcagctaccatgtagcgggaactcccacacttcagtgaagcagcatccaagggtgactccaagagcaagcctccccgaagagcatggctgcccggagtaagcattactccttggttccttgacaatatgtcattttccttttttaaaaatcaggggtgtaaacggaaatgtgcacagaggcctccattttctcttgccagcctctctccacagaaatcttgagctctgctctgagcgcttcgcggcattccctttcactctagtgagaatgagctctggatccttttcccagaatagactcagagcggagttgagggtggggttcaggaacaaagacaagaaaggggagaatctgggaggcagtcagtatttagggaatgaacccaacacccaacagctttgtctccttgtttttctgggttcttgccggtgacgtcgcggctttttgaaccctagcaattcctactgacagtggcaggtgctcactgagctctttgcacaccctgtctcactaatcctcatggcaaccccatcgcatggaggaggtggagctaagtcacctgccagggattgcccagcacaccgcagagcaggatttgaacttgggctgcagtgtcttggcacagggtgggagggagagtcacagagaagcgggaccctttgccagcccatggttgaaggggaaagttctagacacaaggttttcctggcattcctggagccccaggggcgcccaggctcatacctctttcttcctgaagcctgtgcctcatttgtctaggcagggacgagcccaccttcccctgagcctcagaaccgcctgtcacttggtttaagggatgggctggttgggggcctctgctccttcctcctcctcccatcctccacacacttccct

SEQ ID NO: 101558 - DNA, 1419 bp, Homo sapiens
agatgctcaataaatggccacgagagtgttggtgccgatggtaagtagggattggtggtaagcaggatggctgcccgagagtgtgagctgggcggagctcaggttggctccttcttgcatcaagctgcccactaggcttgcacatccttgatgtgggcaacacccacagactgcacaagctgtcccataaggttcagatgcccagacaacaagattcggttcgagccctgtggggtgatgcattccagagaccacacttcctttagggaggctcagaatttgcatggggccacagcaaacgcctttcttcattcccctgagttatacagcaggtagcagagcttcaatctgaaacacctcgtggatgtcagttgagagatggcgtgagagtttggttgtggtcagtgatgtgcttcagactcccagagaagggagactctcaatgtcctcttatggctgctacatttaaggaataaaaaataaaagttaatacagagacttgccaagtctgtgtgtgtgtgtgtgcctctatatgtacgtgctgacttcttaggatttctgcaaggtccggaacagctttccagaagaaggtggaaagtgaagccggggagctttgcacaggtctgggaaccctgcaggaacttggtgcccgccgcgccagttccgcagattcccctcaccgggctgagctgatgtctgtagctggccagagttctaattgccttcctaaaaacaatttagttggtaataattctgtaaatgtctgaatcaactttgcgcaaacaccctgagtaatttctttgttcttttctttctactttgtaattggtgtctgtaaaagccaaaggtttggtcttgcggaaggcatgattcatttattggtgtctatgcctcctcgttattgagtcatttcagatgccatcacggtgagccagggctgattcatatggggctgagcttagaagccaatagggtcacggccataggaggaagctggttttctaatctgtttatgatatgggaaaaagaggcgggtgtattgagatgatggagagggtgtcaattacatgggtgaatataaccaatgaaataacaccaaccagcctttaaacaccactccatttgctgctgttgatcgttaggatagatcgcagctcaatgcactcctatctcgggtgtatctctccctgtgtttatggatcttgatctctgagcaggctgacacgggagggatgcccccaccccagacctggagagacgtttcaagtcataagccacagatgcagagaatgttgcctctttaaaaaatgtatcagctggacctaccatgaaacaaatgtttaaatgtttaggctcacgtgtaagggagcctctgccccattccctactcatttctctaacaatgacaattattagatg

SEQ ID NO: 101559 - DNA, 1076 bp, Homo sapiens
aggctgtgctgctgccagcctcgggttctgtacggtgcacatgctgagagaaggagattgaagccgagggcccattttttgctttttacaaagtgttgcgtaacgcacgcatggttggggcacgtgcgggagctgtgcgggagacggacctactcttcatgcaccctctggagtgacaaggatggtaccatgctgtgccaggggctccccgaggctgggggagcatggttcagggaagcaaactcagttgtctttggggtgggctccagggaaccaggggcaagagtccagtttaaaggcactgtggccactgctcagcccaccattgccacatgggccctgagtggccagatctttccgttccagggcagccgaatggttagattttgacataaaactcctgggttttaagtgctggcagttccttttgtctcccctgtcaccaagaagccccacagaacctgctggcagaccccatctgtctcatcaagtgacctgccctgctgtgggtgggttaggagtgagaccgagggccagagggatggaggcgtcaaaacttgctggccgtgtcccctttgtgccccccttcactgtcatctgatgggtctgtaaagtggggtgataatagtccctgtgctgagggtgcagagagattctggctgtgtgtggcctagtgtctggagcagctgtgtgttcatagaggtgagcgatgatggtggggcggattggactcgatggtccattctgcctggttccctagcggtcactctgtaacagagtgcctagtgatgagaaggccttcaccagaaaaaggttgcccatcctcggactggctgggaaggttggaatcaacaggcccatctggggcccatggccttgaacatggaggtaattgactatctgtgtaatactccttgtccttgccaggcccaccgcagacctggctggcaacgaccccagcatgcccgttgctggcccaagaggccccagacggtctcttcgggtctgccagcagggttcccttaatccactgccaggcttggtggacagaggctggaagagggggtacaaggcaa

SEQ ID NO: 101560 - DNA, 1066 bp, Homo sapiens
gagcctctgattcttcttctccaaccttttccaaacaaatatgagaaaatatcagaaactcacaggacacccaggtttccctgggcttgcctggcacatgctgtttgacacttgcttgaatcaagtgagggtgtagagacagtgccttggcactgtgacattctgagcccggtaattctttgttggggggcaggaaaggccgtcctgtgctctgtaaggtgttaccagcacccctctcccacacccactagataccagcacccctctcccaggtttgacagccagaaatgtctccagacatggtcaaatgccccctactgagaccactgtttaatcagttagtggtttctcctaaggggcttgagggccagagggcagcatctgcgttgccaggagacccttaattcccgtcagacgttcgtccctgtgaaggcctgtggccactccgcagccactcatccactcagcttttactgagtgcctgttgtgtgccatgaaggaaagataggggcttcctcttgagatgaagttttcccgttttcgtcttggatttgcttttctaaggagagaccctggcgttagtgaaagctgatgttttggattggggttaaaatacagatgtccaacaccagctgttctcccctgtggacccgctaaaccctgggacttttcacccacaggttttctgactgtctgggttttaggttgtggtgcaataggggagttattaagggagttgagttctatgacccgaatcttaggtcagacagttggcctcagcttcccaggaggtctgggttaagccagctacactgcccagtgtgacccagggtcgaggtgagtttagcatttgtcaaagcacaaaataactaattgttcctgtacaaacacacacgcgcctgtgagtgggtgcttgcatgcgcacacgtgcagacacacacacgcgcacacacagtcatacacaggcacacacagcttctaccccatctgtctttcctgccctcttctctttgggttgggaatggttaaaacttctgggcatgtaagaagaaaaggaggaagagtg

SEQ ID NO: 101561 - DNA, 1070 bp, Homo sapiens
cgctgtggaatgaaggcagtgtctgggcggctcataagcaagtgtccgcaggcggctgccagtttgtggcccctgagcctatacagtgagcttcaagtggtaaaaataaccaggctggccgggctttggtggtgggtccttccatccatccacctctccacactccctcccagcctggaatggaaagctctccccctaccccaccttagctggcctgtgccagactagcgaggtgccaggaggacctgcccagagccagcgtttgcggaaccgacttgccttcccagaggccctttgtgaactcaggaggctaatgaaatgcacgagaatgttattaaaatacgttcgcacacgtttggagagtcttgccttagatggattgctgcttcagtgccctccttgcctcactttttgcctttcgctctgtaaagctgccttgaggacctcctgctcgaggggcacacatccttgtgtcacccttattccaagggctgggcacagtgcatcattttgctcttgtctctctttatggttcaggacttaaaaaaaaaaaaaaaaagcattgttcttatttctgtcctttcttaggctcatcagtccatgatgtttttgacctgacatcaaggcctcttgttaaatgccttgccgccgccctctgcactttgccccgccgccgccagcagcctttgagtgattgggacccttggggttaatacctggaaccctagcctgttccagctggcccctgggtgccccagttagtcctgtgttctgtgtatacacagccccctacttattggaagaaagctgcaaggcacggagggaaccaaccagtctttaaaatgcaggtatactgtaacagtttgttttcatcagatttccccgagagactagggtgaggaagtggtaaggcctggtgtctcctggagtttctttacaccaaaagataggaaggaaggagggaaggaaaaaagaaaggaaaaaagctagtatttggtttttcttttaactagtagtggctgctgtttttcatctagtacatgctgggagttgtttgcaacgagaacttg

SEQ ID NO: 101562 - DNA, 1021 bp, Homo sapiens
aggtgctggctctaccacttcttgcaaacctcacccttctggagtagtctgtgccttaaacatgtgaatattacttaaaggtgttggttagccataccagggagtccctagggcataaggaatagtggatgcaaactcacagggttgctcctcagtgctttcactttagcctttgtatttctgtaaggacctccagcagtcttgaaattaaaatgtatgaaatcaattttcctttgcacttaaaagaactggtttatacagtatcatatgtaactgtgcaaatgtaatttttaacatctggaaagataccattgacttcaaggaaagcttttgccttggcttacagaagtaatttctggcattgaaaaaggactctttgaaggggaagtgacaggacagctgcttcctttggagcaaattggtaacatgtccaatcaactctgtaggatccaggtggacccagaaatggaaccagtgaccatctggagactgaccagaggcaggatcccaccccacttgaagagaataaatctaaattacaggttcgtttctttcgggggcgggggggcggggaggcaactcaaaactgtgtattttcttaaagttaactttaagaattggaaccaaatattttttcttctatcaatattgattacatattttaattcatatttcgtgttgctaattgtaaaaaattaattgtaaggtagtgtttaagcttctgaacaatctataatagtgttttcaataaagcaaactaatatgagaaaaaaataagacatctaacactgatttgattgagttctatctcagtcaagcacagtcaaacatagacgtgattatcagagtataaggtctcaggtgctaggttcttggggcagttgtaagaaaagagaaggcagtctccattctcaagagctggatgtaccagcctaagcagacattgctgtctagactgtcctctatgatatcaaatattgtgccaatcttaagaagatgagttttgggtgttgctttcact

SEQ ID NO: 101563 - DNA, 1511 bp, Homo sapiens
gcctcccagagcagctgtcacaccagccgcccatttggtaggcgctctggcatacgtggatgctccagtgctggtcctggcatgctgtttctctttcttttgaaaaagcaccagtgacccccttcctcctgtgggtggaaccagccccttgtgagaccacggccccaaagctggagtgaagaggggcccatgatttatttcttcaggtttctccaggagcttgggtcaaccccttgtagctggaggttcttgagctgtcctagtttctactaagcttccacttggaccactttaagttggggtcttccacaggtaggggggcagaatggaggattaaaatgagggaggagtctgtggtcatacagtcattgggatagcaccgtgtcattatcatgtgccatgatggataatctcttcaatctcatggtctccagggcctaaataccagttgtttctctattcatacagtttagaacttgatttcagtgattaacacctcccttaccccttaggcctgctctaataaagcaaaataaaacattttagaactcaaacataaaatgtgtaggagttggttatctgtgattaataagaaatggggtgatatcctcttctgctggtttgttgctaaaaaaattagcaagaaagctcattattgtcaaccttgttacctagagtgcaaaagttgcaagtgttaagtagaagggtgtgaccacatttaccttggtggggatgtgatagtatttggacttctttatcatagaggtgaaaaaaaaaaaaaagaacagattcctccaggctggggcttttgagttgcagctttaaaagggtttgtgtaatggagcctgttttatggtgtgggagggcagagcccttgaatttgcggcttgactccaagatcctagtgggattaattaggatgcttcctgtcgcaaaagaagggagaggaaataaaaaactccaagaaccatgaggaaaatgttctcttgcacaagacaagaggaagaagtgctgtggttgggcagcttctgggctgctagactccatacctttggtgctgatctgtccacccttcccctctgctgtggtggcttttgtcagcatgaaatgcccagtggaaggcggggcctgtgtcttcccacttgtctcttttgaagaacaaggacaccccaggcgggaaaccacctccctgccctctccttctgcctccctcttcctggccacagtcacggtgtgcattcatgggttgagcatggtgaactgggcagaaacatgggagccccctgagtcgggatcctgctagaaagaaggctgctggatgctgagtggtgggtgcacaggtagccagccagcatggtgtcccactggggtttggggaactcacaataccttctggaggtgccatgacttgtggtgatttgcttaagccttgatttggctcctggattaagtgctgcacatatgcttgcactgaagactttggaataaaattaatttctaaagggataata

SEQ ID NO: 101564 - DNA, 1031 bp, Homo sapiens
tttcgggaagggaactatgaaaattcagttagccctgtgattattctttatccttaaatttatgaaggaaattaaatcaatgtttgctgaaggaatgggcacacgtaacatatcacttctaatagctagagacaaaggtctgtttttggaaaacacattactgagctgccttaatccccagtgtaagacctggactgggggctgggcagtgatgactgtggcccctgaggcccttgtgatatggttaaggggattgtgcaggcagccaccctgtggggcatggcgagggctcggaacggaggggatgcgatgtgtagaggaaatgtctgggagagaccttacatagcaggtgacatttggcctgggctttagagattggctgagaacccaccattcagagaagtcaggggatgagtttcagaaggttctttcagttccctgaaatcattatttgtaaaatcttgcatgtttgtgcatacttaatttctttgtaagacaaggcccatagctttcttcagagctcaaagggatctatgatccccgaagatctagaaataagtgatgcattttatttgtgaactggccacggcaggcaggagatgtcactcaggccattgggaagggcctggtgtgtagcactggagcggtgggacctgtcctgggcacagcgcagagccagctacaagctctcagtgttttgatgaatgttggagtccacgaaatttaattaatagaagcaggatgcaggaagtaatatgtgtgtgtgtgtgtgtgtgtgtgtgtgtgtcttttgggaggttgaggatactaaaacattcgtttatttttacagaaaggtatgtgaaatatgttatctttactgtttagatagtctcaaactgtcatactctggacagaaagaatgggcagcctttggggcttggtgagtgagagcattactcatctgtgtgtaaatggatgtattcatgcatgggtgtgtgtgtgcacatgtatgtatgtgtatgtgagcaggtagccatcctgctttataa

SEQ ID NO: 101565 - DNA, 1069 bp, Homo sapiens
taggcctagccagcaaatttttaatttcagttattgtactattttgctctagaatttccattttgatcttttatagacctttacagtttctatatctctatcatatagaaagtccctgtctattctttatgcattttttccttgtaattcttgagtatatttataacagctcctttaaagtccttgtccggcccatgcaacatttggatcatcttgatgttggttttcattgactacttatattatggatcacttttttcttattaatgcatgagtagtgatttttgattggacactggacattataaatgatacattgcagagtccctggattctgttatatttttctaaaatgatttttgtcctaggaggcagttaccttgattaatctccagctccaaattatctgccttgtgagcagaagctgaaatctctgctgagtttgtttaatttctgacgctgctttttttctgggtcctctgggatccccctcacatatatgtagtttagcagttagccaaagatttaagcacattttatgcacagattttggaccttgcttgcaaatctctcctgttgcagtgtatcttttaagagtagcccctcttccagtttctgccttttggttgctttccgctgctttcaaatggtgttttttttatgttttgtcaagattctataatttttagcttcaggagggttagtctaacttagactttgctattaccagaagtcttggttcttttttatagtttccatttctttgataagattcctaatctgttcattcattgtggccctgttttcctctttgtacttgagcatatttgtaatagctgctttaaattccttttaaagtcttctaattctaatatctggattttctgtgggtgttttttctgctgactgatatttttcttgactgtgggtcacattttcttatttcttctcatgtctatagatttttcattttctattgtattttgttgaaacattgtagaaactctggattttgttgtttacctctagagatattgactttgttctagaaagcagttcagattctgtt

SEQ ID NO: 101566 - DNA, 1722 bp, Homo sapiens
cagggagctgttagctaaaagggtgatgaggaaagaagcaaaccgggctggtcagatgcccgatgtgtttgggggctctctgttgatccggatggtgtgaatattgctacatctgtgctgtacataaacacacgcctactcaaagcagtgccattttggaggaagtgcctcaactcccaaggagactgcacgtcttcatggataaaatacatctgttcattcgacttgtcactctcattagaacttaacaattagttgattctgatgccaacaactctagtgcatatatgattgggaaaatcagagataaccaactgcatgtgtcctgggtgttttagattgagttatgcaggacagcttccatgttgggacatgggtacatggaatcctgggaagggaaatgtgtgtgcattttcctttgtgaagaccttctagaaaccctatgcaatgttagtgactctgtccttgatgcagttagaagggttggctctgtctgtcttctgtcacttagcagttgagttgtgaaattctgttttgtttatttctccctcaagatggtgagcttcttggctcactgggctgcggtatctttgcaccatcagcacccagcacagtgccaggcccagagtcagtactaaataaatgttagttgttggatgaatgaatcggtaaaaactgcaagagctgtatcttttaattatatctagacaggataaacaggccaccagagaccaattataattcctcttgcttgcagggacgccattagcattccgagattataactcattgtcagaagactatttttctctctcaaaactttttcacgttaaggcttcctcattttttgtcatcatttctatttttaagctaatttttatttgtgcacttatttaagaagaatctcttggttatgtgctataaagaacagttggctccaagcaactaagtgaagatcgtcattccatacaagtggttcccagggccacgggaatataatttcttgtcactagtgtgctgacttttaatgactctggatttgttttatactgtatagtaataaggtcatgcaggtgtggcagatggagaggggtggatggagatactgggagtgctttagttgcccatcaccctgcatacggaagcctcacatcctcatttattgtggctgtcactttgtacaactctgctaagcatcacatcagaaatatgtgtcctctctgttctgaggacacaaaccttttccttatttgtgttatgggctagtttccccgttcgctccacccccattggttttctttcccctcttcctgtatgcaaattccaaatagaatgatgggtagattactaacccagaacctttttctactgtaaataggcagtgctgtgtatatagtgagaataacagactttagagacaggaagcccttcctccccccaatccctgcctttctccatcccttcctttcttctctccctactttggtccttcactcccctgccttaaccttcttccttccttcttttgttttttcctccttttctttttactgtgttgggggaatggaagaattctttcacaattttgtttttggcaacttttcatcttgtttcaatttcaaacttgcaagaaagttgcaagaatagtagtatgaattcccctatacctctttctggcttctttagtaatttgtatctagcttcatttattttatcattttt

SEQ ID NO: 101567 - DNA, 1117 bp, Homo sapiens
catcggaaaggatgtggttttgtcctttcattgacttttctttttcctttggattcattcttgaaaatgagattacactgagtcaggggatttgacatttcttgacctttgtccagtagcattgctgtatcttctcttccagaagagccgaggcaggaagcgtggttttgactccagaatctagcatggtgcctgacactcagtctgtgtttgctgaagagtcatattcttggtcgagagcaggcactccgatggtcagcccgagctgtgtgtgcacccagcttcccaatgtgtccgcacccagcttcccattgtgtgcagatctgccgcacctctgcactcccacttccactacaaacacagcttgccctcctttttttgctcccctgccgtgggccttcctgcccccacaggcctctggctctgcagcctctatttcctgcctgcatttacttcctgttgttcctcagcggctccctctcttgtcccaccctttcaggcctgtccctgccatcaccctctatttacttgtccttttgatggtgcttctgccacgctggctttgcctgtcctccccagcccttcagtgtcctccactgcttgtggccgagcttggtggagggagtcctgtcatgcactgattggtgccgttgcaaattgatgggttccagtcgtggctgggcttgcagcattgcttggcagtcctttcccttgtccctcatcagctgcatttcccattatccttggcagttctcttagaccttcgccatttcatcaggcctctcccctctgcctgcctcgcgccaagcagatgaccttgccttttactcagagcaaatagaggccttcaatcttcatcccctatctccatgcagggaaccaccacctacttcacacactccccagagccgccacccaggaactgacgaaatcctctcccctcacctcctccatccagctagagccaagccctgtctcctttgtttccatcaaaagtacctaaccccttgagggcacccgctcctcttcattcccacccttagtaaacacagaaaagtgctgaagttctttctcgctgacctcttgttccctgaggcacagcccagactccttcctg

SEQ ID NO: 101568 - DNA, 1546 bp, Homo sapiens
atgtaggaagatagacagcactcattcttatcatgaaatatttctttttttctttagcattttactatggaaattttcaaacgcacataacagtagagagaatatgaaaatgaatgcccacgtgccctacacctggcatcaaccattgttaacgtttgacctggccgggcgtggtggctcacgcctgtaatcccagcactttgggagtctgaagcaggtgaatcacctgaggtcaggagtttaagaccagcctggccaacttggtgcaaccccatttctactgaaaatacaaaaattagctgggcatagtagtgcgtgcttgtagtcccagctactcgtgaggctgaggcagcagaattacttgagcccggcaggtggagattgcagtgagccgagatcgtgtcactgcactccagcctgggtgacacagtgagactctgcctcaaaaaaaaataaaaacaaaaaaaattcgattaattttttcatttatcttaccgagataaaatccaatccagacaaaagaatttgcagaaaccatctcatttcagctgtaaatacttttagtattgttctctaagaaatagactcttttaaaaaaaaacgatagtatcattaatgcaaatataaaaattatcagtagttatctaatgtcatctaatatctagtcattggtcaaatttcccagttttctcataagtgtgtgtttttgcgcagaggccgttcaaaccagaatacaaacaatgtccacacattgaatctaagtgatatatgtctcttagatcttttaaaatttataatgttgctcctccccacttttttcccttgctatttatttgttgaggaagccaggtcattagttttatagaatttcccacatttgggatatggtttattgcatctctgtagtgttaagatgttgctctactccaggcatttcttataaactagtagctaagttggaagctcagccagactcagattttttatttagtgagaatactttgtagatggtttgtgttttcctgctatatcaaatcgggggcagaaaagctctggatggttatcttttcctaatgctgaatttggccaccttttctgtaaaggtggccaaacttctataaagttctccatcatcgtatgagcaaccattggtgatggttgccctgatccagtatctcattagaggctgtaaattctgacacactaattccaacatctctttttagtttaatagctagagttcttctgtaaaggtttcctctatcaactatttgatagccctgaaaacctgtttgaatagggaagatagaataaatgctttattttatccctttatttaccagtttccaggatcatcgttggcgttttaataatctacaaaggttaccagttaggttttaaaaatttttttgagtattgttaggaactcccacattttaacatagtagatatgtttcaaactgttatagtacttattctttttttttttttaaattatactttaagttccagggtacatctgcacaacgtgcaggtttgttacaga

SEQ ID NO: 101569 - DNA, 1039 bp, Homo sapiens
gcgtttagaacagaccggatgtggggtggactttctgtcagagtcttgctaacaagtaaggccaaactgatttgtttttccttcaactgctttaacctgtttgcacagccctgcgtggtgagcagggcttcttaaacagcagggctttcttagaggtgtacatctgctcacttgctgagttctccagtagaggattggttcctttcactcatgcattagacagactgcactaaaagaaaggcgtccggctcttctttgttactctggtacctattattttcttttgcggttcttcaactgaccatttcattttgggtgaattctcaatgttgcgattcttagagacttcagctgtgaaggtagaacacatgccacaaggccatgtctttgcccaagtgtgacttgtcacagttgatgcacacttttgagcgtgggttcccccccttcactcttcctttttagatggatttgaagactatggtacagattgcgacaacatgagagtaacggccttcttggacattccaggccaggataacctgcctccactcactcgcctggagaagtatgctttcagcgagaacaccttcaaccggtaagcccaaccaggcctgtgtatgttgacaactctgtgttgtgtgctttaagctgacacttggggccacttctctgtgacagctttgaggagacttcatggatgatgaggtaggttggatacagattgtcaccaggatgctgggcttctgtctgaatggtaccatcttattaggctttttcattatttttgttattgttttgctgaccacctggtaagccaggaaggaaatggtgatgaatttcatggtgtttaagtgattaggattgctaactgggtttctttcacatatgcagtactcagaaaaatcatgcattccttaattgagaagcaccaagaagcgtcagttggaagcattgtctgcccgctttgtattttgactgcgctgtgtatcaggaacttcggtggcaatgtgtcatgccatgctccgttgtcaccgtgtac

SEQ ID NO: 101570 - DNA, 1119 bp, Homo sapiens
atagagttgtggggaagcctggggctcaactcctgacacccacagcctggcagggaagtgcctgcagtgtctcaagggcccaggcagaagagggaacacagatctgggcctgtaagaagacagggccgggctgggtgcggtggctcacgcctgtaatctcagcaccttgggaggccaaggtgggcagatcacctggggtcaagagtttgagactagcctggccaacatggtgaaaccccgtctccactaaaaatacaaaaattagccaagtgtggtggcgtgcacttgtaatcccagctactagggaggctgaggtgggaagattgcttgaaactgggagatggaggctgcagtgagccaagattgtgccactgcactccagcctgggcaacagagcaagactctgtttcaaaaaaaaaaaaaaaaaaagaagacagggcaggggtaggaggggaaggcttctgaggggaggtggcatttgagttggggcaggcggaggaaggcgatgggcatttgggcggtgtgtacacaggcagagtgttgcatgatcctggtctgcttgggagccagtgagaaagaagagtggagacttgggaacaagggctgtgtgtgagggagggagtgggagaggctgggagatagcactgggggctgtcagtgaagaatctgctttaccagtccagggtttaggcttaacctgggaggcagtagggcgtccctaagcactgtggtcgggtttctgtcttaggaatgcaacccaagcagtggtacaaacactgctgcttacttaggactaagagcatgtcaagctctgctgtgacacattattgttgtaacaaaagcccacgggctgggtgtttttaatcccattttattattgcaagtctcacagcgggcacagaaaggctaagtaacttgcccaaagtaacacagctagtaagtgacgggtggaatttaaaccaggaagtcaggctgcagaatttatcttaaccactatcctttggaggactcgtcattcactgttatattcattcattcattcaactgatatttattaagggcctattaagtctcaggcactatgttaggcattgtggacacagaagtgaataaaacgaa

SEQ ID NO: 101571 - DNA, 1036 bp, Homo sapiens
aaggtcctaatctgtcttaacggcaaaaacctctcccttttagtacagttggaatttcctaattactctactgaatttttatgacaaccgcttttgtgttcctccgtttataaaatttacacgtctagggtgatttttctaaaatcctgaacttatgccacaaagtagtttttggtgtctgccaaaaggtaaactttttctcagtccctcatctcgttctctttcaggatacaggtgtaggtaaatcgagtattgtgtggcggtttgtggaagacagttttgatccaaacatcaacccaacaatagggtaagagacttttatttgatacacatctaaaggtgcattgaaaatccttccaaatacatagtgtgttacaggtgtaggccctgcgctttgtagtcattgaattctgagtcgctggttcgcatcatctctggaaggacttgaaagagtccagtgaggatctgtgtattttaggaaaattatcttcggacttgttgggggtgagaacttcaaaatgcaaatatgaattggagttctactaattattagaacagacacagaagcttcggtctataaatatcaacagcaattacaccttgaaataaggcagatgaaaatagatcctggtgctattctttcaggcatatcaagtaaaagacatttaaatggtttttgtccttcctgaaagtagtaggttgagatctgaacccttacacattcctgtactggtagtaataataaattaataaattcatattgaaatggaaggttttttcagttctctggttctatggataagtaaagttgattgttcatatgtttttgacgctataagaaaacttttcattttgcaatactaatcctttgactacataagaagttgtgttttataggctttaatattatgttaaccttataaaactaaataggtgctgtgctctagttttaatcatcaaaccctcaaatggtttccagcatttaaagaaaaaatctatgttatccatcattaggataaaattggcctttgtgctc

SEQ ID NO: 101572 - DNA, 1745 bp, Homo sapiens
ggcgcgatcttggctcactgcaagctccgcctcctggattcacgccattctcctgcctcagcctcccgagtagctgggactacaggcacccaccaccatgcctggctaatttttttttgtatttttagtagagacggggtttcatgtattagccaggatggtctctctctcctgacctcgtgatccgcctgccttggcctcccaaagtgctgagattacaggcgtgagccaccgtgcctggccgcctatctgcttttttaaaccctgtgggtctcctacacatttgaaggcatggggatgaaattcaccaataagtttctgcaattaaaatgcttttccgtgtcctttaagaaagagctgggtatgacacatgtaaaacatgaccccatccttctcagggcctgcctgtccctacctgcatgggaaagtgaagtgttgggaagtgacagcaagtactgctggtgattcagtgagtgatacacttcacactgagtcagagctgaaaacctaaaatccacaagacacccagacaccaccttggctagaagtgctctctcaaataagaagagagaaaagtgaagggtgtagcttcatgcatcttggtgaggcacgccccatcctgagtgtccactgttccctttttgccagtagctcccaatctgccagatgcctgtggctcctgagctgcctctagtccactctctgcaccaggagatttggctcacattttcacagggaaaatagcatacaaggctttctcctcattttctttcttctgcctttttttgtttctttttcctcagttttagaaggtggcttcctcctttgtgaccaaccccaaacatgcccctgagctctggagccccacctcttcatgagttaccctgtttcttcctcagccctatcatcttgtcatagcctgcacacaggttccgaatccaccccactccaccacaagagcacccattccccaacctactgctcagatggtggaactcctgaaagagaagttaccacttccgcaactgctgctcactcttcagccctccgtcatctcagctcctccctgccatgccactaaaaccaccttcccctggtaccagtttccatctaatagccaaagtcaaatggccttttcttggtagttttctttattcatagagtgcctgctatatgccaggtgctagactgggtgctggtgcctagaccaggggtgggcaaactgtggcctttttgcccgcctcctgcttttgtaaataaagagttactgaaacagtcacacccaattatttacttactgtcttgctgctttggggctacaatgaccaacttgaatagttgcaactaagccttgatgggccacaaacccaaaaatatttgctatctggtacttttcagagcaagtttgctgaccccgatctagacaaaatggacttctgtcctcgtagaccttacctacaagaagctacattatgactagtgtacaggaaatgatttattctttttctttttttttttttgagactgagtctctctctattacccaggctggattgtaatgacacgatctcggctcactgcaacctctgcctcccatgttgaagcgattctcctgcctcagcctcccatatagttgggactataggcgcacatttgggaatctgcccgccacaatgccaagctaatttttgtattttgagtagagacagggtttcaccatgttggccaggctgttctcaaacacc

SEQ ID NO: 101573 - DNA, 1055 bp, Homo sapiens
caccacgacgcccagctaatttttttgtatttttagtagagatggggtttcaccatgttggccaggctggtctcgtactcctgacctcaagtgatccactcgccttggccttccaaagtgctgggattacgggtatgagccacggcgcccggccgctggttttttttcaattatccagcccaaaatgtcagccttgctgttctttttgacccacttcccttcgtcttgtctgtgccctcacagggcttactgttccccaatttttgcctacatcatctgtctctacttctgtcctggaggatccttaaaagtagagactttaaggatactgcctggaatctggggggataaaaagtattttattgtctcttgggaaaaataaaactagttcatgaaactggtaggttttaaattttaccaatattgttgcttaggcaaggctcagtttaaaaaaagagagtgattttttgaaatattcagtagtaattcaaacgaagcaacataatgcaaatggtacatagaaatgtaccttttttaaaatatttttagaatatctctgaaatattcactagtaatacaaatggagcagcataaatggggtggcggagctctggcctccaggagattctggcttacaaggaacagggcctcacaccaaggaggcacttgttaccagccttcacctgcctggagccttctatgtggtcacctaactgcactctgcccaccccaccctccaagtctaaccctgcagagcagccaggctgctgcttgacattcatgattctctactttgattcttgccgttgctcttcatggaatgggacccccctgggggtcctcgcccatcttctccctcaactttctggctcagccccatacttcacctcttctctgaaggctttcctgatgcatttgtttcctcttgctgctttaacacatcacagcaaactgagcagctttaaaaaacacacacttactcttttatagttctggaggtgagaagtccaaagtcagttcacaagattaaagtcaaagtattgacagagctggtc

SEQ ID NO: 101574 - DNA, 1053 bp, Homo sapiens
ggcttcttgaagccactctaacataagccaaatgtgcgcttaaattcagctaaccctcactgagaacccatcaagttctttgcaccattctaacagagacaactttgtgaaggtcccttgatacctctgttagaggaacttctagatgtcatgtgcctttggtctttttatgtctcaatcttggtattcagtggtgtttccatcagtgtacataatccagagatccaagggttgtttgcatgagatttctagttttgagaagtgagaatcctttgttaattgtaaaatgtgctggattgttcatcctcgggaggcactatatgccattatggggatgacaccatcccatatgccatgcaaagaacagggtttgcagtaaagagaggtgctggaatgtaatgtcagagcacacctatgttccaggagagctaaacaagtctactgcagttaaagaaaagaaatgtttaaaataccttgcaacaagttttttcattgagagcacgtactctgaccaaagttcatgactacttggtgtgcatgaagaaagtcatatttttagaatgccatgataaatggagaagtatatgaaaagcattctagctttaggaaataatgctagtatggattttagattaaagacataataagatctgcctaagcagagtgaagagagatggtttagtagtgaaaaataaggttatcagacaagtaaatggcaggctggaaaataaaaatgtatcatttgaatggcagggagccattgccagtttttcaaaaagcaagatattaaagttatcataccctctgcatcatttaacttgatcgttaaaggagtgatcctagtgatcctagagttctagtgacaacgggagggaaaaattgtagtagtcccactggaagattagggtccaatttatgaatttatttcagggattgaggttcaagtgtagattaaatataaaatgaagaaccagacagctctacttcaaaattggatgcaagtaacaaaggacaaaggatagttgcagacttcgtttctgttctgtggaaggc

SEQ ID NO: 101575 - DNA, 1222 bp, Homo sapiens
gtttcagttacccctcacatatatttgatgatacagcaaagccctcatcataaagaatcatgctgtaatatagattccattatgctttgaatcagagcctgtcctggtatatgcagtggcgtataacatctctttttttctggaacacaaaaaaaaaataacacaaaggtgtttgcctctctccctttctgccaccatggtagcagaagtctgtgaagttttgtacttagctggttttcctgcctcttgcttgtccacttctcattggttctgcaacaggagtagttgctctgagatgcaaacctgccttcagcctgcctgatgcaccatcacacagcccagagctgcacaggagatgctcatggggccaagccacaggccaggggtgctgaccaggatgccctgcatggagaagacaggagaggagcaccacctgatgagcacacactccagccagttgttgctgggcgtgagcacatgtccagggttgccaaagcgcagtgctgaggaaagccacacacctgacagctacccacaaattgtttgaaatgctgggaggatcacacaagacacgtcttgtaagcctgtctgggtcagggactgcccgtttatcctgggcagtgcattgaaggtccagaatgtgccatccacagccaggctctattttcacctcctcccaccagtctgtcctctagtacaaactgcgtgctgttctccagcatgccatagtttcacaccctcatgcccttccacaactctattcagccttcagaaccaacctccaatgtcacctaaagggggctttcctgccatccctgctctcggacaagtaaccacatcgccacactgccgtgttgctctagacccatatctggaggcctccctgggttcctcccttggcctcagtgctggacaccttctccacccaggtgtcctgacagcttcattctctacatgtatcgcaaataggttcacttctccatctccgctcccagcatcctgctctcagccacctttggccattcactgagtactcctttagccttttcgtgggtcccctgctttccctctgtccatgacatgtcctcataggacccagaggaatcttctggaaacaaaaatcagcctgtgttattggcctgcttaatatccttcagtgacttcccactgcacctctcataacagccacactctgaacagagacctcccaagccccacgtga

SEQ ID NO: 101576 - DNA, 1094 bp, Homo sapiens
tataaaacatatttaaccagttttcccaattttgtttatttttccccctcctctgcagtttcgtgccttagcaccaatgtactatcgagggtcggctgcagctataatcgtttatgatatcacaaaagaagtaagactatatagttttctttagattgttttgaaaactcttttggttgcttagatctccagttgctctcttttttgtgtgttacaggagacattttcaacattaaagaattgggtgaaagagcttcgacagcatggcccacctaatattgtagttgccattgcaggaaataaatgtgatcttatcgatgtaaggtaagttattagaacgagagattacaatacctattatgtgttccttttcttaataagcaatatccagtttaagaatcttgcttttattttatctctgacattgaaaaattccttttggttgtgtggttggagtcctaaatttttaaactaaaattaagatttcaggcatttggagctaattatattatgtatacagacaggtgtgcaatttacggaaatactggttgcgttgcatccaacattatctgagatcagagcagcccccaggctcccatgacttagaatacttgaatgcagaaagcacatttattggcagtttccctgggccacttccatcattcccaaagcaagggctttttgaaaattttggctggggaagaaaaccctgccatccctaatcattccattagctacattactagtggtaccgagttttgtttcactttgtttgtttacccatggatgtggtgtaatcgagaagaccatgtctcagggcccatccagcagccatttagtccatcctttgtcatcataaatctggttaactactgggtaggtgggggtacaactaagatcttcatgggtagaatttctgatatgtagttgttgccttccagagaagtcatggagagagatgcaaaggactacgccgactctattcatgcaatttttgtagagaccagcgcaaaaaacgcgataaacataaatgaactctttatagaaattagtgagtatctctgtgccttatccatttcctctgtaaaagccgc

SEQ ID NO: 101577 - DNA, 1947 bp, Homo sapiens
aaatcatgtttattgttgtcctggatgtaaatagcaggtacccagatggatttttgaaaggcaacataaagccagttgggaatttttcacagctcaagctaaaatgtctaagtgtgtggtgtcatgagtatgttaaaattactgctatctttttgtgttcttcactttagtggtattaaaaacaggaaagtaggccagacatggtggctcacacctataatcccagcactttgggaagccaacatgggtggatcacctgaggtcaggagttcgagaccagcctggccaacatggtgaaacccccatctctactaaaaatacaaaattagctgggcgtggtggtgcatgcctgtaatcccagctacttgtgaggctgcggcaggagactcgcttgaacccgggaggtggagattgcagtgagccgagatcacgccattgcactccagcctgggcaacaagagcaagactccatctcaaaaaaaaaaaaaaaggaagatagtaaactataccaacaatgaaaagtcttatataaaaactagtatgtacatattcaatttaactgtgaaaaacaaaacctatatgttcacaaagattagaaaaattgggagagatgtacatagactttcttgttcactggcttagtaaaactgcgtgagcacagtgcctggcacactgactttgtattgaagtataatagacatacagaaatgtgcacgtatcagaagtataaggctcagtgaattttcacaaactgaatatactccggtgcttggcactctggttgggacatggccgttcctacacccaacggtaaccatcctgatactaattcttcagattggtttatctggttttgttttacatatattttgtactttatatttttaaaaacactctgtttcctcttgtgtgtctggcttctttcattctgcattacatttttagaccatccatgtcattgcatctagctgtgaatgatccactctcatggctggtttgtgcgtgtgagtgtcagagtccgagttgtgcgggtaagggggcagtgaagaatacccacaatataattatccattctgctgttgatagacatttgggtagctgtttccaatttagagttattacaaacagtactgctctaaacattctgatcgtattctttggtgaacatctgtacacatttttgttaggtatatttatacccacaagaaaaaatgcttgtcattgagtatgcatgcattcagtacagctttaccgccaaccagttttcaaagtggtagttgtactagttgacaaccataccggtagtgtatgagaagtccgatcaccttctgtctctggtgggtagtcagtgatctccattttcatgacagttaatgaagtcgagcacatttccgaatatatgtttacatttgtcgtatctacatatcctcctttgtgaagggcctgttaagtcttttgcctgttttcctgttgggttacctgcctccttcttaatgttttatagttctttattttggagatgagtcacttattgactatgtatattggaagtatcttctactgtatggcttgcctttgatttttttagtcaactccttcgatggattgaagtttttaatcttcatataatctgactgatccttgttttcctttatgtttagctgcattaggtttttggttgctgttttagaaatcattacctgttcccagctcatgaaaatattctcctcttatttcttttaaaaatattatttgttcaacaattttttgatgtcatatttcacagatgtctcttagataccagctatatttcaatatccatttattgagaataatgacaagaagcttgggtaaagcttttaaacagatttgtagtatattcacagcagtgtctagtcatttgaaaagtagttagaagacattgggagatactttctcaatgtagaa

SEQ ID NO: 101578 - DNA, 2017 bp, Homo sapiens
ttgttgtgtctgagaaagttaaagctcactcccttcccttttctcatcttggtttaggtcgaagaattccatccactgacgccaacctgccatctggcggtaagggcttcaaactccgaagacagccttcagagccaaagcggagctgctgctgaccgaacctcagcctctcagacttgatgatgaagtaggtggtcctgaaagttaacaggagggctggggtccctgccaccagttttcacctagccagtcttgagtcttctccgtgcaaaaaggattcacagaaatggaccagttctgttctccaaagactgcagcaatgatatttcagtctgtgaacttctattatgtaaagaatctctagtgtacaaagggactacatcgttggcttttgaccttgctgaaaaggaacatataattgtatggatggtaggattaagttgttgagtagttttgtaatcaagattttatgtaacatttgtaaagggaaaattagcacttttgtggttcttaagggaaaagaaacagaccttgtggagattataatttccttggtttctgttaccactgttagagggagttgtatcatttaacatatagtaggatagtttaagtgtagggaggacaattattgtctgaagctaaaatgggttatttataggactgatggaaatgatttcatctctgccatctctaaagcacttttcattgaacatgttagcctaggatacgtacagtaaattaacaatgatagcagcagatgcctagctcatcctgggtttgcttctgaccttgtcatgtgtgtgccaccaaacacgttattggcacctttttaaataagctctcatgatcaagatggtgatggtagagaagctgcccggaataaactgaatttcatatgttctaaaatgactagcaatggtttaaaaaggaagaagagtggaagtgaagaaggtggtataaatgctgtcaatttttttttaacccaagtattttggtggggaaaagcaagtatctattgcttagcatatgtaaagttgtagtctatatttatggggccattgcttaaagattataaattatgtaaatacattaataaattctaagtttcatttgacattccattgaatctcgcacccagtcttgcgtatgcctgcccagttttcagcctcttaacgggagactcaagcacattggtattgtataaaggtatagagcacttagcttacaatctttaaaggtttctctgccttcccttctacccacccgcctcccaccagatcccatctggaaatcataataaagacatatgccactttgacaaacctgactagtccttactagcctgagggtaaaagattaagctccaacctcaagtcatttacctggtcttggtaataagtttcttttagcttgtacagcatcctcagaccaactgaggagctttccttgttaacaatttagcttatctttctgtttcctttatttttcccctgcctctgttagtggttaacactcttttccctcagggagcctaatgaggtttttaatatcatctaaaaataaagcattgaagtgaagttggtgaaaatttgttcctggtctaatttggcacccttccaacctgagtattgtaggggaaggaaatttacaagatttaataggaaatgaaacagcttgaatttcaaactaaattgtattttcagagctatcctgaaactgaacagctgaaactttaaaaaataattggtattattttgtgccccccacttaatatggatagattttaatgggaaaattataattcagattaaataaaaaacaattcccttttccctgttgtatatcttaagcatttggaattttttttatcttctgaaatcatataaaaagaatgtcattagtaaaaattctaacttcgttttgtttaaaagacatgtggatgctccatgcccctaggattttgcttcctccccggtgctaaattagcaagctcctagagaagccatgtgattcc

SEQ ID NO: 101579 - DNA, 1094 bp, Homo sapiens
agttcagtgacaaactagatagtgaacctgtgaaagtcattatttacatttgctttaaagggacagttttaccgttcaacttcaagagtttttctacctctttaacagttaatattttttaaaggaagaaatggaatgtaccttcaggggtcaagctgttaactgtatacctgcctctagttagcttggtttatcaaaaggatttttaaatgattcaaggtaatgtttaggatatttgttttaactcctgctgtgctgtgatttaaaaaaaaatagtctaagaaacaaatttatccatgagataaacatcatattttatagttttagaaaaaagggttgggggtggaatttagcctagaacttaaagaaacaacctctgcgaatttctcttgacagcggagttgcttgtcttgacttctaataatataaatccaggcagtttgattatccgatttgcaagaaactttaatggaattctggggcatttgtcctgttttatgtgcaaatgaaagtctaaaaaatatgaggaagatattacatttttcaggagcctccattttttcagtctaagagaatgataagtgagaggcctattgtgatgaagttgcattggacataatgtgggaagtgaataaatagaaccaagaatcttcatctatctctgttggtctttcaggattctcttagcatataggaaaatgatttaccttccagatctcgaaggacttccaatagcatagatcaggtttaatttgatggtctataccatcagaaataactaatatctgttttctttccttttagagtataatcaattatggataggccagaatatttttggcttcaaaacaaaaggattcataagcttaaaaaaacaaaaatcccaaaccttccatctatcccttttattacgttgaacattttagatagtaagattaagatgtatcattagtatatggtgaaattaaaaccgtggtgtctaacagatttaacaaaaagtgtttaatttactgcaagttcatttttagatctgtatggtgcccagtactccacaaaatgcatcataattgaaacaacaaaattattttcatgag

SEQ ID NO: 101580 - DNA, 1063 bp, Homo sapiens
tggtaataagatagttaacataagtggtcagaacttcgctgaatttgtaataaagcatttgttaagcgtgtaaaagtccaaattaaaagtcttgaagaaaaacagctatggcaatgagcctagacatttttcaaaaaaaaaagctaagccgtcctaccagcaatctctctttctcctaagaatgtcatgccttctcaagacctgatgaaaggaataagatatttgtgcctttttataaaagcatctattacgaaagtaaaattcagttgcttacagttttggccgctttgtagcactattataaacagcccaaatttatggccttggacttactgcatgacacatggcctggttacctgtcatggaatgctgcagtggtggtttgccaagcttctgtggatgtttgaagactttatttttgcagtcttaaccttgggctggacctaagtgtatgtaaaccatatgatgcctgtattgtttatagatgctgacaaaagaaaactagaccttttgttttttgttgtaagatttttgttttcatgcctatgctcatagtagatagtttgcaaatgaaagttgatttgccatacttttaaataatattgttttagcttgaatattctataatacacttttatagagtataacatgctaaatcactgttttgttgtaagaagggtgtaaacattttgttaataaaatgctatgtttacaaatatatatttgcctcccaaatggtttctctttgtgatattactcatcatatgttcttcttaaccaaatactctgaagtcatttttaaatgacctttggatactgaagtaccagaattttgacagctgtagtgtctggtgagcagcaagttatttgtaccaaggtatctgaagcttcccagcttcccatatccttatcttatacaactcctccctctccttgctcttcagtagttaagatgggggttctagaagcaggtcagcaaggccaccagtgagcacttagagggaagtttgctgcccctggaagaaaggaacggtgcagtgccctagattgtggaagaaaaggt

SEQ ID NO: 101581 - DNA, 1055 bp, Homo sapiens
actttgctataagtctgctggtttgctgttttgttttttctatgtttttaagtataaaacctacaaaaaatgtcatgaatcttgggtacagctcaattaaatttcacgaaggttacccacataaccaaccctcagatcacaaagtgggacatctgccacacctcaggtgccccaccttgtgctccttctctaacatcactgatgagttttgtctggtttcaactttatatacataccatgtggttccatatgggtctggcttctttcatccaacatggtatgtcgtattctcattcattctcactgctatgtaggattccactatgtgaataaaccaccatttatttatctagtctatattgataggcattggattatttccagatttttgccattatgaatggaccacagtgaaccttacatacatctctggtgtaaaggcttgtacaggtttctcttgggcatgtgcccgggagtggaattactgggtcatgagaaatacacacacacacacacacacacattctcaatgtctgtatttgtttttgcttttgtagatagttttctaaaatggtgtatttagctgggcatggtggctcatgcctgtaatcccaacactttgggaggccgaggtgggtagatcacttgaggtcaggagtttgagaccagcgtggccaacatggcaaaaccccgactctactaaaaatataaaaattagctaagcatggtgccaggttcctgtaatcccaggtacttgggaggctgaggcaggagaaacacttgaacccgggaggcggaggttgcagtgagccgagatcacaccgttgcactccagtctgggcaacaagagcaaaagtccatctctaaaactaaagtggaatatcaatatagctccccccagcagtgtgcaagaattctagttgcacagcatccttgctaacacttgatattattattttctgcttttaaagtctggagatctgcagtccaagctgttaacagaacttacctctgagaagagaggcttggcccacagaactgtcacctggttttca

SEQ ID NO: 101582 - DNA, 1027 bp, Homo sapiens
aatactccagaacggtggctgtcactttgccttccaagttaacaatgtgaaataactctgaatttacagagaaccaaaggctttccaattaaaatgaaaaaaccgaaaaaccccaccaaacctaccgtggattgtaattccaggatagtacttgagctttcatgatgttctcatggccttctggggatgccagattgggaaagaagtccaggtagctaaagtgaaaatagtgagccttagtttccacttgagttgtctgaagttctttctctatctgggaggcctggcttggcttctcctgataattggtgggttcattcggttagtccacaaacatttactgagtacctgatctgtgtgtcagatacccagagaagccaagttatatcagctgtactctcctattttccctcaacctcctcccagtactttagggaagggggcagatgagaataacagccaggacaggacaatgatgtagggtagtccagagtgctccaggagcattgaggaggtcaactcctgaaagaggtgtcatttgagctcagttataaaggtcgagtagaagaaggctcaaagaaggaaagggtggggaacatttcagacagaggaaattgcatgcacagaggcacaaacactgagatgactgggctcctttgggatgccactagtagtttttttttttttgagatagagttctcactctgtcacccaggctggagtgcagaggcgccatctcactgcagcctctgcctcccaggttcaagtgattctcctgcctcagcctcttgagtagctgggattacatacaggcatgtgccactacgcctggctaaattttgtatttttagtagagacggtgtttcactatgttggccaggctggtctcaaactccggacctcaagtgatccgccctccttggcctctcaaagtgctgggattacaggcgtgagcccggccaccactagtggttctgaatgacagcaacaaagaacatttgttgtggttgcctggcaagatgggaga

SEQ ID NO: 101583 - DNA, 1047 bp, Homo sapiens
ctcagtccctttatgcatagatgcagccagtgtccaagttaaaattgtgttgcttctccttgagcagtccttccttgcattaactttctgaaaacccccaaatcccagtacaaactctgttgtctaatatgttatggaaagaggcactcatttgagaaaatttaagattttgttcaattgttttactgaaagatgtgtgaccttaggccacttcactcctcaaagcctggggtggttattcggtcaatggggatgatgctcgtgtccacgttgcctcttgtagaacgtgtttagaaggaatgacatggctgttagtggctttgtaagtgcatagtactatacagagattagacaaccacttaactacttaagtggtttcatcacttctgtacctgaaaggtgtggcagagaatagcgatcattctggccctggattggccaaagtaattatgccaaagtcactggatatttttgctagggaagtggtccaagagaagtggtaccaaattgttgaaggcctctggctcataactttagaagagacatctgtgtgtgttcttaaatgacgtcatgaggtgtgttgtttgtttgttttaaactgaatgctaagacagtacaattaatagagactgaataccctgacttagagataattcatttcaggatgagaaatggcacatttaactggtttcttccaggttactcagggtgacgactctgatttctggtcgttcacctagatgaacctctgagctaactttacttgagaaggtaataactaaaatgcccattcaaaggaaaaattatcttttaaatgcagcctaagttgatcgtatgggattgtatattgtcagactctttaatcttgggaattttgtgtggtatgttaaatttaaggatgttacagaagaaaaagaatgcaaatttatatgactttatgcagttttataggaagtactatgctgcatcataaatatcaaaaggagaaagcctggtggcttcctgaaagaagcatgacacaggaggatttgcctagacttaaggttg

SEQ ID NO: 101584 - DNA, 1081 bp, Homo sapiens
tcaagaagtcttagatagtcctgccattagtagggatctcagatgggagggcaccaatgaatcagtgtagttgagtaccacttttgggagaaaatagaaacttggacactctaaatgatagtttaaggacgttgtttgttttgttttgttttttgtatgggaaaagttggcttagactctttagttcagcccttcaagttgatgtgtaatttaagattgtttaggaagttaaaaaatctaaagccctgtggatatagttcattcagtgcagtaattatctttcagatgccaagtacagcattaattctttagctttagcatggcactgattttcttaacacttcatgatcacgtggagcagactgtgctttacagcacaacagagcgtcagccatgtgctgaagattcttcgtggtagtggtttagatccaccctgaatagattatcttcatttatttaattattaagtagcttgcttatcaaaagcggcattaaacttactaaacttgagtcaaacgtaaatcttcatagatagtaccatttacttctgaaatcttgttcctgggagaaaaatgtggactggaagttaactttcttttatccacctattcactcctttttcttcacagttaactccttaggggaaaaaatgtatagttcttgaccatgtgcttatgtttgtaaagcaatgatgtttccttaacgtgagtggttgtgacatagatcactgttatcttcataattacctgggagcttttcatccaagtgtggatttactaaaataattagtctgaattgatgcttattaaagagctgaactcttaaacgttaacactatcttgtatttattaaaattgtatgcatgtttccttcaaatgctgaaggcagaatactgagaactttgaccctgtgttattatcgctaagtagttgaaaattaggggaggagtcaagggagtatattatattggttatcactcaaatactacccctaggcatgatttttagaaccgaaacttgaatttttacataaagaattatctccaaaagtgtcttttttttttttttttttgagatggagt

SEQ ID NO: 101585 - DNA, 1098 bp, Homo sapiens
ccttactaactttgtattttttttcaggtagctttcctgagtttgatcttaggaattcttaaaatacagtagcatgtcttccagtttagttttcccacccatggaggtggtggcaggctgagttttgtttctttctgctctgaaagacctaggaaactagtgaattgagtaagcaccctgcaagtctggtatagtctatttcaatcaagttggcttctggtgtgcctttgatggcatcatcagtgagagttcttggtgttgatttctcttgctgcaataacaggtgtgatgtttctcagtagctggctggctcccgaggataccaggagaatactttattaatttaaaacactgcattctaagagttcttcaggaaagttatgtgtctatgggtagggttgtttttatgtggttatttcaaaataagagctatacaatcaggctttctgctggaatattggaatataatgtctgccatttaaacacattggttgcaaagctttaaagctttatttttgtttctaaagcattgatttaatgtgtgagctaacaattcgatcaagaaaatagatttttaagaaaacttctccagtgtccttattcttgagttcatggttatttaacagctcactctcttcgaatatctgttagtatggtatctttcattttttagggagggggcaactttaaaaaaaaacaccatagaataattatgatgaaagcattattgacacagtgagcatttttaataccttcaacctgtatataagcagcacaaatttagagtgatttcagatccgggttttgaagtaggtgtctgtttacaggaaatgcagcagaatcagagtacaatgacctctgaggaagtctcgtattcatgcagcatacatttttactatgtttgtggcactgttctagtttggaggatctggtgatgaataggacagacaccccccccccccaccccgccccccactccatgtggaaacaggaaaggaacaaacaaaatatgtcctatgcagaagatgaaaagggtgtaatgctggaacaggagcagcagtagtctcagtatttattcacccagagcctggatgtgct

SEQ ID NO: 101586 - DNA, 1612 bp, Homo sapiens
tctttgcagttgggttcagcgaggagcagttttctgtgttcaccagtgttgatagcagacaaaatcacacagaaacaaatacgaaaattgttttatgtccagaatgtccctctaatatgcacatgagtaacgttggatcaaatttatgttttcaaaataagtctcatagcagaactagctgtcgtttgattttgggattgagtcccatttccttccttccttatcaccattttgatttcttaatttgtattaaggtaagcccatatcagattgattttttttttttccatgcccggagcacctcaagagtagagacaccagcctgaggatcttaattttgctggagataatccacacacaggtagttttcttcttggtgaatatgtagattgagatctttattctatgccagccacagtgctggggctacagagatggataaggtataatccttgtctcaggagcttagagtctcattgaaaagtttttcaaaacacacatttgaatgattttgttgagtcaacattacgtatttgtttgtgaacacataagcgcacaccctttccccaccttcacttcctgtttccttgcaaatgcaaagacaagagtaaaggacttgcctagaggaaacacagaaatactgatttacaggtgaaaaatatgtaaatttgaaaaggtgttgaaaaagacctaagtttttgtagccacctgactaataaacacagagatcacatgtccaccatagatgggtaaatgaaaaaaagcaagtttcaggttaataggaatagtattatttcattatttgttagcccctatcccttgcacatgtgtgtatgtattgtttgtgtaaacatagatgatgtggaaagatctcccatattgttaatattagttatctcaggggacaaaggaaagcttattcctgtttatacatcttttattgtttggtttaagaagcatgttttacttttttaattaaaaaatctaataaagtaggaagtgaataaataatagtaataaaaagtatcttcaggccactgagcctgttgcagtcttcccagtagcgtgagtaattagtaccgtctgtaatgcttcaggtgtggactgcccagcaggactctgaacttcttgctacagcctaaggtgatactaagttttctgtagcaacactataatgttgagagttactgtgtttatagaccattaacacctcaaagtctttcttccatctgctcctcttggcacactgctctagataatcattttggaatgagtttagtcctttacgctctccctgttagatttcatattgttactgtggaaatcagtatttagcatgggtaagaactggccttagatgcaagccatctggttacagatcctcactaccactatcatgaaaacttggacaagtaacttgtctccccaagcctcagttttctcatctgcaaaacagcaataatcataaagttgtgaggtttcaatgagatgccatatgttagaacacttacactaggtacctggtgaaatagtgggaacatggtaaatattagacgttactgctagtgcattaacctcagctcatctctttcatccattggcatgttaatga

SEQ ID NO: 101587 - DNA, 2095 bp, Homo sapiens
caggctagccctttcccctctgtagcctgcagtttctccgtttgcaaaatgcggttggaccatatcatgtcatccaacactgggcataaacagcccatcccgttaagctgtacagttgactcccctttctggtgccttggcttgtctttgaaatgtgcgtttgctcccgtaggaagaagatggactgcggatgaggaagacagtgcagagcaacagccccatttcagcattagccccaactgggaaggaagaaggccttagcacccggctcttggctctggtggttttgttctttatcgttggtgtaattattgggaagattgccttgtagaggtagcatgcacaggatggtaaattggattggtggatccaccatatcatgggatttaaatttatcataaccatgtgtaaaaagaaattaatgtatgatgacatctcacaggtcttgcctttaaattacccctccctgcacacacatacacagatacacacacacaaatataatgtaacgatcttttagaaagttaaaaatgtatagtaactgattgagggggaaaagaatgatctttattaatgacaagggaaaccatgagtaatgccacaatggcatattgtaaatgtcattttaaacattggtaggccttggtacatgatgctggattacctctcttaaaatgacacccttcctcgcctgttggtgctggcccttggggagctggagcccagcatgctggggagtgcggtcagctccacacagtagtccccacgtggcccactcccggcccaggctgctttccgtgtcttcagttctgtccaagccatcagctccttgggactgatgaacagagtcagaagcccaaaggaattgcactgtggcagcatcagacgtactcgtcataagtgagaggcgtgtgttgactgattgacccagcgctttggaaataaatggcagtgctttgttcacttaaagggaccaagctaaatttgtattggttcatgtagtgaagtcaaactgttattcagagatgtttaatgcatatttaacttatttaatgtatttcatctcatgttttcttattgtcacaagagtacagttaatgctgcgtgctgctgaactctgttgggtgaactggtattgctgctggagggctgtgggctcctctgtctctggagagtctggtcatgtggaggtggggtttattgggatgctggagaagagctgccaggaagtgttttttctgggtcagtaaataacaactgtcatagggagggaaattctcagtagtgacagtcaactctaggttaccttttttaatgaagagtagtcagtcttctagattgttcttataccacctctcaaccattactcacacttccagcgcccaggtccaagtctgagcctgacctccccttggggacctagcctggagtcaggacaaatggatcgggctgcagagggttagaagcgagggcaccagcagttgtgggtggggagcaagggaagagagaaactcttcagcgaatccttctagtactagttgagagtttgactgtgaattaattttatgccataaaagaccaacccagttctgtttgactatgtagcatcttgaaaagaaaaattataataaagccccaaaattaagaattcttttgtcattttgtcacatttgctctatggggggaattattattttatcatttttattattttgccattggaaggttaactttaaaatgagccctatcactgagaaatacgtgtttcatgatttaactctgtgtgtgtgtgtgtgtgtgtgtgtgtgtgtgtgtgtattttttttttggttgtcttcagctgacagtatgaaaaatgaaactgctgaaaaagctgagcacctggtcacccttggccttccattgctttggccttcagtaaaaagcagcctcccttctaggtcagggaaccatgccattgagactagtaacgggcgttctgggcacagtcccactgtgcacaggtttgagaggacaagttcatcagaaggaaggcagtccttagaagtcacatacgttgagccacgttgctcctaagcctggctctgtcaagctg

SEQ ID NO: 101588 - DNA, 1058 bp, Homo sapiens
ggttggtctgagtaagtaacttcctgtcttcatgaaaaaagttgactttgaatcccaggtactcacagaaatggtgaacagacttagttgttacccaggcacccatggattgtgttgagtgtgcagacagggaggccaccccaataggaattcgtctccaggatttttcccatgtgtcccccagtacttataaaagggagtgaaaagaccgagctgtaaggcatgtgccttctgccacctgactttccgtgaggggactaaaatttactaattgtagttgctgcagccagttaagtcctgtagcttccaggccctcatgtctttgataggagagtgcttaggtggtccccaacagtgcctaggggtacagtacagtcccattacactagagcagggctctatttatttttaaaggatatggccgtgtgttttgataaaactttattcacaaaaacagccgggtcatgggatttggcttgtgagtctgtaacagttcttaaaaagaatatctgagaaactactctgttttagacctttgaaggtgatttagagttttgtgtacatctaggagaaggtgttcagcttctcagaggatgtggacattttggttgcagctaaaaatcagtctctgaagtctctctcccttctagaggttaggacttggtgaacatgtttgtgggccttttgactgagtggcagaaggaaactgctcaggaagagaaacaggtgactgatgggaaggttgattattttctcagtcatcctggcagccaaaaatgtgccaggaaaagaaagaatgtggagcacgcgtggctcctggaggacttggagatgcatgcacatttagggtgttttccctagaattacataatgaaaaaaagaataaggcaaagaggaggtgaatatggggcctgtcacaacggcctgccctgccccaagagggttaagagtcagataatcgggacgaaactggcatggaaagagcgagcctagggaggatgccgctgggcagtgtgcatgggggagctgctgccaggctgccctccagtctgctcctg

SEQ ID NO: 101589 - DNA, 1042 bp, Homo sapiens
gccaacgaccactcttctggaacaccaagagcagctctgagatcatgctggccctacgcgaattgagtttctgtggcctaattggatttggagaacgccttccctggccccttttcctcagacagatctgctctgataggaaccttttcaagaaagttactgttgtttcaatgccactccttacctgtatagaacatttccaatacattcgctcattgaacttaatccttgcaactgtgactggggggtagatggctctgtttgcatacgaagaaataaaggctccaggaggttaaatcgggcaactttttagaactaaatcagtctctgtaaggcctacattgctaagataccatttcagctctgaaaatctgcttcagggaagtgagtggatgaggccttcctgcctcagctactctgcccgtctgtacatcttttgtgtctgcctccgtaccttattcagttattttcacactaaagtaagtagaattaagactgtagttcagatgctttttctttttctgttggaaactgaacacactacagacagtgaaaaaaggtacatattccattttctcattgcctgaagatctctgctgatgctcctggagaatgactttgggggctttagaaagaatattgccagtccgtctcggcaaggagatgatgggagcgctttatatggaggctttacatgacttgtaaattaaatgtgaatgagggcagttgattaaaattggtattacagaagggccctgctgaggtttgaaaacagctgagctgctgatgtctcaggcctttccctgaattagcactgcggttctccaggatatcagcaaagagggcaagtaatagaagcccctgataaggagcgtcagccgacaggcaagcttgggaggctgtgggaatgggtctgcccccagcttcacagacctcttcctccagcctctgaatcccattagccacagcctagaacattagctgagctgcacaagctcacccacccctgtgccagggggccctgacctccctccatgccatg

SEQ ID NO: 101590 - DNA, 1489 bp, Homo sapiens
ctttcttttgtttttaagaaatagactgaattcagctgttaatcctctagtacagtatccatgttaaaatgtttttccattgcatcttttatgtgaattcaaaggtcagaatttattgtctgtgatattgagaccatgtgtacaagaactactttttgcttttcatcattcactccttagcaaacgtttcgtaagtaccctctgtctgtttgctactatatgaggtgctgcgaaattagtgggcgtggctttttatatttttcattcgtgtgtagcctaagtaaggtgactcaagatgatacaccgagagaaaaatgcaaaatatatttggttctcatttctgttgctgtcgtttcctttttaaagacgatttatcaactgctgccatttggaacttcctataagaaactaaaaatgatctatttcagtgttcctttcgcctttcctctgctttctgaataaatggtttcagtaacccatgctgttctctccctattctacgtctttctccctatgttgaaaaaagattcccacagtttctgatgtgtgtgtttatagtcttcaatgtatgttaacatgttaggaactgagtatcttaagagatgtcttagaatgctttagttttcataatttgtcctttatgtatttttcattgtatttgctgttttgacatggaagtaatttaaaaagttggtgcaggaaaggactctttactgttgcacattttggttttctgatatgtaataaattcatggcttggcagctgacatgatgtttcccagagagaaggagatgtatttctgcagggtccagaccaaaagagccatttacagcatgttctcccatgttccattatcagcctgatgaaacctgccctgccaaggcataaacttttgtactagctgtctccatattatgttcaataaattctgtgctctgaatatatttaaaggatgcttcagtgtaaaattattttgaatggatggcttaattccattgagataggctttggagtgtggactagagcccgttgctcgactctcactgctttgtaggaacatgaaattggtttaaattaaaatcagagaccttttgcaccagaaaacagatctaagagatcacttaggtcaacgtcttcattttactgatgaggaaacttttgcccagagagcttaagcacagggaccagcttgcatgtcagtgttttcctattgggggaagtgtgtgtcatcagtgatttacaaaggtacccacctgtgtaaattgcttccagctttgaaaggtgggtggattctgtcttttaagtagtggttgacagttctccatcttacagtgttaccttgttaaaacgttaatgaaaacaattttaacttcttttggaaaagtaaggtgggcaaatggtaagacttcacacaagaccaaggggtacacagtatacaaaatcaggtttcctccattcccaaacctttctttctccagagatatcctg

SEQ ID NO: 101591 - DNA, 1840 bp, Homo sapiens
ctcccgctccaactccccgcgcccaaaacttcagttcttggggagcccaaatttgcctgccgcgcaacttccactctaattcagcgaccaagggccctggcagcggtttgcagcctgggggccacgctccccaggctcaggcctgctcgttggcctgctcctagtgcctggacccagttgggggaggcgaaacagggcgcccgaggagcaccccgggagagggcggagcactcccgtgccccggggcaggagtgcagggagctcccgcgcccggaacgttgcgagcaaggcttgcgagcgtcgcaggggggcactcgcgagggacggacaggaagagggccaggggggaacgccagaacccgggaccacagcacggaaacggtccggggctgagctgcagtcagatccggggatggagggagccggagaagaggagtgagaaggccggggaggcaggccctgctgtcttcctgcaggccggcagcctgctggcagtggaggaccaggccgtccaggaaaggaaggggtcaggaggtcgggcagggcctcagcaggttcagacaagtccccagaagggagctgcaggcgccctcgagtccaggccccaagcctggctccggttgtccaaagagggcctaggccaggcctctggtgcggaaactgagtcacagccagacctcagggcacggcctagacgcttacgagccaaagttaggggtagagagcagagacctccggggggtctcagggagtagggggcttcagggcctcccagtctagagccggattggcgagttagacgcttgtagatccaaggttggattggggtggggtctctgggacgttggatcgctacgcaaggattggggggattcaagtgcttagagatcgaagtctgccctgggtagggggagtcagacaattggaaagcctaggtagttatttggggaggggtctctacgccttggcgaagcgcacagctgcatctttttggcttgaggcctgaggccttgtcgagaagcttccgtgaaagggtgggccagccgggccacgagaaagaaagtgaataaatcaggaatataagtgggcggggggcccctgagaggggggtcgcaaagggtgagacatggccaccaggcgtttaaccgacgctttcttgttgttgcggaataattccatccaaaaccggcagctgttagccgagcaagtgagtagtcacatcacctccagccctctgcattcacgtagcattgctgcggtgagtctcctggcggcctctccgacacacggaccgtgtgcactgcggctctgcctgtttgtctgtctctgtctgtctctctgtttaaaaagagaagataagaataataagactaagaataataagatctcttggctagagtcagggggcatctgtagccctggatgaggaagaagcggtgctgtgaggccgcagctccacctctgcccggtcttctcctcacttccgcagcacccccccccccgcaccccccgccttggcgtcactgcgctacaggccgcctgtaatttacatatgttttaacgctaacattgggaagcattgggcctttctgaagcctttttgtttcgttttgtttgaagctcccctccccccagtaatgagcctcagtttggtcctaagggctgggtcgccggatcgtagacccaaatccttgcaaaatgaacgactccctcccctcaaagaggagggagttgtgttgttgttttgttttgttttgtttttccgcccgttttcttttaacggccccgcagccctctgtgtggccttgttccctgtgaataattgcctcactgttcttcc

SEQ ID NO: 101592 - DNA, 1268 bp, Homo sapiens
ctccattcgaactttttaaaaaaagcctgaggaggtatatgtgaaaattaaccccgtaaaatagcactttttttttttaattaaccacaacctttagttagcctagcagtagcgttttttaagggtggtcctggaaaaattactgtttggggtttgtttttaatgggggctacttttccctttctgagcctcagtttactgctctgttaaataaggggcgagtctggatgatctataccagacagtgatcgttagctctgtaatgtcttcaattgaaaagtgaagttatgaaactggctgtagttcaggctacctgctgtaggcagactaggttggaatagaagcagcgttggaacaggcgggaaatagccatcccaggaccacattcttgggggttatacttgatattaggcaattttggaacattcatttcacctcttagggactgtattgccagtttatttttttctttatggctttatctaaatgcttcaggaaaattttgccatatgtcatgattatcatgtctacaaagacagtttctcctttttgtaagtcacaggtggagaatgtctttggccatataactgatagaaaagtcattttaagccgtgtgagcggtttcaggaataaaagcatgtaaactcaggtcaaacagcctagaactagggacagagtgtgtgtgagatttcagttaattaagaagttgaagggttttttttacatttataaacggaaaggaattacattatattgaaataaatgtaaagatgtctggtagcatagaaacaggctaattctagcgctaattttgaagaagaaataatccaagaaatcgagtagaaattggatgaattcaattccttaatggaacttcagtaatgttaaataagaactgcatgttccttaaatgacttgattttgtgctgcctcaaaaactactgaaactcatattaagatttctaaggtatcagttttaattgaaaaacatattgtttatttttcaatttttaatcattaaggttcaaaataccctgaacctttgggtaacatgagggtttttttttttttcccgattaagtcagacagtttaaaaacctagtatctgagacgggaagctttttaaaagtgcatctctgaatcagaccactttagaaaattattttctaagttaggcaattttaaaaaatatttaagctaagcagaataattaaaaatggatagttaacgtatacagtttggaaaaatagatatgtcagggtatatac

SEQ ID NO: 101593 - DNA, 1268 bp, Homo sapiens; identical to SEQ ID NO: 101592

SEQ ID NO: 101594 - DNA, 1268 bp, Homo sapiens; identical to SEQ ID NO: 101592

SEQ ID NO: 101595 - DNA, 3123 bp, Homo sapiens
atctttctcagatcattgaaagcagtcatatcatttaaaatatccttatagtcaatccatactatctcaaaaataggttttgcagtctaacaaacatagtttgcctgaattcaaatttaaaaataaaacacagatttatatattttaattgtgttaaaaaatggcatgtcataaatttctgaagtatttagggttgaagtgttacatcttcactttgcttacaggtgattcgtaacaaaatctattctgcacacagtacggcgaaatgctaacaagactaaatagaggttatgattttttcaacttttctggaagttggaaaagctttataaacattttgaagcaaaagccatgtttaacacaatttgtaaaatctattgagtaactcttagcaatgcttttcactgcatatctagctcacaaaaaatttaaagccttgtttctgacttgtaaatttcaaagccatgtagcaaaccaaacaaaatcgtatctgtcaaattttgaatatggactaggtattaggtgacattaaggaattaattataatacattacatttgctaattttattagagatgcctactgaaatgtttagtggtgaaatgtcaaggcatcttacctaagtccttaaacccctccaaaaatagaggaagcaaataaggcaaattgttactcattgttaagtctagtgatgagtatgtgtgcgacattttaccattttgtaggcttttctgcatgtttgaaaatttttaaatagaaacttaaagtaagtatatttgttatagtaaagtaaaacagttaaaaagaggcaatttgtaaatacatgtctaacactcaggcaatttgaaaggaagaaattaaacctaagtttaacttaatttaaaaaataataacctggaattttaagtttccaattagaagaaaaagctgtagactttgatcttgatgcatttgataccaactaaaaatacacctaaaataacagactttttaaaaaaaaaattgtaatcctgaattttgacatcttatttcaggaaaaagctgcagaaattaattgcagagtagtgtgtatcatacacctcaaagcaaagcacacctaaagccatgccattcaaaaaatttaaacatgcattttttgcatcctagtttgagggaaaaaactagaatttggttgttgtagtggggttattgtgtgtccctgtgcgtgcatacagggttttgcagcattcaggcaaatatgtcaaataaacaggaatttaaggaggatacgcagtgaccagataaacacaaagcctcaagggccagaaggaacctaaaggtcatttggcctaatgtccccatttgtgataacccctcatgcctatcttatttggccatggtgtatgacaatgatggaaaatgccagcagctccatgatttttaccactaaaaagtctttgcctgttaatcccaactatttgtgtcctggggtcctgcttttagttctgttccttcgggtcttccttctgtctggtaaccctgcagccttgttacccagaattctttccaggcctagcattcccggctcagagtggttatgcttttttcctataaatgatgtttagtttttctgtatcctttttagatttcagcatccagaactgagcaaaattctacttttttgtgttcttagttgtattaaagttagtaaaactaattgtaaaaaaacagacaggtttgactttatgcactcctaacaaaatacagtcgtatttcccatgcattttactttggcctcagttttgagtgccccatcacgttcatgcctcagggcagcatgaaataaaggaaagagcactgagaattgaatctgagaattgaggcctaagtcctgttctgctgcaggctcagagtgtgtccttaggcaagcctttaatcttttcggacattttttgcctcatttgtaaactgaggggtttgggttaggtgatttccagcagccctatcgattcaacagtattttctcaagttctgttttaatacattgtttctcctgactttagctttaatttgaaaaggagaaattcatagtcaacagtgttgtagctgtcagtccaaggttactgacagaaatccttagaagtagccccagtactgtgcaaaagtaactttcacattattatgccagccaagtgcaggttttaaggtagcaactcattcaagcagcttggctttaggaaactgaaatggatttatgaagctaaacaattattcaaaacaaattgtaaagtcataaagaaatgaatgaaaggtagatattgagatgctcttctgatctgatgaaattctgtatggatttgtgtggtttccttcgatctccgggaatggatctaatataggggttggagctactttgttagtgtttactgcctaatctatactctgctttaaaataatgcataatctataattggaagctagcgttaattggtcttagattagtttgaaacataagcacattatttttaataaaatgtgtgctttaggaaaaaggaaattaaggattaactatggttataagaaacctgaggtccttattcaggcttgactacaatattagctaagatttatggagagtttactttgtgcctggctctgggctaagccctttccgtgtgtaagctcagctcatcttcacagtgctctatcaaataagtactattgtttttctcagatacagataaggaaacagattttagaggaggtaggaaactggcccagtgtcacccacctgatggctgggggctgtgattggaactctggcaaatctggcttcagagccccgtgctcacctcctgggccactctggtgttggctgcattttcagaacttgtgctgcagatcctggaaaatggaaggacctattgttttaaaacaattttttttcttgcaataggctagcatctttctttatctcactttatgaaccttacatagtcaattttaacttgcagattgaagattctaagttttagtacaagctgagtctgttggaaaattagttctctgtctttagaatccaagtatgaaatcattatatatttctctttagatctacttgcttttctgcttttaaagattccat

SEQ ID NO: 101596 - DNA, 3123 bp, Homo sapiens; identical to SEQ ID NO: 101595

SEQ ID NO: 101597 - DNA, 3123 bp, Homo sapiens; identical to SEQ ID NO: 101595

SEQ ID NO: 101598 - DNA, 1661 bp, Homo sapiens
gaaaagacttatttctagccctagaatcccatgattctgatttcacctcttatcaactaataattgtagaaatcagaagatcagggtgtgtgtgctcggttaataatccaagagcataggcacatgtgcagcagagattttaaccgaggtttgcaatagtacatcgttcaaagattaaatgccagggagccgctgcagaataggaagaagactgagatactcaagttagggattttgtcttgcatcatgttttattaataaaagattttaatgttctcttaatgttaagcttttaaaaaataaaaacattttttctttgtaaagtaaaaggtaattaaatcagctttccatttgatttattaatatcgtctagtactactattatggcagggtgtgtatagagttcttttttgctctcatagaaaattgtggaaggaatgaagaggatttgcagcttttcataatgtcatctaattgaatttttacgtggagtaaagtttgattacatttttattgctatcattgtttaataatattttgaccctgatagagcagcttcatttgcactatttttaaataagaaagttatgttttattttctaaatttactgctaaacataaaaaaacacaattgattattgaatttcaccactaattatttcagtgatcaatactgtacaaaaaaaagacctagttgtttagattatctgtcattagtaaatgtctgtccagaagatagagttccatgttgatctaaaaaagaacctttacttttcaattgaaacttaaccctctggtgtcatgcttctcccttccccctccccttaaaagaaaaaaattattcttaccttttgttttgtctcgtttgcttgcttttataagagccttatgaataactgtatgctttctagctaataataatacataccaagagatggtaagagtttttcttttattttgccacctgtgtctctctccgggaaagagtggtttctcagctctcttactaccagggatgaagccgtgtctgcgggatgtaatttgcagagaccttacatatgtggtcactcacatgttatctgaatacagctacagacaatttttgtgggtcatttattttttaattttgttgcatttgcaggtctgatttacatgttaaaatatacatttatttaacatgataaaattacattttagctctgctctcttattttattttcctgagggaaaatagaatgtggtattgtatgtgatatttggtgtttatgaaacagattaacagcatattttagtgaaaccaaagcaagtgtgttttatctgtttccagtgtattttaatatttacagtcattttttgcttgtttcctagctcattttcaaaacaaccacagtaaataaaaattaaagcatatattgatgtagcttaatttaaaaaaaaaaaaggagattttaaaatgccttgcttagtggatctttatatttagtcagcttaaaatctcagtgttttctcaactgaccatgccttgtctgtctgtctgtcccatgctgctttctttgtgctttccccaactggatgggactgatggggacaacatgtctcttcaggagctggacgaggtattgtgttttgaatatttttatatgttgggtaatttgagttta

SEQ ID NO: 101599 - DNA, 2805 bp, Homo sapiens
ggccctggagagggcttgggggcttggagagcaggcgttctgagttaaaatagatgttgctactggctgaacagtttgaagatatggagcttatgacctcaaaaggaagtgtataggatgcgagggagggtaacaaattatggaaccacttaggttgaagaaccatttgaataatgttccaaggaggggcacataagtggtcataattacttcggggtctgctgtctgaaccgatttccagtctttcctacttcctttttcaggcagcaagttccagaaactggctactcactgcatgaacttggcaggcccttttgcttttcttatgtttcacctctaagggcttaaaagggagtcttcacgctctgtgatcagaggccctgcgtagagagcactatctcctccacgctcaccccagtgctattagaaatgcaggttgctgcctcatcgtgggtgcccacggccacctcatttccttgtgcgtttcacttgcctcttttgctcttttgtgcagtgccgttatctttttcatgaagtgtggcttccacaattgtctgtgacgtacattttatttacctcgtgcattcattccactcgtttcttgtcggatcactcagctggttgtgattgtgcgttcaggactctgaagtgccaggtactggcctaggagcagggggtgtggttggggacagtgtccagaggcttctttgaagctgacgcagggcctcacattggcatctctggaaatagtgaacacccagctccagagtggattagatgttagccacccctttataggggaggcctgagcaaatgtccctgagtgaatatcacttgcatctcccagagtaaaggcatctgacggcctcacttcagaggcttcctgcagtctgtccatgtttgattgtcattctcctcctctagcctgagtaccctggagatgtcacttttccttctcagaaaacactaagtaaggtgttccctgaggaggacccgagcccaccattggttctcttacccagggaagtgtctggccctctcctttgttctctgtctttaatctacttcctgtcttatgacaaagaaatctctgggagtttttaaactcaagaattattttaaaagtcacaagataacaaatgtcaagcccccaaaccacactgcctggaggactgcacatctgggagtgcctgggccgggccccagtgtccatgttggtgaaatagggagcggcgctcctctgaaggattgttcttgggactggcatgggccaggtcagtagcagtgctcagtacagtgctcacagaaggcagggagggacggattgctcccctcctttttcttcccctcagagtatgtatgttagttgagaaaaaaggaaaatcagtgaaacttaacaacagtatcagggtgatgtgattctcaagtgtttttatctctatattttttgtatcatttatttttatttttttgagacagagtctcactctgttgcccaggctagagtgcagtggcgcgatctcggctcactgcaacctctgcctccccagttcaagcgattctcctgcctcagcctcctgagtagctgggactacaggtgcgtgccaccatgcgtggctattttatttatttatttatttttgtattttttagtagagacggagttttgacatgttgctcaggctggtctcgaactcctgagctcaagtgatccgcctgccttggcctcccaagtgctaggattacaggcgtgagccactgcgtcatcctatgccattttaaaagtatttattttgaccatttactaatttcataattagaaaaggtaagcattattttaaaattattacgggtttagaaaaatgtagtgctgacatcacttttttcttttatccacatgcttattcacttctccaacaactcggatttcttaagcctaattgtctattagcgaagtagtctgacttcatcatacaggctcccagagtttcacgtggaagtgtgagttgccagtctgttgattttcagtgtcccttctgggctttccaagtgttcattgccatagacagtccagaattatcggtattgttctcattaccaatgcgttacggctaaacttagttgatttttttagatggggaggaggtgtagctgacttttccaatctccacagaggctttgctatttctgtaatcttagtctacactaaatcagccttcagggaaaggcagggtttttaagagtaggagggccatagatttggaacagcaagatttataagagagaatgtgtatgttctttccatagatggagaacttgtccatactggctggtactctttaaatggacaaatgtcaacatttgaagtggatcaaaggcaaaagatacctttagtgagactggcaggaaagccattgggtgtgctgttttgaacatctgttggattttttctgcatttctctcaggaaggatggctctaggttagggtagcggaccccagtagttcttggagagaggaactacatatcaaagaggcaagaattcttaattctcttaagtacaatttttatttaaaaaatatggatttttttttttttacttcagaagcacaaatttatttatttatttatgtattgagatggagtctcgctctgtcttaataaaaggctggagcacattggcacgatcttggctcactgcaacttctgccttccgggttcaagtgattctcctgcctcagcttcccgagtagctgggattacaggtgcatgccaccatgcccggctaatttttgtattttcagta

SEQ ID NO: 101600 - DNA, 2805 bp, Homo sapiens; identical to SEQ ID NO: 101599

SEQ ID NO: 101601 - DNA, 2805 bp, Homo sapiens; identical to SEQ ID NO: 101599

SEQ ID NO: 101602 - DNA, 1736 bp, Homo sapiens
cgagctgggcctgtggtttgtccccctgctttttagtcagtgtgtcctccacagagttgtgtacctcttggtgactttggagcaggagtgttgaggaataaacaagtctgcctctgagtgcttggcacaggccctctctgtgcctgctctgtagagggtgaggtctgcgcctctctgtccacggatggtcagtaagagaggatgatctttactgacactaacgtcactcactggcggcctgtcctatagtgcctggtgtagttggtgggaaatgaatcaaactactgtgttttgttgttttaatctgatggcttgtcttgattcattttcttagcaaattgcagttatagtttatgggcctgtggagtgattggcacctttgagggtggaaggggtttctggagtcagccgacccaggtttcagtctgtcacataatggctctgtgaccttgggcaagcgacttaacttttctgagtttcaatttccatatttataggttagaataatagtttctaactcacctagtttttatgaggattaaaataatgtcaagaatgtaaaattcctattgatgaactcttgaaaccaaacagaaggtagtggtggtggagaattaccacttcacggcccgggagccccagacagtgcgggtttggatgacacaccatttgtttaagaaatgacactggccctgcagcatccgtgccacgcttgagcaccgttgggcttaatcacggctcctggacgtgctgggattagtgaatggggcctagtccttccagcgtggtcattgcctaagatgcgttccctgagtggacacgtgccccagagcacacagaaagcctgaagcagatggtggcagaaccactccagggcatgcagggaggttgatggtgaagataccaatttgcttttaagaattttactgtgaactctttaggatttagggcctattacttgaagtggtcttttattctaagtttttctttatatgatatttttcccccttcatctgtggattttaaaattttgtcttgttcctttattattagaaaagcaaataagtatttaatgaatgaaaaaataaatttagttaaatgcaaggaagagggaagaaaagcaatatgaatttttcacccaactctacagtgtgatttagaaaatttccaaagtattatctataaagggcttttatagattattttccattatattttgatcatcatttggatcttttgaaactggcatttaaaaattctgagctctggagggcacctcaaaatcttttcaacccattcactgcctgcaggcaagaaaacagcttaaccgtgccaaacccatgatttccctctgttttttgtgtgtgtgtgtgttttttttttttttttttttttgagacagagtttcgctcttgttgccctggctggagtgcaatggtacgatcatggctcactgcgaccttcgcctcttgggttcaagggattctcctgcctcagcctcccgagtagctgggattacaggcataagccaccatgcccagttaatttttgtatttttagtagagaacggttttcaccattttggccaggctactctcgaactcctgacctcagatgatctgcccgccttggcctcccaaagttctgggattacaggcgtgagccaccgcgcccagccgatttccctcccattcttaaaagctttctaccgcagtgtgttatatagttaaaataaa

SEQ ID NO: 101603 - DNA, 1736 bp, Homo sapiens; identical to SEQ ID NO: 101602

SEQ ID NO: 101604 - DNA, 1736 bp, Homo sapiens; identical to SEQ ID NO: 101602

SEQ ID NO: 101605 - DNA, 1059 bp, Homo sapiens
attttgtagttgtttcatttactgcctagttttttttttcacttgcaactgatcacaagaatcattgaggttcatgccgttctatcacagtactagtagtaagaggtctttattttaaggatcttttgttgactttttcattacatttctatagccagatcaagtcaaatttacgttctgaagtatgtccaaggaaattaagagctggtgcatgaaaagataggaaaacaatccaaatcctagcagttatcaaaagcaagtttataatacaggcaagtgcattcactcctttctatatattttcagggagcaacatttaagagagagtaaacattcactcctttctgtatcttttcagggagtaacatttaagagagagtaagagtatttgtatctaaattggattagaataatttttttcatgtccctttactttcctgtagcttgctgatgaccgtatggcactggtgtcaggcatcagcttagatccagaagcagcgattggtgtgacaaaacggccacctcctaagtgggtggatggagtggatgaagtaagttccatgttagtttcatagcatcttgtttttttaagtaattatgacaatgtattttaagatatctgtcatataaacgaatttggctacacttgaatgtatatttctagaaatactttagctttaggttaagttgtctatgtgtgtgttaatgattttagctgtagttttaacattggtagtaactacctgaattataggaagaaattgaaaccccatgcaacaaggaagaatgtgattttctggtaatttgaattaaaagctgctcacacatcagcaagccaacaagtttgctgaagaccgaattctgtatgctgagtgtagctgatggaggcagaccatagcctgcctggcatcagtggagttctgtgacttcatttgcttagattcagtatgatgttggccggattaagcagaagatgaaagaattggccagccttcatgacaagcatttaaacagacccaccctggatgacagcagcgaagaggaacatgccattgagat

SEQ ID NO: 101606 - DNA, 1024 bp, Homo sapiens
tgccctgagcctcgggcttgttctcttagctcttccacaggtgccagcgtgccgtgcaggccctgccgagccgggcccgggcctgctccgagcaggaggggcggctgcttgggaacgtggtggcctcgctggcgcaggccctgcaggaactctccaccagcttccggcacgcacagtcaggctacctcaaacgtgagtgctgcccgggcctagtgaagggattttgagtaagaaaagcactttatgttttcttttttgccactattttttcatttagtccagtacctttcattgttagcttttgaacatgctcataccttgtacagtaaagggaagcctcctccccatgtgaaaccctggcttggaatgaaggcacagcgtggggtaccgaccaaggctgggggagggcaccaagatagttcagcatctcagcaaacaaaatttgttttgtgtcaagctgcaagaatttgaaaatcaaccaagcacattttaaaaacctgttgttttctggatgttggggtttgggagagctgctcttcaataggtaaaaagcagttgttattactgaaagccacatatttgcataacaaccaaagtgtttgagagcacctgagaaaacctccccagggtccttgaaacacttcctctgctggcaccacaggtttcacccagcagaccttttcttcccaaatagtgcaaagccagatttcagctctcttctcattctaatcaccctgtaaactgggttttttaaaattgcccttgcaatcaataaagtccccacatactccaaaaaacctagttctccctccctctgacaactggcatatttgtattttaattttattatttccaaaatttgattagggccatatggaattcatactagagatgcttctagagagaaatactgattttttaaaatgttttgtaacagcagttagattaaatatttctgcttcacttagagattctcagatggttgtgtcatttttatcttggcatcaagtgaattgtgcacatt

SEQ ID NO: 101607 - DNA, 1085 bp, Homo sapiens
ggccccaggaagtccgaatatggcatttctatggcagctgaaaccaataaggaaacctcagtctgtcagtacttctttctcgtgagctagatgtgatggcactaaccagcattctgccatcgagctcctgacactgcttgagggtgaactccagagccctccgtgtgtacctgcagcacacagggaaggaaaacatcatcttatggatgatgatgtctgtaatttgcatatctcatttttgacgttcagttttcccagttgctattgttgattgtctgtaactgtcatttattacctagggtacagtccttgacagaattgactataacgttgaacagtcctgtatcaaaactgaagatggtttgaaacagcttcacaaggtaatatgtctttcaagacttgggaatcttaggaactattttcaaataatcaagaattggtaagagggttcttttccaccataacgatcttcagcattcttgtgttgtccactctcaatacagtagtgtaaaaagggattcatcatttcatttaaagccaattgtgggggctgttgccgttttattgcagttaatgattccaggtgtatctcacacttaaatccaaaattgctaagaactcctttttgtgacagtaaattctaaagagattggagttctttcttttagaaaatatttcattcttttctaatgcttcttgttttaggaaatcaattgggcatttgctaaaatatgtgttgaaaatctgtctgcttgttgccgttgacttgggcctctcttgtgatacattcctgatgaattgctgatggagaatcattctgcagaagataaaaatctaatcttctctttaattaccacagcatatctgtattaccttgagaaaagagaagtttgttgaagtgagagtagtaattcttttattctgtgctaataaggtagctgtttcagggatgtttttatgatattctcttttaaaaaaatagatggaaagcatcttaggaatcttatcggttataagaaacatgcataaacggctgagactctcatatataattggttacgtattttctttaaaaggaatataac

SEQ ID NO: 101608 - DNA, 2318 bp, Homo sapiens
tcatggggctcttccactcctggtgattgaattccgtgggattgattggagggattacaatcatgtagcctgtagcagagacctcagtcactgtgcagagagatctggaagcctcattctggaaacgagtgggacttgatttgggattttggggaaaatgacggccttttttccctcctctttttgtaggcagaacagtatcaaaagaagaatcggaagatgcttgtgattttaatattatttgtcatcatcattgtgctcattgttgtcctcgttggcgtgaagtctcgataagtggcattgggttttcgtgtgtgccgcgcgtgtggatctcccgggtgtgaggggcttggcctgcgccccgccagctgcccgcagaggtgcagcctcgaggaatctgagggcgtcggggcagcgaacctttgcatccacggactcctccttccctagtcctgctcaagcggtccggggaatgggtttttgtttttccttcattgttgagaatttaaggacctttgatactgctgcacaatagagattgagttctgggatcagttataatatatattttttttagaaagagaaaatgagctgagagtttacaggcactgcagaagctgttcagtattatatgtgtatatgctatttttttagcagccatgtctgagcagaatgttaacataatttttggaaaaattttctttaaaccatctggtttttaagaaatttggtaccaaaaattgatgagtagaggcaaaaatgccccttcatctttctctatatattttccagttgaaaacaaactaagaagtcctttaagaatttataatccgttccccattaacttaatttagcttttccatcactgttaatgatcagagtaacaaagtgtgaaaaataagaaaccatcattgatgttaattaacacatttagatgggccagttaaaacagcttcataagttttaaattaattgtaaatggaatattcctcatttaaaatttttgcactgcattttctactgtaaaccaaaagaggttactaagcaaaaccacctaaatttaagttggtgatttaaatgaatctcacattaaaagaaagcttgacagtgttatgaaagccaccagactcagccagtgtgtccccatgggtatccccagccatccttgctcaatccattacttatatactaactacataatgacctgttcaaaccagactctatttaatgaactgtgaatttacacagaggccattttaaatgggtcaccccatttaggattagtggatctcaaattattaaccaaacatcactccatttcaaagtaaaatattccaccagcgatttgatttattggctcttccattgccactgagcaatgcccaggaagcaggcacattgccaaggactgggggcatcttgactaggaagctcctcgtttgtgtgagcgtgggtcagaccgccaaagtaggacttcatcgtttacctacctattatcaatatggtgcttgaatatattcctataactgtagaacagtgtggaaagtgatggtaactttgaagttgttcatgttttattggctttgttttaattgacactagtagagttttaatggtctttgtgtaaattttaatggcttttccattgtttttgcttctcttaaaaagtttaagaagaatatgacctcattaaatgtgctgttttatttggaccagtcacacaaaatgtctctctagagttgactttaaagttgtttacagaaatttaaactcaattccagagattgaagttgtccaaacagctcatgggcttagtgtccaaacccctgcccagccttccctttccaagttggtgccacctccaggtagccattggtggttttcctattactgatgtggctgtggaatgataaggtcctagaggggccctggcatttcaggaagcggacctggtattccctgacaaacattgcttaggaaagagggccggagaataagaagccagcacctcatcagtcagccctgcaatgtgagacttccgtagctgttgagagtcactgcaggtgttctttcatcccatctgattttaacccatggttgagacgttccaagttagatctgctgctcttaggtgtggggctgtccacattagggaacttgcctcaaaaacagtccacagtggcaataccggacttctgttcaagctttttaaagtgctgagccttacaaacccctgaaggaaagtgaccctttaagagaggatcatctttttttatatttattttcaccaaatagggtgatgagggttggtttttgtt

SEQ ID NO: 101609 - DNA, 1023 bp, Homo sapiens
tccgtctcaaaaaaaaaaaaaaaaaattgttttagcgctgggtttcccaaggtgggagagacagacccagcctggagctggcccctggcctgtgtgctgacttcttggggtcctcaaaccactgtatttttctgttgagcctgtacttggggagagatcagtagcatttgaggaagtaagagaaaagaatcatggtacctcagggtttctttccctttactcgctggcagccattgtctgtgggcacctcatgtttttccacactctactgggccgtggaggtaacgatcacccaggccagtctcctctgcctgggatgcgccctctgagaggaggcctagcagggcaggctccctctgggcatccctggatgcagcctctggacacatgcctcctttaaagtgtccgggtgcagctcaggttgagtggaggtagaaggagaaacagacatgtttaccacgcgttttccaaagctcctgatctttcccaagattgtaactgaaaactgctgtctcttgttttgttcgttttgggggtggtggtgctggctgggccatgcttgtgaagtgatgtgtgtctctgatttaacggattcactgttttctctgctaattgagagagcgttatttacattatttatttgttttgacacaagtgctttcagtgttttatcctagctaatggcttcttaaaggtaataaaacccttccaacgtaattggtcagataaaactttttttcttgtatgcttaaataaagcaattagtgaagcacttctatccaaaatgacttttttgtccttttttaaaaccaatttactgttactggaaactttttgtacaataaagcaatcacgcagattaaagaacatcctgcaatcctagtattaattttaacaatgggttcatgttttcttccagtgcatttgtgttaggggagggcttggccagttttgtgatcctctgggcccctgactctgttttgtgcctgaggcctttgcctcagtgtccgaaagtagatctat

SEQ ID NO: 101610 - DNA, 1030 bp, Homo sapiens
agcagagacttttagcacgtatgaaagtgcttctgatttaggactcggagttagatggtgggtgtcagctgcgtgtgtcttgtccccaactccatgccaccctcgggcagacgtcatggtaccagtctatggccaggctttcttactacacaaagagacattccatggagtcaaatggcagagacttgtgtacaattatctggtcagttgaggcaaaagaaaataatcatttgtccaattgtccaaattagctctgtggattgtcctgaatgctcggggtaactgtgtggttctccacttcagttccgtaacctggctaagatggaccatttaaatgaggctccattcaacacaatgcacatttaaatgaggctcagttgcaagagaccactgggcttagcgttttcaatttgtcaactataattctataattgcttttagctaatcatccaaatgattacatgttgtaatggaggcagaagaccctcgtatgcatcatttggtctctttttctcagaggaagtgctgaaggatcaaatgttttgtgtgtctctgtgtgtgtgtgtgtgtgtgtgtgtccgtgttttaacttggtgttctgacgcacaacaccataatagacctccattttcatcaacggtgggggaatgagaacaacgccccccatcccaacatcccccttttccagagggggaaactgagacccaagtttccctcttgccaaggccacaggactagaactagaatcgtcagttttctgatttccagatcaggactatttctgcttatgccattttaatttttcatttctttccataaaattaaatgaccttcttcaagaaagatttaatggtcaagatgcgatttggtaaaaagcttcctcaaggatttttttcttattacaaagatgagactggctgaggctgagagatttgcaagcagtggtatgtcattatccccagctcagttttttgtgtaattggtgtgaagagattgctgctgatgaatcagcctgctgctcaacagaaaa

SEQ ID NO: 101611 - DNA, 1030 bp, Homo sapiens
cctgtggcctcatcctcttctgtagcagggactgggactgtgtactgtgagtctctgctgagcttgactcccttggacgtctctgaattctcagagtcttgcacgatgcctggcacatgtggacagaatgagtggtcctcctctcatggtaagggacacccttccccagtgcagcatggctgtgtgttggtggagggcacccgcagccctgccctccctcccacaggagcgctcttgcgtcagagccccgagctcgccgtggtctggggtcttccaggtgacacctggcctccttggaggcaagtcacacagcattgacgcacttctcagacagtccttgtcgagtccccacatgccctcacagacagagaacccgctgacaggcggcagggacggctcaggcacattcatatcagagctgtcaaggtccaggtttctacctttgaggctttggggtttaattacctcggcagggcgggggaggtggccaggctgcagtatcgacccggcgcctgctgccctgacattatgagactagaggcagggatgataaacttgctgctgtcctgcacccccgcaaaacagcgctgctcttctcttaatattgtctttctggtgagcaagggaggccgtgcaagcagccagctgtctgaagcttctgtgcctggggatgcacagtggggaacagggtggggaaggggtgcccgcagattcagctgagagagagtgaagctcccagggcagatgtgagacacacatgagaaggcaaagaatggcccaagccagggctgaaggacacatttttgggacccacgtgatgtgtgctttggtgcatgtgcccctctctgccctgccttcgagtgtgggctctgaagccctgccaggccagcagggcccatgttttcagttcctgggtggacacgtcagttccatgaggcgagacctccctctgtgtccttcccctccgtgcccagaaccgtgctgtgtcaagtgacagcactagggcagccagacccccatctgtcttgca

SEQ ID NO: 101612 - DNA, 1030 bp, Homo sapiens; identical to SEQ ID NO: 101611

SEQ ID NO: 101613 - DNA, 1030 bp, Homo sapiens; identical to SEQ ID NO: 101611

SEQ ID NO: 101614 - DNA, 1014 bp, Homo sapiens
ggatgtgactgattttggcgaagagttcacatcaaccctcaccatcattcaaggttgtgatgaggggcagagaatgctgagcctaagtctcgttaggtggtaaagccctctaagtgccagggagaggaagctaggccctgttctggggggcgacaggtggccagggcaggtttgcattgcggcagcagcccctcaggcttcctccctgccataagcacactaggaatctgcaatgggtgcaggaagcacgcaagcccacccaggtccctgaggtgctggccagggacctccagcaagccccagaggctccctggacctcagcttccttctcacgctgtgcggaggagtggagagagtggccctgcagacagacccccaggcggcgtggcagcccgggactgaggtcagggtgcccggcgtcaaagcacggggtccctgtttcaatgtcagagcccggccacagcgaattctgcagctccgggcatctcctcgggttccccctccgtgcagttactgtttgataaccccaaagttctgtcaaaacaaaagggagcctcaccatctatggccatgactccctgttgcttctggagaacaccccacttggccaatatgaggttcatgagttctgtgggtgcccaggaggcctggtgtgggggctgcccaggcctgagagctggggaaggtggggctagcgtggggccgggtgggggtggggggcttccgctgccaggcctggacctcacagctcacctttgtcctggtccctttgtaccacccgcagactaccatgccggggatgaagcgagactgcgggggtgctgcggccgtcctgggggccttcagagccgcaatcaagcaggtgagtgggccctgcccgccctctgcaggggcatcctgggtgtgcctcgtgggtgctcccctctcccctgtccgtcccgccacaggccccaccagggtcctacccgagtctccccagcggatgcttgtcccccctctgcccccaggctcttc

SEQ ID NO: 101615 - DNA, 3135 bp, Homo sapiens
ttcttgataggtgagaaagtgagccccacctgtgtggctcagcggtcagcacctaaggccgcatctccagttccacgacagaaacaccaggtcatgtgcatgggtggctggcgcacaccatcaacaccgtgaaggcatctctttgccattcctggtgcccccactggagcgggcgtctgaactctggagattgagaacctgggggctctggtggggcacagagtgcccaagcccctccccactagatggcacggccgcagaggcagtacggatgagcattcagcaccccttttctgggagggtcacctggggcggggtgcgaggacccctttgccctgggcacctgttggacctgagtccgggtcccagctgttctacctcacactgaggtcgtggtcacctgtgtgggtctgggttttttgtccgtgacaaaggttgggaccagaggtagatgggtttgcctgctctattgtttcatgatggaaacaatcctggttggttgcctggtttctgcttgggttcccattccttgccccggccctacaggatcagtggagcaccatagccctgcctcctttctctggccagccagagggcttcagaaaaggcttatctaagcctggcttcttgccctctgttcttgagggccctgaagaatttgactctggcagatggcttctctcagatcagacacaaaggccttggagattgggactccacacccatttcattgaaacctgctctccccccatcagaaaaagggccatgttttcaaaaccataactgcttctctcttaaatcaacaataaacaacagcctaaagattgcccgtgaaagtaagttccactgatggccgttctggccgttggaagcaagatatcaagttggagtgtgaccgcaggcgatcatgccgcaggtgagtgtgtgtgcgcctggtttcatttctgttgttaatcctttgccctgtttttctctttgtttttattccaaacctgtctgctcccaagggtccctgtctgcttccaagggtccctggaaccttctgcagctgtgcctctccagagctccgcctcattagtgccacgttcctggtttgaaaaccatagtacttcaacctcttctagatgggagttaacctttgccctctgaaagaaaggtttgataagcaaagagagtttggtgagcaagatccttgaggtaagagctgatctctgacgtccgctgggaactggctgctctgcaggtttctgtatcacattttctgcacatgtccattagaattggagatggggcgtatctagtgttgaataaaggcccggcaggccctcccagatgcaccctgtcagacagagcctactgtggattctttagaaatggcttgactcattcttggtggcgaccacaccacccacaggcacctaaaatgaaaggatttttgttagctggttaccaccaaaccacctcaggcaatacgtgggagactccaaaccagctgctgttaaaaaaaaaaaaaaggcagcagagcagtcatagaacagacccttcttactgctgcatacaagatgatcccatggaatgcaggcagccacagctttgtccacatgtgctctgtgtatctggggctgctaggctggttagatttgtggtcttcttcctcctgtggaggaccctagagagagccagcctgagccctcaccgttgttccttccccggcagcacttacagaatgatcctctaagacctcccctccagccctagctgggttcctaattttccagctatttaatatcttctttatgtctcagtgaatgttcccaggcagagtagccagacagactcatactgacagttctcaacagccagtcccatcctcctaaagatctccagaatcagccacatggacctgatgctagaggcctgtcagcactgggggacccgggagaagcagctcaggtcttcagcagaagcagggaggttctcccagtggttttccttgactgtgaggaactagcctgctgctttgctcaggagtgagctgccggctcccctttgatgtgctgcgtctgttcagaactaggcaggggtgcttcaccgtggcagcacttgagttaggcagtggttcatggactcttctcccagggccccacacaaaacactgttagcacagacctgccactcagatcaaggtggccagcagagccatcagagaatagccttcagaagatgaatggcaaggccagccggcagcacgtgaggccagggcagagacgcagtgaaccgttccatggcgccccgagcctgctgccaaggcctccttggagctgagatggaggcggggtggctgagaggcaagctggatgtgcatgtttgggaagagggctccgtagaaagtgctgtaggggccttggctggggaccacgtgagcccttgtgcggagagggcctgtgtctgtggatctggggtccaccacaggccactgagatgggacagggctgggaggattgaggagggaagatcctgagtgaaattgtgaaatcaggcccagcctcatgtgggaggtgaggagaaaggacccttccagagggccccccctcaatcctgttgtgcctaattcagagggttgggtggaggctctcctgaagggctctgaagagcgctgcacccgcagctgtgtgccaggagtggagacaggacagtcgatacaagaggggcccctgtcatgtcagctgctgagtcccctggggcggccgggcactggggaatggtgaactcgccgtgccgcgcctctgccacagtctcccgtgggtccccactgccgggagttttacctacctcccaccctcagccacgagcacctgcaggatgcggtgccatcctcgccggtgcccgctccccttccggaggctctctccaccctcactgacgcctcctcgggaaagcccccgctccttccccgacctcacagcatgccaggtctggggcttccgctggggggcttacctgttttccacccctgctagactgggagctccagggcaaggccgtagctgccttgcggattgttacgttgtccagcttgtctccacacgtgatacccagcaggtgcctaataaacttgtgtagaaagagtggtgg

SEQ ID NO: 101616 - DNA, 4907 bp, Homo sapiens
cttcacggtttttgccatattccaatactgaactgcacttcacacttctctctaagtcagctgtttttttatgtaaatacattggtttttaaaggaaaattatacaactgctattgaaagattaccagtatccctggcgtctggttaagtattttaaaaatactcatgaagacaagtgcatgctctggaaatggcagcgtggctgatgtccctccaggtgcagccctgagcacctccttgatcctgtccccatccacccagtctcttcattgacctgagaaatgctcatctggactctaggagagatggtgagagatggtcttctaggacacaaagatttcccaccaaaggggataaatgaggttttgctcccagtgtctggtcaggtgcctcttagctaaggagaggtaggaagagttctcattccaaccagcggaagcctgttgagtttcaacggggctaaattacttggggcacattttcttcccatgacatttgttgtctaataataagtcaacagatggagttgtcttgatctgcctttaccatgacatttgctcccacttcacgtgtttatgtttgcggacgcagccaagagacagtcggtagagctgtgtcccaagccccagcgagatgagcccgggcacttctcacttcctgctggcatgctctgaagcagtgttccagccagaaggcctctcacagaacccatccactcacctctgttctcactcccagcttttctggggattgggtgaggggagctgggtctgttctcccatagtgctctcagttcttgataggatgccagaaagtacaatgctctcttcatcaagttcaaaagcaggcaaaaccaagtaatgcatgcatgataaaatgtttacagcgagcatatgataaactcagcttctgcatttggtttcttctggcaggggagaccacaaggagtgggagaaggacattctgctagatgaagttcttggctgtgttctttctcgggttgggctgcatagggtcacaggggttgaatgatagtatttttaaatactaaattttaaaagtacgtattcggactgcctccatgggtcagtggcatgggacagctgaaaccaacccagggcatttgggggtgggcctgctgtgctatggcaaaaggaggttgttttgaggctgagctgctgctgaccagcatggtgggactttgctcacctttcttctttctatacaaattaagaaccctcagaagagttcttagcacatattaggccctcagtaaatatttgttgaacaatttttcacatgtgtatttttaaacttgttgttatggaaattttcaagcacaccaaggcagagaggaggccagcgcagctgcgctgcccgtcagcttctgctgctctggtttcctctgtcaccacaccttttcttctggagcccttcacagcaaatcccagaaatcatagtgtttcacccctggcagttttggacagtagactgggttcttctcttctggatttgtggctctgatccacctaacagttcgttcttcatgggttcttttaggatatgttgaagccgacctcttcctccccaaagagagcgtgtcaggaaaatgaagcctttctctgtatctccctgtgggggatttcctcgctgcataggtgtgtacttggctgcatgtttgtgctgggcattgtgctggacctatgtatcgatgatgagagaagaagcctgtggcctggggcctccatgcaaatgcaggctgatggcgcggttaggggagcagacccttgttcctgtgagcactaggagtgctctaaagcgaccactcatcttttgagccccctttcacgactcccaagttgatcattggtgatttcccccattgccaagtcagagtggacattttcagcagacagtaccccagcggactgcagctctgccccttctgacagaaggcacattgggaacgtgcagagcccacatccagggtgatggcagttgtcaccatccatgtggaaagacctggccccggccagctgctgggcctctttgcactgtattaatagcaaggccatggggcccactggggtcgggagacgggggggatggaggacagctgtggcggacatcaccgcatgctccaggcacgtgcgcccgtcacaggcatacagatggccacaccttgacctgcctctccaaagccccccaagcccctgccagccttctccttgtaggggcaggaactggctcgcactgatgacccatttgacaaaggagccaaattaagaatggcatgattggaatagagggttccagtggccccgtgttcagggtcagtttctgcttttattggacgcacaggcatgggggccgaatgaggcagtggtatttaaacagctggggatattaggttctatacgccaaggctggacagatatttttaaatgtcacaggccaaatggaagctcagttggcagcaggatggaggggcagggggatttggaggccactgcattgccgtggctagatatggccaggagagctgagtgggattaaggcttgggaagaagccagcctgggaagtgcccgtgaagagggagcagggaggatcatatgaggaaacagtaggcgccaggggtggcgggcaggcaagagcgcaggtgctggggccaggggcggacagaactgtgtgaaagcaccaaggacagggccagaggagccaggtcagagcccagccctaggtcgggaacacgtagggagcagagctggtggttcagggccctgttgtggcatcagagagatgtgagcgctaacctcagcaccctgctttccactccggggccttggggcgacttatttatctgccaaggcagtttcctgacttcagggaaggggccaggagagaattaagtaagaacaagcagcacctgacactcagaaaagtgtccctaaatgttcgccacctttattaatagtacaaattaatgggtgaccagcctccattgtgggatggagccggaagctgctctccaggcctgctctcacccagatacatggtatgtttcgaccacacaggagttcttttaaggatgaatgatgatgaccgccaacgtttaggtgtccgcagattttacagaagcctttggccatttgacttctcctggtctagtggagcctctagttttctggggcctgcctcttcctgtccatagacaaccgtagctggggtgcggccgccccctttcggccagcagcacacacacccctgtgcctgccaccacttgtgcctgtcactcatctctgagtggggcctggcctccttaggcatttgcacttgttctccctgcagtaaagtggagctattattatcttataagaaacaagggtcatcatcagaattgggcagggacccagcaactgagttctggccggggcctccttgcctttgctgtgacattggtctggaagacctgggctgatggatgagcattgaatggccgggtctggggagccatcatggctgcctgccttcctcctggtgggccccttagtaagctgagcagaaacacaaaatggctagggcagttaccatagccacttaacgtctgtgcatccctcggcctccctcattctcgtcgggatagggatgacttaggaaagccagaggaggcccaggctgctatgaaacctgggccttgcttttcagcacaaggatttcaagaggagaggaggtgagggaggaggggagtttctgttggggctgttgtgggcctcaggcggcccctgagttaatccgtattcgtattcagaattccctccttttccttagtgggtcagagttctctcttgctcatccaggcctcagagaagaatccatggtagttgtgaccacagctaggccttaactccttcagagccatgtacatgaaggctcagaagatcccctcatcttctgaagaagtgtgagtctcctcctgtaggcttccaagggacgctagggttagccatacttgcacagcctgccccacactcaggcttcttggcacagagaagcccttcctcttactgatttatggtgcctaccatgttctaggcattagagaaatgcattaatttactcttcatagcaaacatatgggaaaactgaggtacgcacaggtcagatagcttgcccaaggccacacagcaggaaaatcgtggagtccggatttgaactccagtggctggtcaggctccagaggtcgcctttcaaatgctgcctggaaaatgatggagctgatggaggagtccgaggtgatggctctggtgagtcaggagcctgccaagtcacaggagctggggaaagagcacactggacagaggggacagccagtggaagggccctgaggtgggaaagagctggccatgagctgtagggaagcaggaaaccagtctggctgcaggaagtgagcaggggccagggaaggagctggggtagctgaggaggcagcaccataagggcagcccacggccatggcactggggtctgattgcaagtgcagcgggaagccctgaggcttctgagcagggccctgctggcttgaaggtctccctgactaggagatgggattcttgtggcaagaagagagcggggagagcaggagctgagctgccccacattgggtagctggggtcttttcactgaaggggatctgatatggtttggctctgtgtccccacccagatctcatcttgaattgtaactctcacaattcccacgtgtcatgggaggaactgggtgggaggtgattgaagtatgggggtgggtctttcctgtgctgttctcatgatagcgagtctcatgagatctgatggttttaaaaaacgggagtttgcctgcgcaagcgctctctctctttgcctgctgc

SEQ ID NO: 101617 - DNA, 1208 bp, Homo sapiens
agtggggcggtggggccaggagctctgccatgttgagtggggtggtggggctaagagttctgcctttggtctgttgagaacaaggtgcctttaggctgcacgtgacaaggtatcaagacaaggtatcagacaggtagaaagatgttctaggtctcgggcacagtggaaaggctgtcatagaagcagaaaaagtctagtgctaagtgggagacaagagaggaacactccaaattgagtttccaaccaaagtcattatcaacaggagtcatcctggagctggatggcactggagagatcgagtctcagcccttttattttacaagtaaggaaactgaggcttagagaggtgggaccagctggttagtggtaaagccactcttagactgaatttttctagtcctagttctatccctcaattgtttactacaccaagcagagaatcttcccgtgaaggtggaacatgagccaagggctcagatgtcagcccccttgatatcagatctattttttgtcagcaaccaaatggacagttcacagcttcacattcttttcttgatcactttagaactgacattcctccagctccttattaaagaaagagcaaagcaagagctggctagaagtggtttggaaggtagaaatagactataccatgtctttagtaatcagcctggcaaagtccacatggcagccgggaagggtttggccaaggctaaagccagtaggacttggtggcactctctttttctcttggttgttccaaaagcaccagttattacttaaaattggcccctaaaataggagcattaaggtacaagaaagggaagttcatttttctcgagatcctttttcaagatgtctacactgtgactgataacatatcagcagcttctcccagccatgacttcttaactataatgtgtaactgcgcatgcaattatatgaattacatgtattatctaatagctttaaaatattcgataaagctaaggctaatgtctgctttgatgaccctgcaccagccacagttttcatacatcacctctcaaatcccccagaggttaccaacttcacaaataatgggtttccatagaggatgtcatcttgaaaaacacaaacatagtttcatgtgtttcattgggcttcacattgcagccttttcatctatctacatatcttggagaccctttcctgctgattcctgtagg

SEQ ID NO: 101618 - DNA, 8423 bp, Homo sapiens
tctttcctgcgctctcagttcacacaaccacttctctcctgcggggcagttcagggtgacacggaatcctcactggaggccccttacagccatttcctaggtaggtttttttttttttttttttttttttgagacagaatcttgctctgtcacccaagctggagtgcactgatgtgatcttgggtcactgcaacctctgcctcctggcttcaagagattctcctacctaagcctcctgagtagctgggattacaggcgtgcaccactacgctcggctaatttttgtagttttagtagagaggggtttcgccatattggccaggctggtttcaaactcctgacctcaagtgatccgcccgcctcggcctcccaaagtgctgggattacaggcgtgagccaccgcgcccggctcctagataggtttttaacaaaggtaactcagcaatactcattgggtgccttgcatgtgccaagctgtgttttaggtgctgaaggtagagtagtgaacaacaacaacaaaagtattgtattaaggaaaggatattttggattaatttgctgtgaatcaggagattgaatcagtcagaatccctctgtacccaccaacattgtttaatctagcttgaattccacatgagaaaatgattggatcagggctagggggcggtcagacaccactagatcgtgttgttgtactctgcaaggctgaagatttggagtaaatagtgccgctctttcttggccctagaaaatcaaatgatggcctacaggaggagatccctacagtgggagctaacctggctgctgcttttgaggtgtgcgtgtcttcagtctggccctccatgatgattatggggtgcctttttggccatagtgacaagtccaaaggcgaaacaactcagagcaaagccatcatcctaaaatccctgggagtatcaagaaggttgtttcacttaggacacatgtcatgggttgtggtccttttctccttcttgagtcagtatggggaatcttaaaaaaagaggctctaccactgggtggcccaccaggccctcctggtactggtacttctgcctggtgtctgaagagtcagtcaggtacccacagccattctcaccatgatggaacttaacctcacaccttcaacaccacacccgtattaaaaccactaagtgcagagttcataccccagtgagagaccagcaactgctttggatgtgttgaggttttcctttctgcatcttggctgtgtctagcttgtatcttgcactctgtgttagtttgtagcattaaaatagtgattgggctgggcatggtggctctcacctatgatcccagcactttgggaggccgaggcgggtgggtcacttgaggccaggagttcaagaccagcctgaccaacatggtgaaatcctgtctctactaaaaatacaaaaattagccaggcgtgttgacgcacgcttgtagttccagctactcgggtggctgagccacaagaattgcttgaacctgggaggttagtctgataaagtaggattgacttgtcaaaccccacaaaaggacaaatgtctatgttccagttgtgccctgctctaccacttttcctgtggaacagcaagggttttattatcacaggtgcctgcgtggctgtagtcactgtgtggatattatcatgggacactgggcaggggcatttagagctgtatatttcaaatcctcatctccgcttctgagtcccaactaatggggcacgtttccagagagtctgcctacactgacccacccactttatttcttctaattagcacagctccatcgacagcatatggaacagaaatatattattcaagctgatttcagggcacgttgggggaaaaatcaggaatatatgggtgctagtaaatgccctttgaatggaaactaatgtcagctgtcagcaacgaggtagattatgattctttagtgtacataagaaagtacttcattcttcagatggagtgcttttatgcctataaaggagatggcagcccagagctgattcactaatatagatacaccgagattgcctgcattattaaaaaatgtgcattacataatacatatatttggactagattctgcattagcaatgcgctttctttgcaagatgcattttaatcagcaaacacacatttaacaaaagactgcatttttgagccccagtcctgtgtagttataaatacatctcagtgtacattcaccacaggctctgggaggaaggagtgggggactgcactgagatgccattccatctcacacttagtgccgaggtcgagcaaatggagccgtacagcagatgctctttaaaatgcattacgtgcgtgactttaaaaagtgctcgctgcagagtgaatttcaaaaaggagcaagtgggtgatgaaccacctctgttgttaccgggctgaggaacaaggggctctctctgtctgctggtaaataaagtatgggcatatatcacttgcgggtctctgctggagggaggctcctaaaccagttggacaggaaagcgcagttcccagctcactacagtatcatacagtaagcttctgattcggataaattgtgaagaatattgtctctagctccttaaaggattttcatgtggaagaggccttaagatttattatatatggctctagagggcaaaattagaacctatcggtggtagttgtagcagaaagccttcagcgcaacccaaagaagaatctgacatggagtgggctgtcagaaagttggcgctttgtcagaagcaatgtgaagtcaaaggacaggtaaccacacactggagatgtttttcgtggtgtgcgtgagcaagtggggttggaactcggtgcccaccgcagtcttatcaggttagcctctgattccattgaaggcctctgtaggctgtgggagaagggtttgggggctctactgatggacacgatcctcccccccgcccccactttttactattttggaagcattgaaagtgcaagtggctcagtgacaggaaggagtgttggggtggcagttttaagacagggcaaacagatgtgtgcaatggacccagcggcctgtggagctttcctcaccaaggcagggcgtggaggctctttgctccacaactcatcacttgttgaagcaaagaaatgagtcaagtccatctgttaattacattggttctctttgcctcctctcctggagctgtctcggaaattacaaatgaaattggctatttagcaatcataaattgagccacttctatgatcaagacactattccgggcactgtggggagatcgaagtaattgaggatgagcaattcctgccatccaacatcacacacattgatgtgaagtgcccccaaatattaaaaccagattgctgacaggtgtagagtaatacattccagcccagatagacagggagggaagttgagtaactggttagaatcagaggtacagttcatcttgtgattttcagaaagagatgagtctttacctagtctgactctgagattttcttttgatttttaaaagcccatgagaattgctttcaatccacttgtttctaaccatgtgtctaccgtgtgcaaagccatgtgccagtggccctgggggagacagatgaatcatgggttctcagaaggcttgcaggctattgtcagaggtcccacagacctcaatgcattttctaagatgaaactcaagataatggattggttctgccctgcctggtgagcgggtataatcactcttgaagatattttttggataatcattggaaaggactatttttggagatgaagagcttttccaactttcctttggacagaaatgaattcagggagtttgcagcactcgctacccctcactgtggcaatcagccagtaaggctcaaccccaccgagaatttggtattggcccctcccgcctgttccccagagaggaccaggtacaatgcagaagcatttggctcagctctctagggtgctattttgctgctattcagactgcgctgatatcaattggctctcaccagtagaaatggtgaaaacctcgagctcctgattttgagatttgggggaatgccatctagagctaaaagcaaacaatagagggaaataatcacctttttgacatggctggtttctgtccaggccatttttgggattacaatactgtatttgtgccattcgtttttaaagggcgtaggatcagaaaggagccttcgttctgtgcgtagagattgctcggagctgtcttcccaggagctcccttactttctcttcacttcgtgctctgttgagcttctcctactgataagtgcctatctccctctctctccctctgccacaggaggagcaatttctagactctggatccaacgggaagcatctagaagcccccttgctcaggcaaagcatcagtacccaagaggggtacaggccctcttggacgtggtgtctcatttctctcccgtggccctggagcttggcattctgtattctccggttcagaccctggactctgacaccctgccttgcttcatcttgagttccggctgtctgcccagccggacctacactgagcttgtctggttctttcctgcagccagttgagacatcattgtcccaggacacccccagtctacggggttctggccccagatgtccacctctgccctgcccaccagcagccatgccagccagtgagctgtgggtgaaaacactgctgattgcaaaggaccactcaaccgtcaggaaagctctcggctcatagctttgtcttttgtccagctgtcctggacatcctatctttcctctagcccctagccctgacagagagcctcaaagttgttttcatcttatctgctgaggatctgactcaccccatcagacttctgggagggagagagcgagcgcgcctcgagcccggaggggagaaacccttagtgttgtcacggtttaggcacacgctcatagaaatccttgcagctcgagctcttcaaaatatgattagaccaattttacatgtctagtcactgaggctccagtagattgggactatttctatatgtgcaaagtgaagtggataattgaggcaattatcttcaggcaaatgaatctgggcactgtaatcagtccatcctgataactggggagaaatcggcgtcattcactgtagcattgctttgcgttaaagagaattctaaggtatttgtttgttattttcgcttggcttcatttttctaaaagacagtccagtgaagatgaggtcctgcctcgtgctggtgttaggatgtgtggaccccttaggtctcagtcaggtgtgtgtggggttgatctggacgagttgataatcagatcagtgccctagccgggtgcatccttggcttccttgtggtggatacttggtttccacatcagggttttctttccacttcttctttccttgtgtatgagaaccctgaggtgttggatgggttggtctacaaggtcacctccactgctaggatgataggattcctaatagggcccatgagtgacatacattgtgcatgataaaatatcatggagccaggagaatgaaagaagggcctctcaacgtcagaaatgagaatgcactggaggctggtgattacttctggacccccgcttccccatccattgtttcggctaaaagtcatcataaattgggagtccttccctttactggtctagaagttccctcaggaagcagccgtcacttctctccctgctcttcactgaggagggagggaagaggagcaagagaagactttccggttttccaaatggcagatttggtttcaggcatgtgaggagccacatataaaaagaaaaggcattgaggcatgtgagatttgacttaagtggaggagatcctcgcctttaagcaataatctgtgtatttagggagccaatggcccagcaagaagtccagcagtgcctcctgagtgcctgggcacctggtggagatggtgcagggtccctggcaaaagagcctctgggacaggagttgtagccgccagcctgtgtcacacactcacactcacaattagaggacaacgggaatttaattaacttccaaagtgtgatttttgaccataagcattctaggaatgaggtgctgtgtggggattgagatgaaccttggaaaatacttaaggagaggcttgttttatgctgtcaggaaatcttcatcttgtcacttcgtaaatttttgaccttgctcagttagttagaaaaacaaaaacaaaagcttcctgtccacaactgagataagagagttttgcaagacatctctctgtcctcggagtgttgtggccttctgtgggttctgtagttttaattgctagtggtttcattcctgctcagttagtgaaattgcgacattttcccagtatcttagcgtgactgccctacagccttaataatgatgattttagactgtagtttaagatctgctggggcaaatgccttctcactgcacagtatctcagcattctctgatgttttgtccatttatttttctatatgaatttaagaaccatttttatcaagttttataaatgaccttggtgatattttgactggaatggcgttcaatttataaattaagttgggaaatattatcatcttttctgcatttagtcttaagccagaagtatggcctctcaatctgttcaggtcactatttctctcattaaggatttgtgttttcttcatgtaattttaatatatcctatgtgagtttgatatgtgaatatatatcatatatttcccaagtattagatgcttttgttgcattgtgagtgggcactctttttttaattatattttcaggcctcttattatgtatttatagaaatggtattgatttttgtacgtttttctcatcttctgccactttcagaattggttggtttttgaggcaaccagcagcctactcaggcaaacactcagagaaggtttctggaggatttggtagaagagactacctcatcagggaaagagttgaactaagtcagcggttcccaaatgccagtccacagtgaaatgagaaaacgaaagatgttgtagtggggctttcatcaagccaaatttattcaggggagggacttttgattttgattcttgattttgaggctatataagcttcctgccttttagaattttgatatcatttctttctagaaggattgtagatgataattaggggttttgttttgctttaagattttagagtctttgaaaataaataaatcagaaatccttataataaatgaatgaatgaatgaatgaataaaactgcttgaattctaccctccccaaaagattttagatctttttttgtttttgtttttttttgtttttgagacagagtctcgctctatcgcccagactggaatgcagtggctcaatctcggctcactgcaagctccacctccccggttcatgccattctcccggctaattttgtttttgtatttttagtagagacgaggtttcaccatgttagccaggatggtctccatctcctgatctcgtgatctgcccgcctcggcctcccaaagttctgggattacaggcatgagccactgcgcccgctgatgttgttttttaaattttgcttttatttagttttcagtgactttatctagcagatttttttaaaaaaaagcaaaacagctggcaacccgatgtgagtgccacacatttcttttgaaatattagcgtggtctggccgggcacagtggcttatgccactgttcgtagattttggtctaaaatctcaaaatctaggaacctccaattcgatgtcctttgggttttacagttgtgatatttggtaaatctggacttctttttatattttaaaatcatttttagtttattcttttgggttcttctagttagtagtgccagttagattgatgtttttgttacttattttggctttctctgacttcatcctttgtctatgccttgcgttgtcctctgaaagtgtgtaggagagagaagggtgaaatgggggcaccctcgttttatatctgtttttaaagggatttttctctaatgtcttttctctgacagtatttaggtgggcttcaaagggaaaatagatggtatcttatgagagggctcaacagaaagtttggaggtgagaaaccagaagccagatttgggatcacacaggcctggatataaatcttgcctccttctgcttgctagctgaccagtgactatgcctggtggcggtgatggtgctggttatgatggtggtgtagcattggtggtgatggtagtggtggttgtgatggtagtggtgatggtgatggtggtggtggtgatggtggtgtggtggtgtggcggtggtggtg

SEQ ID NO: 101619 - DNA, 3012 bp, Homo sapiens
tataattaagccggcgcaaaatgagacacgcacaccaggaaaaaaaaaatcaatttccaagtcggatgagattttttaaagacatttcacttatcagtctttccccccaggactggcgaggagagcacgccttcccttccgaaggtgcgttaccagattgctgccgtttttgtgctgggtcatcagagcagattcccctccaggttacagattaaacttaactctacccgtgctgaaaatggccggagcacgccgcctcgcctcccctccccaaggctgccggagccgccggcccctgcctccttttcgacgactgatcgtccaaggactggcgccggatccaacacctttccccagctctgcgcgtaccgcgctctttggaaacgaattgtaagttatcctgatgttagacgcgacccccgtctccagcctgtcccttgttccgctttacctttccacttgcgacgatctcgagggcctccagaggtcctgcgcaaacagcccaggacgtctcctgctaagccgcatgcagcctggccacccgaccagctgcgccaaaagcttggcaataccccgacgtgaccatgcctgtgcgttcaaccctggtagcccgtaggggcatccccaagggtccccttacctcctctacctttcccccaggtactttcccctaaccgcccgccgccgggagaggtcagctccggcgcgcgcgggcaggtgcgcacgctctttgaggcggtctctgtcccgcgagcgacgggaggcgggctgtggcggccaaggctggcgcacggcagctggaggcactggcgcggaggtcccgcggcttaattgtcagctctgggacctgggctccggctctgagctgcttaggcgccgcgcgcgcgtgacttccctcccgggtggtcagtctctagagttctcgcccattcccattcagattactttccgcacatttcaacggtgtctctacagcgcggctgctctcacatcgtgaaagttggcgcgcgcacctccgaaccacattttggacacctgagaaggccaacttatttgagactagtctttctaggaggaagaaaagcgcgcaaaacaagtgacttaccaatgccgtttgggtgtgcagctccaaatctggggtgcgttcgggattcagtcgcgtagccggggcaccagctcggagacctcaggttgtctccagcgggacgcacggcgtgcgccccgccgtccaacaagcctttggccaccagggcgcccctggcatcctgggaagtttgggggagccctcgccgcctcaccctgacccccgatcccaggctgaccagctgagcctcctctcttcccactcgcccctgacctgcctttccttctcacctcctttccacctgcgctgctcccacaccgccctcaggctccccagtttagcggtgggcaactaacctgaatccatgaaaacaaggagaatctggacggcgtcctccattagtgacgccggatggggatgggtccctttttggaaggggactccggggacgcgtcacggcgggtgggcttctttggcttgcagcgacgccgctgcttctcctccttgggctccttcgactcttcggggtcccttggatctttgtcctcgggcttgagctcctccccttccctggggctctggggctcctgagtgctgggcggcgcgcgacttggggaggcgtcggggcttcgcaacttgagagcgtgcagacgctgggtgagggactggccgaaggtggagtgcttgggcaccaccgggccgcgatcgtcttcaggctcggtctcgggctcagtggtgggggcggtctcaggctcggtctcgaagtcggtctcggactcgatttcggactcggtctcgctctcggtctcgtagtcgaactcttcctcgtactctaggcactcggggagggacagctcaaggtctgcctcctcgtgctcgtggtcagattccgattcgggggactcagggaatacctgggcgccggagcggtggtgggcgttaaggaagctccggcgctgttgggcagccgcgcgctgctgggcacgggcgttggaggtggcaagggcgcggaggagcgcgatggagcaggagagccagaggagcgcggtggctgcccggcggcctatgggcgggcacaggtcgttgtaattatggcgagctcggcgccactgctgagcccgggacctccgatccatcctcttaggcacacaccgagaagccggcctgccctctggctctgcagagagtggctccgaagcacattggctgctggagccgggaaaggtacaccctatgaggtgagaagctggcccggaggtcccagcctcacctccttgtgaggagaaaaagggaagcacctaccttcctgaccacttaagaactttctaaagctccgcgccttgcttgcctctctgagcaagaagaagggatgggaaaaaaggggaaagttctgtctcctcccgggctcctctcgctgagtcttagattccgcagcctaagactcgagagaggtgcctccgccggtcctcttgcctgggagaggacagaggagactgaggcgaggagggacgggcagtgaggttctgcgaagttgcgcgcccggacttctgccgggcatgtgcagtaaggaggtgggggccacctccccgcgagctgcgtggtggcgccgagcctgtggcgcagaccctagtgggccggcaggtggcaggagggaaccttgtttgaaaggatttgggcgaagcgatgggcggggggcctggcgggtggcaaggagcaagcggcaagctagccccaggtccagtacttgggcaggtgggcgcaggctcccgtggggtcgtgcccctccccagtttccccagttattggggaaataaacacagcctgggagcagctaaaaacccagaaccccaaatagcaaatattcaggggaatgagggtctgtctatacacgagtattaagcctctagcattttccaatggcttaatag

SEQ ID NO: 101620 - DNA, 1630 bp, Homo sapiens
aagaaactgaggcagaggggtgttgggtctgacctaaggccacttgaccatggctagaagcaacctgggctgctagccctgggcctttcgtcttagatcccactgctccagtttgggacatcaagttataggaaatagagtcattagtgtcaaaaccccacaacagaacaagaaattccatctctcattcttgaacatggggattaaagatgtcatttgagcatctcatccctctgctgggtgattttttagagaagagcagcagttgagccagcacatgacatcactggcctggaagcttaattttattttagtgatttggtttttgtgataggtcaccttccaggtaagcagttaggagacatgctttactcacaccatggtttctgctcagtttcctctcaaaagcttccctcttcttgaagagcagtataataataactgataattgaggtaaatccatgtagattattaaaaaaccaaaaaacctcattcttaccaacactgaagtttcagctttcttcctccttaaccttccacacagctgcagaaaatgaaggctgaagagttaaaggctgtaagcaactccagggtgagaaaggcttgcagtgcattaaagaaacatctcaaaacaatcccaaactgtaacatttctaattcttgaattctgatgaacataaaagagttttgtttgcaaaactttaaacctacatcaggttgaccccacacaatattggaacattgcaacataaattcccagctcagataagttcagttacaagagcacctttgggtcgccctcccctcccccacaaaagcaaatttccattaagcaaatgattaatgtactaaaggaaacaacttcaatattgggggcatatcatcatgtttagctagctttattctcctgctcctcctcctccctcaccctccatttgaaatattaaaagtggctggtaattcacctatgtggttcaccataagatctgctttttcttgggagcctatcctcaccccgcagacctcacctatgtaaaaggggcaagtgggcctattcagatgctaaccccagttgagcagggtggggcaaagggccagctgggagactagtgagttgggaatgcttggggaagttgctaaaaatggctctggaaaaggaaggagctgagtaccagtctctcaggcagagagaaggtttgcgaagtctatatagcaaaatcctgtcttctcagggagggccataggtgctttcctcgggggttggtatagctctcagttgcttcatatggtctgcactggcttttccacccttgaatcagggtgtaaagagggaagctgggggaggggaattgagcgggggaggagaattgagcgggggaggggaattgagcgggggagagtgtgtgccggtaggtaacaggtttttacaattgggctgtaatgcagatggcgaggcagtttgtggaagactgtctgaaagacagtgtgtgttcctagattgcccctcctcgctacatgtgaacatggtacattgcttacagttcaggaaacatccctatgttgggcttctgtttaaaaaacagcaagatgggtgtgaggtgtgggctcgacacggagggcttttaaaaaa

SEQ ID NO: 101621 - DNA, 2530 bp, Homo sapiens
ggcctcccaaacagtctcacctctctattgatgctttcatggcatatgtattcaacgagtaattgtgtttctacttacattctgggattcttactcattaccaaaagcataaggcatatctcaagtttaggtagctacctgtcagctttctgggtttatccctgtagccaacaaagagaaggcaaagtagagagagggaagggaggtgggtgaaagggaagggaacagaaaccacgaaaaacagtatttttttggtagtcattttccttttggtctgcggctttgcagggaggaggtgggtggtgaagtttgcagaagtgccttctctgcagcccattcatgtcattggttgtcagtgggtttctttcaattgaggaaaaagtaaaagcagaaagagaaggtagaaaagaatttaggcaactatgaagcttctcagcctcccagtgacaaatgttttctgagtgctgagtgagtagtaatagactttgaagctgtacaattaattacttttcaatcaagacttgctgctgccatccttttcccttcagactctcctctgcccgccttggccggtggaggcagcagcatactgctatctgcagaggggtctgcgtggccaggctgtttgaagcaaatgccagctaaaggaaaaaagcctcaaatggatgaggcaagataccaggttagaggcagatgcaaggctgatattagaggtagtggaaaaagtctttatgaaaatacttgatatgctcagattaaaaagcccccatcgtgagttcagaccccttcactcagctaattagctgtagctcagcaaccttctcaaaaggtgccccaaattctgtttcagccaaggcatgccactgtcctctgaccacctgtgcttgaacagtgggtccagacatttgtggattccttctccagactagctgatgatgcagcaaagaatttcaggggaggagaggccattccagaaaagatgaacagcaccatgggaaagcaactaagagagaggcaaaagtgggggttggaggggaaagagggaatctcggaaggtaaatttggctttagtggaagctctgcttaaaatttctgcaattcatagtgggaattccagccaccctgggggcttctgggcatcattgtttaaggggaatggtatatttcaccttctagaacaacctcaattacccagggcaaattttcctaatgaaatctaattaagacagcgacataagccaggacactcagaaaccagctctcacatggggttgaggggagaagaaacgtggtcttctgctggctgccggtctttggcctgtgccccttggacccctcaagtttgagagtggggaccttgaagaccaaccttgctgtgaaccaaaacccaaagctttagccttggagctagacagctagatttctaggtgttaaatctttctctttgagtgtagcaattgaagtacttgtatgaaaactccacacctatgaaattggaatttttggaccaggtctgtacgaaactctcagggggacagtgatgttaatggtgtcgaatctgtgagcctcattggtagccctccaatgccatatttggcttttaaaaatgcccttcctaatgttgagctgaagtctgtcccttgatgcacctggttctaacccccttagccaccagatacttgaagctgccctcaacctttctctcttcaagactctctttattccttcaaacgactttctttataaccgccaaatttcctggctttgtgacccccttccccatttctaaatcttcttttctgctccttcccaggggttctcttatctacccacatcttcctttttttctgtgatccctcaaattcttcttttccttttgtcttccttaaatctctccccactttactgtcaccacttaccctctgtccctgctgcctgggtttatgttggcctttctcatagccatgtgccctgctaatttgtaacatacttaccctaaaataaacacaaaaaataaacacacaggctatgcccagtgggagctgggaaggcagcctccccatttctacccgggaatagttgcaggcagagtcctgcctctgctggctgagcactgtcaacaggtaatggtggccccgcattgcaggctcttggccttgggagaactaagtcactaggctgtttattctggcttctctgccctgtgaattaatggccactagtgcttggaccagcatagctattggaggcgtttgaaaaaactcatgagatttttaaacaagggaaagaaaacaaataccagtaaaaaatttatgccccccaccccccacatatggccttttgatatgtaagaaagaaattataaaacaaaaatgggtgctacatcacttaatttgacagaaccagatttttttgtttttgaaatgcttgctttgtttatcccatgcatgtatgatggaggcaaaactggttttgggggatgcggtgcgcaaacaagtcttagctgtgacaaggtcctgcagtgcataaa

SEQ ID NO: 101622 - DNA, 3084 bp, Homo sapiens
gtggccacgcagcacggaaggaggcgaacacagttggaccctgggaaacgtttgggatcccccaaagatatatcgctttagctctatgggtctacacacttccagatgtcaacactgaactttgattcaaactttggccaactacacccacgcaagacggcttaaccacttgagcatccactgaatggcccaactgggtcccaacaccaactcactcccctccgaccccagcgccgggtcagccattgggcaggggtcatgccaatcaaggctgcctggcgaatgagcagggggcgtcagaccggaaaccggatatgggtgggaggtccaatagggggcgccgcgttggaacgcccgaagaggtgctgctggggtggttggaagccggtggggggcgggtgtatggcggctaggcctggaagaccacgaggaccgctagcgccgtggggtcactcttcctcatgccacaggttgccgagcctcgggggagaggtggggtcccaggggccaacccttgggtgtgttgatggcggcaggctaacccagccaacggggtgccactgccgggcaaggtgaggagcaagaagatttccagggctgggaggtagagggccaggaccccaaggagagggcttactgcgaggagcagcccaggatggataaggagttgaggccccagggatgctgagcctgcacaagtggaaggtcagtagacattggggttggagccccagggaggctgccatgggtgctccaaaggggttgtttgctttcgtcaggcctcgcgctcacccccaaagtaccatttgtcgaggaacgggttcagggtctctgttcgacaccctcatgggtctgtgggacccctttgttcattctttctgatatcatgagctttgccaggggagcacatgcatggaggtgactaaaacaaatttaacaagttagacaaataccagttcctcatcctggagagtagagcagcatacaaatggaagaaaagaactccacctggggggaccttgaaagtcttgctggagaaaatgactttttatatgggcctccaaggaaggatagacgccttggctatgaatagaaggtggtagtgggggatgggagacggtttgcccaccacgaacaaaggatttaatggtaggaaacatggggcgtggctgggtaaacacaactggccaccttggctggctcttggggagcagggggagaaaagttaggagaaattagatagaatctctctgaggatgccatggagtatgagggcaagcacttttgaggctattttggcaggaaacggaaaggatgttgaaagttttttgttctgcaagtgaggatttgagcctacttttaggaaaagcagaagcagcatggaggatgatcctgatcgagaacaaaggaaaggggttatgcacaaaggagatgtttaaaggagagacctagcacggtgaaggaagcaggaaggctgaaggacggcactcaagaggggtcccaaaggatcctcctggagcagctcttatgctagaaagacacaaaagatggaggagccaaagtgtggcacccagatggatggaacactgggagtgggacagggaagtcagtgggaggggctggcaaggtggcagtgctgatttggttttagacatggcagattaaggaactttgggcagttgggatggagatttttgcagcccattttctgggaggaaaggtctgaagttcagaaaaagataaagatcacacattcaaattggcaatcgtacttacaaagatgaatttatggagtcagagaaaactctttaggggagaaatacatttggtaatagaatcttgaacaattggcgcactggacaggaaaaagggagacagtccaggagtgagtagggaggactcagaagggagagatgggagcacaccagaggaaggggtttcagaaccactcagcacatctcatctagacttggtgttttagcctctgcactggtggtatttggggccaggcaattctttgttgtggtgactgccctgtgcattgtaggatgttgagcagcatccctagcctctacccactagatgccagtagcatccccttagttttaacaaccaaaaatgtctccagactttgctaaatgtcctctggggggcaaaatctcccccagttgaaaatcaccactataagctgagaaaggacccttagatttaaataggaattgccttaatttaaagataaattaagactaggaagaataaatcccagtatttaaccctgatattcccccttttttccactcctgttatttctctgtagtgactggctaccagactctgaaaaacctaagtcctttaggtgagtggagctaagagctgaaacatcagtaatggggtcagggaccccagaagtgtggccaaatgttcgaggagttgacccacctgtggcacctgcaaggccacagggacctgaggaatccggtatagtaagagctgggggtgatcggctagtgggtttactggggtccaccttgattggcctgattggttggcttgtctggtgatcctcctgaaggctgataattttgctagctcaagacagaaacatggccttgatctggagggagatggccagtgctggatgttagtgggcagcatcgtctggggcctaaccttgccggggcttttttaggatctgccattataattgtataatagcaaagtaccttaaacatagctttccagtgctggatggattgccatcatgggaaaagataaatatgtgataggactgaggaaggaaagtctattaatgtgtttatgcagctaaggaagaggaagtcaggagaggctggtgcctgaaaaaaaaggccgagttgggatggatagacgctgtgtgccagggtcttgacccctgtcatgaggggctgtgtgctggagtgtagggctgcagtgagatgatgtgtcaagtaggggaggacaggattggctgtcgaaacccagggatggtttacttgaaaattgtgtatacttggctacttaaaaataatagcgtctgcacttgatgtactaagaaaggcatgggaa

SEQ ID NO: 101623 - DNA, 1043 bp, Homo sapiens
aggccactgcagccttcctctgcttgatttccatgtagcctccagttggttgaaattcagcatttgctggggagctcagggctatgccctctgctctcccactcagcagtttattgagggcttggcagtgtgcacagaactctcactggcctgtcaggagcccactcaacagcagagcccagatggcactgtgtctttctaaggtccttgctgaccactggaagttatgagaaggggaaaattattcagcccaagcggcaagcgtttgcaaccagtctggggatcagatgaaaaggagattttttatgagctacagacctcagctctacccacagccacgtcccagggtctctgtcacgccgcccaatactgggaaggctgcctctgcctgctttcttgaacattcctgtttttcggttgccttagtctctactaccttctcagattacggctccttttgtgctaattacaccgaaaaaattgaaagaatgtcgctgactttacaaagaacacaaagcagacttgcttaaaaaactaaatatagccagtttctttcagaaggcagacagactcggccttccaatgatttgtactatgcagattaattgcagatggccaattcatttattaggacccaaatgacagaagggctcagctatcggcaggacagattaaaaatgtgtgttgcttttgggggccatttacataaaatgagaaggtctgattaatgacgaacttttttttttcccagcacttaattgtaaattaagatttgctgatgatgatgggctaatttaagctaccgtggaaagagggaagaaatggaagctgctgatcgtaggaagcagtacctgtactgcgcaggtaaaaatataaatgaaacgaaagaagaaaatctaacttctcattctggaaggcagtggctgccacagatcaagaggatattgttttgcagcccctcttctccattatgtaagaaatggccattatgtaagaaagacagacttgggaagggggtattatctctgctagccaagcaaatt

SEQ ID NO: 101624 - DNA, 1053 bp, Homo sapiens
aagacagtttgtggactttgcatatctgggctttccgggacgtaggcctgtgtcccatccaagacactgctcacgtcttagcctgattacctggccgcctcggctcacctgggcacatggtgagccgcggaactggcaggcaccaaacatttattgaatgaataaaccgtatcccagcagacaccatggtggcagcagatgacctaaccaaggtcccaggaaaggcgggctggggtcaactgcttgaaaatttagtaaccctgctcctaatcccgtgcactgctatatcctagtgtgcggcgggacacttgagagttttgaaagaaccctcaaacaagttcacgttccgtaaactacttttccctctgttccagagcccccagggcgcccaggcaaggccgccacctctcccacctgggaggacgcctcgagcaccgactccacagccacggccaccgctcctcggctcccgtgacaccggcgcgcctgctgcttcgagcaggggaggctttgcactcccatcgcacttttctcgtccgaagatacgaaactccgtccgggcgtcgcaaataattcgaattcggctctctgacacctacctcggcgggcgcgcgccgctgggagggcggggtgggtggctggaggtaaggaggcgcacagcaggggtaagcgccgccgtcgcacactttgcacgccgcccagggctacaccactcaccgaaaattgggaggcaggtctgggaggcggggttgagcgcccaccgccttgggcgcgcccgcgccccccgccatcgcggcccccgcgcccccggcccacgcccgcgcggtcccggcaccggcctgcacccccagggtgcgcggcggcccatttgggtgcgtccccggtgggccgatttttcgcgcttccccttcggtttataggggccgctgctatgggtcggtcctctgaagaggctggggcgtcatcggggccggttagaagctctgctccccggcggggacactcagtcgcgtcggcaccgcggagcgggctgcgtcaggtggctggccggcg

SEQ ID NO: 101625 - DNA, 1038 bp, Homo sapiens
tgttgttgggtgctttttggtttgttcttgtccctttttcgtttgctcatcctttttggcgctaactcttaggcagccagcccagcagcccgaagcccgggcagccgcgctccgcggccccggggcagcgcggcgggaaccgcagccaagccccccgacacggggcgcacgggggccgggcagcccgaggccgggggcaagcagggagcccgggccaggcgcgagccgagctccccgaggtggccgggccaccatgctgaagatggccatgaagctcaaagcccgggcggcggagagcgagaagaagacggccgcggcggctgccgaggtggctgccgaagctgcggcggcggctgcggcgttggccgagccgagagagccgctcgcgccgcggaagagcggggaccccgagaagctcgcgaagaaccccaagaacccggcgcgggaggcgctccccgaaaagttcctaacagacaaggagcgcaagaagctcgagaagaagctgctggagcagaggcgaaaggaggagaagaagaaggagaaggagaggaagaagatggagaagatgctgaagaagaagaagaagaaggtgccagaagcccaggaggaggcccgatgccccgaggccgccgccgccgcggccgccgccgacgacgacgagggcgccgaggagggcgccgtcgggggcgccgaggagggcgccgccgccgggggcacgagtagggcctgggctgactgggacacggactcgagcgacgaggacgacgcctactacgcggcgccgcgcgttgggggcatcgtgtggcggcccgggccgctcaaggctggcgcgctgagcgcccacctgcccctcgtggtgttcctggtcttctcggtgcgcagcccctcgtgggtgctcaacttcctgctgcagaagcgcacggagcagggccgcggctgcggcttcgtgttcggggcgacctgctgcttccgagtgttcctgggctgcgccttcttctcctacttgggcggccgcgccaagcgcagaggccgcgggcg

SEQ ID NO: 101626 - DNA, 1115 bp, Homo sapiens
agaaaaaacaaagacattcacaaatcagataaaactggagaatgacatttgtctgtaaatggcttcttggtctggaaatggcgtggtttctttttttttttttttttttttttgtcctcctcaaggtgggaggggggattgagagtgctctaaggagacttttcctccaggtgggaagagataaaaagacattaattagttgtttatcaagtgacatttagttgtttggttttgggttttctttttttgattgcgatttttcctctgattaaaaaaataataataaaataaaaaaaggttaactataaggagatggcctttcctccttttttttcttaaggtgctgttttgggggaaaaaaatgtaatgaaatgaccaaaagaattacacagcattaattaaaaatggaagttttccacttccttgataatttggctatctgaataaatttgtgaatttgctaggttaagacctagttcgtggtcacatttcaacaaaacagcttgagtataaagaaaataataaaaggctgttcttatttattttcctttggtggcttttggtttgctctttttgcataggtcatgactttgttctcctgggtccagatttataaaagcagaaaattactaattaagtcaaaataagtgtctttggtgtttatgcatttgcaatttcagtaattaaatggtacatgtgttgctgtcttgtctaaaacttttaaaggcagaattatgctgttgggatattagtatgcgtataacttgatttcaaagtataaatctggaaaagtctagaatcttttctgtgaatgctatctcagtactactttaagtcaagtgtgatgctaatgatatcttaaaatttccaacaccttttgtgcagtgatcacaaagtctccacttaatttgagactgttactcagaacacgccttgcgtcacgggggctaatctaagtgtcctagtctatatgactacattacatcatgatgtattgattgcctctggcctaggaatctgcagcttaagccagtgacacaatattttgcatttttaaatggtgattctcaccaaataatgcctccccacaaaagaggaaacctaataatgcccca

SEQ ID NO: 101627 - DNA, 1049 bp, Homo sapiens
cattggttgaactaagctaatcaattaccaaactgtagaatgctgcccttcggccttcaaggaggaattcctactgtttatgaagatcgggtttgggtttttggttttttttttctttttcttttttccgtggtggtggtgggtgggcttttgttctttttgttttttctgtggtggtggtgggtgggcttttgttctttgaaattttttttgctacatcacagtccagacatagtttaatgacaatttatggggaacaattatttataaataaaaccattttataggtagtttccttccactgcaagaagtgaggtcattagttttgcaggaaatcctgggcagaaatctcccccgtttatgcctttatgccttaagttacaaccttgggaagattctgacctgggagaattaggagccttatgcgctgccatattctccaaagaattgtgagataaatcactgctttagctccctaatgcgtgtacgtttagtgaaagcacaagaaaacaattatccatccctcctgtctccgaccagagtctccagagagctctgttaatactgcagcaaaggtgtgggattcttcccccatggcctgcagtctcagtggatgttccaatttagccagaaaggcgacctaagaattgccgggaggatggatggctggcgcgcgaattgttgcttttgctcttggctgatggttgaggaatgtagagagactgtgtggggtttgtgtgacactgcggtgccttgcagattaggtgagctttcaatctctctttaaaaggggcggcgaagaggacccgcaggctgcaaggagcaacagcgatgggtaggcacattcaaaaccagaaaaaattgttaacaaaccaaacaaacatgaagatcatactgggaaactgaggccagagacccgggaagaaaataaaaatcatttaaaggaccatcagccatattggcatacatttgtgaataacacacaatttcctgacattttggagcaagtaaagtgcgtaacataaatttttttggccatgcttaaagta

SEQ ID NO: 101628 - DNA, 1052 bp, Homo sapiens
cgcgtctgtcttctgtcttccttcctttgtctgtcttttcccaccaaagcacaaggattaaggtggagacctgaatagcttcccccaccacttagttagctgaagcggggggaggggaggagctcttaaaaactgaacgcatcccatctgctgtatacatagaagggggaggaggaggaaccaagaccctaaaagtacttccagccttagtcccaattttgtagcgaatcagaattctagctaatggcatatgttttgcctttgttgagtagtttaaagacatctaaggaattttctctgaatttcacaatcaacgttaaattcattaagcaatagtaaaagtgatgataaacccgccaacccccagtataatatctccatctacatagtaattgcttcaatggaagaattttatgttttagtattacacacccgaattagattttagatttctattttagctgttttatacttgatatactcccacacctattcacatacgtagatgaatactgaacacgttctcaaaatatccgtattttaagacgggaagttttccaattatcatactactgcttagaccaaaatatcaaactgaatgaaagaaacttgtttctggaaatactttctcttgctgtatgcagatttggatatttagtacccgaatgtatttaattttactattgtggaacctcaaaaccaaaggttaatagctttcattacctgtgaagtggagcctgcttttaatgaatgggaatagatttgccctagggggttttgggtaaattctgaattcaaaagtgaacattggggaccatcaaacacatgtccttttaatttataacatctaaataatcgatgttagactgtaataccaaggccggggattcttaatttcagaaatgagctttgattctgcacatacaaagcagacagtcgcacagagcggtcaggactcactccctttcactctaaggtggttgctttaagagtctgggggccagaatcagatttcagatttgtacacaaggcctgaagctcgctcacctccc

SEQ ID NO: 101629 - DNA, 1173 bp, Homo sapiens
tttggggtcctttctctactggttgatatgcataaaaccttctaaaaatcaagaatattgccagagagcaacaggaataaagaagctaagtaaagaataaaaaagaaaaatagaaaaaataaaaataaacacgaagaacaaagccccaccaccgtgctgtgctgtttgtgtggccccactgcgtcgaggccacaggctagctgctagacgcatctagagttccctgattcctaaaattatttatcttaaatcctgtttgccctaaccttcttaaggcatcagctttgagttacaaatgtaaccaacacacaagcaaatgtgccattgacttagtgctgcataactgtgggacggtcacttccgttgagcctgaccttgtagagagacacaaatagttggcaaattgatgtgagcgctgtgaacaccccacgtgtctttctttttctcccagcttcctggacaagatcgacgtgatcaagcaggctgactatgtgccgagcgatcaggtgtgcaaaacccctccccaccagaggactctgagccctctttccaaactactccagacctttgctttagattggcaattattactgtttcggttggctttggtgagatccattgacctcaattttgtttcaggacctgcttcgctgccgtgtcctgacttctggaatctttgagaccaagttccaggtggacaaagtcaacttccagtaagccaactgttacctttttatataacagagatcatggtttcttgacattcaccccagtccctctggaataaccagctgtcctcctccccaccagcatgtttgacgtgggtggccagcgcgatgaacgccgcaagtggatccagtgcttcaacggtaggatgctgtgggcttggctgttcgtaaagaacgctttgcttctgtgttgttagggatcagggtcgctgctcacgctcttggctttgctctctttggttaagatgtgactgccatcatcttcgtggtggccagcagcagctacaacatggtcatccgggaggacaaccagaccaaccgcctgcaggaggctctgaacctcttcaagagcatctggaacaacaggtttgtggagtgaccgcccaccccctgcgcttgcccaggaggccctggtctgcactgtttatagagaagaaccccgtgc

SEQ ID NO: 101630 - DNA, 1032 bp, Homo sapiens
tatggaaaaatcagggttttgaagacttcaggagctacagagatgctagcaccccagctctgcttgaattttaaattacattaatatgtattccctttttatatagctactcccgagcccggagaggacccacgcgtgacccgggccaagtacttcattcgagatgagtttctggtgagtcgagcctgtctttagtttcctctcttgttcctcctctttttctcatggatgtaaatttacttaattccaaattcaggggttcagctacccagttccatggttttagttcacgcacatccagtgtggatttgagctctttgcgcccctctttttgcttttgttttcatatgacatcagaggctggctgacagccgtccctggtaggtgtccccatcagggatagggtggttcctggcgagggtgtcactgacaagtccccttgtttgtgcccgcagaggatcagcactgccagtggagatgggcgtcactactgctaccctcatttcacctgcgctgtggacactgagaacatccgccgtgtgttcaacgactgccgtgacatcattcagcgcatgcaccttcgtcagtacgagctgctctaagaagggaacccccaaatttaattaaagccttaagcacaattaattaaaagtgaaacgtaattgtacaagcagttaatcacccaccatagggcatgattaacaaagcaacctttcccttcccccgagtgattttgcgaaacccccttttcccttcagcttgcttagatgttccaaatttagaaagcttaaggcggcctacagaaaaaggaaaaaaggccacaaaagttccctctcactttcagtaaaaataaataaaacagcagcagcaaacaaataaaatgaaataaaagaaacaaatgaaataaatattgtgttgtgcagcattaaaaaaaatcaaaataaaaattaaatgtgagcaaagaatgatgggactcccgtgagttatttgtggttctgagcaaattcccgtcattcatggttttgacttggt

SEQ ID NO: 101631 - DNA, 1034 bp, Homo sapiens
tttttaaaattttgagtagagagggggtttcaccttgttggccaggctggtctcaaactcttgacctcaggtgatccacccacctctgcctcccaaagtactgggattacaggcgtgagccactgctcgtggcccaggaacttgcatttttaacaacaatcaagattggggatgtctggtgcattttgaagtggtattataagggaataaaggatgaagtggggcttacgttgataaacatgggtggtggtgtgatggcggcttcggagccatggtctaaaatgccaaggcgggcgatgtgtttctggaactgaaagaagccctgtgatgttagctgcctggtggaagcagtggcaggaggtcagtagggagcaggttctgaagatccttggagagctgctgaatggtatggcttgttcaggagtttggggcagggagtgacacgagtagatttgcatgttggatcatttcacagtgttggaggcttagggtggagtggatagagtcagacttagctaactgagagcttgggccatgtgtgtcatgcgttatccccttccacacacaggattttgagttgggtgttaccctacttatctggtaagtgtagaaaatgagacgaaaagacttactgacctgcccaaggtcatgaaactaataaaggaaggagaggggacccaaacccacatcctttgcctccgttgccacttcgtcaaattgctgactaccaaagtggtccagatgagaaggtgtgaattagcttagtggtaggttggtgtttggggcatctagtatatcaccttgagcctttttttctttttttttttttttgagacagagtctcgcttagctgctcaggctggagtgcagtggcttgatctcagctcgctgcaactgccatctcctgggttcaagcaattctcccgtctcagcctcctgagtagctgggattacaggcatccgccatcatgtccggctaatttttgtattttagtagagacagtgtttcaccacgttggccaggctagtcttga

SEQ ID NO: 101632 - DNA, 2483 bp, Homo sapiens
aagtgctgagattacaggtgtgagctaccgtgcccggcctcaccttgaggctttgagtcataaagtgttagaactggggcatataagggccatctaatcagtaccttcactttatagaccaagcacgtgagttatttgcccaagtttgtgcagtcagacctagaccccactgatgggagattggggagtctcatgtttggggaattttaatcatgatcctaatttggcccactgacaccagtgggctctcatggatgaggggggtggaccagacgttcatttcatgtttattctgtgactctgcttggaagaggtacagaaagttaggaaaggtgttaggagggtggcaagaactggattttaaaagatagttggtgacccaaattctgttcgcctgatgccatgttacatagtgggaggtaggaagatgtgtaaggaggccaccgtgatgttcagtctggatggtggaaactaagagctgcagacatgcaaatagatgagtcctgctacagattgcaaatggggagtggtgagaggtcagaacggacaggggaagtgggaagggcacgctcttgctagagctggggcgttttttcctgaaggagatgggaatctttaagcaggagagagacgtcagttttgtggcttacaaagatcactgtggccacggtgtgaaagatgattgaaaggaaggaataagactgagacttcaggggaatgttgctactgcaagcatacaaaaaataaggaagagcagaggcaaatgtggaaagaaggaccaccttggatagacagatgggagatggaactgatgagtctttgtgacaggatgtgggggtggggtgagggagagaagctgaggatgattttcaggtttggggggtaacaagtagatatatgaaggatacctttacggaaatatgggttgtaggaagaagatctgtttctagggaagagatgtcagttttggacctaaagagtttggatacttgtgagacatctgactggaaatgagaatggaatgttggatacctgagtctggagcttaagagaggaaagacggagagagagatccaggctaattctagattggtgagcaggtagatagcatgacccaagaggtggtggaagaggcaggtaggtgagtgcccagggtggaagcccaagagaacagacaacgtgggaatgaagctcggggtgaagtccggcctctgtcatgcccttaggggctcagcgttccccatgcaaatctggtctgagagaagactccacagcttttactgggaagtcatcgggttctgtctgctcccaaagcactgcttttaggatcttagtccagatcaggagtgagcaaacttttctgaaaaaggctagatagcaaatattttaggttgtgcctgtctctgtcttaactacttacctctgcccttacagggggaaagcaatcatagacagtccttaaaagaatgggtgtgctgtgttccgtaaaagtttatttgcaaaaataggagagggctggattcggctctgggtcatagtttgctgacccctggcccagctcttgccccattatgttagagtaggttgcatggaggtctgtctctcctattagtttgtgaacttctttgatggaaaaagccttgtcttgtcttacattttcttaggttccttggttgatgagcatagtgcagactgaatgttcaaaaagcatctgcttgttagttagggtggcagtgttaaagttggacagggtttgggatcacagtccatcctcacatggtcattagcaggtgaagaagcctgctttgcccttagatggagtgacaggcctgaagttgcttccacatagaattgggactggagtccagccagaagtgtggatgcaaggcgagttagtggtctttactttctaatggtaagtgatggctcacgctttcaagaatcaggttgttactcttcagtggcatgtatgaaataagaatagtgaaaacaataataataatagtttactatttattgcactgttacgaaatgtcagggattatgctgggttcttccaaaaattagctcatggaatcctcacaacagccaaatgggaataggcgttattattatcttcacttaacagaggaggaaatggacactcagagaggttgggtaacttgtgtgagcatggaacgcggtttgccagggaggagttgtacacacccactcagtgtgatcctggatcccattttcctagccactcactatctgtccagcccatttcatgaaattgtcatgaaagtcaaatgaaataatgtgtgtagaatactttcaaaatgggcagcattatacgatttaaggtgagattagggtatttgtattaatgaaaaaaatatcctggctcttcgcatttaccaacagcaggaggatgattctggagaaggagaggatgatgcggaggttcagcaagaatgcctgcataaattttccacccggga

SEQ ID NO: 101633 - DNA, 1551 bp, Homo sapiens
atcattccattcattcgggtgtaattgctgttgttactttccctaggtattttcaggcaggagggtctccagagaatgttatccagctcttatctgaaaactacaccgctgtggcccagactgtgaacctgctggccgagtggctcattcagacaggtgctttgtgggtgtcccctgtcctggctagttacccccacttttttaaaaatagacttttgggtccttataacactgatacaatgccttctttgatttcctggtttctgagacttgtgtaagaaagagctgaacttcttactcatttttatctttatcttactcatttgtatctgcttgcctcttatctttgattcagtaattgaggtttactggtagcctgcaaacgtgattctcattgagctgttttccctaccatgttgtagaattataggattatacagtgtgtgttcagtgtgtcattttcaagacgtctattacagcaagcagtaaatgacggataatttaggactggctgtgattatggcttttagttaatatgatcaaagtagagtcttactgtaaatccacggagccgggtgcagatgacatcactgaagtgcgtgctgtccggaagcttgtggacacactgctgtcccggtgattagatacaagtgtgtctcttttggctgccatctgctccctcctcactgggcagggatgtttttccatccccctacctgttgctggggccatttgtctttatcctcagtgaggctctgcagatggtgctgtcctttccatgaagttaggggtggaccagacttgtgtgttctgttctgtgctgctttttggtcttatcattgataactactttgaagagttccaaaaccttacatgtataagtggtcagaagcaattctttggtatttgattcacatagagacttttgaccatttgctttctaaagccacacagtgaatggacagcttgccattgtctagttgcttttattctctttcaggtgttgagccagtgcaggttcaggaaactgtggaaaatcacttgaagagtttgctgatcaaacattttgacccccgcaaagcagattctatttttactgaagaaggagaggtgagaaattatttttctttgcctagtaccaggccctagggtcttttgcaaattccctgtgtacagtggagcgtggcatatcatgtaagtaatggcagagttgaggactaaaatcagagtgtgagacagaagttgcatctagtcagaattgccctttaaactctgtacccagggtcgtgacatgcttgcacgcaagaggcacacaggtgctgagatcaagagaatgaacagcaagttcccaccatttcccctctcaggctgactccagggcacagcccttggagtgttgtggtggattcgtttggttcctccaagaagcagctgccaagacagggctaggcctgcaggagatgatggggaagcgactatgagggaagatggggtagggctggaggaggctggggtagctgtgatgcagtctgacccttgagggcaagagaa

SEQ ID NO: 101634 - DNA, 1004 bp, Homo sapiens
tgtggtgatgggccagaacacctgtgccatttaaatggcctctttctcttttgctaagggcatacaagctggggcagcatgagctccctgtgtgtgcaaggcagctctatgcggttctcggtgtctcctaggaagcaactttcagtaccctcctgtgttgagtccgattttctaaaagctgagcgggcatctagggacctttctgtcactcagccgactgtgtggctgtggccagctctgggtctgcctcccccagaactagatgcccatggggagtccatcagcaccaatctcctgtgatcgtttatacaacagaatctccactcaagtaaaagtggggcctcctcctatcttgctgtttgtgtgtgtgttggcagaccccagcgtggctggaacagatgattgcacataccacgtggcgggaccttttttataaactggctgaagcccatccagactgtttgatgctgaacttcaccgttaaggtaggaagagttctagagttaaggagaaaagtgtttatgaatgtttatttttggttgttggtctgtttcctttgacagttcatatttgctttttttccataaaggtctttattgttttattttcataagccttacactgagaaagaaaagtgtaaaatttgtatctgtttttgggtcagtgttgactgtgttttaggatttagcagggatacaagaattctcttgtggttggagaggagctttaggcgtgcctgcttgatcttcctcttgcatatgaagaaacgatggagaggtggtcagcccagggcacacacctaggtgatagcagggtgagggcggagtgaaggcctgagacccacgaccagcgcacacttactccacctcaccatgaacactgacaagccagcttcccgtggaggtgcggtcactgcatgcctcccctctgacttcttgttttgtgtcctagcttatttctgacgcagggtaccagggggagatcaccagtgtgtccacagcatg

SEQ ID NO: 101635 - DNA, 1712 bp, Homo sapiens
tgccttgttagtaacggggtctatggtttttctcatcaagaggtcatgacgccagtcagatcacactagccttgggcacagctgcctcctaccccagggcctgccaggctctcggggccatgctgtccaaaggagccctgaaccctgctgacatcaccgtcctgttcaagatgttcacaagcatggaccctcctccggttgaacttgtaagttgcttctcaagaatccccaatgtcagctggtaaggtgactttggaaagtctgtgcttgtctgattgtctgaaggctgtgaatgcaaatccatcattgtcctggtccttcctcagtcacactctctgcctggagcctgttgggcccctgctgtgtagggaaccctgaggggaggtgggtgagcagtgccctcacgcctgccatcccgaactgggcatatgcttctcctcagatccgcgttccagccttcctggacctgttcatgcagtcactctttaaaccaggggctcggatcaaccaggaccacaagcacaaatacatccacatcttggcgtacgcagcaagcgtggttgagacctggaagaaggtaccatcggttctgggaatttgtggattttttaggagacaaatatcctcctctgctttgatattattttggaattttggctgcaagaaatcttgaccctccctagtatcaggcatgtgttttcttgtgtttctgcgtagagaaagcactaaacgtctccagaaaatgtgcgtaatgtctccaatgctctgcaaaccgtaaattgaaatgtgactaaagaaatgaaactgatttccgtaagacatggacaaacactagtctcattgcttttcagtttctgtacactgtgtgactgtgaagtttgacagctgaattgactcccaacttaagtagaaatagggaaagtgctttgcaagaagtggccgacaccagaacaccccgacagcagggatatctgccctgtcaggctcaccagcttgtgtgtgtgttttcagaacaagcgagtgagcatcaataaagatgagctgaagtcaacgtcaaaagctgtcgaaaccgttcacaatttgtgttgcaacgagaacaaaggggcctctgaactagtggcagaattgagcacactttatcagtgtattaggtaagcaaaacgaaactcagttcttaaatcagtcctttggggaggaggtcgtttgagttttcatattgaaagctcaaataacaaaagcttcagcgatacttgttcattttatttattttttcatttttaaacagtatgtagggaactttaaacagctttagcagcatgagtaattttcagatgtttatttgccagaagtctgttgagtacaaattaggctaagtaaaagatagccagagttaacaaaaattgatttgaagggtctatttataggtaaagttatgcccacaaagtattgcttacatagaaatgatttgtgattatgccaatcatataaatagacgtgtcctagaaatagtgtgtcctcttaggcatgtctttcccctaataatttatactagggatgaagaaagagtttgctaaataaaggtaaacttcaacccagtccaccaaactcactgagtatcactcattaatgatcttttcctttcgataagtggtttaaagtgagcagagaattgaactctgcttcttgcaccgcatgttgagtggctgctgatc

SEQ ID NO: 101636 - DNA, 1024 bp, Homo sapiens
acttcatcatggtgaactaatttagagcatcctccagagctgaagcagaacattccagaacccgttgtggaaaaaccctttcaagaagctgttttaagaggctcgggcagcgtcttgaaaatgggcaccgctgggaggaggtggatgacttctttacaaaggaaaatggtagcagcttcagtgagaaactgcccttacaaacagtcccttctctgctgtcaatccaatactgctcccaaatcctgttttcagtgttcatttccctcaaggcaggcgctgggctcccacgacccctcaggacagatctggccgtcagccgcgggccgctgggaactccactcggggaactcctttccaagctgacctcagttttctcacaagaacccagttagctgatgttttattgtaattgtcttaatttgctaagaacaagtaataagtaaatttttaaaaagcctttctgctgggttggattaagtcctgatgtgacattgtttttgtgtgcgaataaggcacgggcagcctcagtctcgtgcagagccagatactttattcatcacttgggcgatttgaaactgccaactccctccctccctcccccacccttgattctaaagtgacataagaatggtgataagtctgaactctttcacctcttaaatgccatattattgcccacagttgccaaatacaaaatatcaagtcctctgctgaagaagactgaggtcccatcgtttcctgtgtcgcaggtcacttcttcaccaggtggctgactgcatcattgtgaggcagagccatgctgtgcaagtgtcataagtcatcccactttcaactctcaggaacactcgcagccagtgccacgctgtcctcgccatccaatattgatagccaccccagttcctgccagccagcctggcacacataaccataggatcccctctggtcatgggtcaccatgccttttcttaaactgcgcttctagtgacatggccttaaacgatggggtccccaaatgtacagtgct

SEQ ID NO: 101637 - DNA, 1060 bp, Homo sapiens
aataatttaagacacagaaattcatgattaagaaatggggggaaagcggttcatgtgcaggtgatgaaatgtcgtcattttttactaggtgactaatgggggtagtagtagctggaggaggcaccagtctagagtcaacatgttttgtgagatgaattcacttctggcatagagggccctcatgttaaacattaaccaagtgaaatgtttcacaaaaggtatttcagaacaggggtcatgggaaagctgaggggcagctgagtgggctgtctggatcccccaaggctggcctgagagatggaggcagaaagcagggggcagggggctgacggcagcaaggggagcgggagacggctgcagatgggctgacgcgcgatcccacttctcacagggcgagagaggctggctgaggatcgtgaccagcacctataaggatgggaagggcgccagatacaaccttgccatcgaggagcactgtacatttggggaccccatcgtttaaggccatgtcactagaagcgcagtttaagaaaaggcatggtgacccatgaccagaggggatcctatggttatgtgtgccaggctggctggcaggaactggggtggctatcaatattggatggcgaggacagcgtggcactggctgcgagtgttcctgagagttgaaagtgggatgacttatgacacttgcacagcatggctctgcctcacaatgatgcagtcagccacctggtgaagaagtgacctgcgacacaggaaacgatgggacctcagtcttcttcagcagaggacttgatattttgtatttggcaactgtgggcaataatatggcatttaagaggtgaaagagttcagacttatcaccattcttatgtcactttagaatcaagggtgggggagggagggagggagttggcagtttcaaatcgcccaagtgatgaataaagtatctggctctgcacgagactgaggctgcccgtgccttattcgcacacaaaaacaatgtcacatcaggacttaatccaacccagcagaaaggctttttaaaaatttacttatt

SEQ ID NO: 101638 - DNA, 1014 bp, Homo sapiens
ttttttttttttttttgaaacacagtctcactctgtcacccaggctggagtgcagtggtatgatcttcgctcactgcagccttgaccgcccgggctcaagctatcctcccgcctcagccccctccaccgagtagctgggactactggcgcacaccaccacacccagctaatttttgtattttctgtagaggtggggtttcgccatcttgcccaggctggtcttgaattcctggactcaagcgatccacctgcctcggcctcccaaagtgctggaattacaggcgtgagccacggcgcccagccatatcagattatttctaatgacggtaaattctctcaatttaaaagtggtaattctttaactgcttgctctcagctgtggaataatggcaacagaaagactggctaactacaccggaggcatctatgccgaataccaggacaccacatatataaaccatgtcgtttctgtggctgggtggggcatcagtgatgggactgagtactggattgtccggaattcatggggtgaaccatgggtaagatgttttcattttcttaaggtcattcctagaaaaaaacgtcctggtactcctctcgcttgaatggttctgtttacgtttagctaaaaactggggccttgacagagggttccttgctccagctgtctcagccaccgcgcgagtggcttttggggccagacccttctctgacatgcgcggctgccgccatcctgtgcactttgggtgttcagcagcatccctggcccctccacccactaggtgactccccgcaatcccagtgtgaccaaaaccgtctccagatggtgcctggtgccctggggaagtccctgtgagcactgctggagaggggctctgccaccctcttcctttacaaccagctcattctttttcccatcatggtttttgggctcccctaaaatactgtgtcggtttttcaaaaatactcgagttgggccaaaaatccaggagagagaaattaactgccagacct

SEQ ID NO: 101639 - DNA, 1039 bp, Homo sapiens
ttttaggggagcccaaaaaccatgatgggaaaaagaatgagctggttgtaaaggaagagggtggcagagcccctctccagcagtgctcacagggacttccccagggcaccaggcaccatctggagacggttttggtcacactgggattgcggggagtcacctagtgggtggaggggccagggatgctgctgaacacccaaagtgcacaggatggcggcagccgcgcatgtcagagaagggtctggccccaaaagccactcgcgcggtggctgagacagctggagcaaggaaccctctgtcaaggccccagtttttagctaaacgtaaacagaaccattcaagcgagaggagtaccaggacgtttttttctaggaatgaccttaagaaaatgaaaacatcttacccatggttcaccccatgaattccggacaatccagtactcagtcccatcactgatgccccacccagccacagaaacgacatggtttatatatgtggtgtcctggtattcggcatagatgcctccggtgtagttagccagtctttctgttgccattattccacagctgagagcaagcagttaaagaattaccacttttaaattgagagaatttaccgtcattagaaataatctgatatggctgggcgccgtggctcacgcctgtaattccagcactttgggaggccgaggcaggtggatcgcttgagtccaggaattcaagaccagcctgggcaagatggcgaaaccccacctctacagaaaatacaaaaattagctgggtgtggtggtgtgcgccagtagtcccagctactcggtggagggggctgaggcgggaggatagcttgagcccgggcggtcaaggctgcagtgagcgaagatcataccactgcactccagcctgggtgacagagtgagactgtgtttcaaaaaaaaaaaaaaaaaaaaaaatctggtatgacaacaaagtgtaaacccgactcaggtagtgtatatctgacggttctggataaacttctgttgttattcacatagtgtctt

SEQ ID NO: 101640 - DNA, 1074 bp, Homo sapiens
ttattttttaagcctaattcttgataacctcttaagtcgaaataaccagaatttttttttttggtcccctcagcgtgggcacagaagaaaatgcttttttgtggttgttgttacccaaagtattggcctatttattcaccagccagcaatagagacattttattaagtgctaatcatttgattatgctccattttcagctagaaagtattgtggaaaggtccttctccagccattagaggaaaaaggcgaactcctgggtgcctactatgtgctaattaatgtctgtctcttttcttctctgccaaggcctggggaagggcttttcataactccctggcagctgaaagaagagcgtcattaagcagcacctaatagcaagatgatttccgttcttagctgctgagtggtaggctgcatgatgagagtggagagtgggcttggcgggcttctttgtcagtgggttgatgaggagacggcctcatgctgacttttcttgctctcccccagagtgtgacaagtttaaccaatgtgggacatgcaatgaattcaaagagtgccacgccatccggaactacaccctctggagggtgggagactacggctccctctctgggagggagaagatgatggcagaaatctatgcaaatggtcccatcaggtgaggagaggtcccgcgggcaaagagaggtttgcgggtgaggaaaggtcccgcgggtgaggaaaggtcccgcgggtgaggagagatccgcggtgacagcgccagtgtgggctcatgtcggtgctcatgtaggcatctccgtccttcgccactttccttctggccggttgtactcagtaggctcgagacagccacatcatttcccctctaagaacttcagttttctcagagttaacactcagctgatagcaagtctgcccctatggatggttgtgcggaatgcggatgagacgctccaagctgtaccgagggggcagtttcagcagggaagacactatgtgaataacaacagaagtttatccagaaccgtcagatatacactacctgagtcgggtttacactttgttgtcatacc

SEQ ID NO: 101641 - DNA, 1072 bp, Homo sapiens
gttcacagagctgacaccttggccccctgtccacgagggcagggacggtctctcctggctggctttggggtgtggcccacttgccatgggtggctgagtctctgtccattcagcccttcattcagcaggcacttctcaggtgtctgcagggccagatgctggtgaccgcctggccctggccctgctctcatggcatttgtagcgggaggtgtggcagacaggacagtgcccaaagaaggccaggagaggcctctctgcagagcgacgtctgagcggagacctccatgaagaggtcagcagggagaaggagacacaggcagctgggcagagctgaaggcaggccaggctgggcagcgcctgcatcccgcctgaggcgtccaggtccgttcggggaagtgggtggagagtgggtgagtgctgactggcaggtgctgactgttgcagatcggatcaacatcaagaggaagggagcgtggccctccaccctcctgtccgtgcagaacgtcatcgactgcggtaacgctggctcctgtgaagggggtaatgacctgtccgtgtgggactacgcccaccagcacggcatccctgacgagacctgcaacaactaccaggccaaggaccagggtaggctgctgcccgtgcccccactccaccctcctgccctccactccctcttccacaggccttcgtggctgaggacccagcctgaccccgtgctcctcacattggctggtggctggggagctgcgggagggcagaggttgcagcccccaggggcgctggtgctcttgaccatgaggggtagtgttcccagtgccagctccagcctctcgctgcagaagccccctctgctatcttgcacccgcttgggctggggatcagaaaactggaccccgtagtccctgttgagaagcccaacgaaaaagcctgctgcaggagcggtctgaagagcatccttggccatgcgcgcggtggctcatgcctgtaatctcagcactttgggaggccgagacaggcagatcactggaggtcaggagttcaagaccagcctggccaacacggtgaaatcccg

SEQ ID NO: 101642 - DNA, 1031 bp, Homo sapiens
tcctccgcctcggagctgtcatcctgctgttggcaagttagggcacctcagttcagtgctgtggcccccaagattaaggtactaggaagtatcctccattacagggaacaggaataaatgaatcaaaaagctatcgggcctttttgacatgggacgaataaagtaactaataggcaaaggggctaaatgatttccagtcaagtaattagagataagtcatttattaaggaggcagatggggtattattggtatatagatggcatagtagattgctagtatattggtagattattggtatatagatggtatgttaaggaggcagatggggtattactggtatatagatggtatggtagattggtagtatattggcagattattggtatatggtatgttgaggcagatggggtattactggtatatagatggcatagtagattggtagtatattggtagattattggtatagagatggtatattattaaggaggcagatggggtaattagaggtgagacttagggacagggcttgtgatatggaaaggagtgaagtcactgagtaaaagacaagtttactgtcagcagagattcttagaggctcttttctccgtgattaaaaaaaaatcctaaaccagtagtataataaacttcctgcctccagcagtgctgggtagctggcaggatgactgtgcccagtgatgaggtgaccccagtcagaccaacttaatgagtatcccactaattagttggatgatgtttgaagctgtcagttaatctcttagttcacatcgttcttgtgagcaaagtgaaggaatcggataagctctaaatttcggtgatgctgctgctctgagagaccaaggtcgctggagcaaccgtactgctaaaggataagctcttcaaaatcaaaagggacagatttcttaagtttctagtttgttttgtgtttttacatctatttctaccatacgaaagagtaggatggtgagatgcatttctaaatatttttaactactcagtctggatggtt

SEQ ID NO: 101643 - DNA, 1031 bp, Homo sapiens; identical to SEQ ID NO: 101642

SEQ ID NO: 101644 - DNA, 1480 bp, Homo sapiens
actttttcacacttgtttttcctcctcccagctatcagcaggacaggtattattgtccttttattctgttgtttttttcaggtgagtgagtaaacgtgctgaaaaggttgaacagcctgaaggtcacccagttagtaagaatggaagcaggcattggaactcatacctctgagtccccaaaataaattctaaaacatgagaaaatagcacccctccccgcttcctgtttttcaaaagtgggaaaggtgatctgacatcttttggaaactacagtgttgatgggagtccatctaccaaacaggaagcaggttttacagttttgctagaattgatgatgttctctaagcacttttcagtttgatttagaaatcttcattaggaggttattttcagtggcagacttgtgagacagaattcagtattctcagagaagagtttaaataatttagaacgaattgttttaattcaaaatagttttctcttatgtatacctcattttccaagaataatataattaaagttttaaggagagaaatcgaggagagaattcatgattcatgttatagtctctaaacatttcagtctctttttttctatgctgtgggatttttaaaaacatttatgcatctttcattttgaattaatatacactaaagagaaaacacagtacaaagaagaaaaatcaaagatcatccatccaaacaccagttaatactttggtacatttttttctagttctttttctttgtatagatactttttggcattagtcatatttttaaatccaattctacaataaggtacaaccaaaccaaaataaaaagtacaggaagaaaagcgaaaacacagtaacagctgtctggctggaatattgataattaaccatataccttctctcattttctcccagctacatccgatactcccagatctgtgcaaaagcagtgagagatgcactgaagacagaattcaaagcaaatgctgagaagacttctggcagcaacgtaaaaattgtgaaagtaaagaaggaataatctgtaagttatggatttatttagaagaacagttgcatcttaagtttttggagcaccataaagatcaaaataattttagttttgggttctattcattttttagtcagtgtatttggaagttagttattgggatggtataatttaaagcatgcaggttatagaagtcccctggcctaataaaaagaaagtcttcttgggccctgacaagcagaagtaattggcacattgattttcagttcatttagcaatgcttaggtagagagccatcgtatttgaattaaacctgtttcatttgtctgcacaaatcaaataatttggaggatgaactccccacttgtataattgcaattggagttacataacagtccaagagcatgaaaaactacagttctttacatttttatttcccccacaaccactaatgttctcacaaatcactacttccc

SEQ ID NO: 101645 - DNA, 1040 bp, Homo sapiens
acacgcttgtctgtccacagatttaaaaaagccggcgccgtttccctgaagcgggcgcaaagccaggccctcggggcggccgtgcccgcgccgcctcgcgtcctcgcttcccgaaagcacgcggctcagtggtccttagcgagcggggacaccccggccttcttgcccccgtcgtccccgccggggtaatacggaaggtcgggggacacacgccccgggagctcttggagccaataggtgggcgcggccggccggcccgccccgggattggcacccgcagtccagaccgcgcgcgcccattggctcccggcgccggggggcttccgcggcagggcagcaggggccgtgctcaggggcggggccgggtaggaggcggtgattggcaggtccgcacgccccgcctcttccgcttctgtggtctgatcttcctgcggctgaaccgcccggctgagccgacattgccggcgtcttggcgattcggcccgacgagctccgctttcgctacagcatggtggcctactggagacaggctggactcaggtaggcccaggcctccagagggaagggcttcgcgagccggcccgcgcgcatcccggtgcccagaggtcatgcaggacacagagcagcggccccacgcgtgaccggggttgggccaagcctcgggcgtcgccgccaagatggcgtcgctgtgggcaaagcgctcaggcgggcgcggcctcgacctcgcgtgggagcgcgtctgtgtcctgcctcgcttcccgacggtgcggcccagcacccacagagtgcccctggacacctttgtgaatggcaggtttctcgagagagaggccagctcttatttagcaaacctttttcttctagaatggtgctggagccaggtggtgaaagtagtacagtcacatccacctcgggaaacaggagatttctctccacgtgaccgccgttagcagctttgacctttaatccagcatcgaggtggagccttttacaactttacacattttttttttaaacttttaagtcctgttgatttcagg

SEQ ID NO: 101646 - DNA, 1577 bp, Homo sapiens
tttaattgtagattcatttgagaacatcttttgcatacaaagtaaaagtcagtttatggatcaagccagttgctcaaggcatttgatgtttgctaaataacattagaaaaagccaggacaaaaacgatctgtcatcctgagattgagttaaacttgtcacgccccttgttacttcctggtgtgtcattagttcgatatatgcctttgctctccctcagtaacaataaatgtattggattttttttaagggccgagaagcaatggaatgggtaatacataaattaaatgctgagattgaagaactgacagcctcagcaagaggaaccataaggactccaatggcagcagcagcgtttgcagagaagtgatcgtgacagttggtagacaacatcgggtactccaggtctctccaaactgactatatatttatttgttattttaaaaatacaactatattttgggtagtttttttttttttttttttgataagttggtgtaaggctatgtgacttgatcaaaacagatgcagggcctctaaataaaagggatcatctgaaattaatgttgtttgaaattactatctgattttgagggttccagtatttctgtgaaaattcaacaagaactccttggaaactggtattgatattcagtctccttaaggtagatttttcaagcttttcatacattggaactccacctgactttggaccaaccccagaacagagcagagccacctcctatagacgcccattgccctgctgctgtacacttcagcagcttgcacaagggagctcacttaaaaggagaaattgtgtagttttaaaatatattttgtgtaaaataccttactatgctataaaccaccattaaaaaccagtgttttgatttggtacttaaatatttttggagtgaaaattatcactaaagtaacatgactccaacaaaagtatggtttcattataaaagagtactgtattgatttgcccaagttttgtaacttagtaaaggtattaacttccttggatttgtactttgtgatttagtatgctgtatcgtgggctggttatgttaactgaaaaaaataaagtcattacctgagttttgcagtgctctaacttaaacagaagaacagctgttcacatcttttagcattttacatttgcctaacttaaaaattgccatgtgtcaaaatcatggttttgtaattgctaaggcatgatatgtcaggttatttgaatataattactttttgaagtaattgtgaccacaaaacatcttttttacatgaaggagctgtgtatcatttgaaattactcaaatgatgtcttgctctgaggcataaatcccaggtacttagtgtttttaataatatggtgccactgcaggatttgggggcggtggggaagaacaagcataatggtagggggaggcttggcctgaaactaaccactgagtgaattgcactgcaggttttacttaacgggaattccttatttgggatgtcaagagggcagctgcaaactgaaaaacaatccagtaaatgtactttgttttatgtattgtagcaggcaatt

SEQ ID NO: 101647 - DNA, 1042 bp, Homo sapiens
acacagaaatgagcagggtcagggggtgggcttggggtcatagcacagggagtgacagtggacactgacgtgtgagcctccatcgtaagaacgctgtttttctgtctggagaatgaagctgaggtgccccctcccttgggctgttctaggaagatactgacagatgcctttgagttctcctttttctagctgccatgttgccccaaacctgatttccatatctcagcctcagcgctccaccgtcgcaccgcggcagattcagcgtgctgcctcacgttgcagacgttctcagtgggctggtttctaattgcctccgggaaaagtttttgtgtctggcagtctcctctcatccatgatatgtgaataggcctcctttctgacctttgcttgtttcctctggtttttagaaaacagatttttggttcaaaatattgtaacacattttttccttcaaataaaatattgatagacttggtaagaaattcttcctcctctgattcctagttctgaatgttttacttagcttattggtgcagcaagaacgaaaacatatgtgcaagaacattctgtagttgatcctgtagagaaaacaatggaacttaaatctactaatgtaagtcttggctcccttttgtttcatttcgaactgtctggctgagttctttgtccctctcctagttgccgtagaagtgagtgcgtgttcatgatgtggttcagagaatccctgcttatgtgctggcctaacttggccctggatgttgcttccttacccttcctgctctcatgatcttgcctatctctaaggggatagcactcaataaaatgagtttgggattatgtgtattatcattattatactttatttcctcaactttgctttttaaataaaaagtaggcagtgaatagtttatgcaataatagcagcggtttatttgttgttttgtatgtttagtaagattttggcttgtgtgttgattttagcaacattttgaatcttcagttccaaaatgatttgatcttttttttttttcttcattctgta

SEQ ID NO: 101648 - DNA, 1019 bp, Homo sapiens
tcagggtgccggcaccatgaagatctggacttcggagcacgtctttgagtaagtttggggcgcgggtcggctccgtggagggcaggcacgccggccctggagtagaggcgaggcagaggcggcccgcaggaggcttctaggcgtcgggcctagcgaggggagcgaactctgaagcctgcgggccccggcgacacggagggcagaccaaggtcacgaccccgaggcgccctagccgaggggacggctccgacctccagacccaggcggccttgcgaccggcagggctacggggtcacttccgggctgtcccccaccatgaggtagcctcgggccggcggcctcctgaggtcctgggggcgtcgcggagcacgaagcccttgacagcactcagggttgccccatcccgccctgtgaaaccactttgggacgtggacccgaggatcccaagagggaggtgttggttttctccagagtgtactttccctggccgccgtttgggtggagtttctaccttcgaatgtgaatttcgggtgaactctgaccaccaggatgtgaagccttttcacaactcgttcatctacgcagcagagccttggatttggaattcaaggtctagctctggctgtaacaagcgtgtgaccctgggttacccattttcatctgagagatggaaaaggacgatcgtcagggcctacccgtgttagctctttgaggccacgttcaggaacatctttttggataatgtgaactgtttactaacgaaactaagccttgaaccagttggatgtggagaattatattctcttctaggtccctgattccatttacaaaagagccacaaatttaagcagcgaaatccttttttttcccgagttacctgctctgttccgctgatcttaatgtcgttgccacactgttttaattagtatagccttgtaaataaatatgctacaaagccatttatgtttttaaaactgtctctgaaggcaaattttttttaaatttcttttttgaggcag

SEQ ID NO: 101649 - DNA, 1032 bp, Homo sapiens
gggctggcacttaaaggaggtcacttgggagggggctgaggcagagagtgtggctgggtttcttggtttcaatgttgcatttcaatgttgagtcagataggaccccagtgcaaatgccaagttttgggttggagcaagggtcccggcacccaaggaagaaccaggctgtgtgcccacaactctttgggcactgtgatgccagacctcaagaaggtccctttgacttcattccttttggaaccaggaggatctgtccagctgccacctgaagctcagcttccatgatttgtgtggctacttcccggagcttgcttgggaatcttaactctcacccttaaagggataatgtgctatttctggggccagggctgcattaatttaggaacaaattaaccactcattcttccagacttcgaagtctgatttcgaagtgctgactcgtagtgggttatttctgcactaaatgagttttttttttttcctttaaaatttttgtttgaagggaaaggcgtgatcaatgatatcatgacatgtcccagctgatgctcattaaaagttgtggctttaggggctgcaaaagacagtttgaaatttaatgccttgtttcctggctcagctcagagtcggggctgggcaaggctccctggaggctataactctgaagacccagattgggtctggagttgcccaattcttttgaaatcttaatgacaaccagctggacttagcaggcttttctggtagcaagtgactgaaatggactagacacacagaagcaaaagggccatctgttaattcaggaaactgggcgtctgtagctccagctagcctctccttgtctgtcccagactcagggtgggtcatatagctggcccttgaaccacttactggagtgagggagtggggaggactggacggctgagacctagctgtctcctccggtccagaaatggagctggcatccccgccatagccagcctgagacttccagtaggaaatcaggaggatcgcagaaggacatgggtactgggg

SEQ ID NO: 101650 - DNA, 1124 bp, Homo sapiens
tgtgtctctccacttacgagtgtccgaaacagctgtatgaactgcacattctccgtcttccatgactaaatccccttaacgaccctaattcactctaattccagtaacaaggacgctccagcactggaggcttggtgcatgttcgatttctatttttattttaatggctttgctatctgtgccttttcctataatccatgacaaatcatgataaattaactccatttttttttttactgtttggttaaacattgggatgataaaaaataaggcgatattcctcttatttgtagattactgtgatttctgacctagagtattgtggtcacgggtgaaagtgcagaatattgtacactgatcatttgcgtttgcttgggagtcactgcagtgggggattggagaggagccactctgcagtcactggacagtgatagtcacaccagccaggtcctgtcctcagtcctgctcactcatctacacatctctgtgggagatgagctccacttggtgggaccccatttgacaggtgaggaaaaccgaggctgaaagggacagagtaacgtgcccaaggtcacagctgctgagccgaatttgagcctggacagtctgctggattcttggtcgttctgtgatcctgtctctcatgaacctggatttatattatatcccattggttctggaaagtgtctgacagcaggtcaatgcttgttgttactgcctgctttggaagcccttaaaagatgccccaactctggctgtccttgtggggtgcctgtcttggaaatgagcaggctgctgactgaaaagagcctttccctgtaggtgggatgtggtgccccacaggtgggaccccgtgtgccctacaggtggacactgggatggttctctccacctgtcctcatctgtggcttcttccctttgttagagtcttgagttgatgttggatatgagcgcacctttcttccgaggatcgtctaagcagggtggaggagatgcaggttgcacagaggtgggagaaggacccttggggccaggaggcagatgtggggtgtccccagctctgccccgagtcccagtgtgaccttgtacatgttcacccttctctgagcctggctttcctcgtg

SEQ ID NO: 101651 - DNA, 1035 bp, Homo sapiens
gttcatggctggtcaggaggatcacaggagagatgtctattgctgccagaacaatttaccaccaactcagcagctaaagcatcaccgatttattgccacacacagcctgtgggtcaggggtgcaggtgggcttacctgcttccctctctgggtctcagcagcgctgtgctgtttgccagatgctctgggagagaattcacttcctgctcgttctggtggttgtcagaattcagttccttgaggctgtaggactgaggtccctattttcttgctggctgtcagctggagctggggctggagccggggctggggctggggctggggcctgggcccgggtcattttggttctcagctgtagaggccactgccttccctggctcacgtctaccttcaaggccagcaagggtggctgaatcctctcagccttcaaatctctcctccctcccttccaccctgtccactcctgccttcccctctgcttcctgagtgattccatgaggcccatcgggtcttccaggttcatctccatatcttcaggtctcctgattataaccctgatcccagctgcaaaggccttcacattggtgcctgcattggtgcttgatcaggtcaccgggggtcgggagtcctgagggaatgaatggctctcaaattctgctgtccttactgtgggtaagtggctgagggctgcttggaggaacctcacagtaaaacagacaacctctcacttaaacagcacataaactcatatgtgaggctctgatttgtagcagtaatagtgcacaggaagttttttcatttattacagatttagctgcagggtgcttttgataaaaagacccggttgaatatagttaaaacaaatctgggatccgcccccttgctgagcatttctgtcgcccctgtcccagtccaggctgccccatctctccctgtccgatgcagcagccccgtccccctggtccctggggccatctctgctgtcgtccactttatcctctatctggcggccccaacacccttccaggagaggtc

SEQ ID NO: 101652 - DNA, 1119 bp, Homo sapiens
cttggggtgtcagggggcaactacctcttcatagcaaagcttcattcgttaagttcctggttctgggctattgtccctgtctccgaggatcagagaggtgaagtcccctgcctgggttcagatggttatggagtaggggtcctggttcagacccatggctgtctttcttgccagcagcacttctttctttggggtgatttttcccccaggggacactgcagtgcctggagacattctggttgttataactggggtggagggtgcttctggcctctggcatgtagctgtcagggatgcggctaaacctcctgcaatgcacagcacagcccccaccacagagaattgtgtggtcccaaatgtcaccagtgctgaggctgagaaaccctgcaccaggcccctccccagctgaccctatgttcctgcaactaagccagcagtagacatacctgcagcagcaggtgttggtgctacaggtgaccctaggtcctcgacctccccatctgtctgccacctgggcctgggcctgggcccggaataaaaggtgcaccaagggtccctggcttcagcattttttgttttcaggttgcatatcagactccttcttgcctcctgaggtcccttgggacttggctccaggcagcctccctgatctaagacttcagcagccgcctcaggactctgcatggccaaggtcccctctgccccaggtcaccaaggtcattgtggtagggaaggagaagagagggccctaagaaaaactccagtcccactagttcctggaacttgcctaaggccaggagaagttgctgccatcgtgggttctgtatatgggattcaggactttggttcaggtggtttctgccaggctctggccagatgccagcctaggcagtgtcctggcagtgctgagtgacacgtctcgggcacagagaggagtgggcgcctggccctgagcagaggggaggcttgttgggggccagcacttgatccactgagccggaccctcagaccctgggttgccctcctcacccccacccccacctcatctctgcttcctgcaacatctatatttaaaaatgttgacagataataatggtgttcagccccaaaatgcagaca

SEQ ID NO: 101653 - DNA, 1082 bp, Homo sapiens
cagtcccagagccaccatttcggttgtcacctaggtgcaactctcagcagaaggaagcattcccaataagatgttctgaaaacgtactgccgttgaatctcacaactttcaccccacaagctgcaataagaggccagtatgaaaatgcgctctttcttccccatacattttcttctgttcctgagccgagcccataggtagcttggcagtttgcaattctctgtctacacggaatagatatagatttttttttcctgtatgttttgggtattaactctttggttgccaagctgttgagccctgagtctatattatacaccttcagcccgtggcttacagggcttcaacacatcgttgttatataatgcagtagttttgcttgtggggtgactgttcatatcgtggatgctcagaaaattctatttttaaagtataaaataccactcttcagagcagcctgctcactcctgcctccctgggagccacacgctttgcaccgtggagttgttggcatgaaggcacatgacatatggatgggagtgcgttcctcctgtctagggcctcttaggacccgaggaatggctggaggcagtttctctccagtcctgaggttgatgatccgaagctcttggtgctgagcctgtgctgctatttttagcttcctttcttccctgcatcttgacataattcgacatgtcgcagctgaatctcatctacttgcagagcttaccgtgttttgtaatctgtgttttgtggggcagaaatagtccttgccagagcatattatatcattattattcagggggaaagttatgatactatcaattaactttagaagatgcaaaacacaattgatcctttgattttctttctactgctaatttcctggctgggagcacctggagggtaggcactcctcctccttctgccggaccagaaggcagcaagcagtggttctcacatcttgggaacctgtatcagaagcacctggaggggctgttacaaaggcaattgcagccccactggcagagtttctgagttagcaggtctgggtggggtgggggggcaagtaatttgcatct

SEQ ID NO: 101654 - DNA, 1037 bp, Homo sapiens
caggctgacagtgtggctctcaccctgctgccgtgggagcctggtctctggcttccgtgcctctgacggcgacatcacacacccgcaggcttacagaatcactttagatcagggtcggcaaaccttttctggagagggtcagatagtgcatatttcagggggacgtgcagtctctgttgcaactacttgtctctgcttttgtagcgcaaaggcagccggagacaaaacatgcatgagagggcatggctgtgtcccaagaaaactttatttatggccactggcctttgaattttatataattttcatgtgccacaaactattatttttcttttgatttttttttcttttgtcaaccatttaaagatgtcaaatccaggtgggggagctggattggtccccacattgtggtttgctcatctctaccttccatactctctctcttgctaaatgattgtggaccagggactagagtggcctgaaacacagtctctttccttgagagggaaaatgcactcctaaattgatgccatgacattttattgagggcccactctgtgtcagggtctgtgctagctgctgaggacacaggtgagcaaaatactgttctgaacgcacatccagtggggccattaggtaatcccacaaaaagccggcaactcacgaccacagtgagtgcagtgaaggatgcagcaccctaagatcatgagacaggacctgacctggttctcggggggccgggagatgtttgagtcaggtccaaaggtgggcaggaggacctaggctggttctcagagtctgttgcatattaggatcacctggagagatttaataaccctccaccgctcaggcagcagttaaattagatgcgctgggcgtgggacccaggcagcagtgcttcctcatcctccacagctgattccgactttgatgcaggaaggttgaaaagccaagagacagaaggaagcggggagtgacttccagcccacaggagcagcaagcacaagtccccgcggtggaagggaccttgagatggtggg

SEQ ID NO: 101655 - DNA, 1059 bp, Homo sapiens
agagtactacagcccagacctttaacccaggaaccatgtcttctttcagtagcagcctcttccttcctatcgtgggcaaccaggtcttcccatcagcaagtacttctaattgtgttaatctttggaaataaatatcagagccttagaaatagaactatctttggtgaatagggagctagcaaatgcataactgaaactgactgcccttaccttcagtgcatgaaagggaaaatgggtttcctctgcggtggccatggcaatcccgccataaacactgtgccttcatcagtgaatgtaggtttgtccttagctcggaagccctctctagtgtcctgagtggaaggacctgagaattttactgctaggtttgtggtgggtgtttggttttacttttgttctgtggagatgagaatagggtaactatatatagcctagtatgaaacatcatactcataggctctagatacacaggacttcaagcactcatactgtattgtattttcttcttgtaaccaattcttagaatatcacttttgtatttgcttcaagggggaactcatgactaactgcagtcatatctgaggagcactcaaaactccgcccatataacactataacgtggatagaaaagcagaagagcaggggtccctttatatggtgatggtaattctttattaggcccaatctgtgccagggactatattcagtacttggtatatattccctcatttaatcattgcaacatatttgtgaggtttgcactttttaataaatgaatattgggaaaaggatagcactagagttcaaccccaggtctgcctaactccattgcccatcttcttaactactgcatcagaagcagtaatacatttctggatattcatggaagtctcaggtataactgtccaagctgctggagctatttccagaaaatatgagtatagcagtcctgattatgggtcccttgctttgtataatgcagagggtgttctgggtctggaaataagaaatccataaacatatcactaaggggagctcagaaggggaggtctgtgggct

SEQ ID NO: 101656 - DNA, 1052 bp, Homo sapiens
gattatcaaaaacaagaaaacaaaaacattttgattgttttatttatgcaactatccaccttcctattatgaattttcttatggtctttcagctatttgtaatcatctaataaaagaaatgccacgtttagtttttttaatatgtatactattaggttatacctctctggaaataagttgttttgatttaactttgaattaacaacatcaacaccaaaatacaaatatcattatctgatctggttttccaagtgactttcttggataggttattaatgccatcctaaattaggatgttaagaaatgacaagttagttttcctgttttgggttttgtttttttttgttgttgttgttgttttggtttaacttaccttgcatgacataatgagatgtagtatttcttcatgcatttcaaacttttttttatagattataacaaatcatcaaaagaaaaatctgtttagtgatactgaaacagagtacagatgtgatgacagcaagactgatattagctggctaagagaaccgaaatcaaaaccacagctaatagactatagcagaaataaaaatgtgaagaatcataaaagtggaaaatcaagtaagaaattatcttttggataaatgttgcaaatgattttgcagtttatttcaattattgaaaatgctttatataagcttattgtatttagactgttcattactacatactttcatggataggacaaaacactagtttttatgttttttgttttattttagtaatacggttatatttatttttaataggaccttagggacacaaattatgacttatcattatccttggctcatgattttcgtcacttgtctactcatggcccagtattatccagttatttagctaattattgtgaataatataccaagtactcatgaacccaacacctttaagaccaaggcttgaactttgacactaatctatatatatttacatgtatttacatttgtgtgtgtgtgtataaaataaatatatttatatgtttgtgtgtgtgtgtgtgtatatatatatat

SEQ ID NO: 101657 - DNA, 1192 bp, Homo sapiens
cataattttcacataagtaatcgctttcagtaaacgttgactacattaaaaatcaaggtcttaaagtcacaggctaatgttttgtaacattaagcaaattaatttattttctagattacctggtgttttagacaacatctgtggaaataaaatacacagcaaatgggcatgttggacacctgtaacaaacattgaactatgtaataaccaaagagcaagtacttcgtcaggagacacattgaatcaaggtgaaacttagttttatctatatgtaatagttcagtgttaatttcctcaaatgtctaacaagtattaaaacaaatttaacaaattttacatatgtcaacttattaatttaaaaagaattaatttctcattttccccaatagatattgttataaataaaaaacttactaaacaaaaatcatcctcttcaatatctgatcataattctgaaggaacaggaaaagtgaaatataagaaagaacaaaccgaccatatcaaaatagataaagcagaagtagaagtttgcaagaaacacaatcagcaacaaaatcatcctaaatattcagggcagaaaaatactgaaaatgccaagcagagtgattggcctgttgaatctgaaactacttttaaatcggttctcctaaataagacaattgaagaatcgctgatatataggaagaaatacatattgtcaaaagatgtgaatactgctacttgcgataaaaatccatctgctagcaaaaatgtgcaaagtcatagaaaagcagagaaagaattgacttctgagcttaattcctgggattcgaaacaaaaaaaaatggtgagctttcaatgtgttttgatttctgcatatccataagatgcctacttgataacataagaaagaaagaaacttgattaattgctacacatttaacatgtgtaataccttgtttaattcagtgcccagactctcagaattcctcactcacctctcccttgtcgtagctctgatagaacagtactaggtgcatatcagacatgtaaatatgtgtagaattaatgaaccatgcagttcctgtctcttctttttaggttcctcccactctttccttttgacttggatatagaactgtttgtacatttcttataattcctacctttctttttaataaatggtttttttttctctctttgactgtaacca

SEQ ID NO: 101658 - DNA, 1048 bp, Homo sapiens
aacttttaaaaaactactagcgctctttgagtttgaaactatggttaccactttcaagcaattgttaattcttagtaccttcaaaggtcattactgtgaaagttttatgagcatatatttgcaaaagcaaataaaacattttctgcttgggcaggcctcataagaatcaggacatttcatagcctataggacatttgtcccttaggccacatcatggcgtggcctgcagagctttttcagatgtagagataaatttccctactttgtgtgatcctgctccttcagagtgtttttctcttgcccgaaagtacattgtgggcagggttggagacttttcattcagcaatagaattcctgccacaagtaggacacgagcatggtggcctctggtctataatacaggtgcatttattaggggccaggtaattttttggtaacttttgtagggagggagagtgtgactatttcttataagctggtacttgctgtattctctgtttactggattggtaagttcattgaggccaagtgctagatccttctcacctcacaatctcctgacacttaatttttgtcaaatgttgtttattgtcagcatgttataacaactgtggatttaatagaaatgtttatatgtgtatgtctagaaatatggtaattatatggaattaaagttattgtttttgtttgcctttttttaaattaagaaaatagtattctcagatgtgttcaaggaatattttattaagaatttgttagagtccagaatgtatttaggattctatcttattagttatagccatatcctgtattttatagataagaacactgagactaggaaagctaaattgacttgattgatttacataggtaagtagtgccagaattgattaatttaaacactgttcaatattgagaatttgaattttgattcaattaatctgctacatccatgtcttatttatagtatacttgcagagtagtatcatagaaacgtaaactaatcagtgttgtttctatacagtgagagaatcaaagaagctactga

SEQ ID NO: 101659 - DNA, 1004 bp, Homo sapiens
gtgtctaatattcttcatattgatggatttgtttttaaacaatgtgtttattaaaataacttaaaatttattttctaagctttttgtgaatgaattttaatatggtgatttacatgtagaataaatcatggtttaaagtactctgggataactgtaaacatgttacacaagaggaaaacagactttgtaacttacagacaactgtgtgggttactttgcattttatatctctaataataatgaaatggcagtgtctttgaatatttagaagtctcaacatttttttaaattttacttatttcttctgttggcacacttgttatttgggctgtgttaattcctcaaatgatgagatatttctaatccatatgaagaaaatattaatagattaatcaattacattaatatattcttatttctcttgcttattctaataccttgtaaaatatatggtcttttataaacttaattttcataattgtaaatcaaacattaactatttttttaatagattatgacttacaggtaggcattgtagaagctttgtgtagaatgaccacagaaaaacaaagacaagaactggcacatcagtggttttcaatggattttattgctaaggcatttaaaagaattaaggactctgaatttgaaacagtaagttgtataacaataacagaaattcgtgaatttttaaaaattattatgatttttaaaagtatttctctttaaaattaggattgcaggatatttctcaaccttgtaaatggcatgcttggagacaaaagaaggtaaacttaatgcaagatacaaccatttactgtcaaataaatagagctcaagagtgagcacccagtgttgcatctttatacatttaactttattcttgttctctacactatgttggagtgtagaatgtgcatagataatttaaaacaataacatgattttagcaaattactacaccagtaatctgaaataattctgcactggccttgttttatttt

SEQ ID NO: 101660 - DNA, 1048 bp, Homo sapiens
gctggcgcaggattcactcgctgtttttattctgcttggtgggagtctccaaccatagctgtttctagttggccatcttggccccagaaatgctctttttctagattttgggttatcagttggggccccatcttaaaaaaaaaaaaaaaaacaagtggtgctgatacttatagcagaagactttctaaaacagatttttctactttaacttgccattttcttcaggccagaaaagctgagacctcagcactttgcaggaaggaaataggtctctagtgcatcccggagacccgggggacgaagggctctatgagttcacatggtttcaatatggtgatgtcatgtggcacagcaatgtcccctgaacctatgccggattggtttttaacagtatcatcaaacagcacatctaccaggactctttaggttaaaaaaaatccagctcaaactggattagaaaaggaagaggggaattaattggctgcaggcatggcagatccaggggccccaggtgacataaggactcactctgttccatttctcactcactatgttggtttcattttctaagatgccttatactcagcagtctctctccatgcaatgacaaaaggtggccttcagcagctccaggcacacagcctcccagctcagcaccctcaccagagaaagcacagatccagcaaacaattagaggatggcttcatttaattgcattaggttatgtgaccatctctgcactcattcccatgattagatgtgaaaactattcttagaactagcctgtgggtctgcaccatccttaccacatggtctgagagtagggaaggggtgaggtccccaaacaaaatgatgacagcacacctggaagaaggggaatgcttgctgggcagtgaagaggtgtctttcacattaaggctgagaaatggaaaattaatcggtgatccaagtgaggctcaagaggaaattctccctactgcctattcaattggaattcccctgaggttggtgctcaatgaaactttgttaaatatgttaaatgaaataa

SEQ ID NO: 101661 - DNA, 1107 bp, Homo sapiens
ttatgtctgcatcaatccattgcaaatggaaaatttgtaaatcaaaccatagtaagtcgaggatcacctatattcatccaaagataaaaatcacttacaggcagcacctgaagtcctggtagttttatctttcattttctgagtgtgcagtacagaataaacactccacacatccttccttcagcagcaaacccagtgaaatgcaaataaatggagacgcagagtagattcgtggtgaaagcagggcttggaagtccaatggccctttctgttttgtgatcaattctagctcagccactgcctggtagtgtgacttggggcagggtgcccacctctggaggacctagttttgcacacctgtctcacaaggtggaagtgggtggtgggtgggtcaataaagggctgatatggcatagaggcgaggctctaaacaggaagcaaggactttcccctttacctggagcagctggtagaagagaatggatatttgaaataaaaaccgtggagcctgcaataatttaaataggcagagcaaaggagctactccctaatcaatcttttatcgtttttttttttgtctttccctgagagatatggaagtaaatttggccattaaacaaaactcaacacttaatggcactttaatcagttaaagacagtgtgtgacttatgatcccattttgtctatatacaaaatatatgcggtgggtgaagttactcttgtctgtatccgtggatgtgtctgtatctgtatattagctcttcttctatgtatattgaatgaatacctgcctgaataatagtgcttatttttaagtcttgaaattataattcaatttaatttttccttttgcataacatttgtttctactttctccagagttaatatataataatatataattataggcacaataataaaaaatacaatgtgttaaaataatatttatggagcataacaacttagaaaatgtttgcaatgtgttaatagaagtaaccagttgcaaagctgtctatccactctgattacaattgttgtaaaaacaaacttaaaaaaatctgtaaacagaaaatagatcagaagggaaatgcccaaatgctagtaaa

SEQ ID NO: 101662 - DNA, 1037 bp, Homo sapiens
cttggcctcttcggccgcaaccgggcggctccagacgtccaggagggcagaggctgggctggtgcggcgcggggggcgcgggcgcgggctctgcgcctttaaggcccgcgtcggcagagcgagcgcaggggccgggcggcggggcggggcctcggcggggcggccgcggcttcacctgcagctccgagcgcgcggaacagaggcgcgggcggctgcgaggccggcggacgcaccggcccgagggaacgcgccgccggccggacttggcctggctcccggagccggggcggcgagcgcggcgggcgcagcggggctggaggctccgggcaggcgcgggggagcggcggcggcggcggcgatcggagcggcggcggtggtctcggcggcggcggcggcggcggcggcagggagcgggctcccggtgccgggcaccgggcgggcggcggggaagatgaccgcgggcgccggcgtgctccttctgctgctctcgctctccggcgcgctccgggtaagttgccgcctcccgcccccgccgttcggaagccccgggcagcgggaggtcgtccccggatcccgcggggcgctcacacacccggcggggctctcccgggctcccccgccgcgctccccgctgcatccagcccggcgcccgcgctcggcgaagctgcctgcggtcggcaggagcgggaagccgcctgggcagcggggagcggcggagcagggtgggagtggggctcggtggaggacccggggagctccgcctgcaccggacccgccgagcctccctcgaacgcccaaagcccgtagccgctacccggagctcggcttgcctgcatggggcaggcttccactggcggagccggcgcgccctccatcgcccgggagccgcgcgccgcgggagttgccgagcccagccccggccgtggctgaaggcgtggggcgcccggcggctgcgggccagggatccgcgagtgcggggcgcctgcccgacctctcctgcccaaggcctgggggtccgtctagcggcgccgctcagt

SEQ ID NO: 101663 - DNA, 1032 bp, Homo sapiens
attgctgccatgcttttccttggggaaacatgtagatgggagaggcaaggcttgcctcatctttgtgctctctgtgaaatgatggtggtgaagtccacgaggtgcaaattggttgacctgaaaggcgttttgcataacaggtgaatgattcagaaccccggtcatttttgagtgaagtgaatcatttcctgggcagcaaactgtaattcggatgtaacatcacccaaatagtgtgcagagagagaccttcttaccaagtatttttatgcatgaagttctggatacttaaattatccctgctttgaaatgtatgataaagcagacgatgttgttggaaatgcggtaaataagcccacagacggtctgttcacaaatgtggcattcattttcattactgccccactgacaacacgaaaacacacatgcaggagggaactaccaattagctttatcgtaattgcaggattatatccacacttgtgatgggaaagtcagagacagcttcaaaactcagatgacagtagatcatcctgcttattggtctgtttccctttcaagacaaactaattagactttatatttgcataggaggggacataaatcagttctgtgccatgagcaccttggctgtgagcctttcctctctgcatcagtttcctggaagtggcagcctttgaattgatttcaaagcgatagaggaagaggacttttgataaagtatcgaagctaaatttccacattcaggactgttgactgccctaccggttttgtgtcccagggaatgtaaacttttccctccagaactgacagcggttcctgtgtatgtgtgtgtgtgcatgcatgtgcgtgaactcgctcacgcttatagtgaagtgatttttcagatcctcgcccttcaagacagaacttgttgacgtgccttgttgattcctggttatgtggataggatttttattttgcaccgaatccaagttttctgacttagtttttttatctaaactgtgatactactgactcattaatcatcaaaaa

SEQ ID NO: 101664 - DNA, 1174 bp, Homo sapiens
aagggacacggtcatgtgcctgcctaatcctcttcttccattctgccatctttagtgtgtcatttagtgcctcgtcactgcaaactggctgctgtggttccagtcgttgcttctgagttcagagcagaagaaggtgcagatagtagcaccatctgcatttcttccctgtaccaggaagacaaacactttctcagaatccctgcagaagttttcattgactaggtcacaggccactcttagctaaactgatgggggtggagcactgggaatgcagagaattgcattgtcatgtgtgtcttagatccattataatccatcacatggtaggtgtccaaattgctcgtctcagaacagaattggggctttgttttaggaaggaagaaggagggatggatgctgagtagaccttccccagtgcccagtgctgtacccgaagcagagttgacagacagtgaattgctgaatgagtgaatgactcatttgcatacaaaggcattcagacagaggcatggttgaagagagatcagatgcagtgtctggaatccatatctaagaatctgccatttctgccacactgcatggccagaagtactattatcttgtctttacaagtaggttgaagataggctctttgcccatgcagtttggtttgaaccacctctgcatagataggcaactcttccagggcagacacatgctagatacacaggcaagaatgtcatcccatctccctgcatagccgatgtccagcaccggcctaatgcatggtggctgtgaagtcagtattagtcaaataaagtaatgaatgagccggaaaatactgacactgttcgtgtttccgagtcgctttggttaactcacagcagacagggagctgctatgaatattcccataagtggcactaatgataagccaaccacatatgcctggaattattagacactggaagttgcctgtccagtattgattctctctctctctctcccttgccaacaaacctcatctgtgctagtccattggctgacaatgtgccctgtttaatacacctctagactcatttacaccaatgtggcaatgtggcttctttctggtcaccggtatctaattaggttagtctattaggttaggctttggggaaagctgtttttattcttgataacaaggaacaaactga

SEQ ID NO: 101665 - DNA, 1007 bp, Homo sapiens
gttcagaaagggaagtatatatcctgtctttagaaagtggttgctatcagataaaaggtaggagcggcccaggaataaagcacagaaagcgctgcatggtgcatcatctgcaggccaaatcccactctgagagagggtcctggtagccctggttagaaataaagcgaggcagaacactgccgccccgggctctgcacagccacttgcccctgtgtgcagctgcttctcacagctctgccttccatcgcaagagggagctgtggtcagtggccctgctgctacccaggaggaatctaggctcaaggaggtggccacacctgccccagattcctaagtcagtggttccttagtcagtgattcctaagtcagtgattcctaagtcagtggatcaggattcccaccctgcaagattcctaaccgctgcttctctatgctcactgccactaagcagacccccttcattgtagaaggcagtgcatgcaccagctacagaaatgaggatgtgtgaactcactgacgctgtgacttaaagattcaggttttgcgtttgagaaatatgtgttttaatgagtcttcagatgagggagcatgaggctttgcagaattataatataataacattatgttctgtccagtccttggtatacgatatctcatttaactttcacaaaagcccttccagggaggtaaaattgttctcattttatggatcagtaactgatgatcggtgagttctggagattggcctaagggtaggagatttgctctgttttccctctttgtgcagtcctaggcacttagctcattcctatctccaaattaatgttaaagaagatggttttagagcaccactgtcacgtgcagacaggatcggacccagatgttcagggccacagccataagaccagcagtgaccaggcacacaggtatgtgcagtaaacagaggccctcagtgtgtcagaaagtgcttggttgcagttgctcatgtataaggctcaactgaagtg

SEQ ID NO: 101666 - DNA, 1094 bp, Homo sapiens
ggagagcctggcttccgaaataattgctgatcgtgagttaatttcccagtgccctttggggctggcatcctctgctgtattaaatccagcccattgacaatggcgctccttcttcctaagtgatagaagacagccctcagcatccagccctgctgagtcagcacagcagagaggacagcgggctgtctttgtcatttctttgtgagcagaggattaaattgccctgtgggctggcacggagccacaggccgtggctttgcatcctacaacgtgaggccccggcctgggggttctcaggtctgtgctcacatcccaaacatctcccacgctctcccccggcctcttcttacagcggtgcgtgaagccacgtgaactgaacatcagaatttgatttttccaccccaccaacctggaggttgtgccttaccctgggcaagtgagagaaggtgcccctcacgagatggttctgtcacaacgccatggtcctggttttgcctttttgcaatggaaagatgaaaacgaggtgtcgctgagctctcccctcaacgtgccaagattctgttttcggggataggctgggactccgggctgacccacatgggtttgcacgtgctatgtttaaacaaggcagctcgctgattgggggcagggtgggcagggagccgtgtgcatggaggacggccagagagagcgggggaccgggaggcaaggcgctgctcttgtacttggtggcttccttctttcacttaaaattgtgtcattaatggcttttcctccttttacaaaagaagccccaagaagagttttttcatgccaggcctcctcctcctcctcttggcagccccgaggctgcagcctgctggcactcaggattgtcagagacatgccccattgttggattctaaaaggaggattctggaaggatatcaatctccgacttgcacataaaaagtcccccagtggctttctaaggttgtggcttcaaggaggcactaattaatcacttcctccagccccagtggaatggaggggctacttctgagatagggaggctgcagtcgccccctgtctatctgctcctctctgccaggcag

SEQ ID NO: 101667 - DNA, 2598 bp, Homo sapiens
accatgcgcagtttgggggagtaccatgcgcagtttgggagagtaccatgcgcagtttggggggagtaccgtgtgcagtttgggggagtaccgtgcgcagtttgggggcgtatcatgtgcagtttggagtactgtgtgcagttcgggacacctgactgtgcttttctgaaggatcctggattctgagtatcactgggggtggaagcaaacacttatctactgatttgctaacatattgcactgttaatctcaacttgccttctcccagtggaactgctcttggtgagactgtagcttctctctaggaagtgatttgatttttgatgtaaggaaaaggattagtgtggctggattttgataaggctggccgcctggcacatcagcgacactctcatcccatcagtatcactgacagcgggttcgttatgcaggagcactgcagagcggtgatacgggacgtgcagagataattgtagttttgctatttaaaaaataagtctagtgctttacaatgtttaagtgataacctgtttagaaaaactcacagtgcctgtcttttggcacagaaaaacctcttctagcagcttgacttggattttattaatctatttttattttcctgagtataaattgaagtctcatttctgtttgaactcttaagctagaacttaagaccggaagtgcacatttgcactttcaaactcaacatatttccaggggttttatagcaatgttgggcttatgcctttgcttttcagtgatctccagctttgagattagatgcacttggttagactcaatgtaagtagcttgctctatggtgggtgttttttgatcaaggtgctaatcttggtgtttacctggggttgtgagaagagaggattaggaggccgcacttgagcagtggctaaatcccatgctatgtcgctgctgtctttctgtccccaccaggagaatgacagggccgtgcctggcatccctatgccattcttgggatgatgttctgtgactctctcactggctttgctgcttctcttgtggccaagtcagctgttttgatgggatggacatccatggaggccaagaatggtggtcctgggcagtggagattccatcactgtggctctaagaactccacggggtcaggggctgttgggcagagggaggcacaggagccagcaagatgctgcacttttcatgaatggatcacattgttcattgctgttattggggttttacttcctagacacctgtgggttcctggatatcaaagtagttgtagtcatctttgtcccattcagcaggggatcctagagactctcaggttctctaaaagctttgaaggctctgctctatgcagattaaagtccaagtgcaccattccaggccctccatgcagtggtccccaggcctctgtccctttttccctgtcacacgcccacccccttctaggcaccagcactggtctgcctgctgagcttgctagaacttgctagcccttccctcatgtgttcctttgttttggctgccacctctgactggcttgccatttcccctgtgggaatcttccagggcttctgaatttaagagttactcctccactgagccctcttttgcgtcctctcccttcccctctacctgagctaagtaagatgaattatttccacctcttttgtctcagttttattaaagtgtataatgatataatgtttttgtactctcttctgcgtcttcctaaattgtggccttgttgtgactttgtgtgtgcgtgtgtatgcatgtgttagatagcagcgagagaagtgtgaggggtgtgtatgatggaaatggggagagagaaaactacctcagtgcactcacatgaagccttcttcccaggagggaatcttcataatgaaaaggagaggagccttctcccacctcgtggagggggtggcagtggtggaaggctggaactgacaagcaaggaaatatgaaaggattataattggaaaaagatgggcataaaatgaaaaagccaaagtatgttttattttgcacctgtgtattcgggcttgctcggtttatttattaagccgttatcaaagtaaagtaagacaagtgagtcttagtctaatgaaattgcccctctgtgggccatgttggcatcaggtatccagagcataattggataacaatgacaattactgtgtcgggagtttcagcactggacggcctccgctttcctgtgctttctgtgcggtgtagctcatgagcgttctgatggagcaggggagggccggcttttccagctctggttccgacttggaactgcagggtgggtgccgatcgggcctaatgggccctcacatctcagcccctggcgttgatctcagattcagagcctgcgttatggcccaggtgaaaagcacgtctgttgccatttgataaactttcactcagtggcagtttgcctgctccgggcatctgtgagccaggcaattgtctgtcttggggtcagggggccaaggagccccacctgtgactcctgcttcattttttaaagtatggactcattgcttctcctgccagccatccttccctgagtaactccattgc

SEQ ID NO: 101668 - DNA, 1383 bp, Homo sapiens
accggggcttcccattgtcttagcgtgctcctttcatctaatgagcaggcgcccttggctgaacttttcaggaatccgtggggaaccagagtgaatatattatggcgctgtggagcgaatgacaatcgggcagtgctcgcctgtggccgtggaggtatctgcgccaccgcaaaatgcctcacccttcttttgggttttggggtttcaggtcagctctgggggcccgttatcccgtgtcaaggaggcccacgcaggcacccgaggaaggctttggctatcacgaggtggcctttgtgcaggcgggttcagcaactttggcattcattggggcagcctgttactggtgcttggagtaagtgaagagtgcgattgggcgccagagctgacctggcagggagccgggtttccggcctgtgtcagcggctgcctaaccgtggacaccagcacgatgactcagtcctgaccgctataagcatcccggccaccagctctgcatcatcagggagatcaattaaattgagtgtgtgtaattctcggggattagacggaagtgcacaggcttcattgatccactctcctagacaatcagcaggcccctccaagggctgaggacccaccactcagcaggaagcctggctcacttctcccccacaccccttcctcccgcacttccccacgttcctctctcctggattggatttctggaaggttctgctgggccacgtcccgtcaggtcctcaggaacacggcatgcacaaccacacaccccgtctgcaggggctgcaggtaccctgaggccctgggactctgtgtttttctgtggttaccacttttcctttgaacaataacattttttttctgagacacactctgagacttctggcacccaccgtaccttctaattctactataatcatcacccttttctcttgccaaaaaaaaaaaagaaaaagaaaaataaacttaaaagaacacagactgaagaaagtcatttccaagttaagctgcgaaggggtctgaaatgtatcgctggtgagagtctttttttttttcatggtaaccacaaaagcaagtgcactagtgtgtctgtgtatgcggtaaacaaaatggtttgccaaactcaggaactaaaaatgctctaaaagaacagagttcatttctgaaaacagccaatttggaaccctggcaccagtattttgagtcagaagatcactgagcattatgggttgaattgaatctcccaaaatgccttttgctgaatcccaactccagaacctgtgcgcgtgatcatatctggaaaaaaaatggggggtctttgtagatggaatcaagttaagagacagtcagagtggatcagggtgggccctaaatccaaagacccgt

SEQ ID NO: 101669 - DNA, 1022 bp, Homo sapiens
gcctttacattttgtcagtggtgccagcggtggtgccctgcccatatgttggccatttgggaaaacagcagccatgtttgaaaacacattgcccctttatttaaatgggcagctgctggtactcactggcctgggcgtgtgcattttgctgacatttggggcagacccttctgttgaattctcgatgcttcgcgaggcctcttgccttggtcatatgacctccagagagtttttgctgctttttaagtcgtttcaagcgattattctccggccataaaactcagctttaaaaataggtttcataaaggccccgacttttcttctaattagtgtaaagatttattgaatatacatcatatgcacagatcataatattattaaaattactattaagactttacacatcaaaatatttcaggcagtggggagacaggaagcctgatggtccctgagaatcgaatctgcattggcaagataaaggacaattgagggcgattacaaaagccatgatttagagtacaacataaaactctgctgagaactaattcgtattgccagctgctgctaagcttcttaatctttatctagttcaattaaaatctgaatgtttgggatttcattaacaaccgggggtttggaaattacatgcgcttttacgccatacttccgttgctgactgacaatattggaagttgcccaaaacgtctccaggtagacttatgtataattaaaacttaagtatttaaaggctaatgcaaaggtaaaagcagattgttttaatttgcaagtcagatccgactgacaaagtaaggagactccactacaaacggtgccccttttgtggggagagagagcatttagtaggccgaggtctgggcggtgacctgcagctcatggtcgagccctcaccacagggccggtttccgtgtgagggccagggagctgctttgggcatcttcttagccactggggaccttgtcacgttcctgtgtgtgcagtccgtatcctcactgtggtgcaga

SEQ ID NO: 101670 - DNA, 1075 bp, Homo sapiens
ttgttttttgtagagatggggtcccatcatgttgcccaggctgctttcaaactcctgagctcaagtgatctgtgcaccttggcctcccaaagtgctgggattacaggcgtgagccacagcacccagctaacaatgtgttgattttatatacgtatgattctccagatcaagtcagttcacatctccatcacttcaccttgttaccttttgtggtgagaggtgagaacatttatggtccgttccttttacagatttcaaattaaccatacagtgttgctacccctggtctctgagctgtaccttagatccccagaaatcacccatcttagaactgaaactttgtcccctttgaccaacagctcccctctccccactcccagccccaggcaaccattgttctattctctgcttctatgagtttgacgtttttagattccacgtagaagtgagatcgtgcagtatctgtctttctgggcctggcttgttttatttagtatcgtgtcctccagtttcatccatgttgttgaaatgccaggatttcctttcttatggtggattactagtcccttgtgtgtacgtgtgtagaccacaattcatttgtctgttcgcccaccagtggacactgaggtggattccatatctcagctgttgagaagaatgtgctgcaatgaacttgggactgcagggatctttttgagatcctgacttcatttcctctggatagatgcccagaggtgggaccactggatcgtatggtagttctacctttaatgttctgaggaacctccatgctatcttccataacgctcatcccaatttatcttcccagcaacagcggaggaggaggaggaggcttcccttttctccacgtcctcaccgaggcttgttatcctcgtcgttttgacagtagccgtcctaacaagtgtgcgatgacagcgcattgtggtttgaatttgcatttccctggtgattcgtgatattgagcactttttcataaacctgttggccatttgtatatctgtgttgagaaatgtctgttcaggtcctctgctaatttttttattacattgttttc

SEQ ID NO: 101671 - DNA, 1040 bp, Homo sapiens
ctccatggagggagttttctgacaatttgcacgacttattgatcccacctcagtttgaattttcttgacggaaatctgaatgagtcatggagattcagagaaatgtgttagttctcttattaggaacaactgctggtgcaattagggtcccactggggctccctctcagtggtgagaccaccttgccctggaaggccccactgagtaactggctagcaggaacccaagccagatgcgacttattcatggtgccaataatcacatctgtgcatcacacacagtgcaactgaatattttaaatgtcacatccctttgcctgtaatctttaaatactttacctgtggcttattcctaagtttttgaacaacatgaatataatgaccttcgatctccgttggaccaaatacacggcagctttacctgttatgttgaacacagggacgactgctggcttggcccctgcacattcatcccagatcggctgggccaagaaggaaggcatcaatatcaatatattgacatttgtcaatggccgcgagacctcctcttgccaactctgtaaagtggctcatgctgaacaacacgaaaccacgttagagagactcgctggatgtcttgtatctcattggctcctcagccgcatcatcgctgtcatcatgcttattaagaggcagaatgcctcttactgagaagtctttggaggacaggctggagcctggggctcagcagcctgggaaaaggaaggtctcaaggtttcctgcagaaaactcataagcaaatgaaggaggcaaagtggagtttctcagcacatccagcaccatcgtgcacaggaggaagcctgaggttccaaaagctgaatgccaatgaccctcacagactgagcaaaggacatgagcttccaccccaggaggcgagggctacagacggaggccctgcagaggtgtgggtgctcatgtcccccacccccaaatccatatgttgaaacccagccccagcgtggtggcacaaagaggcgggacctttgggaggggttgggtcct

SEQ ID NO: 101672 - DNA, 1003 bp, Homo sapiens
aggccctgcccgcattcagaagacaggtgacagcccgtgccgctgcctggctaaatgcttgctccacacattttactagtggcggctgagtctgcgtgatggccaacgtggttttagaaatatacacctagattagatgaggcttctgtcttagatgattccaaatgttcttacttggattttgcttaaaggaaaaacaaaactatctacacatttccccctcttcatactttaccaaaaagaaagagaaaaaatgtaagaggatattgactcccacgatgcttcctgcggtgactaaatataaatatgtatgacagatcgcagaaggaatcattaatggcagctgtcagtgctatttaaaatgaattagacctttccagtttccctctagtgtgagcgctgagagacacataaggctgttctgattcatcgtggacctggaagtccattgttcagcttagtcgggagatgtatatgcttatcaggcaaaataagctggcgggggctggtgtttgcgaagcgccaactcgccttctttgtctcataacatttggcggggtgtgctttcctggttcggcacgggacattggtctcttcaacttcagctgatttgaattgggacccacaaaccaggtgggaagcatggcgtttgaaccgtgcctggaatatcagatgagtcctgtgtctgcaaagtctgatagtcagagggaataacaagtccttaaaatgaggaacagccctttccatggttaaagggaagagtggaaacccacgtgtgtattatcggggaagactttcttctgggaacaggtgtgcctgtaacatggtgacttcccactggtctgtttcgccccataatggtaagcattcctacatttggagagagtaggtatattagtctgttcttacactgctaataaagacatacctgagactgggtcatttataaaggaaagaggtttaatggactcgcagttccacatggcttggaaggtcttacatt

SEQ ID NO: 101673 - DNA, 1005 bp, Homo sapiens
cagggtgccgccgaccgtcctacagtgcttaggacgccccccaccccccagaggcccaaatgtcccagcgccgaggtcgggcctggctgctctaaggagcggaaatgtctcccggcagcacgtgagtgggagagggcggttttccagacagtcctcctggatcccccaagaccctggagtcaaatcattctcctttgaattccaagacttacctcttcctggcaacgtgacctctctgaaccacggtttcctgacaagggctctcgagatggccatccccactttgctgggtccttatgaaaatggatccactgatgcacattgacagcttagcacaatccaggtggtggctgttgctgctgctgttgccgttgctgttgaaataaatcaaagatgataattgaggggagagagaagagacttccaggctttcccttgccccacatctgaggggctgtcctgacccctccctgtggctcagccccgctgcacctgctgggttccctgtatggcctggcagtgtggagcccacattgcttgccgtggctgaccggggcctgcccaccacattgctcggccaaggtttagccctggccttcacaggacctcgttggcttatcgtcccggggatgaccagcccagttttgatcctacactcctagtcacactgtcatgttgctggaacctgccaggggtgcaggagcggctggagagcatctgtgaggggagagcagggcacagggagcctctctctggctgccgacgcagcttactccgcacctaagagcatcctcttaattaggcatcaccggccacatttggaatggcgcattaacattttatgggccattttcccataaagaaaagcaaagccgatgtaattcttgctggctttggggttttggcttcacactcagcacatcagacaaaaccactgtgggaataaaattcctcaaatgtggctgcagtcattgagtagggagaaaaacgcaccgttaagtcctt

SEQ ID NO: 101674 - DNA, 1035 bp, Homo sapiens
aactttggtttccgacagtcgtgcgtggaggagcccggcctgactccttccttgaacagacatccgctgagcagcaggtgacggacccaacccaagctcagggtctaagaagggagagctggagcccgagtcaggaaagcggtgcaggcatgaagccagggcaatgaggctttcatcagtctgtgctcgggcatagggaggaggtgccgtggtgcggaacccggggtgcctgcccgcaagaagaggccagcccagcacatagctttctctcatgcccaagtactgttccagacccaggggatcagcttcctctcatgccccaggtactgttccaggcccaggggatcctgtgcacagcaagtaagccaggcatctgccatcccggagcccacactctccgagaggggaccagcaagtgtcttgcccagttggagcagctcggagagcagtgggtgctggtgaagaagatgcagagggctgcgcgtcccttagccagcatggtcggtgaagacctttgtgaataggagacatttgggctgagacctgagaagcaagaaagagccaggaaggcaatgatgaggaagaagaaaggtccaggtgggggcacagcaagtgcaaagcctggcagggggggatgtgcttgctgcatttggctgtgtgggccttggggaggggtttggggttttggggtgatggaagccacagagtattcagcagggaaggggagagcggagacgtggcctaggacagcgtagtggagagcggagacgtggcctaggacagcatagggcagggcagagatgtggcctaggacagcgtaggggagagcagagacgtggcctaggacagtgtagtggagagtggagacgtggcctaggacagcgtaggggagagcagagacatggcctaggacagtgtagtggagagcggagacgtggcctaggacagcgtaggggagagcggagacatggcctaggacagcgtagtggagagcagagacgtggcctaggacagtgtagtggaagtgaagggaag

SEQ ID NO: 101675 - DNA, 1041 bp, Homo sapiens
aaagacacacacacagaaatatagaggtgtgaagtgggaaatcaggggtctcacagccttcagagctgacagccccgaacagagatttacccacgtatttattaacagcaagccagtcattagcattgtttctataggtactaaattaactaaaagtaccccttatgggaaacgaagggattggccgaattaaaggaatattgggctagttaactgcagcaggagcatgtccttaaggcacagatcgctcatgcaattgtttgtggcttaagaatgccttcaagtggttttccgccctgggtgggccaggtgttccttgccctcattctggtaaacccacaaccttccagcatgggcgttatggctgtcatgaacatgtctcagtgctgcagagattttgtttatggccagtttgggggccagtttatggccagattttggggggcttgttcccaacaggaagaaaaacggtaaaggaagaaaaccataaaaacagcatattaacggggtcatagccctggacaactggagcttgggccctttgcggaccctccagacaccacacagaacacattgcaggcaacgagacagcggggcccatcgaccccacccaccccattgctgacagagagccatgccgggactactcactcgggcagatccagtccacccaagccctgactgagcaaatgtgcaggtcctcagggaggagggcgtgtgccaaagcagccaccagagccgtcacttcccccaggccagggtgggacagggctccagagtgcctccgggggctccctgagatcacatttcctaacacacctgagagtgtcttcagttaaatgctcgctctgtgctaaacacattctggagctgaagcacagctgtaaacaaggctgacacaagagacagtcagtaaataagtggacgaatgagtaaacagcagagctcctgctaattataagtgaagccaattaaaaaaaaacaatggagaaagtaagaaagtgctcaaatagtggtgggaatgtgataaaagaaaaccac

SEQ ID NO: 101676 - DNA, 1008 bp, Homo sapiens
tggcccatgggtctgtcccatgcaggcacagaggcagccgcaatgggaccaggcacccagccctcctgcccagtgtttacatcagaaggaaacagcgtgctcacgtgtctacccgcacacgcttcgcctccttctccgtgcagcaccgccctgctgagcagctgtactgtggactcttctgcctgcaggtccccatggctctatttgcagacccacctcaggggcctgacacagactaagcagcacagattcatatttcagtaaagggtgacatccaggaaaagctggagccctgccggacctctggattgctcctgggtcaccccaaagctgtggtggacttgggtggctgcaaagatcttggtccccctggcatggctccagttctcggttaccctgacgtcccctgagatccagacctggagccaaccctcccccaacccccacccacgtgccagccgggtctcagttttgccacagatgaggagcaaagcctcccaggtttctgcccacataggagggatggccgactcctagtagcaggacacacttaccaagctagactatttctttccacacctacagggaaggctaaaaagcatcctggaggtttccgggaatgagattcaaagggcggaggcctcagcagcaggcgtggacacgcaaccccagccccgtgccctccgcgtccttgcatgcatttcacacgatacttcagatttttttttcatttagatgttaacgcttttataaaaagtacttttcataaaaatcctgattcctggctaattttctagacagttggaggatttggcttccagagcccacattgctgcaatgccccatggctggcttagggcagcagctgtcccttaactgggcacgtcctctgtgtggccgacactcccgcccccgtctcaacacccaggtgtgtgtcctgccggccccgtagcctggaacaacaccctgtgtcctgtgccctgggccgtcagcactaggcagctcctc

SEQ ID NO: 101677 - DNA, 1029 bp, Homo sapiens
aagtaagtgagcccaggaacgcaataatttactcaagtggacagaattagtgccatttagggagaggggctgagtgctgtattgaggggcctggaagccgtcggggctgggctgggtccggacttgctaaacctatctgatctgacacttgcgtcaggagaaaggtggggggcagctggtttttgtgggtgacctgctagccagggcacttcctgcggtagatgagaatgtccaccacctgcgccctccgaaccgctttattggactaagggacatcgccagggctagacacatgccccaccactctgcacgtgtggcgtaaggggctcagcaattgtctaaacagaggaggctccttcttagacagcaaagctgtgtgttttgtatctgttggtctcatttcctgtgggatgtttcctggttgcagcatgtctgtgcttggttagtaagacagttggtccaaagctcttcttctctcccgtggggaatgtgagcagaacgatccttaggtagaaaagcggagaaccagtgcttctgcttcttttgcgtaggtggacaagaaataacagtgggaggatattgtctgtccctaattacctgccctgcatccaatttgctggtgtcaggcagctttcctgaggcaagcccttgggtacactgagacgctaggagggacagcagctccggggcctgcagggctctgggatttttttctgccaggtacacttccccctgcctgcattgtgcagaaaggcaaagatgagcaattgggagaaagacagccccagtgactcagcatggagatattatgggataggggagagctggctacttctcaacccttcccccgcctcgcttgccgtgggtttcagcatcgcgggggctgtggagaaaggcctagagagctttgcaggaccaagtggtggtcgggcagcccgtgctgcaggaggtgaacccgggcatgtgacacggtcacagggactcctccagtggtttaacgtgcagtgtgagtggccttaacacgggacc

SEQ ID NO: 101678 - DNA, 2046 bp, Homo sapiens
tttataaccaacccttgaggtagggaccacctttatatccatctcacagatcagacacatttgaaacttcgaaaatttattcaacgtacctaaatccatgcagctggtgaaaggcagaggcagcatcccacattcagcaggcagcctccagagcctacacatgccctggccatcaggctctttttcctagcctagtgattaggttccagtttatagcaaatcgtatgccagatactatagagagcgcaacacccagtgaggtctctcatctctgtatctccagtacagggcagcaaattaatgcctggtgtgtgttgaataaatggataggtagatgggtgggtgtgtgagtggatggatggatgggtggatggataggtggacagatgggtgggtgggtggatagatggatggattggtgggtgggtggatgtgtgggtggatagatgggtgggtatctggatggatgggtgggtggatggatgggtggatagatgggtggatggatgggtggatagatgggtggatgggtgcatgaatagatggatggatggataggtgtgtggatggatggatggatggatggatggatgggtgggtggaaagatggataggtagatggttgggtggatggatgagtgaatggatagatgggtggatgggtgggtaggattttcaaaaagcgctacatctgtagccttcctctggctggatctgcaggtaaggaattccctgagaaaggcgtcaaaatttcaggcatatttgtgtgccgagcatggcttggagccatgcttctcacctggagatgcccttaaaacagattccttggcccagccgcagagattctgagtcagcagatttcccatggatctggacaccctgaatttccagcaagctcccaggggatgcccctatacttatctgtggaccacaacagagaggcaaagacataaagctctccagtgcctttggtgccatctctcttgcaacaacagtcagtaatgtttcccttaaccctctgttaattggactaagcagagataatgaaagaatgatttttagggcatgccttcagggccctgcagagtgggtgtgcgcttgcagagaagggggcgatatgttttttcagcaacctcccccacacctgagtctgcactcagctttgacgcccggctcatcagtgtgccaggcggccttctgcctccaggccatttatagtgcagaagcttgtgaagccaaaacagtttgatgtgtaattgcaggaggaaatgggaaacctgctgagcgtggcaggatatagtgccttatcaccctttatgtgcagccactgcttgctggaattgccagcagatccacaccatcgacagaacggtgacatttttcatgggccgccgtgttctgaatcaacactgcaatggtgcgattagaggaggtaaaggaaggaaacaatcccagcctcgccggtgacagatcagtcgccagtcctgcttccctccttattacctgctgtcttgtgtgatatgcaaagcagctgctccacacgcattacaccttcacattaaccgaaaattgaattttatttggtagcctgcatatcatttataatactcctcccatacacttcagctctcatttggctaaaagtgtattctttacttcctactggccaagaaacagagaaaggagcctgtgtgtccattggtgcctgcagcccccaggcttcagggttcctgtggaacagggtgtcatcggcaagaattgaaaagcatttccctgtctccaaaatgccccagacgcctccttcccgaggggccacatgctgccatcagcctcgatccagagactgtgttgctgtgtgtttctttgcttggctgtagcatgctggctctgtgtatgcaaagaaacacagcgcagcacgcacagatccacccaaggaattcccactccaggggaagcacgtgggtagaggatcaggtggattttaactttaaaacttatcataatagttatcttctaaaaagcaaacaagacaaaaccctgcctctc

SEQ ID NO: 101679 - DNA, 1034 bp, Homo sapiens
atctctgctaatgcaaaatttatttgcatgtcagaactttatttgagtggataagggcagaaggaagctgctctgaaaacatttcatatgaaaaggcatattctgtacttccaaaaaaaatattggtcaaaactttgccatcctgtgttagtagggtgctaaagtccactaactacccacagaaaacatcccagcagtgtccagaaagagaaccttggcaaaagtaaatcctgccatgttattaaatcaataagattcccaaaatcagtggaaggaagctcaattcattttcaatgcccccagacaaatagtaaaaattagctaaaaaaaaaaaaccaaaaaccttaacttacctaaaaacatgaagatcataaaatttcattcttatttacacaatgaaaacacattgggtaaagcttttcaacgcctctttcatttttccccccaagcctagcatctgccttcggtgttgactcttctgactgaatatatttttaacttttaaaagacttgtcttttaactgaaaaatagtttgattttttgtcaaaatggtcaaaacaatcttggtgcttgaagttgtgttatttgaagattcaggcctgtcttaaaagcgagagcccaagaagggtgttgcggtgtgcgttttggttgtgctgcagtgtgcgtttcggttgtactgcagtgtgcatttcggttgtacagtgtgacaaaacaaacccctcaaagctcagaggcgtcaaacagctgctccgtggctctgagggttggctgggctcagctggcctgtccggacttggagtttctcatgcacctgcactcagtggggttaaggctggcatcatcccaagccatgaccagccagggcatgcaagatggcacatgtatgtggctagtagtggacgctggtcaccagcttggagatatgctggcagcaaagactggacatggttcagccttctgatggcatagggactaggttctgagagcagatgtccccacagggagcattccaagagtcctctgtggaaaccag

SEQ ID NO: 101680 - DNA, 1046 bp, Homo sapiens
gcaaaagggtggcttgttggatcctccttcagataactctgttaaaaaagacactaggatagagagagccagagatgtgaacaggatatagagccaccctgagaaattcaactcccaaagcaggtgaaatttggtggtgactgtgatgtgagtgacagtggcagggatgatgacaatggtggtgatagtgatgggggacaggtgacagtgattggtggtggtggcaaagatggtgatagtagtgatgatggtgatgctgatggtcaccatggtgatggtacgatggtcatgatcatgatggtgctgacagtgctggcactggtggtggtgatggtaagatggtcatggtcatgatgatgacagtgctgacactggtggtggtgttgggatggtgatggttatgatggtgatggcagtgctgacactggtggtggcggtggtggtggtagtcttatcatggtgatggccatgatgttgatgacagtgctgatgctggtggtggcggtgatggttatggtcatgatggtgacaacagtgttgacactggtggtggtggtgatggtgatggtatgactgacactagtggtggtgatggtcatggtcatgacggtgatggcagtgctgacactgtggtggtaatagtggtgatggtatagtcatggtcatgatgatgacagtgctgacactggtggtggtgttgggatggtgatggttatgatgttgatggcagtgctgacactggtggtggcagcggtggtggtggtggtggtagtcatatcatggtgatggtcatgatgttgatgacagtgctgatggtggtggtggtggtgatggttatggtcatgatgttgatgacagtgctgatgctggtggtggcggtgatggttatggtcatgatgttgatgacagtgctgatggtggtggcagtgatggttatggtcatgatgttgatgacagtgctgatgctggtggtggtggtgatggtgatggtatgactgacactagtggtggtgatggtcatggtcatgagggtgagggcagtgctg

SEQ ID NO: 101681 - DNA, 1072 bp, Homo sapiens
aagggcatttttatatgttctattaaggaaatccctgctgtggcagatgctagcagcaaatactctagagctgtctgttgtttctgccttggatgagattttatagcattattgagcatttcagaacattatatcagaagtgcacgctgcagagtttggttgtaaacttaaggtttccattgccattttagaaacctgcttcctaacataatttactttcagtatctgaaaatattaaaagacccaaagcaaataaaacaagagcagtatctattcagttttgatttgtgatgccttttgattatggcgatcccacataattaataatgtgctttatttgagaatcctgcattatataagctagctatgaaagtcactgtacaaaagggggcatgtgttacacttttttccccataattactctgagcactgtaccaaaaagcactaatagaaatgtggcgtctgttgacttcatatctggagaataaaatcagccaaaccacaggggtggaattaagaagtgaccccttctaccaaccccagccccctccaacttagtttccttcaaatgcccagacatgaaattctgatccagcaaaaatgacaatgtctagaaatctgactgttctgaactagaatcctcagtgaccctgcctccagcctcctccaccactttctcccccatggaatttacctccccccctctctctccctcctctccctccccctctctacctcccctccctcctctccctctctctctctccccctgcccgcccctccctctctccctgccccccctccctctctctctctctccccctgcccgcccctccctctctccctgctcctccctccctctctgtctctctccttgcccctcctcactcacccgcctcccctctctctcttcctctctctctccacctctcttctccctaccccacaactgtggactctgagacataggatctgagcttcatggcttaaggtaaaccttattcctgtcttcatggcaatctaaaaatattcatgtaattgctggttgatcacgaactacaaatgaacacca

SEQ ID NO: 101682 - DNA, 1467 bp, Homo sapiens
caaaaaattagctgggagtggtggtgtgtgcctgtaatcccagctactcagtaggctgaggcaggagaatcacttgaacccaggaggcggagattgcagtgagccgagatcatgccattgcactccagcccgggtgaaagagcgagactccctttcaaagaaagatgagaggaggggaagggaggggaggggggtggagggggagaggaggggaagggaggggaggggggtggagggggagagggagggggagggggagaaaatacaggctgggcacagtggctcacacctgtaatcccagcactttgggaagtcaagacgggaggatcacttaagcccaggtatctgagaccagcctggcaacgtagaaagaccccatctccacaaaaaagaaaaggaaagaagagaagagaaagaagttagatggaaggaaatgcaaagtccccagagagggggagaagaggagaccaaagctgcgggaatggagatgaacaacgatgatttagataggctggaaattgccctaagatgaagctggaagcatggcggggttgcatcctgggcagtgcggggcctggctgctctcccgtgtctggccgtccttggaaggggaactcgtgatgatcttgatttttttttttttttgtaaccagtgcaccgcccttgtcccttattattacagatttcttacggtccatagatgacattcactgatgtggggaattagacattttagaaaggttcccaacagaggccaaagcaggaagggttttctggtgaaatgttcggttttcagtcagcctggagtatttcgttcctaataaagatctaatcacagagattttgggtttcaaatccataggaaggaatgaccattttcatggtgagacattgatatttcattcctgagacccaaagccacctttgtaacctttcaagatcctttttgattgtgtaaacttcagaagtctggagatcttagatatcaggaagataaatttacataggtaagcaccataattcttgttcctcatatattttatattgcatcatttacataggctttaaatatccagtgaattgtaataaatggggaactcataataaaactggtaataaaatggattattcaggtgatgctgttttattacagtctcattatgattatataatccttattaaaatctggaccaaagatgaatttctcactggaggcgcttcacaagtactttaataaattctatttgttgcacaatcctggggtgaatgttggtttttataatttcatacaaatgtgttgcaacatgccatggaatctgactataggaatctgtgcagtgaggaaagagaatctctgtcatctgcaggtctgttcaatgcctcgtgtggtttgggaattatgtctgctgtttcatacgtttctgttgaaacatggggagaggccctgtcctgtgttcatggtgagcg

SEQ ID NO: 101683 - DNA, 1054 bp, Homo sapiens
gtctgccctgggcagtggtccgccaagcattggcttggggctcctggtggtgtcccccccaagccctgctgtcacaggacgagagggagcagagcagggacacgccagctcttgacctccatggcttctgcgcatattcccttggccggagctgagcacatgactatgcctctccagagggtcttgccgagtggatctctgtgcacacaggatttgaaagagagtgtttggagaactgtgtggactctgtgtgctcaccacattccctgtccaattccctcccagcttcccaccgttctcctccccgatgcccgcagcgttcagagcagcctcacctgggaggcaattcgatccgattggttggtggtcaggtgtagacctgagggtggagggggagcaatatgaagagggctgaatagggtgcatgcaccgtagctctcccaggtcctcctggagcagggcctggcaccacatggacactcgacaaacctgatgggcggacgaatgcacggcagcgtcgtcttgatccaattttagaaactgccgttaggaagacctcatatcacaatggaagaatttcctttattgaaagaaaaaaaaattacctatgaaatccagccaaaaatgtatcctttgacatggttcttgtgctctagaagttggaacagtcttgaaaactgttcatgacggcaccggaagccatgtttgaaagggatgacctcacatgataggagggaagtgcccagatgttgatatctgattcctggaaaattagctcacctgtcatcactgagacaaggtggtgccttctgtcacataacttcaggggctggtcttggggtttaggagcaactcataaaatcctacctggtgggttccacgtgccatacgaaatgccggcaggaagaacctggtggctggtgatctcctgtcccagggaagatcttataaagccacatgaaggagtggtgacgattcaaaataatgtcactttcaacagatttttctgtttctaagatctgactttaggatgaagttttctagaatccaagca

SEQ ID NO: 101684 - DNA, 1082 bp, Homo sapiens
tgagccgcctttttaaggaaagcagattggaccaagtgtttctcgcctttccgttgcttttggttcttccaaaggttttgaaagtggttggaaaacattcttattttctcagggaccattttcagcttctctaccaaggatgaagagttggagtaaaaatgaattacaaactggcagagtcagtatccacctatttaccacgagccggagactttcagtggttgccagcgtagaacgctcatttttattaaccctatttccttcaagtgtctccttccatggagattgacaggccccgcacatggacatggggagagaggaggtctctgtgtctgcagcgctctgacatcctgcaggacgggacaaggtggccccgaggacccgtcagtgcccacggggtgcccataaaactttagcagtggtacatatttacccaaacttcactaaatcactttctaatttaccagtcattgcttgagaggccggaaagattggaagcccaaagaactgagcagggccgattctaccgggagaaagggtcaccgagacactcaacagctcgcttatcggtcactctccgggctgcgcctcctcggggagttctgggtttgcgcgggaggctgccgatggcacgcggctcacagataatgcgggaatggactgcgtgtcttcctcccagtgtcttcagcacacggctgttgccagcggcggtgatgggcttgcctgcctcgggggagctgatgggaggagggggagctttgtggacactgaggagctctgtgaggtggagagcagctctgttccaaacgcccatatccgttagcatgggactcaacctgtcaccctacatcccaccaagctgccatccaaaaatcactgtttagtgtatctgttaaaagtagcatgtttcaaattgcacagaaaattccgaaagctgacagcacgcagctgggcacctgtctccgagccccccaggaaaggcctttgtaagctcttctagctggggacggcagaagttaccttagtctatttaggctgctacaactgcagacagactgggtggcttagaaataacagaaatg

SEQ ID NO: 101685 - DNA, 1022 bp, Homo sapiens
accacactagcccgctgctcaccatccccctttctcctctgtctccagtgcgtttatctttcattcatcattcctcgcaaacaccaccagcccaaggtggttctcagccatttggcctccgattccgttctgtctttcccgagaaaagccgacaaaaccttgcacctcataaattttaacagcttttccaactgatgtatttcatgtctgaattgttttatctgtcctactttgattgtaagcctcgagggctgagacctcgtcctgtttcatcttctgtaccgctccgagcgcactgttggcattctgttcgtaaaaacacacgcggagataaatatatgcaaacatcgataattgttttagttggagccgtttgacgacagatcagagctgtgtgtggacccctacatctgaggctggagcgtgatttcaggccacctcttaatctgttccttgggtattagtaatttgtaaaacatgatttatttgcttagaatttttcctcataactttaaatgtgtgcataatagtaaatctctgatctctgattaacttttgccaaataggcttcccagagtgatgaatgcttgtgtggtgactcataaacaagactcaaagcatttgtttaaaaaacacgaggcttccttctgtctaagcatgaagagatgttaaaacgaaaaaggttcaacttagacttaagacagacagaaattaatcaggagtgatttcttcttggtctgaattttaaattgtttgtgaaagggtaatgatcgagctggctttgttttactccacttcactttgtttctaatgtgtaaattttcagatgcttttctgctagaaaattcctcttggtgaatatgatgtgcctatcctcacataattccacaagtggcatgcagaaaaacagggtgagtcccacaagaaccatccaaagctcttgccttcactctgtgtttgctgaacacccactctgtgccaagtaatgtgctggatggcaaggattcatggttgacattgaa

SEQ ID NO: 101686 - DNA, 1092 bp, Homo sapiens
tgccccagcacagtagcctcctgctgcacatggcccaggcccttgctacggaagactcacctaaaactctgcaaacagaaaacgtcagtgacagggacagcatgccactggagtggggtttcctgacctcagcacttgggattggataactctctgtaggggctgccctgtgcattgtggggtacttacctgcatccgtggtctctgcccagtagatgccagtagcacccaccctgcccagttgtgacagccaagaccatctccaaacgttgccccatcccctggggacagaattgcccccagctgagaatccctgcatttgagttagaggggacctgaatcaggggaggtggctgcggagtttaagagcctcgcagtcatgggtgctcactgagggcccaggaggcctggagccctcactcggaagctgcttgggacagtgggataggcctgttaccaacatggaccacaaccagtcatttaagacagtcagggaaacaaacggggaggtgccttagaggcaaagcttcatttaaaataatgacataagacgtgtgggttggagatggatgcagagaagtggagtttccagatgaggatgtggaggtgggagtagaagggcctgggttcaaatctcgaccctgcctatgccagccgctggctcaccccacctgccacgctgcaccccactcaccacactgcggcgcctgctttttccttgagcatctgggacgtctgtcatcagcagacagctgctggtttccgtggctgccttcctaggggagcatggtgacagcttcctgtctgttacctttccccaccccatcacaaagccccctttaaactcccgtttagaacagtgattgaaggtgctaatttcacattgtcttctttatatagattacaccttccaaagccttcagaaataccattacaatgaaaacaatttcaagagcaaattgaatacctaaaaaagtataattaatcaaaccatatcaagagagcccgcagggtcatcaagagctagacccagcggccgtgttgtctttcctctacatgagcatcattcgtgcaaagtgcatcacagctgat

SEQ ID NO: 101687 - DNA, 1082 bp, Homo sapiens
aggcaaatccaccccagtccctcttggacctcagccaccatccccagccagcccagtcaggcgtctgccagctgccagttatgccttggtgtgtgtgcagcgcatgttgcatcctcctaacacttctgtactgtgacctcatggctgtacctgatacacctgggagtaggacttgggcttgaagagtctgcctgggcgcccgctcacaccagccactggggccccaggatgctcttgaccacggtcagcagggaagggcgaagtgtcagagatccccaggactctgcttggctcagggcttgtggtttagctcaacatgggacgctcagcggggcaggtcaggcagggccttggtttggggctcacacctgctgggaagggcacggccacacctgcaggcccctggctgtgggatccaggctccccgttttgcactgctcttgcatggggcttcagcgccttcctcctcctcttggggaagaagtcacatttggttggaagttagcttatattgtgatttaaaattctcccagagtccaagacactccaggatcccaaagttagtgttggcaagaaccaacttatggattataattcttggtcatgttcagatcctccctgatacccatttgaaactgaaatgactctctgggtagaaataggtagaaaacagggttcagttattcattcaccaaacccgtccagagcccttcagttgctggggctggggtagagcatgaacggggcccttgctacatttctgtgcccgtgggaaggtagacgggtgaaacccacagttactgacaagggagacacaaggtaagaaggaagtgagcagggataggaggtgggcgtgccccaggaaatcctggagggcctctctgaggaggtgacattgactgaggaatgagacaggatctaacgtgtgaggacagaggagaagtccagaggttcccagtggtctgcagttctgcctgctaagcaccgctgtgtccaaggtgttcgagctgggactggggatgcacaggggaagcataagacagcgtggctcccctggaggcccctgactctcccaccgtgat

SEQ ID NO: 101688 - DNA, 1051 bp, Homo sapiens
agaagctgatttctgtctggcttggcgtatcagagaagagcacacatcgggaccatttctccaccagcccagcttgccttgcatcggccggacagctcagccacttctgaaaaggacacatcggtagttcctttttctcttcctccccctttaaaaagattcatctcccctgcccttgggcaacaagcagagtcttcgggggaagcaccagagatacttctcagcaccagcctccatctgacagagtgagtcatctttaggaagaagaaaatccacaaacatcattgccgccgtgtctaattaggcagagctatgtaaattgagcgcttctacttgattaagatgtcaggagaggcttcgataagacctgagcggttcaagtgtctctcgtgtaccagccgaagatgccccacttgctaatcctattcatctggcgttgtttcctaattagaatatttatggcctaatgaggaggtgaacgtgccgcccgagccccgtcctgaaggtgagagtgggctctgcagacgcaggcgctgttccgattgttgggcagtgaaattagcaccgggccagcattgttctcagcgtcccttccaggctgctcccgaggatgttgattttgttattagaaactgaatccggccttccggtcctatcacaagaggactatcacctggtcacctccatcagcttgaaatttcttcccaaacaaggggggccgaattcgtgatctcctggtctgaaaggattctggggaaagcaaaacccacacctccccgaacgtcttcaagaccctctgcccgcccggtgctgtcatccaatggatggagagtgataacgtggctctgttctactgctcaggatatcgttctcaccaccatcgactttagttaatgtattcacatgattcaaattccagtagaaagtgttcgtcggtgaccagaatgtcccctttccctctgagagcggcgtggctttctgaaggcatttctcccagacagcgagcctctcgtaagccccacccagaggcatctgcctggggagggcagta

SEQ ID NO: 101689 - DNA, 1057 bp, Homo sapiens
ggccctctgccgtggctgcagggctgacgcacctgccgggcaggtctgcacgcctgcttcagtggggccccggcagccgtgctatgaggcgtgcactcccgtgcacccctgagcagcctgtcttctctgattcctgatctgggcgtggctgacacggtgtgttctgtttgtgaacactcgttgagctgggctgacacggtgtgctctgtttgtgaacactccttgagctgggctgacatggtgtgttctgtttgtgaacactccttgagctgggccgacacgttgtgttctgtttgtgaacactcgttgagctgggctgacacggtgtgttctgtttgtgaacactcgagctgggctgacacggtgtgttctgtttgtgaacactcgttgagctgcacatatgctacgtgcacttctctgtgcatatttacacttaacacgggtttgtgacattctttccttccattttgcagtttgcaggggaggtccccgaaaaccgcgtggagaccgtggtcgcaaacctcacggtgatggaccgagatcagccccactctccaaactggaatgccgtttaccgcatcatcagtggggatccatccgggcacttcagcgtccgcacagaccccgtaaccaacgagggcatggtcaccgtggtgaaggtgcgtactcttctcacaccctgccaggcaccccaagttctgccacctgcacactccctaggaccagtcaaacaggagtgatactcggtgtaaagttactgcccccctaatatccaagggtagaggcaggtaacccaacctgctggaggcagacacaaccttcacaaggacctgtcatgtgaccttcaggggcttggcagaccccccaaaaataccctcccattcccttttcaatgtctatatattcactcccaccccctaatctagtaatgggcgaatttcattattagaattcctaatgttaaaccatctttgcattcctgagacagatcccactgagtagtgaggtaatattttgtaacacattgaagaatttgttttgctgatatttgaagttt

SEQ ID NO: 101690 - DNA, 1709 bp, Homo sapiens
gagacaagccattcactgctgctctacaaagcattccttaagtgacacaggaggacgcctggggactttttatatatttgcagattacgcctttttgtaacgagcaaatgggatattgtttaaaaaacagccacctctttacaatggaacagttttatattcctgtttctaaatcagctcttcagtgtgaaagaaaacacgtttctgtaacagagagaacacaaaggcctgtggatactcttaaaggacaattaaatcttaactcatcttgattgagtggccttcctgccaaacaagccatatataaagactgatggaatcgttagcaaataattagctgccctctgtcaactcatagcagtttctgcattatttgtgcattttggtttagttctacctaacttactatgtaggtgtatgtctacagccgatgacctcatttcgtttattttatttttgtaatagtcagttggcaaagcaaactgattttttagactatttatcttccttcccttcccctcccaccccgctctcctctctgccccctgccctcccctcccctcccttcccctccactccgctgagaatcctggaggaatacacaattcatcgttgcacccccacctcagagtgtaatcgcatttctgcttggtagaggccgagcccagcaaaggtggctccttctgaatgtgtggtcagcatctgtacaaatgcattttatttgctatagtttgtaaagctgtaaagttaaaagagatgaaaaccttttcagcataaatatattttacttgcactgtgttttttagctaaaagtgaaaacctagattaaataaaatcaaagttgagaagaatcatcaaaagactgtttctcggtgtgaatcaagtgttgaaaaatggttggtgtattttgtcagtaattgtacataacttttggcacatgacatagaaatggctatgtaaactataattattttgctaagagactgtatgcaagccttgggccgactttacagacgtccagagcaaagccccttctttgtacctatttttttattacaaatatactaattggttctttctattttcagaggttattgtatgaaattgtctattgatagtacttttatgactgtaaatactctggctttctccgtgtgaattctcacattagactttaattcgagcgcgtgtgaactgaacgctgatcagtattttttatcaacacctgagaactgttacaccttttattttgtcttttaggaaatccctgtctttccattttttcatgtaaattttgcacagttacttgttcatatgtaaatattttactttcagaaatgaagtttttaattgctattgttttatataggattgaaagaaaattaactcctttattaaaaacaaatttatctgtatttgttttgcctatttttcctccgttttccagttttagattctactgccagattgcactccggctctgctgaggtgctggtttctgagccacctgttggaatctgtagctgagccccatcagagccgggagaaagaactttctctgtgaggacaggggccgagctactctctgcgtggagtctgggggctggcggctgcgcttaacaccttctgctgtcacaggtggagatgagctgggcacagctaggaggggcggcgggaggcccagtgctgggggagatgtacacagaaac

SEQ ID NO: 101691 - DNA, 1041 bp, Homo sapiens
gactcaagttgcaaactctgtctttcctgtctgggtttggctttaggctttgctaaggtaggtcttactctagggtgtgatccttacgtacaaggaaaggtcttgttactcgggcaggctggactcccatgcttctggactgccctctactctgcccgacccctgacttctctgtttcgctctcagccccgtggcagctgctgtctgatgcacattggctggtcttgcaccgcttcttggtatgcaggtgcactctgggacagggtcagggtagtgacctgatgaggacagagctccccctccccaccaggactgttggaaatgtgtgggtgggatgtcccagacctccgtgctggggctcgcctgcccacatgctagcagtgacctctgagaaatggctgcctggtgtggagaggagggactccaggtgtaacagacactagagttttggcaatatggcatcccagaggttcagagaaatccctcctgggacagtacaggttaaaatgtctggtacaatgtaggaagaaaataaagatcttgtctttataaatgcgtgtgtgagatatagataaaatagggggattcttctctgggccagaaataagtaagtaagtacagattcccaaggctaacacgggctctggccactgtgtggctgggagtcttggcccgggatgggccccagcaggaacctgcactcacctgggcctaggcctgagtgcccactggctgtgaggcccgcagcccacgctgaaaatgtagttgtataccaagaaagaactgaaattctgaacaacaacaacatatatcgagaagagcacttagagttaaggacttacttttttgtgggggaggtgaaagatattgattagccttttttttttttcctggatttcttttatggttaactgaattctcaaaggcatagattttgtagcccatcatcagttcgagaactagaacgttgtaatcccagcactttgggaggccgaggcgggtggatcatgaggtcaggagttcgagaccagcctggccaag

SEQ ID NO: 101692 - DNA, 1005 bp, Homo sapiens
gaagcagctcttccaagtaaaacgtgccttcctcaccagcagtcacatatgaacactcttccaagggcacactgggtgaggtggtgcctgctgccacagccgggaggcagtgccttcagggcagcactgaaataaacacacttagcccttgctgtaaaagtagttctgtgttgcagcaaaaaaggtaaatgttactttaagaaatctgacagcatcaaagtgtataaaagggacactctcccacaagtgtgcccctgagacagccaacacgagacttcgttctgtggacgtgagcatcgatagagctctcgggcgcagcatttgcagggtgggagggatcgggtcctcgccgcattcagactggacggagggagggcgttgtgcacggatggtccagtggtgctagacaacccctttgcttgctgggctctcagatttatgacaagcagtattttaactttcttcataggatgacgacagatatgagcaggcgagtgacgtccgggcacagctcaagttttttgaacagcttgatcaaatcgaaaagcagaggaaggatgagcaggagcgggagatcctgatgagggcagcaaaggcgagtgctgggtgtctgctgctgccgtctgggcacctccgtctcagccacaacctgatgagctcactgagacagtggggttttgggtggtcagagcatgttttgggctggccttgaagcaaaggtgatgggtgctgtcagtggagctgcaaagagaagcctcattcatttggcactagcgtagatgcttgaaaagcggggcttcttaagattcccagcacctcacgctccacacagtcacacccaggtgtgaagcacatgttcctagagccccctgtgtgcgctggactggactcttcacactcacgttgtccttgttctagaacattcacagccaggcgaggcactgctcattaatagaatcagacaggagaccacagttccccagggacgggggtgggtactgtgga

SEQ ID NO: 101693 - DNA, 1523 bp, Homo sapiens
aaagtcaggttagcaactttcaggtgattcaggaaaaaattgtgcgtactcttcttccaacttctgagcctttaaaaagaatttaatgctgcctctggctttaaaaagctttgcatagatcagacccccacaagtccccgcgctgctcccggctttgctttctctggacttgagtcccctgcgcatctgtgtgtagatgttaacccggcgccaactcacagctctccttccgcagaacaatcgagctttccaggaaagcagcgaggcaccctctctgctgtggcagatgcagcaggtgcaggtgcggggaggacagaggcctggcctcctcacggccctgccttccacgtggggtttcctgcccttaccaccccagcccacctcccgatgaattccttgtacagttaaagtgatcttcccttctttcctcaagggacgatgatgacattaatgatgttgcatcgatggctggagtaaacttgtcagaagaaagtgcaagaatattagccacgaactctgaattggtgggcacgctaacgcggtcctgtaaagatgaaaccttcctcctccaagcgcctttgcagagaagaatattagaaataggtacgttggtgtttaatgactgagttcttattaaacagctgcgctgctggggcatgggagcttcaggtgagcacacctgacacctggtcatgtgttttgtctgagtttgtgatttccacatggttgctggtggtggttcttgggtaaaatatgggtaccactgccttccaccccaccagcctttctgggctccccttgggttgtataaaagcagtaactgctggatcagagattagccgtaaagaaagaactgtgcttaatgattttaaaatactgtttttcttgcctgacctttaggtaaaaaacatggtataacggaattacatccagatgtagtaagttatgtatcacatgccacgcaacaaaggctacagaatcttgtagagaaaatatcagaaacagctcagcagaagaacttttcttacaaggtaacaggctgtttgccgaggagagcgtctttatgttgttggcccccactctctgctggctgggagcctcctccccacaccgaggcagagggcggtgggtcccaagtgcctccatgttccttacgaacgtgttttggatttcttataggactagattttggaaagatttctttttgaggtagggtctcactctgttgcccaggctggagttcagtggcgcagtcttggctcactgcagcctccgcctcgtgggttcaagcgattcttgtgccttcgcctcccaagtagctgggattacaggcgcacaccaccgtgcccaactaatttttgtatttttaataaaagggacagggactcgcgatgtagcccaggctggtcctaaactccttgcctcaagtgatcctcctgacttggcctccttaaatgctgggattacaggcatgagcctctatgcctggcgggtttaccttttggaaggcacctgcctctctc

SEQ ID NO: 101694 - DNA, 1360 bp, Homo sapiens
cttacttagctcaaaagctttctgtaaaagttgatatttctgaatttttaagcaaggaaaaccgacgcatgagcagccgcctgacccctcgtgtctgtctttccacccagaggagcttacccgccttgagacagctgacccccgactccgcggccttcatccagcagagccagcagcagccgccaccgcccacctcgcaggccaccactgcgctcacggccgtggtgctgagtagctcggtccagcgcacggccgggaagacggcggccaccgtgaccagtgccctccagccccctgtgctcagcctcacgcagcccacgcaggtcggcgtcggcaagcaggggcaacccacaccgctggtatggaaggggcgcctgactggtctgcacagcccaccgtgcctctgctcccgcccgcttcttagataaattggccacggctcagaaaccttttccaagcatgcaggaagcctcctgctagaggaagcttgggtattaccttaaatagttaaaatagaaaccagaggttgaggccctgggatgttgtattttgtctcagtaaaatgaaatagttgagttggctttgaaccaccggcacgtccccgccctgccttgtctggggatgttactggtgtaaatgaatgcagcgtgcttttagaggatcttgtagatagatgttctcttggattaggagcagcggtccaagcgtaagacacgggcacctgcgtgggacaggtgggcaggagactggaggcagggtagcagctcacagcacagggtggatttaggtgagtcccgggaggcgaagccgcggctgctcatagcggttcacttatgtgcagtttggatctggctttcttggttttatagtcatgacgtttgctctgcagctagagaaaggatgtctttgccagaagaattacattttgagcacattccctttcatgggcagagggattcaccaaacgtagaggggcagttttaaaaaaatttcagaggtgttttcttcctctaaagacagcttaaacaacaaaatggtgcgggctccctcatcatgagctggtatgtgttgtgatggtgtacacatcagaaccagctgggtgaggagtagccattagggggctggctcttgtgctctgttcaagttgcatttgtttttgtcttgataatagcgaggagaacagggtgaaatggcatggagggagggtgtcccttataaaggccagggaagggctgagcgcctgtgtaaagagagggcttccttgcctgccttttgactccagagggaaagagatgtgccgtgcctcttgctttagtgtaaggacagaacttccctgttcactagtcagtggagctacttt

SEQ ID NO: 101695 - DNA, 1010 bp, Homo sapiens
cagcccctcctttctgacagtttgacactgatgacccatcctccattgctcgaatctgctctgaaaactcccctctgtgggaggcttcttgttgacactcacttttggggagtaaagaaaggtgggtttgggtgattgcagggagctggggaccctcccctatgggaggctgcggctgtggagccctgaccgccctgtagccagcctctgcacctgggaggatggagctttcaggagccgttcttctgtttgttgttttgatttctgagagatggggatctgggttgcctgttaggattatttactctggtctctatgtgactttttccatggacttctgaggactggggtctctgcagtgcctggctttgtgaacgtccgtttttgatgcaggtgcaaatcatgccttcctcacccgctcaggactgcgatcgtcagggcacagggcaggcctcccagcagcactcccgtgtccagcgggctggcaggtggccggggtccttggcttcctgggcgtcctggccaccgcagggaggcttgttttcttttgctgggcgtgaggctggtctccccctcgtcagctggtggcgtgagatgcccttaccttgtgtttttggattcttgtagcctcagctcgttctgggtggcgctgcccagacggcttcacttgggacggcgacggctgttcagacggggactcctcagcgcacggtaccaggggcgaccaccacttcctcagctgccacggtaagagccactcctttccgtgccttcaaagacggtcaggcccgtggcgcaggtcagaaaatgcagccttgagacctcaggccggcttctgtcccagaccgctcactgcttgcttcacaaagcagtgaacagtctggggcccacgtgagcacgtggggctctgctgctgtgctgtgtgaggtgggctccgagggccttagaccgcagaagtctgcaaacagcaaaagcccaaacacctgcctttgaaaaagtcactggtgcac

SEQ ID NO: 101696 - DNA, 1322 bp, Homo sapiens
tattttgaaaggggcgttttggggggaagttttcttaatgggcataaatgtggctttttggatcaagaattttagatgttagcccaggagaggcatcaccattattcttgataccatgctgagtttcgaaagagctggagccgacagccctgagagtgccccagcgtcatagcgcaggaggaggaagccccacgctcatttgtcatcatgaccaacaggaggttttcaggccttacttcatctttttcgaggttatcatttcccattctccataaaggggaggaaggagaggctgggaaacgcagtggccgccccctgtgccccgtggcttggccagtgtgtgatgggtggtggggacggccggtggcggtgcctcattgcacgtgtgtttagtttctcagctccttggtgctgggctgtctgccgaggcttcactcgggaaagagtgcagtgtttatagccctgctcccacggctgcatccccacctctgtcatgggaagttaaatttaaaagttggacaattgtgttgctgtttctaatggaatttatgatataactggttgctgttttttgaagctaacattaatgccaaacctgaatggcaggatttgctttcctgtggtttagctcaagaaccatgacgggcaaatggttctcctgtcctaagggttgcgtcgcatctgcgcctgtgttgtggttgtcagggcagtgtgggggcagcactgccctgcctcccgagaggagggttctggtgaggagcctcgtggcccaccctccctctgttgggtctgggtgtcacaggacagcaggctgggagaccctggagtatgggccgtagacatggttgtgccctctaggcccagcccagcggacgtggccctggcacaggcaggaggtgggggcaaggagactggcatgtctgtggggtgtatgggctggttgggggcatgggggcacgtggtgtggccggtggaagccattgctacactgccttgctgtccagctcattcataaaaggaaggctcaggtgccattttttttccatggccttttaacaacctttacagtttttttgtcttgtataccatcttgactcacaagtgtgttttgagtttgggggattcgtgtgtttaagacttgatttcctttgtttccttctcacagctgtcagcttcccctgggtcaggccagggcctcctcatggctctggggtggttgcgttcctgacgccaggtctcctttgtctgcaggaatggtcctcgtccgaagtgagaatgggcagttgttaatgattcctcagcaggccttggcccagatgcag

SEQ ID NO: 101697 - DNA, 1051 bp, Homo sapiens
ttgtggaggtggtggggtacggagagcctcctgaatcaggccctgccacgtgtttatccatgaggttccacatctgtgctgtgtggcccttggtgttgctttcgtggtcacctgatacattttgtggggccagtttaaaaagtagataagacaattcaacattattggcaacttagtaaagtttttggacgaaatttgttttcaaaaaattattactctaagcatgttaattggaaaattggaggctgtactgaggtgtgtggagtagggcaagcaagacccttcccagcactgtccagcccatcctgcgagtgcgtcctctggcttcagggctaattgaaaatgtgcttcgaggcacgacaggccgcagtggggtgtgacagttaagaaaaagccgaaatgggcactgctgggcagggtaaactttattaactgttgaatgactggaaaatcattttaatgtttcagagctgttttaaattatgtgtctgtctacgcatgaaagcgaatctaaattagtattgggctttggcatgaaaaggctgtggtgtcctgactctgggtggtgacgtctgtgatgcttgtgatgctgctgtgtcgtcctatccaggacaccagaaactcagattcgttgcctgcactgaccgggcactgtggagatgcaggtgtccagtttcctggcgggctcgttggcgtccctgcctgtgattccgctccctggagtgctgcagaggcctctgctgcctcctctccttgtgcacgtggccgcacacccctatcggggctctggcccgctgcgctgctcgcctggcctcgcagcgctggcattgtgcgtctttcctccacctggccagctcctgacacccacatgggcagcttcaccgtgaccatgcccctgcggcgcactgttcttccttctggcccagccctgaggcttcccctgaccactgtgggttacctgtgcctgccattcttttttttgttttttttgagacggagtcttgccgtgtcaccaggctggagtgcagtggcgcgatctcggctcaccgca

SEQ ID NO: 101698 - DNA, 1031 bp, Homo sapiens
gcgctgggtgtggcccaagcacacctggggcagaggctttgtgggtcagctggtccactgggggctgcagacactgtgggcagaggtgctgccggtggcaaggtgggcaccttgttccatggggtcgggggacacagcctttcattttctgactttgcagtaaagtgtgtgggacaatgacctgtgaaagtttttaaaggaagttctgtgtcttctgcggaggagcgtggtctccgtggtgttcataggagccacgcacggtgctcagagcatgcccagaacgcacaggcctgccttgctttggagctttgcagaaggttacgaatgtcagtgtcagaagcatcatgacaggaacaagggtgacacgggaagcaggctcgattggcttttttatgtaactgtaagtgtaaaaaattattagttacttcaacatgatttttttgatgataaaattagtttttttttcattataggaagtttgggaagtaaactgtaaagaagaaaatacagtcacttgtaacgtcacctggcccagactgctaaaatttcggggtgtctcacttcagcctgtgtctgctgcatatctgcttctgtgtttttctgtaattacagttctcctgtgacccaagtctgtgctttgccttgtcctgtgtctggtgcactttcccttggccctcggtggtctcaggctccagcatttggtaacggcccctgtgccagggtgctgtgctgatggcgacaagtggccccctgtaggtgaatgccttcatgtctaactgtgtgtgtgtctggtgggttgagcattttcaaggctttgatacatatcaccttccaccagattacacttttaaaaccattgccagaatacgacttttgggaatggataccattctaaaggaagaaaatcgtgtctagttttaagttgcatttctttgagtgaaattagacctcgttcatgtggatgttggctatttattctcgccaactgtgcctatttgtataagcgcgttcttgtttttttcttttttttc

SEQ ID NO: 101699 - DNA, 1975 bp, Homo sapiens
gaatttggtttaggtagctgtcatgatattctttgtcaggacagtgttgtaaagacagttatgttaatgtaattgtaatttgctggtttgaggtgccagagtttagattttattcactgaggaaaaatgagaaaactcagtctttagtgagattgttgcagatgacacagttgtcccaagatcacggaaaagcactagttatgtacagcttaggatagtcataacgtcatagtcaggttgtgattacagctgaaagaagaaaaaggtgatttgacacccacattagcatgttggtaaattgttgagagatcttttcagatcggtgtaaggtaaagaagctcatttctaaaggttatcttttggcctggcaaattcacattttcttcagtgtatcttggtctattgtgctttcatgcagaatttactctccttttgctctaagatttggcccaagtgtagattcccattccaggacagaaaagcactttctcaccatgggccttgatcccttggcctagggggcgtgtgcttgctgcatgttttaggatgagtactcccaggtgaatgtgtgtctgtgggtgctgtctggagcattggttcccatctgtggggaaagggggaaaatgtccactagcccttaatcgcgctgttgggacgggttggatttggcgagtccaggcccatgctgggtggcggcatgcagacggccacccctgaggttgcaggagctgtgagttctggtggccagtggtggcagccagtgctctggcacaagggacattcctaaaagtttagattttgtgacttgagggccctgttgccgtttgacctgggaggaatatgttgttcctcggagccttggcttacccagctgtaaagtggggttgcccttttggtgaagaatgtgaattctgtcaggttgggccagataacatagctgtcaggtggcgctcactattccaaactctcccagttcccctcatttttcactgattttcacacattaatccagactggatgttttctcagtgactgaggtgtttggtgtggcagctgactggttctgtcaatggggaagttaccgaggtctgaggtgggtcaccctggggcggtggttgccaacataggggagggttgcagtggcctttggaggcctggacctgggtggagggctcactttaggctagaggccttaatctggtgtttcttttgacatactcaggtaggagtgacatttgaaaagaacaaagaaaaagaacttttggggagctgtgtaaagacagccctggacagctctgcctagcatagggcaagggcgccgctctgggtcttcccttcctccctgccccctgccccgcggctggggtcgtcaccatcgccttcgggatgaacagagtcatcttggtgacaggttgggatggacctcacctgcctttggtgtctcagagctggtgaccctcatggcttagtggcagccaggagtcggggtcctgtgacgctcttaggagcctctctcctcactgcttactgtgcccgagcactgcattcacagcagaggtctatgagtttgaacagaggatgacgtttgaagttcgttacggttgccctggttcttagggcctgtgagaagctttgtaggagagggtgtcccgcttgcttctgtggcaaatggacctgaggcaggccccgggcgcctgggaagttggccttctcccagggcagagagcagagccaccctggcttccaggactgcccccgggctccccggtgtgctgtggaagttgccccttagacatcagcacagggaggccgggaggcggcgtctggtcagagcagcacagaccgggctcagcagaacagactggtgggcgtgtccgcatcccgaaatcagagtggaatggagacagttcctgttctacctccaaagccttttctactgtataatgtgagttttcttccacttaagggataaatt

SEQ ID NO: 101700 - DNA, 1135 bp, Homo sapiens
tgtcgcagcgcgccctggggacggggaccggcgcccggcccctccaagccgccgcggggaagctgggtccgcctctggctcagccggtcccgggcggtggggaggggtcctgcgcgcacggctcttctcgccctccaatcgtgaccacccctggcccttccctccatttttaatcaataaacccagccgccccgggctgactgtccccgcacccagctgccttggagacaggagtgtcgtataagcccgtaggtaagagcacggtgcttgccaggcgccaaacgaagttcccgagcctgaagccggcacgtctggaagtagctttttttaccttctgctgggggaggggagtaagttacctaaagtgttcccaagcaccttctctctagaaatacttcagtaaaagttccagtcccctctttctgcgtgttttattttccaaccaaaagatggtgttattggacatttctagtggttttcctttctctcatttcttcctaagagcccagaataggtttcagagagacgcttccttgcctcggacctcactggggccaagaggccacagggtcagtcttcgcagctgaagacagcgccgcaataagcagagacctcgggacgatgaatgacgttgctgacaaagaaaatgatttttttaattgctttaacaaaggagactgctagtctcgaaagcagacccgaactggacccttgtgcctgttcgaactgtagccttgcaaaggaatggacttactgataactggaatacgggacttcaccccaggcttgtttctcgacagcagcagcagccaatgagcattgaggacggagcctaggagaggtgcctcccctataggggaacagtgtttgggggaaatcactgcaaacgtacagctggagttttgtacctgaactttggctcccagaaggcaggaaaggaaatgaatgaagcaagctgagtatggcggggagggcccctgtgggtacacctacggagcaccttgagctcagtagggggacagtctgagttttccagaaagaacagaaatataaagtgatgattaaatctcgggatttttaatttttgagtgttgacaactaattagaacatttttaaagcaggtcaaagcacagg

SEQ ID NO: 101701 - DNA, 1517 bp, Homo sapiens
ccacacttctggggaggtgcctgtttgtaggcacggtgtttttcctgtccttgaggttccctaacttgggaagctcagggctttgggagtggggagtccaaagatgaactggccttggtgctgcccagtgactcttggccttcttttgctgcctgggctagcctcagagggaatggcccagtctgggggtgctttgcctggatttgatagaacatctaggcagttgccctcctttccttcctgacatgccagcagaagagaaatgcctggagatataaggcttgcttcttttctctctgtttttaaaccctcctcccctcctcaattcaggagctggttttccatccatcccagtcggcaagagccccatggtggagcaggctgtgcagactggttctgctgacaacctgaatgctaaaaagctgttacctggcaagggcaccacagggacgcagctcaacggtcgtcaggcccagccgagcagcaagacggccagcggtacttgaacacatcatttcctggagtttgcttgatgttctaaaagtggcacactacttcctgggctatttttttttttttaattaaaaaaatactactcccccatcctaagccccatgtgcttttgcagggcaggcctgtgcagcagcctcctgcggtgccgccctggccgcgtgccccatggtggtggggcctgcttccacagctgggttctggcttccggctgctataggagctttgccttactcttcccttttgcgccgtagatgtagtccagccggcagctgtgcaagctcaagggcaggtgaatgacgagaacagaagacctcagaggaggcgatcaggtaacacctgttgccacttgatttctggggaccacgagtgatcaggctgagctctgcttgccctcctgcctgcttctctggttgacggtttcaggggtgctggtgtgaagtcgctgcttgtgtgctctgttccttctgtggccttgggggtgtgcctggaaattccttgtgaggtgtttgagatcactgggttggtgacctacttcagccagggctgtcctttgtcctcacaggaaacaggcgaacaaggaatcgctccagagggcaaaaccgtccaactaacgttaaggaaaacacaatcaaatttgagggtgactttgatttcgagagtgcaaatgcccagttcaaccgagaggagcttgacaaagaatttaagaagaaactgaattttaaaggtttggctcattatatgaaaattattctctgcacaggagtacccctagagagtgttaggaggagatgcctggccgggtgtggtggttcacgcctgtaatctcagcactttgggaggctgaggtgggtggatcacctgaggtcaggagttcaacaccagcctggccaacacaatgaaaccccatctgtactaaaaatccaaaaattagccaggcgtggtggtgggcgcctgtaatcccagctactcgggagactgagacaggagaatcgtttgaacccagg

SEQ ID NO: 101702 - DNA, 1022 bp, Homo sapiens
ggctccagagctgacggggccgccccttccctgtagtggccctggtgagtctgtccctccttccctgggccgctctgaggacgaggcctggccagaagcctgggagtcagtgcctgctacaatcagcatttcctctgtggtttagctccaggcggacgacgtgggccgaagagaggaagctcaacacagagacctttggggtgtcagggaggtttcttcgtggccgcagttctcggggcggattccgaggaggcaggggcaatgggaccacccgtcgcaaccccacttcccacagggccgggactggcagggtgtgagggtgcagccaaaggtgagtggatgaaccttctggacgctttggtgggagggtgtagggtcaggcacacctggagagcttaggaaggtggggagcaggctcggtttcccaggaagaagagaggcccagaggtgtcaaagccaaaccgagggcctcgaccctatgagtcacccgggaggctcttggccaacttcaacctgcatctgtgggggtaggatccaggccccagcatcctccaagtgagattgcaggtatgggaggtgaggtggtgcgggagtcgcgtgggctgggggctcaccacccaggtgaagccagcaagtgagaccttgctccaaagccagtgtcttggcccaacccggccctaagtgaatcagaggcttcatttttaaccaggtcccagtggatttgtgggcaccttagggtttgggcggagcgtcccacatggggtgcctggtgccaaccccacccagcgcctcgggacagccaggtgggccctggaaagactagccctcctgccactagctgcgtccctgtccccagtgtattgtacaagtaggattctcagagtgggttgtgagaagaatgggggtagccagtctgactctgggggcaggagggaggctgagtggctcctgctcgccagcaggggcaacagtgctagcttatcccagcagatgcttgacttcctgtcatctcttgcaggctc

SEQ ID NO: 101703 - DNA, 1081 bp, Homo sapiens
gggtggggtctcaggagtcaggcagggccagcacagggtggcgtggggggcaggggtgggtgggtggagggcacggaaggggttttcccatggatcatgttgtataagtgaaccagaccaccctgatggcatccacagtgatgtcaaggttggggctggccaggggtgggtggactagaagcatttgggagtagtggccaggggccctggacgctagccacggagctgctgcacagagcctggtgtccacaagcttccaggttggggttggagcctgggatgagccccggcagcgccttggcccttctgtggtccctgccagcctctgacctgggccggtcagtcattgctggactctggccacacactggcgttctcatccacttggaaacaagccagtcttttctgcaaggtcagttgaccaagagcatatttcccctctgttgtacatcgttgttttgtgtttgtgttgtaacagtgggtggagggagggtggggtctacatttgttgcatgagtcgatgggtcagaactttagtatacgcatgcgtcctctgagtgacagggcattttgtcgaaaataagcaccttggtaactaaacccctctaatagctataaaggctttagttctgtattgattaagttactgtaaaagcttgggtttatttttgtaggacttaatggctaagaattagaacatagcaagggggctcctctgttggagtaatgtaaattgtaattataaataaacatgcaaacctttaaaattttcttttctgatgctctaagaatcctgttgactcttctgcccaagtcacctctgcatcatgtccaggtctggagcacacacttaggctggtggaatttggggagacttgggccccatcaggtgatggaacgaggtggctgacccaattggtcgggtgaagtgcggccagcagacccgggttctccctgtgggccacccttctgggatgaatggctctgctctcagaaactggatacaaagttcttttaaaaacccagctcacagataacacctgtatcataagcagtggcccctttgccaccttcctgctgc

SEQ ID NO: 101704 - DNA, 1070 bp, Homo sapiens
ttgaacttgctgtcatgaggcgagatcaatccctcaaggtaatcaccaagtttgtctgctttctttacctgtcagttttctcccatgatcagggctgagcagtaccagttccgaaggaaacatcatagggccattctgtggttttaacattaggaaaatgtctttctgaggctccccatacgtcaaagagaagattcccatcttcctctgattagatggtccacgcgtgttctctgggcatgctgagcggctgccagtcagatctgctgctgctgctactgctgcttaatacttgtctaggtcaggccagcatcctcttgtttttcttgaggttcctctccaaagaggctgtatgagcagcagtgccaaagcctggccgccctccccagaagagggcgctggttccttggcaccttgtgtggcttaggtaaccatgaagtttttttctatagattttaaatcctgaagaaattgagaagtatgttgctgaaattgaaaaagaaaaagaagaaaacgaaaagaagaaacaaaagaaagcatcatgatgaataaaatgtctttgcttgtaatttttaaattcatatcaatcatggatgagtctcgatgtgtaggcctttccattccatttattcacactgagtgtcctacaataaacttccgtatttttaacctgtttttttttttaagagaatgtgtatctttaggtgcaatcacagcagtcctctcatctctcacccttctttttcaaccctgagccaccgtaattgagctttcctttctgttccttgtggctaagacagtaagccagtgtgagacacaggttcctcccttgggaagtcagagctgctgccctgggtcctgcagagaaacctggccttcagcagacctgtttctctgttgtagacacagaatgacttccgtttgcttttagaccttcattctagtcccctaatgaatgtataatgtcaaggacacaaacacaagtagccctgggttcattctgtagagcagcagctttgttcaaagcagctttgcatgtctgactttcatagaccacatcttgacgtctg

SEQ ID NO: 101705 - DNA, 1096 bp, Homo sapiens
gcctggccaacatggcagaaccctgtctccactaaaaatacaaaaaaaatttgctgggcatggtggcacatgcctgtaatcccagctactcaggaggctgaggcaggaaaatcgcttgaacccgagaggcataggttgcagtgagccgagatcacaccactgcactccaggctgggcaacaagagcaaaactctacctcaaaaaaaaaaaaaaaaaaaaatctcccattgcctcttgatagcgcagtaaaacatacaatcgtataaccccattctcggtaagaatcagcatcaactctaaagagctctttgcaaaaggaagccacgaggcagggcctgtgtccacagctgctgtccagcactccagcttgcctcctgccactgccactggctgggcggcccatgtagggcagctgtgttccagggctggccctgggttgtcatgccctatgccacgtgagaacatacgtgtctgttttaggccaatgccataggtcggggtgccaagtcagtgcgcgagttcctggagaagaactatactgacgaagccattgaaacagatgatctgaccattaagctggtgatcaaggcactcctggaagtaagtttgcatttggaatccaggcaaggtggtgaagataccacgttttggtggtgagtggtaggtagatgagcaggaaggaaggtggcaaggatccagcagtaatgcttaatgactgctgtgttccaggcactgctctggtctatggtgtatcctaactgctgtgttccttgaaatagccatgcaagatgtgatcattagtgtctttatccagccggggcagctgagggttgtgcagggacacacagcatgagaaccagaggcaggatgtgaacccagctgtccagctgtggaatctgttctcgagccatcactaggccttccagaggcttgaactgttgctaaagtcaggggattagagaactggagatatggttgggctttgtcaagaccttgaagtgctagcaggtaaaaccagagagggactagctggaaggccaggcgggagcgtaggcatcaggattcctggttgtaaccactgtgtcaagaggagggc

SEQ ID NO: 101706 - DNA, 1069 bp, Homo sapiens
ggtgccagccacagtgacagacaagtagaggagaaaggggtgtgggtgaacgcaccttccagtgggagctgctacccggagtacgtaccccccaggacccaggttcagatctgctcctactgctcgctgcctggcagtagaaccatgtatcacttttttgggaggatagggtggggtgaggggacagggtcttgctgtctctgtctcccagccgtcatggctcactgcagcctccaccttccaggctctagcgatcctcccaccagcccccacagtagctgggactacaggcttcagccaccacacctggctaatttttgtactttttgtagagacagggttttcccatgttgtccggctggtcttgaactcttgaatttaagtcatccacccacctcagcctcccaaagtgctggaattaacaggcatgagccactgcacccagcactcatatcactttcttacgtggtttgtggatcttaattaaaggttggtgttcgaggaagagacattgttgttcttggtgtggagaagaagtcagtggccaaactgcaggatgaaagaacagtgcggaagatctgtgctttggatgacaacgtctgcatggcctttgcaggtatgagtcggtggggagcgctgtcttactctctagagtctcagcgaagaatagggctttggagattaacttgggtgtgtgggctattgtgagccatataaactgagtaaatgaaaatcatttaaaagaattggatttggacttttaagttggctagtttctttggtggcctctctctgccatagcaggtgaaacaaatggctaaatggatgaaaacacttctggctgctgcgcaatttgacctccactgttatttttctgtatcaatcagttacaatctagagaaaggctggactttctagagctaactgcatctgtggcatggagaggacagaaccacgtcctgccatccccagcagtaaaaaggaccacactggtggatgcaggccatgcctcgccatgttctcagcgctgttttggtcttgctcatttctcctctcagcagatgcaatc

SEQ ID NO: 101707 - DNA, 1086 bp, Homo sapiens
attgatgttttgttttaaaagttaaaagtaattcttggcgtggtggttcacgcctgtaatcccagcactttgggaggccgaagcgggcggatcacctgaggtcgggagttcgagaccagcctgaccaacatggagaaaccccgtccctactaaaaatacaaaattagccaggtatggtggtgcatacctgtaatcccagctactcgggaacctgaggcaggagaatggcttgaacccaggagacagaggttgtggtggggcaagatcgcaccattgcacccgagcctaggcaacaagagtgaaattccgtctcaaaaaaataaataaataaataaataaataagttaaaattaattctttatccagagtcgggtgctttagaatttataagtcacttatgtgttttgcttgaattaattctgacagcccctatgaggaaatctggaggcaggtaacagttcccattttagagatgaagaactgaggcacagattaaaggacttgcctgtgttgaataccagtcctgttctaggacattctcccctctcctaggagacggatgtcacgcacaaatggggagagaagtgtttattttgtaggcactaagggtttctaaaacccttaacactggtaagggctcaaaaataaacgtatgtgttcatattcgatcaccgaaatgagagttcttaattgctaattgacaaacgcgttagcaatttcagttagggagtcatctcccttgattgtgttcttttcctgtcaattttcatagacctaatttgcaaactcaatcggggactaaaatttcccactgaaaatgttaaacattttagataactgtgaagatagtttatttttattccttgccaatctgggaatatgccttttttgtgtgtttgtgtgtttttttaagtgctgtattaataatactttctgaaagaaaaggacacttaccccaaaacttcaatctgaaatgtcttacattaagaatatcttgaatgttgtgtatatattttaaaaagcactttgcaaaatagtttgtacatttatttcctaatttatacatgatttttggtgttaatatat

SEQ ID NO: 101708 - DNA, 1035 bp, Homo sapiens
gacctgtcttgcgtgggagatgagtacattgccgcgctgggcggggcaggagggaaaggcaaccgcttcttcctggccaacaacaaccgtgcccctgtgacctgtacccctggacagccaggacagcagcgagttctccacctggagctcaagacggtggcccacgccggaatggtaggtgtccccactgccaacagcatctgcacacactcagctctagaaaatccacttttctcaatggggatttgccagtggcctggaagagaacagctttgcgactcacctttttcccatcagtacactgctgacttggtcgtgagcatgagcccttgtgactcccccagccctgaaatcctccctccaatcccagttagttacagactctgcgctaacaaaggtgctgccgcgggccgtgccaccgtcttccctctttcccccaggtgggattccccaacgccgggaagtcctcactgctccgggccatttcaaacgccagacccgccgtggcttcctacccgttcaccaccctgaagccccacgtcgggatcgtccactacgaaggccacctacaaatagcaggtagaacttccagaattctcccaaaggttagatttaaatgatgtaattcagaaaagtaatgatgtaactcttaaatttagctttctgtttaaaatgtagcattgttggccaggcgtggtggctcacacctgtaaccccagcactttgggaggccgaggcaggcggatcacgaggtcaggagatcgacaccatcctggctaacatggtgaaaccccgtctctactaaaaatacaaaaaaattagctgggtgtggtggcgggcacctgtagtcccagctacttgggaggctgaggatggagaatggcatgaacccagaaggcaaagcttgcagtgagccgagatcatgccactgcactccagcctgggcgacagagcgaaactccatctcaaaaaaaaaaaaaaaaaagtagcattgtttttcctaatgtaaacaacttttttttttttttttttttg

SEQ ID NO: 101709 - DNA, 1010 bp, Homo sapiens
ggcatcatacgaggcgcccaccagaacaggggtctggggtccgccttcctcaggcacatcgagcgctgccgctttctcttgttcgtggtggatctttctcagcctgagccgtggactcaagttgacgatttaaaatatgaactggagatgtatgaaaagggcctgtctgcgaggccccacgcaatcgtcgcaaacaagattgacctccctgaagcccaagccaatctgtcccagctccgggatcacttgggacaggaggtcatcgtgctgtcggcgttgaccggcgagaacctggagcagctgctgttgcacctgaaggtgctgtatgacgcctacgcggaggccgagctgggccagggccgccagccgctcaggtggtagccacgccagagcggggtcgcctctgggcctctgtctgagcaaacctgggtgtgaattcggtggttttgaatgcataaagtgccttgtggacacgggggagttgtggtgcttctgggtctctgggccccgcctgctggcctgagatgccctcatgttgggaagcattccgtgccccctaccccgcctgccctccgtatttcctgcacctgtcagcctgcaccgactgatgagccagttgctcatttgtgctgattaacacccctaataaggggttggggtgcccataacggggtggccctgccgctgactcaggtctccgccatgcacgcgtggactctcggatgagctcagcagaaccgcacagccagagccccaggtcagaagtgcagaccagggttctcagcacagtgcccgtcgtgcttccatggcttgctacggagagagacctctggatccacactggggctgcgtctggcccgttgtccagcagccctgcggtaccgcaagcccaggcaccagtgtctcggggggcctcactgctgcgcaaggggtggggccgaggatgcaagtccaggcagagcggcgcaggcagctgtgagcttttctccatcagccgtctgagaagagca

SEQ ID NO: 101710 - DNA, 1001 bp, Homo sapiens
actggaacacggacctgggtggctcccgcaggcacacgccccaccaggggacccggcctgggaagggggcgtccggagcccatggggtggggggcacaggcgaagttccttgccactcaggcctcgggacaggggctggggagagatgtccccgggaagggacacgggcactgggcgaggcgcaaggcgcaaaggcagcgggtgcagctctggctcctgcgctgtagccaaacaaaggctgctgcggacttaggacgcgcggagggcgcagtggggcggtttagagaaggtctgggggaggggacatggaagggggatttttagagctgtgttgggggaagggacggtggggaaggtgggggttgggggagacgctcggaggagcgtgctctcacgtgtccaggctctgctgccggctggggggcggggcacgcggagggggctggagcgccagacacctgttggggctgtgaggtgcgtctcccagacgctccaagcccgcttggcagtagtagtagcggctggcggctggcggctgcaaccaagtgccctttcagccaggagaaaggctttctccttgtctaagctgagaccgagggttgtccagcgccagggtaggggctggagtccagcgggggaggggagaaggaaattgtcttctttcctcctttgagggctgggagggctggacagaagtccagggaatcccgactccaggctctcgggggtcttgtggtggccagagttccccatgcctggatcatccctcctgcccccaggcccaggggacacagatagtgctgggagctatgtgggggtgaaggctggcggcagggcagagtttgtggctgacaccaggtggaggggtggtaagatgaggatggctagttccagaaaagcagccaccatgtgaccccaggtcccgccggtgtctgcgcttaggtccgtctgtcccctggcccctggctgcatggtcccactgtggccctactccccacagg

SEQ ID NO: 101711 - DNA, 1092 bp, Homo sapiens
tggctccaacacctgctgaagctggagcctctcagcagtgcagcagtcacaccctcaggtgtcccgggatctttgggtgtgggctgattttctcctagtcattgtcatacttcctgtttgggtgttgacatttcgtttagtgtttagcacagattgtcaggtacgaggtttaattccaatatgtagtacattttcaggttgatttataaccttatctacactgaaaggaagtcagtatttgaacatgactgattattaaaaaggaccgaagtcctgagttaatatggtgggttctggtttgatagtttaaatgcactttccacatatgctagttgatttgtaaatctgctgtcatttttgctttttcagagtgttcttgctagtgagtttcaggcatggtgtcccggcctctcaggctgctggtttgggctagggtcccactgtggaagcgtggtggtgtcccggcccacctctgcagctcttgataataaaagcatctgttaaatagctcacagcactgtttgcgtgaactttttggcacttctttccttttccttccagattcagaaaagaacttgggatcattcagcagaatgtcacagcatccacattctttccgctggagcttctgctgatgcaaatcctgtgacctctgagttgagctgagtggtggaagtgagcttttataagggactggatctgagactcgtgcctgatgtttgtggctgtttctctttgcttgccttctgttttcagtggaacactcgcttgatgtattttgagaaacaaactctgggatcagtcctgttgagctagtggctggctccatagtttggggcctgaagaggttcccgcaccctcagggcttgtggcggtcatcaggcctctctcctgggtgtaaggtgtgtacttctcacctgcgcactgagggcctgggggctgtggccccgacgctgaggcaagtcaggggtgggaagggtctgaggggctcttggctgagcagacactgagcacatttctttatcaaaggcgctgggactgcaaccttcaggggtgcccagagagcgcctgttgtgggctcatacggggagt

SEQ ID NO: 101712 - DNA, 1035 bp, Homo sapiens
ttttgtatttttagttagagacagggtttcaccgtgttggccaggctggtcccaagctcctggcttcaagtgatccgcccacctcagcctcccaaagtgctgggattacaggcgtgagccaccatgcccagccaataatgctttttagaaacaactcttgttatagggctgaattattggtctgttattcattgattgatcttccgttataaatgctccctctcgtttactttttgaaattatgtttgtgatgtgataatttattttactaatttgcttacatggaatttagattgattttaggatggtgaatgggtatttttaaaatgtttttaaaccgtgaaacttctggaagctaagtatgccaaaatttttttccctttagatcttcagtgtctattggatttttccaagagaaagtttgtaaaattccttacactgtagatgtggatcagatacgatgattcagtagaagagcacatgtcaggggcagtggaggctggctgctgaaggatgaacggagaggaagaattctttgatgccgtcacaggtgagtcaaaagagaaccaactggggacgtactggaagggtgaacgtccctggattcagatgttggacctggcgtttggggtgtaaagatgctcagtaaagcagtgtgtgggtgagcgttcacgatcccaaacacggactgttcagcaaaacctgacatccatctcagaggtgggaaaagccttgactttggctgacagggtttaagtctcccgaagagtttcctggggtgcggatattttcatttgtctcctgagatagccatcttcttcccctatttctgcttcatgatgagaacgttctagatatgatgaccctgtcttgcttggcactgcttgatgcatcccatcagacagcaaacccctgggtctgcagctgcgctcacagccgcagagtgcagttatttttttctttcgcacgatggtttaaagtggcggcatgcagcctgtggtctgaatgaaatcctgtggcctaattgaaaagaat

SEQ ID NO: 101713 - DNA, 1050 bp, Homo sapiens
gtggggtgttttcttcttgggcagggccatttgggaggatgaggagtaaaggaaacaagtatgtggagtgcggttgaaaaccctgcacccctccacagccatgtgccagctccccagaaagccagggccgcatgcccaggaccctgcattactgccgtgtgtgtttcgtgaggtggcctttcttttgacgacttcacaggaaagccatttgtctttgttcagtcttctttgattgcttattaacttgtcttgacatttaagtagaaagctttgtagatgctacaaaggaaagaagaagtacatttcaaacgcatgctaaatacacagcctccgtcgcaggggcttcaaagcagcgtgctgctctcccgcgggtgccggttgctgtgacccagccccgcctggtcgttgcgtcttgggtcacgtcgtgtcttggcttttctggactctcactgcttgttttctggtgtcttcacagacataatgaagcctacacctggaccaaccccacctgctgcgtccacaacgtcatcatcgggaagctgtggatagagcagtatgggacagtggagattttaaaccacaggtgacagcaccccaccgttgggtgagagcgcgaggctccgggtggggatgggcgagccggggagcgtgagcatccgtgctcctggtgggttttagctcagcctcacgagctgctgccgtgtccccgccagcccaggcatagcagctgcctagacttgactctgaccggtgttggccatgaatgctcctcgttcaagacctcgtttttcgtcacggttgttactttaaggctttgagctatgctgaagagctgtgtcattgccaggtgcagcgcagtggccgtccacggccgttggccactgtctaggcttgaatgccctattcctggaagctcatgactggtgggctttgccttttcaccactttagtgaggtataatcgatgcatcataagactcgcccattctgaatggacacttaagtgatttttagtaaattgaccgaatcatggagccgtccccacagccca

SEQ ID NO: 101714 - DNA, 1102 bp, Homo sapiens
cagcctggccaacatggtaaaaccccgtctctactaaaaatacgaaaattagccaggtgtgatggcgcacatctgtaatcccagctactcaggaggctgaggcacaagaatctcttgagcctgggagatggaggttgcagtgagccaagatcacgccaatgcgctccagccggggcagccaagcaagaggctgtctcaaaaaaataagacagttggtgtttctgctctgtccaccctctatggtagaccagaaatgcacccgtttgaacagcctataaaataaaatggccaggcttatgactgaccatttctcccataaaacatgtgaggatcaacatgtggacctagaagggacagcagtcttacaacagggtagcagtcatcagtgccttgacacctctcccccttggaactcagcccagggagcagctggctgtctgtttccagaaataggcgggggcgccgaggccaacactcgctgaccctcagtgagtgcatgtaaaacatgtttttccagaaccgggcagggaccccgaggccagactcgctgaccttcagtgagtgcatgtaaagtgtgttttggttgtctggttttccatcctaaatttaagggtgctctgtccttggagacagagttgtccccaggctgtctactaggtgaggcctggcccagttccccgcgtctgtgtgctggctctgcaggcactgcagtgacaccgtcccctcctgggtcccgagtctgtcagagttgcacttcccgggagtctgtggtcacggttgactcttcccagcaagaggcgaaaggagaaagaaaatggagtctggcactatttggcttcatcccttttagaatcgagagctctggtggccactctgcaaaggtctctgggttgttattgatgaaaaaaggcaggcggggaaccaaagatcaagcaagcagcattgactgcactgattgatagaaaagggctgaaggacacacacacaacacattgagtgtgttgaaaatgatcagtgggcgcatgcagctttacattttaaaacgctcactcttttttgccccttcccgtctcctgcagccccctggaccaaccatcctttg

SEQ ID NO: 101715 - DNA, 1053 bp, Homo sapiens
gatcttgaagctaatcctgcagagagttttatagaggccagggattgccttctaaattatgataaaacagaagtgaagagtttcagagcatcagattgagtgaaaagttgtcagattctgtattttttaacaatcttcaataatgtaaagattacttttaaaatatttaagttaaaactacttgaatagtattttgctgaagagcaagatatgcattaatcaccggttttatactgtccaaaatgaagcatccccgtgacaaaccagagtgggcagaagcatcgagagcgtgacaggaaatcccaagactgcttccgcctcagaggcgtcccggctgcgattcgctgccctgttgtcagtgaggcctggctgtcaccgcacaccgcgtccgtgtctccagggggttcctttcttctcacacgtcgcgtgtacccatagcactcttgtgtttctgtttttcccagtatgcatgtttaaaatagaagtgacaagaatcacatccggttgtgtcctgtgggagggtcagaggcagaatctacttacagtggtgtaattaaagttatttaaccaaaaataggtatgtgtccatctcagcattcacctttatcaagtgactgatttttttttcttttctttccttttttttttttttttgagacggagtttcactcttgttgcccaggctggagtgcaatggcatgatctcggctcaccgcaacctccgcctcccgggttcaagcgattctcctgcctcagcctcccaagtagctgggattacaggcacgcgccaccacacctggctgattttgtatttttagtagacacgggttttcaccatgttggtcaggctggtctcaaactcccgacctcaagtagtctgcctgcctcaacctcccaaagtgctgggattacaggcgtgagccactgcgcctggccgtgactgattttttttcatgtagaattgtcaacacgagagatcacagtggagcactttgaaagaccgtcggttgtgtgcacgcacgcacacactcatgcacacgctgacacgcggtt

SEQ ID NO: 101716 - DNA, 1274 bp, Homo sapiens
gctggggccatgggctgagtccctgcttgcatgccttccatgtgggcacttaggctgtcatcgagctgatggccgtgttcttgtgccccagtggacctggccagtgtgctgacgccggagataatggctcccatcctcgccaacgcggatgtccaggagcgcctgcttccctacttgccatctggggagtcgctgccgcagaccgcggatgagatccagaataccctgacctcgccccagttccagcaggtagaggccgggcccagggtgtcctccactgtgtgctcagggagtgggcaggggggaggaggaggccctgccccaccttcaccatggccagtgcttcatgtgcctgacccgcagagctggcagctgagcagtgtggctctggggtgcagcccgggttggagctcagccctcgcctggctcttcttgcaggccctgggcatgttcagcgcagccttggcctcggggcagctgggccccctcatgtgccagttcggtctgcctgcagaggctgtggaggccgccaacaagggcggtaagtggctgcgcctgcacctccaggccagagccaggggcagggtccattcctgtccccctggatctgcagaagtggggctgagggggtaaaggtcacagcccttctgcccttgatcccatcgctttgatccccagttctgggcaagggttagacaccaccttgtgtctttaacgtgttctagatgtggaagcgtttgccaaagccatgcagaacaacgccaagcccgagcagaaagagggcgacacgaaggacaagaaggacgaagaggaggacatgagcctggactgagccacgcgccgtcctccgaggaactgggcgcttgcagtgcgttgcacaccctcacctcccacccactgattattaataaagtcttttcttttacctgccaatgcttagtttctttgcccaaagggagtttcggctggacaggtgctagcgtggggagctgctgtagggtcccagagacagttagttatttgacctaacaacggaaaacggtcaccccaggaagagtttggtgcctctgtccaggccggttccagatctgtcttgagactcactctctccgtatttaagtcaacattcattcggttacacagaagttactttttaatttttaaggaggaaccagtgatgattggtgacaaatctctcacaattaaaaatgggtggaagggccaaatataaaaacattttgcagtattttattctttcgtttaagaagctataa

SEQ ID NO: 101717 - DNA, 2251 bp, Homo sapiens
ccctgcacaggctcctgggcccacagcgcgtatttgatctgcagcagaacctgggcagcgtcaatgtgagcacgggctgtgcacccgccctgcaagcccagaccccgggcctggggcctagaggactgcaggccaccgcccggaaggtgggcaccccaggggtgagcaggcagagctggggtggctggaagggtggcccctgtgtgggcggcccctgcattcaccatccacgcccccaggcctcccgccgcagccgtcagcccgcccggcatcctgcctgcatgctgcccccacacctcaggaccacccgagactcctaccagtttgggggttccctgtccagtcacctggagtttgtgggcatcctggcccgacataggaactggtaaggccaggcccggctggggtgggctgagaggggccgcgcaggctgacgccagctccgcttccaggcccagtctctccatgcacgtcctcccgcgaagctcccgaggcctcctcctcttcactgcccgtctgaggcccggcagcccctccctggcgctcttcctgagcaatggccacttcgttgcacagatggaaggcctcgggactcggctccgcgcccagagccgccagcgctcccggcctggccgctggcacaaggtgagggccgagaagaaggaaggtggtgggcagggcctggcagccctaccctgacccatctcctgcccccaggtctccgtgcgctgggagaagaaccggatcctgctggtgacggacggggcccgggcctggagccaggaggggccgcaccggcagcaccagggggcagagcacccccagccccacaccctctttgtgggcggcctcccggccagcagccacagctccaaacttccggtgagaaccatcttgccccagcccccactccccacccactgttccctttcagctgccctgggccctgatccctgcccggtctgctcctataggtgaccgtcgggttcagcggctgtgtgaagagactgaggctgcacgggaggcccctgggggcccccacacggatggcaggggtcacaccctgcatcttgggccccctggaggcgggcctgttcttcccaggcagcgggggagttatcactttaggtctgtgggtgctggcatcccaggcctcagcagggcagggcagggggctccaggaggttctggggaggggccccccctttcttctccatcacaacccctccccgcagacctcccaggagctacactgcctgatgtgggcctggaactggaggtgcggcccctggcagtcaccggactgatcttccacttgggccaggcccggacgcccccctacttgcagttgcaggtgaccgagaagcaagtaagcctggcagaggtggcgtgccagggcagggtttgcctccccattctggtgacctcgggggcatagcctgaccctcccttcctaccccgccaggtcctgctgcgggcggatgacggagcaggggagttctccacgtcagtgacccgcccctcagtgctgtgtgatggccagtggcaccggctagcgggtgaggcccctcctgtggccagggcactctgccacccccacccttctgcagagcgggagccaggcgggactctgggtggggtggcttcttttggggctggagagaggctgggctgaggaccacctggcctcaggagtccccctttctcccagtgatgaaaagcgggaatgtgctccggctggaggtggacgcgcagagcaaccacaccgtgggccccttgctggcggctgcagctggtgccccagcccctctgtacctcgggggcctgcctggtgagtgcggccttgatcaagggtgggggagctgcccctcaggactaggtgctgcgtaacctaccaccctccccccacccctccaccccctgccccctcccaccctcctcccacccccctaccaccctcctatgatgtggaatgagacaggggctgggtggggcactgacgtttgggaagggcctgtgggtctctagctgcccaccaaccagccttcttccatcttccctgtgcccccagagcccatggccgtgcagccctggccccccgcctactgcggctgcatgaggaggctggcggtgaaccggtcccccgtcgccatgactcgctctgtggaggtccacggggcagtgggggccagtggctgcccagccgcctaggacacagccaaccccggcccctggtcaggcccctgcagct

SEQ ID NO: 101718 - DNA, 1262 bp, Homo sapiens
cagcaccaccaagcgcttcgagcaggagctgcggctcgtgtcctacagcggggtgctcttcttcctgaagcagcaggtgcgccaggcacacccgtcctgccatccccacttgcactgaccctgccccacactaaccctgccctgtttctgcagagccagttcctgtgcttggccgtgcaagaaggcagcctcgtgctgttgtatgactttggggctggcctgaaaaaggccgtcccactgcagcccccaccgcccctgacctcggccagcaaggcggtagggccagggtggggaccagggtggcagggagaggagatggaacgatgggggcggggcaggccgcagggacacagctggccctggagcccccactggtcctgtagatccaggtgttcctgctggggggcagccgcaagcgtgtgctggtgcgtgtggagcgggccacggtgtacagcgtggagcaggacaatgatctggagctggccgacgcctactacctggggggcgtgccgcccgaccagctgcccccgaggtaagcactgtgcgcagctggggctccgaggccaggctgttggggcggtaggctgggcttggaggtggcgccctgacccgcatccccgcttccccacagcctgcgacggctcttccccaccggaggctcagtccgtggctgcgtcaaaggcatcaaggccctgggcaagtatgtggacctcaagcggctgaacacgacaggcgtgagcgccggctgcaccgccgacctgctggtgagcagccctccccgggctgggggtggcatctgtggacatgcaggggcacccgcgggcactcagggatggcctccccgcaggtggggcgcgccatgactttccatggccacggcttccttcgcctggcgctctcgaacgtggcaccgctcactggcaacgtctactccggcttcggcttccacagcgcccaggacagtgccctgctctactaccgggcgtccccggtgagacctcacacccgtgcccattccccaccccgcggtggccgtcggagcagttgggactggggtgtctggaatgagtctgggtccccaggccggccggctgacctggctgccgtccccaggatgggctatgccaggtgtccctgcagcagggccgtgtgagcctacagctcctgaggactgaagtgaaaactcaagcgggcttcgccgatggtgccccccattacgtcgccttctacagcaatgccacggggtgagcctggccgctggg

SEQ ID NO: 101719 - DNA, 3237 bp, Homo sapiens
gccagcccagccaggctcagggctcagagccaggagggctgcctggggtaggggtgggggtgcctggccgagcttggcctggaagaacaggcaggatctgtcttttagatgggagacgacgcctctggagtgaacagtagggcagggtcaggaggtcggcgacacagccgtgtggccagacaggtggccccgggagacgtcagacccctcgacagcctccccaggaaatgtgccggttagatgttcgcgctcacagatatcccgtagtgcacactgagacatgggactcaggagagatttggctccctgagcctgcctaacaggacctgccagcccagcctgggggtcggcagggggtgccatgtcagagagagctggccagggagcagggtgggccaggcggagaggggcaggacgagaaggctcagaagctggctgagcagactggtgtcagggtgttggaggcactgcaggaggtgagggccgggcaggtgaggcagctgtggcctttcgccaggtgctctaggggccacccaggtgcgctcaggttccgggcccctggcctgccaaggatggcagggctggggtcttgggcttggaagccagcaggcagaggtgcactagtacgggcggccccaggctctgacgaacccctgccccacagagctcatgtcccagacgggccacctggggctggccaatgcctcggctccatcaggtgagcagctgctccggacactggccgaggtggagcggctgctctgggagatgcgggcccgggacctgggggccccgcaggcagcagctgaggctgagttggctgcagcacagagatgtgagtggtgttgtccctggcaggcggggtggggagaggcagggacctgggagctccaagggggaggtcagcatggagtggcatcaggtgggcatcacggggcagatggatctggcgggcaccaagtggagaccaggggtcatgaaggggcctggcttccagagtgaccaccctcaccctggtctcggctagtgctggcccgggtgcaggagcagctgagcagcctctgggaggagaaccaggcactggccacacaaacccgcgaccggctggcccagcacgaggccggcctcatggacctgcgagaggctttgaaccgggcagtggacgccacacgggaggcccaggagctcaacagccgcaaccaggagcgcctggaggaagccctggtgaggaccccggacttgttcttcctcctgctcctcttcccgcctcctccctgcaatccctctcctctccggctcctcccctcccctcccctcgtcctcccctccctccgtcctcccctccctcgtcctccccccctcctcctcttcttccccccctcctcctcttcctcccctcccctcgtactcccctccccctcctcctcttcctcctccccctctccccttctcctctctcctccctcttctcctgtcctcttctcctgtcctctccctccccactccccatctgcccatcatccccctccccctccttgtccctccccaatcctcatccctttccccacctcctctattctctccttccccttctcctcctctcatttccccatctctcctcaccccctcccatcctttcctcctcttctccccctccctgtcccctcccccttttgcccccttccgccttcctttctcttcttccccacttttctctctacccctccatcctcctccttccctcatactcacacgttctaaccctcccctcctcccccctcctcaccccccatactccccctcttttcttctcccttccctgccctgctgtccaccccatcacatcctttattcttttcttacccctcattgtccccaactcccctgcattgccttcagcaaaggaagcaggagctgtcccgggacaatgccaccctgcaggccactctgcatgcggctagggacaccctggccagcgtcttcagattgctgcacagcctggaccaggctaaggaggtgagtgcagcccctggcccctgtcgccaccccatccacggccaactccctcccaggcccgtgggcagctttgtgtgcacacttgcgtgcagagcccgccctcagggtcgtggatcaggtggctgtgagcaggatgaggggctaagtccactcaaattccaggagctggagcgcctcgccgccagcctggatggggctcggaccccactgctgcagaggatgcagaccttctccccggcgggcagcaagctgcgtctagtggaggccgccgaggcccacgcacagcagctgggccagctggcactcaatctgtccaggtgggtggccaggagaggaggggccctgggcccaccctggggatgcagacagggccttgggagggccagctggtctgggaaggctcctaggggctgaggccgttgtcctcaaagaagccaggccttcctcagctccacggcaagctggggcccagagtgacaggagcagtacacccagcaggcgacaggcacgggcaaagacctggaggcgggacttggcgggcaggcacgggcacggctggttgtgagcgcaggaggctggagagccaggccgagggcgtctgcgcttacccactccttcgaccctcccttccgctgcagcatcatcctggacgtcaaccaggaccgcctcacccagagggccatcgaggcctccaacgcctacagccgcatcctgcaggccgtgcaggctgccgaggatgctgctggccaggccctgcagcaggcggaccacacgtgggcggtgaggcccctcacttcccctcagccccagcaggagcgcccccactgcctgcacctcccgcagccccggcctgcgtgtctgagccacggtctgccctggcatccacagacggtggtgcggcagggcctggtggaccgagcccagcagctcctggccaacagcactgcactagaagaggccatgctccaggaacagcagaggctgggccttggtgagtgctgggctccgatgggggcccttaggcctgctgggcatctgagctcccagggaccctcagcccccagccacatgcacacgtggggtttgtgggtcaccgcagcatggtttggggtgggagagctttggagatggctccccagctgcttgtgtgtcagccccggggagccctgcaggggagtccagggaggagcagcctcctgcgaggcactggctgccactgag

SEQ ID NO: 101720 - DNA, 1286 bp, Homo sapiens
atcaggcctcccccggaccatcacaccctttctccctactacaatcagaccctccccataccaggatcacatcccccctcccctacccatgatcaggcccccaccttcaccatcagaccctccccccaacccatgaccagcgccccccccacctcacgatcacatcccctctccccccacaatcagtcccccctcatggttagacaccaccaccaatgccccaccactggcagcggacaccagccgtcagagcagggcaggccatggcagggagtctgcaggtccctcgggcccaggggaggcagctggggagtggggccaggctgggacacgagtgggtagccgggtggtccgggcggcctggaggagacacagcaggaggcagtgaagtgagggcttaggagggtgcctaggggctccctgggggggtgagagggcccagggctgcagtcacggaccccttctgcagggtgcgactgtaccccatgtgggacagaggcctgcgacccccacagcgggcactgcctgtgcaaggcgggcgtgactgggcggcgctgtgaccgctgccaggtagggctgtggggtaagcagggctgggtgggtggggcctagggactagagttggggcctggggagaatctgataggtggggctgaggggcagtgtttgatgggcagagcctcagggggtggggccagatgggcaggacccctggcttccaggttggtctgggacagtcttgagggctgggcagggcagtgaccagcctgtgccacaggagggacattttggtttcgatggctgcgggggctgccgcccgtgtgcttgtggaccggccgccgagggctccgagtgccacccccagagcggacagtgccactgccgaccagggaccatgggaccccagtgccgcgagtgtgcccctggctactgggggctccctgagcagggctgcaggcgtgagtgctggccggtcacaggagggcggatggggacttctgagtggggtacgctccaaggtcccaggccagccatgctcacccaagccccccaccacaggctgccagtgccctgggggccgctgtgaccctcacacgggccgctgcaactgccccccggggctcagcggggagcgctgcgacacctgcagccagcagcatcaggtgcctgttccaggcgggcctgtgggccacagcatccactgtgaaggtgtgtcctcaacaccccacttccccacacctgatggagtaggaatccaagtcccacacagcctggtgaccccagtg

SEQ ID NO: 101721 - DNA, 1171 bp, Homo sapiens
tctcgaactcctgacttcaggtgatcctcccacctcagcctcccaaagtgctgggattacaggcatgagccaccacacccagcctgagctgtcttctgatgaacggccttatagttaatgtacttgaatttatccttttttccttggcagcaagcgtttttgcatcttgtttaagaaagtatttgtcactacttgatcagaaaggacctgcctatgttttcttctagaagcttggctgttctctttgtgtatttcaattcttaaggcatctggagctggtttgatgtgtggtgtgaggcagggatctaggtgctggctggcctcatgggagactggtttttctacctgtgtgtacctcctcctgccccatggtctttgtgcccctccatcccctacagggttggggggtctgttctaggctccctgttctgtcccattgagtgtggccccactgaggtgccatcctggacccacaggggaacttccggcatacggagacgcgcaacactgtgtcccgcgaggagctcatgatggtgctggccagcctggagcagctgcagatccgtgccctcttctcacagatctcctcggctgtcttcctgcgcagggtggcactggaggtggccagcccagcaggccagggggccctggccagcaatgtggagctgtgcctgtgccccgccagctaccggggggactcatgccaggtgaggttaggacagcaccagactgcgaggcggctcacctgtgcacacccttccctccagcatcctccctgtgttcccttccttgctgcctccacttcctgtcaccctactcacctctcttcctgcccctgcttttcacaggctgctggccaactcatgggcctgcctgtcccctgctgcctgtctgcctgcccctcgtccgcctgcctgcccctcatccgcctgcccctccatgcacacaccctccatacccctttcccacctaccccagcccccaccactgggtcacctggacatcccccaccgaccatcctggcgtctgcctgtcattctgcccatccctcgcccactgtgtgtctgtccagctgctaatctgccctgctaatctgtctgtctgctgtaactttgctccttctgtatgaggaggtttgtggttgaatacctcctagaaggagtggaaagag

SEQ ID NO: 101722 - DNA, 3715 bp, Homo sapiens
gtccccagctggaccccgacctcggccccccaccgctgtggaccctgatgcagagcccaccctgctgcgtgagccccaggtgagggccatagtctctagagggacgggggtgtcagggcaggactccgggtcccaacccagggcaggttgtccagggggcagcaggggctcatagctcagcctgctcactagggcctatccctgcaggccaccgtggtcttcaccacccatgtgcccacgctgggccgctatgccttcctgctgcacggctaccagccagcccaccccaccttccccgtggaagtcctcatcaacgccggccgcgtgtggcagggtgagtgtctggtgtggggggtggagaggctaccacacacgatgaggctggaatgccggcgccacagcgtggcctgtgctacctgctatgagcgacaggcaacatgactctgtcctgccatcagttctcaaactagctgcccttgcagcccgcagcccctacccgcccgctcccgttcccagaaaagcctgggtctcgcctctgtctcgtgcgttgggaagccccgttgtgctccatggcacgtggcgaattgagggcttgccccaggatgccgctggcagcacatgtggccctgtgtgtttgtctggttcctggctcggccaagcctggggtcccgcacatggagttgaccggtacctagaggtgtcccgcatgacatctgtaggtcatgatgcggccaacccccgtgacatgaggggccggccttgcagacctcttgggcacgtcccgtgcctgtggccgttggccagcgggcactccttggctgccccaacgctgccatcttcaaccctctgggtgtcttgggggcgctagagatgggggcctgaccctgcctttctcccccgcccaggccacgccaacgccagcttctgtccacatggctacggctgccgcaccctggtggtgtgtgagggccaggccctgctggacgtgacccacagcgagctcactgtgaccgtgcgtgtgcccaagggccggtggctctggctggtgagtcccagctgatgtcctgctcagggaccagctgtccttatacttgtcattaccactgtggtacacttgggctgggtctgtctcttctgggcctgctgaggcctggccttgtgcccagcaaagcagctcctgcctttggggacctcccgatccaccttgtgaggctccagaggggccctggaccctgcaccctgcaccctgctggtcagggtggccttcctggaggaggtggggcctccaggaaggagagggaagaggaaggcgtggccagcagacagagatgtgggagacaccaggaggtctcatgaatgctgctgcctcctcatgcccccgaaagctgctgtttggcttggagtggcctcccctgagcagccagggcccagggctgggctgggctgggctgggctgctgctgccaggactctgagctgcctgcaggaccctggtcccagccagcctctgggggcctccccgctgcaggctctgggcccgcgggagagtgaccaggcctcaccccctaggattatgtactcgtggtccctgagaacgtctacagctttggctacctccgggaggagcccctggataaatcctatgacttcatcagccactgcgcagcccagggctaccacatcaggtgggcagggctctggcaggtcaggggtccggggtgggggtctgggccgggagctggcctcaccacgtgcccctccatgtagccccagcagctcatccctgttctgccgaaacgctgctgcttccctctccctcttctataacaacggagcccgtccatgtggctgccacgaagtaggtgctacaggccccacgtgtgagcccttcgggggccagtgtccctgccatgcccatgtcattggccgtgactgctcccgctgtgccaccggatactggggcttccccaactgcaggcgtgagtaccccagtccttgggcgcccagtggcagggagttggtgccagagcccaaggtggacgggtcgaccagaaagcagggtcaggagaatgttctagagcctggcagggcagcattgctgccccatctgcgggcctgggcccaggactccagcttgcgggccatgcagaaggtttcagggaccagcaggtggtccacagtctctgacgatgatgttgattctgagcagctgcctccatgtcaggagctgtccaaggctcagcacccggggcaggggtccctgttcttgtctcccccgcccccgtcacactgccacatcccctagggctgcattctgggcctctgagaggggcgggactgggaagaggggtcagtaaaccctgtacccgccccacagcctgtgactgcggtgcccgcctctgtgacgagctcacgggccagtgcatctgcccgccacgcaccatcccgcccgactgcctgctgtgccagccccagacctttggctgccaccccctggtcggctgtgaggagtgtaactgctcagggcccggcatccaggagctcacagaccctacctgtgacacagacagcggccagtgcaagtgagagcccagagcggcgtcagcgcggcccctggtggccttaaggacagcatttcctctagccagagggtcctggcacccaccctgctcccatttgtgctccctgggtgcagcagcgccctctcctccacttctgggaggatgctgcctgggtggggggtgcctacgaggtctcactttggtgtgagtgacctggggtggagggggctcagctcccgcccctgccacaggtgcagacccaacgtgactgggcgccgctgtgatacctgctctccgggcttccatggctacccccgctgccgcccctgtgactgtcacgaggcgggcactgcgcctggcgtgtgtgaccccctcacagggcagtgctactgtaaggtgagtgagggctgggcccagatctggcctctccctccggcctcatcagctgaaagtgtccttacgggcctttcggggcagctggggcttcctagaagcttttgggagagtcatccccattggcaggtgggtaccaggaacccggggtcaggcacctggcacctgccgaccactctcactgtcctctcatccctaggagaacgtgcagggccccaaatgtgaccagtgcagccttgggaccttctcactggatgctgccaaccccaaaggttgcacccgctgcttctgctttggggccacggagcgctgccggagctcgtcctacacccgccaggaggtgcgcctgcaggactgagggcattgccttctcggggaggtcttaggtgggactggatgcaagatggggccctgtgatgtgtgggcatccacccgtgtgcagccacacgtgtgtgcccacagttcgtggatatggagggatgggtgctgctgagcactgaccggcaggtggtgccccacgagcggcagccagggacggagatgctccgtgcagacctgcggcacgtgcctgaggctgtgcccgaggctttccccgagctgtactggcaggccccaccctcctacctgggggaccgggtaagcagggcatcaggtctgggggaggcactttgaggatggccaggacgcctgagagggttgggagccaggagcggggtctgtccagggagggggagctccatgggggtccgtgagggtgcccag

SEQ ID NO: 101723 - DNA, 1059 bp, Homo sapiens
cctgtgctggtcctcagctcctgtgggaccgtgggttctggctgggcctgggacacccttggccttccgggttggtcactgggaaatgaccgaggcatggtcctctcttcacagctggctcttgccaccctgccggtctggccccagtggatcctgcccttcctgaggtgagcccaagtctgctcgtgtgtgggagatgggtgaggacccaggccaagctaaaagtcccgagtccggtgagaccagggcttcctgcctgctgctcagttgccatggcaaccccagggcctgtctgctccttaggctggtcctctgcccccactgcaggtgactcctgtgagtcacaggtgagggccctcagccctcaccaccccttgtcagggctctatggctctatggtttgtgggtgggagagcagggcgcccgctctgacctgcagtcttgtcctctcccaggcacaggttccctgtatgtgccgggctcacgtggaggggccgagctgtgaccgctgcaaacctgggttctggggactgagccccagcaaccccgagggctgtacccgtgagtgtgccctggagtattggggtacaggggttccttggggaactgtgcccacaagtatatcctggagggagtgttggggtgcagggttcctggaggggctggagccagtgagtgtgccctggagggagtggtgggatatggggttcctcggggattgtacccatgagtgtgccctgaagggaatgttggggtgcggggttcctcaggggggctgcgagtgtgccctgagggagtattgggggtatgagggttccttggggggctagagcctgtgagtgtgccctaaagggagtattggggtataggggttcctcggaggggctgcacctgtgagtgtgccctggagggagtgttggggtgtggggttcctcaggggatggcacccatgagtgtgtcctggagggagtgttggggtgtggggttcctcgggattgcacccatgagtgtgtcctggagggaatgttggggtgcaggggttcctgggggggtactgga

SEQ ID NO: 101724 - DNA, 1058 bp, Homo sapiens
ttgttggaatttttttttttttttgagacggagtctcaccctgtcgcccaggctggagtgcagtggtgcgatctcggctcattgcaacctccgcctcccaggatcaagcgattctcctgccccagcctcccaagtagctgggattacaggggtgcaccactacgcccagctaatttttgtatttttagtacagacagggcttcactatgttggtcaggctggtctcgaactcttgacctcatgatctgcccgcctcggcctcccaaagtgctgggattacaggcgtgagccactgcacccagcccttgctgggatttttattattttattttctagttagtgttgtgtaaaagtgtaagaaaatgagtttgtggagagggaaggtttgccaggaggggcgtactggggtctgcagggcatctgagactcccctgcctgtccccaccctccagattgtgactgcagcgcggcagggacccagggcaacgcctgccggaaggacccaagggtgggacgctgtctgtgcaaacccaacttccaaggcacccattgtgagctctgcgcgccagggttctacggccccggctgccagcgtgagtcccctctccccgctcaacctctacctgcgctcgaggtggacacctgaggcctggtgcctctgaccaagcatgtgggccaccctttcctgcagcctgccagtgttccagccctggagtggccgatgaccgctgtgaccctgacacaggccagtgcaggtgccgagtgggcttcgagggggccacatgtgatcgctgtgcccccggctactttcacttccctctctgccagtgtgagtggtgcctctccacgtgggcgtgggtaggggaggcccgtgggcctggcctaccgtgacacccgctccgctctgcagtgtgtggctgcagccctgcaggaaccttgcccgagggctgcgatgaggccggccgctgcctatgccagcctgagtttgctggacctcattgtgaccggtgccgccctggctaccatggtttccccaactgccaaggtgagcagagggt

SEQ ID NO: 101725 - DNA, 1042 bp, Homo sapiens
ggccctgtgagaccctgtcctccaccgcctctttccttgtgtccattccctgagcctggggaagttgcgtcagagccacaggctcggggacgctgagtctgggcgagcgcttgctgccggacagctggagaaacagcagcggggggccgtgtccatgtggcaagccaagccatcgaggggatcacaggccccttcagggaagggactgagcacctgccacctgcctccaggatgggcctgatcccccctcctgtgtaccccacaggctgcagtgcacctgccagcacaacacctgcgggggcacctgcgaccgctgctgccccggcttcaatcagcagccgtggaagcctgcgactgccaacagtgccaacgagtgccagtgtgagtgcctcctcccacacacgtgtgtcctgcccacaccctggcccatgagagggccccggtgcccgggcctgtggagggcgtgccaacagctgcgctcccctctctctagcctgtaactgctacggccatgccaccgactgttactacgaccctgaggtggaccggcgccgcgccagccagagcctggatggcacctatcagggtgggggtgtctgtatcgactgccaggtgggctgggctagagggctgggaatgggctggccctgaggtggggcagggacctccccagactcaacggccattgcactcccagcaccacaccaccggcgtcaactgtgagcgctgcctgcccggcttctaccgctctcccaaccaccctctcgactcgccccacgtctgccgccgtgagtgggctcagctgggcgggtgtcctgggtctcagggtctgcctggaaagaggtgttcttgggcctttggggctgctttggaggggatgtcctgagcttccaggccagcccaggaaggagcctcccaggccacggggcgggtccccagccctcatgtccccccagggggcctggctgtagccctcatccccatggccctggctggggaggtagagactgccacatcttggagcccaccccttgagtcctgg

SEQ ID NO: 101726 - DNA, 1692 bp, Homo sapiens
gcctggcagctcccacctcacctcctgccagcctagccacctgcgtcaagagtactggagtcctagcccggatgctggccgtccctggccccgtgccaccctgaccagtcatgctggtgggagtgggtgctcctccccaatagggcaggcctggtcacgtgtcccccaaaattccctggcctgagaatgggggaggggcgggtcagtgatgggcagtaggcgtctgtccccaaggaagggggtgaggatggtcgtcgaggggggtcactcgcactcaaagcgtgcaagggagagcggtggggggcagtgcagtccaacgggccaggccccttcagccagtgagctgtggtctctgtcacgcggcctcttggcctgtgggagcctcagtggcaaggcccggagacgtcaaggggcccgggcaccgcggggacccaggcttttctggtgatccagcgccctcccctcccgccattccccgcagcctccaagagggactgtctggagcggttcgggccacagacgctggagcgcatcacacgggacgacgcggccatctgcaccaccgagtactcacgcatcgtgcccctggagaacggagaggtgggccggggaggggcagggcggtacgggggctggagaacggagaggtgggtaggggaggggcagtgccgagcggggctggagaagggaaaggtgggcccgggaggggcagtgctgagcaggggctagggccacactggcgtcaccgcatactgcccacagatcgtggtgtccctggtgaacggacgtccgggcgccatgaatttctcctactcgccgctgctacgtgagttcaccaaggccaccaacgtccgcctgcgcttcctgcgtaccaacacgctgctgggccatctcatggggaaggcgctgcgggaccccacggtcacccgccgggtgagctgcccatggcgcaggcgggggagggggactggccgggtggacccgggactcagggtgagtgaggcctggccgcctggtgctcacggggcctgcgggtgcagtattattacagcatcaaggatatcagcatcggaggccgctgtgtctgccacggccacgcggatgcctgcgatgccaaagaccccacggacccgttcaggtgaggccccattcaggtgaggccccgttcaggtgaggccccccccagctccctgcctgtccttgtcacccctgcctaacctgagggtgggtgacctggttccatggcccaccacaaccctgctgtctgtgtgacctgcactgaccaccgccgtgtgtgcctcagtttcctcatctgtgcagtgatgtggaggccagggcatgtgcagcctccccagggtgccctatcttggtttggggggccttgccctactgccagcagaggtggggctctccggacccccaggccagctggccttcccaccatagtggacacctggggccctgtggaggggagtcagcaatggggatgattgatccccgactccaagactgcatcccccggaatggacaggtgcccactacctgccgaggcagccctaattcactttgggggtgcccgcccagctcccccaacctttcaggacacaacagacaacttccctgctgccccagccctgaccttcactccagtcaagcagggaccaaggcccaggacggggatggcagggtggg

SEQ ID NO: 101727 - DNA, 1291 bp, Homo sapiens
acccacccccaacgtatccacccacccacccctacccatccatccacccacccacccccctacctatgcagcacccaccctttattccttgtttccatccatctgtccacctgtctgctcattcctccctccacacctgcaccgtcttccttccttctcacccactttcctgaccacgtggatgtatctaccaaggcccctgtctcggcctaggccagggggctgccagccttggtcagggtgggggcagggactccctggagtggggtggggaaatgtccttcctgggcttcagggctgatcctggggcggggctggggcctccatcaggaagccaggctgagcggcgggtgggtccgggcactccccctgcagcgggctgccagcagcctttgttctgggatctggagcggatgccctgggacgggggtgggggcggctggcactgggcatcgggaaggcttcctgctcctggaaggctgaggagggcggggtgggctgcatcacggttcggatctcatacccctggtgtgcggtggggcaggggctggcgcaggggaggggagactagtccctgtggtgtccacccagaagcagctgagcctgggcccccgggagtgccagctgggctcctggcctgggtcccgctgcgcccagccgtggaggggttctctctccaagggtggggcctcaggaagaggctccagcgctggtcactggtgactcagggggcagtttccgagttccagacgtgaccttccccagggggtccttctagggggttcttgcgtatctccttgcatcctccggaagcttctggaactgagcggccacatcactggcctcaggctccttcttccgagaaccacacccaggccccaggccccaggccccaggcccagggaagggtgagcgcgttcatgactgcccaggcacatggccagcgggtcctggcttgagctcccccaccccctggctctgccgcagggtccaggcccttgccccactacaccagcacgctagcccagcgggcccaggttgtaaggagctgggcagggtgagtggggctggctctggcctgtgtcccctccctctccagtcggcccctgggtggcctgaccgtgggggcggggctctccccagcagaggagggcattgcctcccgcctccctcagatgaggagtgaggacgcacgggcccccttccggtagggaggcccctgctttgttctctgtagagcaggccacgctgcaggtgctacaggtggggtagcggctttgtcccagtcccc

SEQ ID NO: 101728 - DNA, 1695 bp, Homo sapiens
ccctggacctgggccaggtagggacccttctttgcgtgctgcagcccccatctctgtgtctgtgcccgtcgggcctaccttgggccacaggaccagaaggcgaggtctccaccgtgagcgagacctggggcctgggaggctggacacgaaggacttggtggggggagtccccacagggacaaaggcacggcagtggtcaccttttgtttgtgctttcagcgtccccatgacacagggaaagcgggtgctcatgggggtgtttccaaaggccacagagtttggttgcgggtgctgagtagacagcttggggctgggagggcggaggtgctgtgagcagtgcggtggtgccccctgcgtcaggcgccctgctgtttaaggaattcctggcaggtgcgggaggggctgcaggaatgcagaggaggctggcgcaagtggacattcctgggatacctgtgccgaggtggcggccactgagggttaggtggggtcgggtgcctgctctccagtccccagctctgggctctccttggccttggaggcccctgcacaagcaggaggctgcagctgggtgcctccaagcgaagagtgaaacccccaaggtgggcctgcctggctgccagccctgagcacccccagattgggggcgacttggcccgggtacccagccttgaggtcctggcctgtaaaatgggccagtaatcctggtgcttcttaggtcagggacagtggtggggcaggtggaggaggctgggcctgagagcagccagtgcctggagtgggggccccagggctgacccagaggcctgcatcccagccggctccgccgctgccccagtcccagtgtgtgacacatcggtcttcacccctgtctgagcctctgtccctgccattgtcccgagggtgttagagatagaggaggtctccctggagcctggctggagggccggccccaaggggcaggcacctttggcagccttggtggtctgcaggcctggcccgggctgggcaggcagtgaggggagggctcaagctccaaaagtggcctggaatttccaggggttcctgaacttgcagagccctgtggagaagggcggggagctggggaggggttgcctgtcctgggctccctgcctgcctgccaggcccctagccctgccctggcctgggtctgggtgtggctttgcctgtttaccttcatctcactgggtttccccgcatctgactcccctgtcccctggagcctgggggtccctcatctctctggcacagcagcagaggcccccaccttggctgtagcgtacgtgtgaattctcagctgctcggggcgggaagctgggcactggcgagttcttcccgcctctcctcctttgagaaactagggggctgggctgggggaggggagatggcccagtctccacggcaaccccagggtggctgcagagccagtgggcgcagtgcccgatgtgcctgggtggggcagggaagccgggactgacactcggacccacgagcctgggctccaccaccccttggctctggggctctctcggcctcggtgcacatgtatgaactgggctggaaacttcaggcctgaagccagtttgcttttagattgttctgggccagaaatcaggttccgccatgtgagcgtcttgcctctcacagcctcagtttcaccaactgtaaaatgatacg

SEQ ID NO: 101729 - DNA, 1057 bp, Homo sapiens
gggtgaggagcagcaaagtcagctccaacggctcccaaccggccgctctaggcccattccccacctcagccccaccttagggagagtctaggggccctgagggcctgtgtaacctgagctgtctcctccctggtacctctgccttcccggaaggagaggctggggcaggggcgagtagctggagatttgctgggtgggggcagagggccctggagcaagacgttatggggatgaatggaggagcctgggctgggcccgccccctctgcctgccccacccccttggccctggtggagggggaaggagcctccccaggcttctgggctcaccgttctctccttaagcccagcacagtcctctgagataggaggtctcaagcccacacttcagatgggggatctgagccctggaaagctgctgacacctgcttggagccccccagccagaacagggtccagcgggggttagctgtgggaacctgggtgcctcctggctgcccccttatctggtcaactcagaggggccgggtctcaggacggagggcctgtgactgtctccttacctgctgccacacctcaccacagagggcctggctgagtgtccccagctgagattttgccgttctggcaggggaggctccaggtgccctgtgaacctcagaccacccccccacagcctgcccatgctgcgtggctgggggccacaggccccctctcagatctgtctcctctgtgggggcttattacccccgtctcgtgagtaaagggccagcctgtagtcaacgcccctctcctctgcctcagctgtgtggcttccctctgtcagcctcaagctgtctttaaaatgggcacagcgtgctggcccccctcacctgagactgtgagcttggcccgaggagcctgggaagtggccacagtttcagtggcagctgtgggctgtggtgctccatgcctcagagccagcttggatgagaaaccagccggcctcgcccagctcatgtctagcaatagaggtgaacccttcgcttccaaagtctcgagctctgagcagtgagtgc

SEQ ID NO: 101730 - DNA, 2354 bp, Homo sapiens
gagtagcaggcaccaggtgagcaggcctccgctcgcagcggctacgtgcacgggcaggagcaccgccccacgccccaggtggccgcagggtgaggggaccggagggcgggaggcgcacaatggggggcacgcccgtatctctagcccggccggcagcgggcagcgaggctcagtcctcgccccttctcccagctgctattcggggctcccgaggcgctcagaggggtcgactgcgtccgtggggcacaacccaggggccaggctaagacgccacacacggcaacgaccctcaacgacaacgacccccacgacgccccgcgccccagggccagcaggctggggtccgagaacctccttgccggaagcggaagtgcgtcacggcgacggccggcaagcacgcaccgcgcagactcgctgtggtggcgtgacccggaagcgctcgccgaggcccctccttgcccgccgatatctctgccgggtgactagctgcttcctttctctctcgcgcgcggtgtggtggcagcaggtgtggcgcgcggcgcgggcttcgggctcagggctggggctggggcgggagtgggggcttggacgcgggggacggggtgcggggtgctgggtgcggctggggccgtgaccctaggggccggtttgcgccgggagccggggcacggttccggccgtactcacggcgccgcgcggtgactccccaggcgcagcccagcctcgaaatgcagaacgacgccggcgagttcgtggacctgtacgtgccgcggaaatggtaagcgccccccacatgcctctcttccgtccttacctaaccaccacgtcccctcgcctgcccttgttcccccacacccctcccgtccttacctcgtcacgtccctaacttgtcctgcccccgacgttactcttttccattcatatacccccaacctccctcgtcccctctttcattcttaccgcccaagtcccctctgctcactgcgccctttctccacagctccgctagcaatcgcatcatcggtgccaaggaccacgcatccatccagatgaacgtggccgaggtgagctgggagcccgggaggcgggaaggttgtgatatatgtgcgggaaaggcaggctgtcccattgtggaggagcccctggggtgaaggtacaggcagaggctggctttgaggattggtgtttcccaaacctgggggagtggtttgtgacccttcttctctttctaggttgacaaggtcacaggcaggtttaatggccagtttaaaacttatgctatctgcggggccattcgtaggatggtgagtgtttccctgggctttgctcatcacttcgggacatcgtggactttaccgtgcgcattggagtgtgtgatggtgcctgagtagatctgctggcagagtagtttgagccagctggactgggctggccgcctgccgcttcttgagggtggaagaggggtgctctgagaagacactcaggcagcagactctgcctctcactaggaggtgcccccccgaccccgctccaccatagtcaggctgcaggctgccccgggagaggtggctccccttctgcgcctgtctccattcgctcagcgggggagagacgtgggctggtggcacagctgaccttctgccatctcaggcagccggagtggaaatattcttagtgtgcttttttttttttcttaagggtgagtcagatgattccattctccgattggccaaggccgatggcatcgtctcaaagtaaggttgggggctcacatttgggcagagtgagtggactaggactgctccagaggcgtggtcttaacgttgtccttttcccctggttctaggaacttttgactggagagaatcacagatgtggaatatttgtcataaataaataatgaaaacctacctgtgcaggttcattctgtgtctgtaggcccagggttgaggttttgctgtcagtgggtgacgggtggggtagggtacccagttagttgaaaggagacaagctgtgaaacatattgcaaaactgaggtttaaaggacaaatacattatccatttaaaaacagatatctaagacaaaataactcaaacattctgaggtctgatacttgcttatgcacactgacatccacaactgctaccggtgcggaagcaacgccaggcctggttctgtatagtcacagccgagctgaacaccttagctccgacacctggatgtgttctagagaatgacaggctgagactgtagtttggtttaactactggctttgttgcaataatcctcgaataccacacagtggcagcttttggcatcataaaaatgggacataactgaagggaaggcttca

SEQ ID NO: 101731 - DNA, 1589 bp, Homo sapiens
aacaggcgcgacctgatagggtttgagttcacagtgctcgtggccttggagctggccctgtatcttcccgagaaccaagtgttacctcattacaggcgcctcacccagcagttctagcagaggccccacagaaggctcagggcaccgaggtgcacttgccggcctgggaggtgtcccactgaagccccgcgcctcctcctgccagcacccccagcacctgctagcaggaggcacctggcctccgctggtgcagctttcctttttgcctctttgccatttccttggaaagagacgtcgctttcatccccaagtgcaccgtccctccgaggggatttctgagaattctcctgcatttttacataaactaaatgtgaggtttgttactggtatttttttcacgtgcctgagaccagcctggtaccaggaccttttgttcacagcgtgcagcagcgagccggctgcagtgtgtctcccctggcctcgccttctgcaaaccaccgcagccaccacagcgtcagggtggagatctgggtttctagacctcactgaacacactggaatggctgagtttaacttatttaggcattcatcttggagatgtggtttttcgggttccccagcagcatctcccgacaccaactgtgccgctggctccctgccacctgaagccgagctcctccagagctttctccgcccacctcactgcatcccaagtggagcttttggtgtccagttaggccagcgggagcagtctcctgatttattttgatctcattcttggactcttggacctctctgttcttcaagcatcgtgtcactgtgaaatcctaacgcccctgtgtcctacagaccgacggcacaacagacagctgcccatcccatgccatgctctaccctctgcctctcaccaggagacactctgggcctccaggacaattgctgcttgccggctcttatttttctaagcaatattgtgatggagaaaaataacatatttattgggatttggttttttgggtcttttttttttaagggaacaaaaaatggttaaatgaggtctgctgaagttgacttgaaaacacacttgaccctcaggcaggagggcactgaccacaccccacacaacctcaaagggtcagtgcgtcagtgccttttcttctgaggcaggaaacaggtgccatcttggccacctcggccagggcagcccaccatgctaaaaggaccccaaatggtggtcgttgtcccttctgtgcaggccagcagggccccatctctagtttttccacgtctgtctgaagttcttgcaacaaattctgcatggtccagcgctccagctagctgcctcatcaaaaacactgaataaccaaggactgctgagtttttcttcatggggggtcagctggtctcaaaactggccactgcctcagccaccaagctttttcctaccactaccttataaacctgcctggccctggaggggctctgggacgactttgtctctagcccattaatacaatacatcctatgctttctgtgcagactggtgcttccgcagaaaggagatgccaattctgctatcacagaactcc

SEQ ID NO: 101732 - DNA, 1207 bp, Homo sapiens
atggtctttgagctagaaggtgtggagctaggagcagacgggaaggtaagagcctcttcgctggtggacacccagcgccgtcagggccaggcaggcgggtgggagcagtcccacgtcagtgcccacgaggcacacgtgaagctgtgcttcactccacgtaaaacgcaagggtggagtggatgcgggcccgtgcagccctgagaacgtggccctggagcccgtcggactcccccgcctggccgtgcctgaggtctgcgccactgccccacagccaggtgctcctggacacccccctgctgcagggtggggctcgccaaccctctggcctctgtgctggtggtcagcagtcttcagaggcagggagaacgttacaggctacagaacccagataaagcacagtagtgttccggaatgttctagctatgtgaggagcagcgtctagctcagacgcagcctcaacggcttgatctgagttgttcccttcattttccatgcagggctcctggcatgtgcgtctgggcttcctgcagcgggagctcactttgccctctggtcccgggaggcagagctgaggccagatgcatttgcttttccaggtcgtgtcttatgcgaagttcctgtatcccaccaacgccctggtcacacacaagagtgacagccatggcctgctgcccacacctcggcccagtgtcccccggactctgccagggtcaagacataaacctgcccccaccaagtcggcaccagccagcacagaactaggtagcccacgtgccttaaccacggcctggaacagggtgacccgcgtgccttaaccacggcccagggactgcagcagcatcagcaagcccctttcaatctgtagccctccgtgcagatggagcctggggaacagggtcaggagaggaacagctccacactgaatcgctatccctgggcttggcctgagccaggcagtggggaggagctgcatccacccacagatgactccagggagggcccctcctctcaggacatccttttcttgccctaagccctgggcccttcaggagagaaccatggcctagagcccctcccctgctcggccttgccccgccatggcgctggcctgccaggccttggggctagatgggtactgctcaagactcctggtgggtcaggggttgcctctcttacagggagtgacgtgggggacaccctggagtac

SEQ ID NO: 101733 - DNA, 1173 bp, Homo sapiens
ttacttggggcctcatcagcccaggacaagggggtcaggtgacctggggccttgtcagccctggacagaggccaggacaaaggggttgggttcacctggggccttgtcagccctggacagaggttcaggtgacctgagcccctgtcaacccaggacacaggggtcagggtcagtctgggccctcatcagcccaggacacaggggttgggttcacctgggaccttgtcagtcctggatacagaactgggggttcctgggctggctgagggtttcctcaggccctgtcaccccccacacatagggttcattgtcccctgaattctcccagcccctgaatacggggtctggatctccacgttgtcagtgctctgaaatgggttttagggttcagcccttattacccctgagacccccagccctgtgggttctggacatgcccccacccccatccactggtaccagtgcccgggacacagggacacatggacagccctgtgcatctcttcgcattctttgaaccgggccacaccgtccatgcccacctcctcagacccagcatgtgggccggggtcctcctggcactgtcactgacacctgttcccagaggcccctgcacagccacatctcccatcccacagccactggtctctggcacccctcctctccctgtcacttccctgctgagccccgcccttccccacatcactctcagctcggtatctttgggtctgtcacaccctgggtctccactgctccccctgccttgattccatttctgggaaccacctcagcccatcccagggcaaccccaaccatgagccctgcctgtccagcgtgtgccccctgcccagatggcccctggctgcccgacaccctgtgtccttctcccagagaccacaggacctgggtgaccctgcctcccacagccctcacctccaggagtgactgtgggctctgggcccaggactggctgcttgttgcggttccttctcaaagggagccactgtccacaggtccaagtgcctgctgggcggctgttcccagaggcagcccctgcaggtgtgcagcaaaggggccgacacagagctcttgggtcaaggctggcacgtgctccttgcttacctggaggtcatcagagttgccccacgcccctggccttcgggcaggtggagg

SEQ ID NO: 101734 - DNA, 1028 bp, Homo sapiens
cacagaccccaccttcccacagaccccgccttcccacagaccccgccttcccacaggccccgccttctcacaggccccacctccccacaggccccacctccccacaggtcccatcccacttcctgtctacaggaacttccacagggtctcattgaggtgccagggcagaggggtggtgaggggccatagctttggggaggggaacacagagggagagggaagggaagggggaagcacagggttcacctgggaaagcccaaacaaccccccatgtgactgcctcattctgagcttctcagggaagctccctcagccacctcccacccatccccctcccccacctcagggacccaacctcctccctcactcagcctcccctgtctgccttagctcacacccagccccttctccaaactgcctgcgtctgctgccggaaccctctgttggcccctaatcctactgatgggtggtctcacctgctgcgaggcattaggcgtctgtgtgattgtgtggtggggggatgggagcgtgtgtgcatgtgagtgtgtgcacatgtgtgcctatgtgtgtgtgttgtgcatgtgtgggtgtgtgcatatatatgtttgtgcacatgtgtgtgcctgtgtgcatgcatgtgtactcatgtatacatacatgagtacctgcattgctttgtgtatctgtgagaagctgtgcatacatgtgcgtttatgtgtgtgtggaggggtgtgcctgcatgtccgtgtgtgggaatgtgcaggtaagtgcatgtgtaagcatgtgtctgggtgtgcacgtgtgtgcctgtgtgtgcatcgtgcatgtgtgcattgtgtgtgcctgtgtgagaatgtgcatgtgcctctgtgtgtgtgtttgcacgtgtgtgtgtttgcacatgtgtgggtgtgtgcacatgtgagcctgtgccagtgtatggggtgtgtatgtgcttgtgtgtgtttccccagctgtaagtgcttggcattggactgagccagaggcgcactgacgaggagaagcac

SEQ ID NO: 101735 - DNA, 1023 bp, Homo sapiens
cacccacccaccactgtatcgagacggcggggctgcgggagtcggcccaccaggtgggagggcagtgcacggtgggtgacagacgctcacgcggggcctggcatcagcacactgtggaggcaacggtgcagggtggcctcactctgcctgcccagcgtccctcctcctttcattatcaggtccctggtttcaatccggggagcctgggtagttctaggggatggctttctcccaccccaagtggtcaagtgacccaagcctggccagcgagtgcccatcttgggacctttgctgggtttcttgaaatgaatctctctcgtgcttgctcttttggtgtctttttccctctgtctctctctttctctttgtctctttccctcctctctgtctctttctctcactctgtctctttctgtctgtgcgtctctcactctctgtctctttctctctgtctctctctgcatctttctctccccctccacctctctctctctctctccctctctcctccctctctgtcccaccgattagatatataagcctgaaatctcagtgtccattttgctccgcctgcagacagcctgccaggagtgaagctagccccaaggaaagtggagctgagctatggagaaagatttctgatgacatggtttgggttctggatccagccctattttcagacctcttggccacataagcaagttgattcatcttctgagttgagtttctatccccagccaacccagcatggcaggagtgacagcaaccagccccatgtggctcctgcagccctgcctctgccctctgcaccctgtggaggctgagactctcgaatgcccatcagcaggccaatggtgtcgtcatagaatggagcccttctcagcaaagaaaaggaacaaaacctatggaaacacacaacagcgcagaagagtcttaaaatgatgttgaaagaggccaggcacacagcccacacactgcatgattccatttagaaagttccagctgaaacagatctgatccatg

SEQ ID NO: 101736 - DNA, 1095 bp, Homo sapiens
ggagcttccctcccgagtggccgtgacctaatctgtagctcactgggtgtggcccctaaagcaggtgctgggcaagtccctcccatggtggagagctggctgggcacgtggcaggcagggcaggctgggccaggtgaagggtggccaggtggatggacatgctctccttgctagactaagcccagagaggccggctctcctcggggctctgatgggccccttggcttgaccaagccccattgcagttttggctccaggtcggtctgacttccaaatggcaaaatttttctcagcccattgtagaatgaaaagttaactcatcgagcttagtattgtgcctacaaggtcttcgatccggatgtctccatgagtgttaatccatttctggggtgggtactgctgagccaatatacattcctggcttcctggactcgtccactggaacgtgttgggtcctggtgctctccccagcagatggttgtaggtggtcagagatgagccacagaaaagccaacgtgcagcctggtgctgggggcaggagggagcagggcccttggagctctgggagagagccacgccaggccagccctcctgcttcctcaagcgggctgtggacagaggccacaaaacgttccctcacgagccacatgactgcctcatttgcaagtggcaaggtgcacactgttggcttttggacaaggacatgggacagtcctcagaccttgctgttgccttcgttctgggacatggaccactgtctggccccccagtgagcttgctgagtgtcagctgacttcaggcaggatctgggtcttgcccacttgttggaatgggcacgtggggattgcaccccttgaacagggagggaggtgccagtaactcacatgctaggttaacaggttctgggtgactctgagccttggccctgccaggggtgtgaggaggaaactggccctgctgctgggacaacagactctgggcgtgtcctcctgtgggcctctgcagaggaagcagactgggactacaaagaacaacctggtcctggggaccctgctgccttctctggcccctgctggcccttcaggctacggtgag

SEQ ID NO: 101737 - DNA, 1045 bp, Homo sapiens
gggggcatgggtgtgccttccttgcgtgaggaggaaaaaccattctatcaccagaaggcagtgcccagtgtgagtgcccagcgtgctgggggcggtgcaagcttggcaagtttgtagacccgaaatgcaggctgcatggggacgagccccatggctgaccctgtgcctgctgggcgccagcatggctctggcctggaccctaccactcgcttgtcccccctctgcagcctcctgcccgaaggccacctgaacctaacggctccctgcaacgctgcctgcagctgccagccagaacactacagccctgtgtgcggctcggacggcctcatgtacttctcactgtgccacgcagggtgccctgcagccacggagacgaatgtggacggccagaaggtgagtggagccgctgcctaccgcccctgtcctcccctggaccctgggaaggggcccccgtgccttccccttgtaatcggagctattgttgggcttcccaggtgtaccgagactgtagctgtatccctcagaatctttcctctggttttggccatgccactgcagggaaatgcacttcaacttgtcagagaaagcccctccttctggttttcatattcgttgtaattttctttacattcctcagcagcattcctgcactaacggcaactctacggtaagctggggtcgggtgtgcgcttgtccagagctttccttgcagcaccctgaggcggagctctgcagatcctgagacaggagcactccaggaaacacccaggtctaagcgggcctgtctgtcactggtggcaggagagacctcactgtctctgatctctgacgaggggcttcccacttgggggggggtgatgatgtggctggggactggtccaggaggccactggcctagggggtgacttggcatgcaaccccacttctgtgggtgctgacgctgtggttttctattgcagatgtgtccgtgaccctcagagatcctttgccctgggaatccagtggattgtagttagaatactaggtactgtgcagtgtgaggaag

SEQ ID NO: 101738 - DNA, 1043 bp, Homo sapiens
cggacgcgcgtgggggcggggcgggcaaccggcggggcggggcggggcctgcgctcgcgacaccctcgcccccacgctccccgccgagcccgggccgtgacaccgccgccacacccgtcccgggacccccgccccctcccacgcgcccttcggaccccgccccggaccccgcccacgacccctacccccgtgagaccgcgaggtcccagcccgcagtgccccacccccacccccgccccgggacagcccaccccctcccacacacaccacccagccctgcccccccacagcccctccacaccctggccctccccatctctccgcagccacccttgcccctccagtccccagggcagcccgtcccctccatcccctttctcctcaccgctcaccggttatcccgccgcccctcctcccctcaggtgtgaaccgacacttccacatgatttgtattcgggacaagttcagccagaacatcgggcggcaggtcccatccaaggtcatctgggaccatctgagcaccatgtacgacatgcaggcgctggtgagcccaaccgccctccctgtgccgcccgatgggggcacgaacccgcacaccgctctctgagagtcagcctgagctgggcagaggcccctccatgtctgctggggtctgctgggcagagtagaggcccctccatgcctgctggggtctgcagtgagctctcagggtcagcctgagctgggcagaggcccctccgtgcctgctggggtcccctgggcagagacccctgcagtgaggctcgtccttaaggaggacatcccggggctccagagcctgtcatggaaagcacaaacacagtgctagcagctggctagcttttcaggggctctgctttagactgggtgctgggccagagtctccagctgagaccctggggagggagggaaggatgcagagtcccgggcccttaggccattgtcagcctcctgggaggcccccgaagtgctttaggcagagggtgaccctatctgagtcacaccaaggtgaatttggtgacttc

SEQ ID NO: 101739 - DNA, 1009 bp, Homo sapiens
gaagtaaagagggaaagctccagggagcttgtgggtcatggggccgccaagggcacccgaggatgctctggcctctggaaggcagtggctgcctctgtagacaaggccgtggcaaagccgtggggcttcctgtggtgacaggcgcttccgtggcactcagtggccaggatgcacgagctctggttccctcaagtactacaggagacgcttccttttacatgtttgttttgctccggtctctctcggtgatgactttgggttttgactataggcgcagaatccgcatttgctgtgatgagttgaatctcttagtgccgttctgcaatgccgagactgacaaggccacaactctgcagtggaccacagcattcctgaaatacatccaggaaagacatggagattctcttaaaaaggttagtggtaggccaggtagattttcagaattttacaaattttacttaacaatgtccctcctttttcctaaggataactcaaactatcctttgtttcctggaatctaacatcaaatactaagtccagtatgagcaaagctctgctctttaatgatataacttgtcatttattaaagtaatagtcacagcctacatgtgttacactcagtgtgtaaataactgtgaagaggcaattgtcagatagcaaattgggcacctgctgtgtacggtatattgcactggggctgacgggtgtgtaggacatgatatttgccctcagaaaaacttgtgaaagggataaaagcaagaatagaaaaacaaaaaccggccagccacagtggttcacgtctgtaatcccagcactttgggaggctgaagtgggaggatctcttgagcccaggagtttgagaccagcctgggcaacatggcaagaccccatctctactaaaaaatacaaaaattaacctggtgtggtggcgtatgcctgtagtcccagctgctcggggcgggggctgggagggaggatcaattgagccagggaggtcgaggctgcagtg

SEQ ID NO: 101740 - DNA, 1685 bp, Homo sapiens
tttttttttcttgttcttagaataattgtatataaagaaaatatttttgggaggaaatatgtccaggtggtttgttgttgttgtttttttttttccattctgacctttagaaaaagtaaacaacttcttgttttctgtattcatagataacacctgttaattaaaaagaggggctttggatgaggtcatattggttgcatagcacttggaaaacgtatttagtgtgatgattgattcttgttcagtttcgttgtataaaataggcttgggcttcatggtccctgctgatgctgaaaaactgcattagtacatctctttgtgtttcggttctctgtgctgcttacccaataatgtttatatcttggattgaaaaggccaaaactgtattcagcattaattgagataagaatacaaaattaaaaaccacttttttcttctttcgcaaagaagcagcgctatgcaaacaagcactgaagaggaatcggagtagaatgcgtcagttggacacaaatgtagagcgaagagcccttggagagattcagaatgtgggcgaaggtgccaccgccacacaaggcgcttggcagtcctcggagtcctcacaggcaaacctgggggagcaggcccagagtgggccccagggaggaaggtctcaacgtagggagaggcataaccgaatggaaagagatagaaggtaatacgtgtgactgcttgtcaggctgactcatatatgattaccttagtcatacatggttatcacagatgagtgatccttagccgtttctgcgttcagagggaataaagcaggtaggagcatcgttagctttcccagatggatcaaggatcccccagactatgcccaggctcgctggctcactaggaggactcccgggactccgcatgcagtcactctcaggctgtgacttactatggagaaaggatgccaggtgcgatcagcaaaggcgcgtggggagaaggcaggagctgaggtgcaagcttctaagagcgcgccctgtggagtcaggcaggttgcccctcatgcccccagccatgtggtctgaaaacgtgggtgaggtgttgccaaccaggaaagctcgctagagaccaggggcgtgtcacgtaggcactgcccccatgcatgcaaccacagtccagtctcccagaaggaaagcagttgttcagtgtcagccatatcgtttgcacagtgtaggttctgggggcactcttaactccctgaatctaggtttgcagactccactaagggccagccctgactgcaggcctttctgaggagagtggtcaggctgttttggtaactgctgcttaccagccagcttgagttcagcaagttttgcctggttctttttttttttttttttttttgagacggagtcttgctctgtcgcccaggctggagtgcagtggcgcgatctctgctcactggaagctccgcctcccgggttcatgccgttctcctgcctcagcctcctgagtagctgggactacaggcgcctgccaccacacctggctaatttttttgtattttttagtagagacggggtttcagcatgttagccaggatggtcttgatctcctgacctcgtgatctgcccgcctcggcctcccaaagtgctgggattacaggtgtgagccaccgctcctggctattgcctggttcttttaagatt

SEQ ID NO: 101741 - DNA, 2073 bp, Homo sapiens
gaggcgcgaccgggaccggtcccggagcagagagcgggaccgagacaaggccagggacagggagcggggccgcgaccgcaaggaccggagcaagagcaaagagagcgctcgggacccgaagcccgaggcctcgagggcctccgacgctggcaccgcctcgcaggcctagacgccccggccgggcagagaccctttttaaagccacgttcgtaagatgcgttgaacaaatagcttttgaaatagccacgatcttagattcaggatagaatattctggacttaaacattactgtaattttgtgtaaatggtttcttacaagatttcacatctttacaattctgatgcttttttaaaaaaactaaactttaatatttccatttaaaattaaaagaaatgggaaattgcctacggagcatattgcttttcagatcatagttatcttttccaataactttattgtaaattttaagggagtttcgttggaccctagagccataccttcactgacatctcatccgtttgtgtttccaaaagctgcttttacaggtcttagccgccgccccggaggccggtgtgggcgtgacctgcaggcgtccaccctgcggctacgggagaagtcttagtagcttgtatctggagtcttgagaaacacaaaccttacaaatgcatctttcttttgtcataaaattggaattacaattttcaactgggaaacagaaacacatttcttagcgtgctcagattttatatatcaccttatcaattttttccaaaacatgatttaaagcaacatctgtcctagtataattgttgcattttaaataacaatttattgaaaaatgttaagttttaccagcctaaaaaaagtaacaaaccaattaagtgtactttgggggcagggaggagtccttgatttgaataatcaggagttttgttggtccagtttcgccttctgagcagttcttctgtatcccgggaaaagtacgctcggccccaaactggtatttgtcagacgatacatgtaaaagtttgtccttgaacgtggaacaagacttgtgtaaagtctgagacgggaactagtgatcactagctcaagaactgcaaatgagacaggaagctgttcactgtgaaacagtctcttgcttgtcgtgtatttttcgagtacttctgaagtgtgaagtaaaaaaatctggctaatttatttgtacaaatacactttgataattttttatattttcataaacttttacagatgtaaaattaaagaacttcacttgttctttggagtctgttattccattgtacgtcactacagatttttcactttatagcacagattttttaagttaagaaaacattgagaatgtatcagtttgagatgtttggtgttgaaagccaagtgtccataggttaaattacattaaagtaggtgtcacgttccaacatctagtacgatgagaaggttttgtttgtttaacatataaagcaaatttttctaatttaaatacacaaatgtaaaaatcaagtgtgtttctttagtttacttgatagagattcctgtacattgtattttatattgcggaggcttatatcactgtacatgagaacatggaacgacctaggttttgttactcgcagtagaataaacagctacaggaagtttctgtctcgggtcttcatcagcctttttctaacgcggagaagtttggggtcgtgcacggacgccctggccacccagtttcttgttgctggtttgcctgggcgtgggcaggagtgccctttggacccctccctgaactcatgctgagcccagggtgagaccggccgggtgcgggtccccacatccttccgtcacggggcagctgtctcgctccctgtggggacccagcaccatccagctctggagacgatgggcaggaaggtcgggaggagggactcacccccttcagaccctctcctggggctgagtgggagcccgagaccactgcaacagcctcaactgcggtgaaggagtctcatggttggggagtgagccccgaggccccagcccatccaggctgcagcagagtgtgc

SEQ ID NO: 101742 - DNA, 1063 bp, Homo sapiens
gccacctccttatggggacagcagaggcccctcaccctcttaccttggtggaccacgaggagtggcaccatcccaatttgaagaacgcaaggatccccatggggagaagagggagttccaggacgccccgtataacgaggtgacgggcgcccccgcccagtttgaagggacagagcaagccccatttctgggaagcagaggcggcgcgcctttccagttcggaggccagagaaggccactgctgtctcagctgaaaggcccccgaggcggcccccctccctctcagtttggaggtcagagaggaccaccccctggtcatttcgtgggcccaagagggccccatcctagtcagtttgaaactgcccggggccctcatcccaaccagtttgaaggacccagaggccaagcgcctaactttatgccaggtcccaggggcattcagcctcagcagttcgaagaccagagggtccattcaccaccaagattcacaaaccaaagggcgcctgcacccctgcagtttggtggactacgggggtccgcacccttttctgaaaaaaatgagcagaccccttcgcgatttcacttccagggccaggccccgcaggtgatgaagccgggccccaggcccctgctggagcttcccagccaccccccgcagcaccggaaggaccgctgggaggaggccgggccgccctccgcgctctcctccagtgcgcccggacagggccccgaggccgacggacagtgggcatcggccgacttccgagaggggaaaggccacgaatacagaaaccagactttcgaagggaggcagagagagcggtttgacgtggggcccaaagagaagccgctggaggagcccgacgcccagggccgggcgtccgaggacaggaggagagagcgcgagcgcggccgaaactggagccgagagcgggactgggaccggccccgggagtgggaccgacaccgggacaaggactccagccgggactgggacagaaaccgggagaggagcgccaaccgcgaccgagagcgcgaggccgaccggggcaaggagtgggac

SEQ ID NO: 101743 - DNA, 1932 bp, Homo sapiens
gaaagcccttaatgaaattcacctctaaagggtaaaagctggatttagattctaaaatttgcacaaatattttgtttttcaggtcttgagtcaccacgtccgaatataattcttgggttagtaatctgccaaaaaatcaaacgtcccgcaaacagtggagagttagacaagatggacgaaaagcggacccgacttcaaccggaagaagcggacgttccggcctatccaaaagtagccacagtcccgcagtcggaaaagaagccctccaagtatccactctgctctgcagacgcggctgtcagcaccacacctcctgggtcgccgccgcctccgccccctcttccagaaccaccggtgctaaaagtgctgtcatccctcaaacctgcagcccccagcccagccacagcagccacaacagcagcggcagcctccacggcagcttcctccaccgcttcgtctgcttccaaaacagcatcaccgctggagcacatcctgcagactctctttggaaagaagaaatcattcgacccgtccgccagagagcctcccgggtccaccgcaggtctcccccaggagcccaaaaccacagcagaggacggggtgccggcacctccgttgttagatccgatcgtccagcagttcggtcagttctcaaaagataaggctctagaggaagaggaggacgacaggccatacgaccctgaggaggagtacgacccggagagggccttcgacactcagcttgtggagcgagggcggcgccacgaggtggaaagggctcctgaagcagctgcagccgagcgggaagaggtggcctatgaccccgaggatgagaccatcttagaagaagcgaaagtgactgttgatgacctgcccaacaggatgtgtgccgacgtgagaaggaactccgtggagaggcctgccgagccggtggccggggctgcgacgccctccctggtggagcaacagaagatgctagaagagctgaacaaacagatcgaggagcagaagagacagctggaggagcaagaagaagctctcaggcagcagagggccgccgtcggggtctccatggcccacttctcggtgtcggacgccttgatgtctccaccaccaaagtcgtccttgcccaaggcagagctgttccagcaagagcagcagtctgcagacaagcccgcctcactgccccccgccagccaggcgtcaaaccacagggacccccggcaggcgaggcgcctggccactgagaccggtgagggggagggggagcctctctccaggctctcggcacgtggtgcccagggtgccctgcccgagagagatgcttccaggggtggcctcgtgggccaggcgcccatgccagtcccggaggaaaaagagccagcctcttccccctgggcttcgggcgaaaagcccccagcggggtccgagcaggacggctggaaggcagagcctggggagggcacccgccccgccacggttggagacagctcggccaggcctgcccggagggtgctgctgcccacaccgccttgcggcgccctgcagcccggcttcccgctgcagcacgacggtgagagggaccctttcacctgcccggggttcgcgtcgcaggacaaggctctcggctcagcccagtatgaggacccaagaaatcttcattctgctggaaggagcagcagccctgcaggtgaaacagagggggacagagagccacaggccagacccggcgagggcaccgccccgctccccccaccaggacagaaagtggggggctctcagcccccgtttcagggtcagcgggaacctggacctcatgctttggggatgtcagggcttcacggccccaatttcccgggaccaagggggccagcccctccgtttccagaagagaatatcgcttctaacgatgggccacgagggcctccgcca

SEQ ID NO: 101744 - DNA, 3559 bp, Homo sapiens
gaagaccgagaagctggcctctccgcacctgtgaagacccactggtcagttgcaagtgcgacagtgtgtgcactcagtgcagacactgcagcacctcagcacctccctaccggggtggaaagagcactttttctttacagaaacatgattcttagatagcgagcctcccctttttaaaacaattgaggcgatatttcatcctttcttgagcttctctccctgctcatctccaaacttggagctgtcaggtgagcacggttgtagggtgttgagcgagccccggcgcatgccgggcaccgggttccccacactgggcagtgacggggcccagggaggccaccagaggagcggcgcctccattctccccacagcaagggctggctgtgcaggtgcagccccggggcagagggaaaggacaggtctcccagcacctcccggatggcaccgggacaaggagggctgggctggggtcactcaccttgtctgctgagtgcgatggcaccaaccacccacactgtcagctccgcgaccagctgggggaacgtcacactcgcccaccaaggcacttgctgaggccacgacgccgcctgacggggacacacaaaagccccagggactttgatccacgataaagagcagaggcgtctgggtaaagtaacacagggcaagggactttagaaaagtaacagctagtgaaacctttccatacacttcagaaatgttttaacttaagacttcagtataatgttaacttctcctgatgtccttgttgacatgaatgcgtgtgcgtgaaatctcacacacttccatggtcactaaacagccttcaccccgggccaggccatcgggtactcggcccgcttcacgtactgattacttgacttggcgttttctagatataaacatgtacatgtgtgtcctggctttgtggtgtaaatgtgtagtgcgtgtgcatgtgcgcgcgtgtgtgtgtgtaaggctaggtcctggcatgtttcccctgtctcagcggaccctgtcctcacggagatagcccagaagcccttggacagcacaggccacacctgagggtgctgatggtggtgactccacagagctgtggtcaggggtgagcgtgtgctgcgcagcttggagtcacgcccccagaagtgctgggtgagggtctgcaggacccagctccattccacagcctcagttctctgcggcacatgcagcacaggcctgaaggagacctggcgccccagccttgagctgcccgtctgcatcagggcactgatgtgggagcatcttcccctggggatgttaaggagaaggtcctgttgggggtagagattcacgcagaaaagagtgactgactcgtccatgtgcctcagtttataccacacaattgcaggtgtccatgcctcccacacatggggacctagtgggttttgacagcgtggtgtccagtcctagccccctcagtgcttgctgttcacacttaagcaagtgaaggcctgaaggtgcccagctgtgccctcaggggaaacttaagtcacccgccctgtcagcacttggcccttgtcgggcagtgagagtggagctgcccccgcagcaccctcaggagccatgcagttcacagcagtagctggatctccctgaggacatttgtccttgcatatcttaatgatttgtccacagaaacaccgggttgtcttcctctgcccctctgccccgcagtgggggcactctctgtaactcagcatcacggtggggggcagctgggaggcctggttccaggtgaccttctccacctagatgttcaccccactcagttccagctttaccaacagggccccccgcagggacttggggtcgcagagtcccggcctgtctcagggccttgttcatggaagggagatgagtcaggttgaaagctcatcgtgtagggttctgtgcagggcccttacaggactggaccgcagccaagatgcctgcctgttaaccatgcccagcccccgtcatttccgcgtgaagccgcaggcctcggagccttggtctgaaatgcctgtggagtaacctcggtccataaacatgggtgcacagtctgttctccccaagtacagggcaggaggaaacaccgccctctgtagctgctcgaatggaaagggctcttttctctgaggtctttatacattagaaagctcttctgggaagaatgtttgaatccatagtgtctttctgtattcacttttaattgctttctaaattagctgagaaattctgacttgaaatattgtcaggtaagcatttcttcagttttcatgtgtgtatgtaacagtagctttgcatggaaattgtaatcagagtcaaatacagtattgaatggaatgtactgccttctcctcctaaatcaataaacatctttcatggaaactggtccttgtttgtttgaattggaaccatttggtggctcctggtcacctatcctaggcccctgtttgctttccataagccagcgcagtgcaccctagtgtgcccagctctgcagcccacccagcagctgctggagaggacgcagtgcaggctggtgctgccctggggcccttctcggcaccccggcacccagaagaagatggacgtcgctctcctcttacctgagacgtgctggacccagtggctttgtgcaggtcttagagattcccagttggaacaagggagggtctgtgtgtgtgtgagtgggtgtgtttggtgggttgggggaagtcacttcttcccaccttaattgccaagtctttctatccaagtcatacgtcaccccttgttgattaacttccacaccgtttctgttccagcaggtgtgaacattttgttttgacaggtgcagaccattgagagagttttcattttaaatcactgatagtgggatgtgccaggtggctttaggggtaaaggcctcactgtgatagtttggggttgggaggagtcaggtttcgggtggttcatttagtaagaaggagcgtcttcctgcagcctcaggttcagtaccgagggtgcttcctgcaccctgagaagcaggtggttccctttgccagctgccttgtcccccagtccctgttgcgacacacctggacacagatcctggttttggtcttggcccacacagcttttcgaatacacccttttatcttcagtttcttgagttcttttcctgtgcgtgtggtctgattctgaccactgagtccagacccctccgtcatgaatacgcaaaggacacagatgtgctaaaaaggcctgttggcttgcacgtggtacgccctgaagaaagccatttgccttctggcctttcagagggcgttgggggaacatccacacccttgttccaggcctgatcagtacccttcagtggaagtgcaggggcacgtttagccgcagctggcgtctccaggccctggtccctggttgctcctgagccccggcccctggttgctttatgaactgaggccctcagtagccctcaggaggaaggtgggtaagtaagcctaccgtgccctgtgccacccgcaacctggctggtgcc

SEQ ID NO: 101745 - DNA, 1295 bp, Homo sapiens
ggcttccctgaagtccaccttttatcaccacattagtctcctgtaaacattgctgtaaaggtacaagccagtcgcttcactgggctccaaaataaagtccagttcttcatcccagtgtatgagggtgtccgtattccggcctcagacagccttttccaccttattttctcatattcctcatcagccgagtgagcctgatggtttgggctgcttgagttctcaccacttggagcaggggctgctcacgcccaggtagtgggatcagtccttcctcactgcagcatgggccatgcgacgaggacagaaactccagctgggagggataggccgccgggctgacagccttgtggtgttctctctccatcggcctccaggctcctccctgtttagaattttaggataatgaaataccctgactttgcatctcaccattgaacagccctaaacagaaatgatttcttccttcctttgttcctgacgctacctttttgacttgtgtccaccttgtgtacataattgtttttcctgaggtgttgtgtgttgttttttttttagcagagccagtgcagcacaggccgtgaaacccactgttgaaccttattacctgtgctctctgggctcccatttgctcacagcagggatatcctggggcgcactctcataaggccgtttggggagttaggtcacaccctgcagggagggctctgcccagtgccacacgcaagtgggccctgagggcctttgtcctgtgcccgctaaacttctgggcagctgtgttttccagaagctctctgtattgacagatataggaatattatttgagtaaatgaaaaatacttgtttatagggactcttccatcgtgttctgcgtgaggaaatctctttggcgaaacttgtgagactgaagccagaagaacttgtatctaaagagctttccacgtggaaagagaggccagcgagatctgtgagtgctgaggggtacctgcggaggcacccaggactcgagcttaatagaaataaattcatagacggctgcataagcgatgctttcctcctagaaaacaaggcctaagctctgtttcgtctttttcatttcaggtgatggagtccagaactaaactgcacaatgaaagcaagaagacggcccccaggcaggaggccatccccgatctggaggactctccgccagtgtcggattcagaggtaagcatttgggagattttgtgttcaccgagaatagactaatccatcccaaatgttttgaggttatcttaaattattgggcaggacctgag

SEQ ID NO: 101746 - DNA, 3752 bp, Homo sapiens
cgggttcaaatgattctcctacctcagcctcccaagtagctgggattacaggcccgtgccaccatgcctggctaatttttgtatttttagtagagacggggtttcaccatgttggtcaggctggtcttgaactcctggcctcatgtgatctgcccaactcggccttcccagagtgctggaattgcagatgtgagccacagcgcttggctaaaaatatgcagttattgagtatgagtagcttcataaaagaagaaaaatatgtccctcgttttgatcatgtaaacagcctagacctaagaaattgagccgcacataaaatgaatcatgcaattgctgcattataatgaatctcgataccttacattgtttgagctgagaattttatgctagcaaatgtctcaaatgttcatcagattctagcacctctacgatagagcagttctacagagctaatgggcttaaagtgtcacccacctgtgaatgcagagagggatttttaatgctgtactaaaatttagctgtacattggttttagacacataacagtgaagaaaagaaaaactgcggttatagcctcagttcagataagtgggtgataatttcagtttggttaatttccatctgtgtcaaccaaaattgaaaagctgccagagactccacatgtggagttggaagagtccgtgtacattgtggggagggagcattggtgggaagatggggaaatgaggggctctcagccctgggttattgcttcctgcctgcctcctgcactgtgagcggggagaggtcgaccaggaggctgctcttctgcccatagcggggtactctgacctcttctccctcttcccttctttgccacacatcagctcctctgggaagctgatttgctccagggacaggaggtgggggaaattgcctgttaaccttcccaacacatcacctcaagttaaaattggtggatttccagaatttgtataggatgggaatggggacgacacacttttgagctagtagcttctgctcgttttgttatcccgtaaatgttgtcttcccaaaaggtgattgattggagcagagttagagacattggtgacagcagctaccatgtctctgcctctcccctaaacacctctgcacttttgtaggctcaacaagtactggggagcctgccaccactgtatgcctttgaggcccctgccctgcctccctggctggccacggagctcgccctccctggtagggggtgagtttggaagtgagaggctggtgtgggtctgtcccatgagctgactcacacttgcctcaccacacataccatcagaagacccacgtggtggagctaccgctgctgctccccacagtgcacctaggcaccctcctgtccttcccatggcactcggttgacctgggggttcctgtccaacaggtgaggcctggtgtgcacagacactctgccattgctagaaggaggctgtgccccctgctaagatatcagtaggtccttcacagcctcaccttgttcctcccatttgtttttaaaaattgtttcttatatatacagtttatttagcttacgtaaacatttggtgcacataacttctctcaaagatcatgatgtttcttttgtggttttataaattcttattccatttttttctctttatttccactgttcacctcccattattgtcgaggcatgaagtcagttggaaatgtttttctgagatgtacctgactgactagaattttgagatggaattctcaaaattttgagatggtatttgataggtgcaatttctagtattttgtctccctaaatggctcattaagtgacttaaacactgaggatctgaacagattttgactgcaaagcagattctacagttcgtttcatctaaccgttggaattaaaatggaaaacgttgccagtttgtaaacccaaatccagatgctgtgttaagcatggtgcccaggtggaagcactgcctcttgttcccacgtgctgccacagagatggccctggtggggtgaaatggacggagaacaccgttcacaaggataactcatggtgtgggctccagaagcacatttcactgaaatcctaagaggacccagtctcagttttcattaataaaaaatacatggggggattctagaacctaagagtgttttgcaggaatttaaagccgggagaggagggtggcttgtttcactggtcgcgtgagctctttttttatctgtctcctccagagttgtcagcggcaataaaacgagactgggagtcatcagactctacgtgtccaccaatctcttcctcccaattagaaaaatcagaatttgttctgagaaagaatatagcttgatagttgtttttttacgttatccatataactggaagtttcttggctgtcagtaatgacattcttttgttatttttaagtgttttactttttataaacttaaaaagcagcctgccattgagaaaattacatcagggaaaggtttcacacctccgtaaccgtgaccctgcacggtgaagtcccacatcagcaccgtcccgtggtgcccctgtccatccctcaggtgcccctttgtgcttatgcttcagccaccttgggcaggtggggtgcagggatggaagtttccagcaggatcggtccccctgaattcaccacctcttcagtgaccttcataggacctttcggagctgtggatctactcatagtctaaagatgaatactcgggaaagcctcctcggcattctcggtgtcacagagtgcagaggtcagctctgaagacgcctgctacaattcctccaatgtggtacacaagtttcaggtagatttgtataaagttgtaaaataatactaggtttttttttttttttttctgttaacacatcaacatacacatagttatattcttagcttctaaaagttagagaagtaacttagaatattgacaagaatttttgctacttatttaaatgaaggttgcggcaactttcatttgccgcaaacctggaagagttcggcaagaagagcttaaggtaactggctttatcctcaactgacctgcttggtgctgtcagctaggggctttatactgagtatggccctttaggactggagggattacaggggagggttgtggactaattttaacatgcccctaacatgttggtttaagtagtaaacaacttagataaaggttaaattactcgtgtgggagatcttgggaagagcagcagctctgctcccaaatgggcttggcagccaggcacacaccatgtgcagctgggcacaactgaaattgcagttgagtggaacgtccatctgtccacgtggccctcatcacacgagtttcttagggagaattacacacctctccattaagttggaaggcactcaagtagcgggtattagtaagaaaactgaccaaggaaagctttgagtattccaaaacacggcagtctagctgtggaccctgcaagggcgtcctggctgtagtgatggtctcctctgaggagcgtctgcgatgtagtctgcctgctgtatttgggaagtaactgtttccccgcaacatgaaagcaaactagtaactacttataaaaggcgaattcatgtgaacacattctagcatgttgagaggagcaaaagcagaacattttctcttgccgctgccaccttgattgttcccactaggggcaatcttggagtgaagaaacaggtaaagcaggaaactgcattgtt

SEQ ID NO: 101747 - DNA, 1278 bp, Homo sapiens
gaccagctccagaaaaaaaagagaccacagtgaagaaggcagtggtggtccctgcgcggagtgaagcactcgggaaggaagcagcttgtgagagcagcacgccgtcgtgggcgagcgatcacaattacaatgcagtaaagccagaaaagactgctgctccctcgccgtcactgttgtataaatgtatgtatcacctaggggttggcctcctggacccctcccgttctttctggatagccatcccctgggcctgtccaggactgggagttgcagctttgtgttaagctgatcacagacaccggctgcaccatcagcgggaagcagagcccatgtccaggatgcctcctgctgccctgtgtccatccctagtctgtcaggacttcctgtcactgttttccaaagctgtaaacctcactggtgaacgttcaccttaatgattgattctttaatctctgttttcactctcaggctctggtaagtattcgtattctcttcatcccagtctgattgcatagccacactgcccggcacgccacatccacccctgtctgcacatgagttgttctgacaacagcgctgtatacgcttcagtttttccacattgtccacggccagcacatgaaagcatcacttcttttttatgttgtgggaatctttgcaagttagtgttgcatctgattttcaggtgtacatttatttttgactgggcagataggggatttttttttttccatgtccgattcacacgctacacacccacatgaacacattcgaacttcgaaggccacacactcctgcttcataggccccacggtaagtgagttcacacctagaacactgtcctgaccgcaggacgcgtgccttggacttggtattctacatgtgactggctttcttgccctcgtctcttgaatgtttagactcttaagatcatatcctgccccaaatttcaaattaatgaaatgaagatatttcaaacagatctttgaaacctcagattctgtggtgcaattttaatgttttcttgtttctcagttttctgctataaaactattttcaattcagtctttaatgccttctgtctatagtgcattttgtgctttttttaaaaagcaccgaaaggttaaatagtctcaattcaaagatgatcacagagtgccccactttcccgtcgtcagactttgagcagattccctaagggaaggcactcatgcaggcaagcagacctatgctaggtctggtgtgccttacaaaaaagacactttttttttttttttt

SEQ ID NO: 101748 - DNA, 1076 bp, Homo sapiens
ggtgtgacttggcgtgttttcactctggtccctccagggtcccgggcctgtccccacccagctgcctgtcctctggcaggtattggaaattgctgtgtctagaagcatctctgccttcacactcttgcactgcattagctgcaaggtgaggatgtccgaaggctgggccgtgcacctgggagcgtgcccttggaggcaggaggggctgaaggctcatgctgcgctgctatcagaggccacatctgggcattcagagatgaatggagatgggaattcatgagaaaagtcattggctttatgtctttattttttaaatatattgattctgttttttgtgcagttgaggcttcgctctgttgcccaggctggagttcggtggcacagtcccagctcactgcagcctcgatctcctgggcttgagtgatcctcccaccttagcctcccaagtagctgggactacaagcacacaccaccacgcccaacatctttttttaattgtcattgtgcttgacaataccctgcacaaacctaaattgtattctcaataaaacttagattctgtggaggaaaactgattatgttaaatatttaatttgagaaataaggtttcgcttaagtatgtgtgagggacatgttcgtgtgtgttgaggcctgatcatcgagacagactttgtaaacagcagtggtcaagctgtttgtggtgcgtgagtttcctcctgctgcacgatgagttactgcagtcctggcttgaaggagctcacatttatgcctccatttccatgggaagcctggacctgctgctcaggtctcacaggactgcagtcacggtgcagcgggggctgtggtctccagaggcttggcaggggattcccttccagaagccctcacgctgttttttactgtataagtgtgtctggccgggtgctgtggctcacacctgtcatcccagcactttgagaagtcaagatgggaggatcacttgaggccaagagttcgagaccagcctgggcaacgtagtgagacccccatctctacaaaaaaataaataatgagctgggcgtggtggtatgtgcctg

SEQ ID NO: 101749 - DNA, 3935 bp, Homo sapiens
atctttagctggacaggaaaatgagaagtgacagcatttagagggaagcaaaaagaacaacacaggttacaggttgcaagtaattttccattttgtattttcgttctttttcttttttttgagactgagtcttgctcgcccaggctggagtgcagtggtgcgatctcggcttactgcaacctccacctcctggattcaagcaattctcctgcctcagcctcccaagtatctgggattacaggcgcctgccaccatgcccagctaatttttgtatttttaatagagatggggtttcaccatgttggccaggctggtctcgaactcctaacctcaagtggtctgcctgcctcggcctcccgaagtgctgggattatgggcttgagccaccaggcccggccccattttgtatattttttaaggctttcattttatgccagtccttcccccaggatggaacatggcataaaatcagagtcatcattagcattgaaatgtaattaaagcttggacagcttggaaaagaattctcaaagtatctactgtctttttcagatttttgtcatttcaacaagagtaaaagtttcataaataagattctttagtaatgtattagaatgaaagtgaaaaataatacagaaaaaaaaatatactggcctggcacagtggctaactccagcctggggacagagcaagactccgtctcaaaaaaaaaaaaaaagaaatataccttaaagtgatcgccttgaccatgttttctaagtgtcccagttgtcttgctgctaacaatatctccaaagctcagtagactaaaacaaggtttatttcataccacacaatctgttgggtcaggagttaggcagttctctcacattgtgcccgtgagggtcattcacttggcagcagggctggtatggagggtcccagatagtgatagcatccttcctggccccagcccctggttggggagctgaaagtcgggactcagcttcttcatatcctcttttcagcatggtggtggccagcccatacttgcaaaagtccagaacagacttgggtccctttgcaggccacacccaaactggcacagcgtcttgttcactgtgcttgtggtcagagcagcccatctgcctgcggaggtgctggggagctcgtgccacctccgagctgctcgcgtccttgctcacgtccttactcacatccttaccctgctatactgtccaatatttcctatttgtccctactgtctggcttgtgaagccttgtcctgagcagttaaatgatgaaattgtacatttgatttgttagctgtatttttgtctaaacgttagttgtttaactatattaaaattatctttacaaatcatcttgaatcatctcacatagcacacattaggaaacactggtcagaaggacttgctttatgtagagctccactgtttgtagggaggtggcccctgctgcgcgtgtttggcggcaatgtcaccttttgttctgtggtcagttggtcactatgtgcttacactttaccgctaggtatggacgacaaaggcgacccgagcaatgaggaggcacctaaggccatcaaacccaccagcaaagagttcaggaaaacatggggttttcgaaggaccactatcgccaagcgagagggcgcaggggacgcggaggctgacccactggagccgccacccccacagcagcagctgggcctgtccctgcggcgcagtgggaggcagcccaagcgcactgagcgcgtggagcagttcctgaccattgcgcggcgccgcggcaggaggagcatgcctgtctccctggaggattctggtgagcccacgtcctgccccgccacagacgccgagacagcctccgagggcagcgtggaaagcgcttctgagaccagaagcggcccccagtctgcttccacagctgtgaaggaacgaccagcctcttctgaaaaggtgaaaggaggggatgaccacgatgacacctccgatagtgacagcgatggcctgaccttgaaagagcttcagaatcgccttcgcaggaagcgggaacaggagcccactgagaggcccctgaaagggatccagagtcgcctgcggaagaagcgccgggaggagggtcccgccgagactgtgggctccgaggccagtgacactgtggagggcgtcctgcccagtaagcaggagcccgagaacgatcagggggttgtgtcccaggctgggaaagatgacagagagagtaagttggagggaaaggcggctcaggacatcaaagatgaggagcctggagacttgggccgaccgaagcctgaatgtgagggttacgaccccaacgccctgtattgcatttgccgccagcctcacaacaacaggtgggtcatgtgtgggcacccacagaaatcccagggttgcaaacagaattttccatttgttttcattttaaagggttacaaagctgggctggatgagcgatttgttggaaaagatgaacaagttgtcaaaaaagaaacacataagagtggctaaggacttcctagagccacctctccactctggtagccactggccacacatggctgtttccagtcaagtgaggaggtgaatagcgccccaccccagtcacgtgagccacgtgcagccagtggctctgtgtagacggcatggaggagaatgtgtccgtcactccggggtctgtctgagactgctcctctagactgccccttgggagacatagcagaggggcatgtgcagaccgcaagtgtcctagtgcaaacattggggcagctcaaaagatctctgctaggactgggtgtcagacggtgataggcagcctgttggcttggcgctgggataaaggcattgtcgcagttttggggggagacttgctgaggtatctgtggtggaatgccttagagtttgctcctaaaatgcgctactcttaaaaaacggtgaagtaaatttggttgaatgttaaaatcaaaggaaaggcatgaggacgttcttaatctctacttttctgtatatttgcattttttcatgaagttaaaaccaattgtcttattaatgtgttgaaaagtgcttgtcactcacgtcccattgctaataccgttattttataatttcaggtttatgatttgctgtgaccgctgtgaagaatggtttcatggcgattgtgtgggcatttctgaggctcgagggaggcttttggaaaggaatggggaagactatatctgcccaaactgcaccattctgcaagtgcaggatgagactcattcagaaacggcagatcagcaggaagctaaatggagacctggagatgctgatggcaccgattgtacaagtataggaacaatagagcagaagtctagcgaagaccaagggataaagggtagaattgagaaagctgcaaatccaagtggcaagaagaaactcaagatcttccagcctgtaagtgtttgtccgctgagacgagcattcagcagtcggcctcactggtttcagtctcgctctagatagaaattcctcccaggacgggtgctgcacccatgtggggcggtgcctctcccgggttcctgcctcactccacctgggtgaggcctttctatttttattcttaccctgtctacctcctctactattaatgacttaattgttgaaatcagcccatctttgaggatttgggtgttgcttacatgctttgtatgcattagcagaaaggaattgtttctgaacgatgggagtggcggtgctcctgtgtcacctgctgtctccagctgcctcgtggttctggtgctggctcctcggggtgcttgtgttgagagtggtttctctgtcttgcagctgtgttgacacttaattctctccccctgatgtttatgacatttcccacatgctgtcagcttctgctgctgtcttgtgtttgcagtctccatt

SEQ ID NO: 101750 - DNA, 1624 bp, Homo sapiens
ccagtgttttctgagcagtcgtttctgaattcttgaagtaattgttttgaggatgatagttttaccacattgaagagatggtgactatgacgatgccgtttggcttatcagagggaatgcctgtcttatttttattttttgtagagacggggtgtctacatggtgacacgttgcctgggctggtgttgaactcctgggctcaagcagtcctcccaagcagctgggatcacagatgcgaaacactatgcccagttgtcactgtccctttaaaaggaggggagttggaatgtttgtccctttgttctgaggttgccagggagaccacagagggaaggcagttggtcttgaggctgaggaagaggtgagagctggggctcagtttggaagtgtcggctttggggcaaggacctagctagaaactcggcacctggaacctttgagtgttgtgatgtgactggttgagagaggatacaagagaattgtttcttaaacacacgtggtgaactgtatcgtgttgattttagtacgtcacaaacattagtattctaaaatttttcttgtttttaattaaaataattcagatacattattaagaattttcaattattacattcttatataatttcgatgttcagccttttcactttttgttcttgttcctctgttttgtggtggattttattgagtggggtccatctcggacataggctccaaatggaaaagaagctgatgcttggcgactcctctctggccctggtctggctgggcctctgcctgcctccctggggcaagcctgggactccactccttcctgcgctgccccggcccctttctcttgggggttggtagcatctgctgtcctgggtagaggtccttaaggacactgcttgcgtgctggttttcaacccccaagctgtctttgtgggtcacacagtatcactcaaataataggttacttgagaagttcggtactcccttttaattgttgtcgatacgtagtttacttaagatatgtaaaatattttcttattttcttttaggagcttactccacgggaacagcctctagataatctgagttgttgaaaatacgaagcctgttactcgtgaacagtggctgacaacagtgttgttgtgagcctggctgtctgcttggacccagaggtttcgtctgccagggtttttggttgtatttaggatttcagggaaaagtgtccaagctttcagtgttggagcaggtaaggtatcaacactgttagtagcaacaaaattttaacttaataagtctgtatttgctatttataaagtggcatttgtaaagaaactgatagtagaatgtagtattcgtattcatttgaaatacattcagccatttgtatcagcagtctctatagcagcagattctgcatctgtggattcaaccagctgcagattggaaatatttgggggacaaacaataaataataatctgacaataaaaaataataaaaatgttataaaacagtgtagtacagcaactgtttctatgatgtaatctagagatgatctaaatatttgagaggttttgcataggtcatgtgcaaatagcctgttctctctttaatgagaacccagttttataaact

SEQ ID NO: 101751 - DNA, 1051 bp, Homo sapiens
agttatgtgaagatggttacaatactccattctaaagacctatctgtgtgaggcaagattttgatgacatgttttagctgaaacactctatgggaacagattgagggcagaagtagacatgaacatggagctgtcttcggttatgccagaaatttgcaaaaatgtacaacagggccactcttcctgttcatttttgtttgttttagaaataactttcatttaaagatactattaatgtattaataggtttatttttaatacatacttagaattttgaaaatagcaatacattccacataaacaaaagctctttggtgttctcaacttgtaaaagtgtcttgagacaaaaggtttgagagccgccattcaagcatttggaagtcagtgtgtgtcctctgcttgaatcgccgctcatcagctgcttctagtcaatagaaaatgaagcagttttcagctggggaaaaaaatgtgcttagaaatgtggaaatattaaatttggtacattctgttttaacctgtagtttgttcacttcccagcttcaaggatacccacatttttctttctggggaaaagttgttactgatacaatatggttgcagttttatgaacacattccccctgtgatgggctgtgtagtgtgtagaattacacactaattatacacacaaaaagttgtgttagaacaggtttttttgcttgtgccttgatatacatatgtttttattttacaagctgactgaaatgttatagtaaattttctctgttgaagacattatgaaatcagttttgtaaatataaagtgatctgatcttttccgaaggtatatccttcattgaattctacttaacagaaataactacatttttctgattactcagaactcaaatctagtagcgtgtttattcgcagattaacataaattgaatttttaaaaatcagttttcgttcccgagaacttcttaatttctttgcttttataaatgttcagtgttggctgggcatggtggctcgttcatgtactccccaaaactctggaggctgaggcaggag

SEQ ID NO: 101752 - DNA, 1413 bp, Homo sapiens
ggtgggagctgggcactgtggctcacgccagtggtgtcccagctactcaggttgaggcagaaggatcgtttgaacctatgaggtagaggctgcagtgagccctgatcatgcagctgtaccacaacctggaagtgggcacgcttgagttaatgacttcaagcagattttagagtagtaaaagttgagcatacagatttgcagtggttgcaaacccatgcattgtaatagttgcagttaggctttttaaagtaacagagctgaccttttgggaagatatttttatttggtttttaagaaatttcacttttggctgcttactgttttggtgagttggggaatctgagggaagattaacaggtagttacagaacccttgtggaaggaaatgtttaaagtctcttctgatgtctgaagcataggtatgtattactgctttgcacatatccagtgtactcctaaactggtagaaatggcatgttgccacagttctttgtgtttcatggactcctgagggggaagtccttgaagccctttctggggctaagaggtaaagatgacttctgcataataatagtctaatagtacaggccttttctggtgagtttgacatttgcatcggtggcacagggcagattggagccctcttcagcaccgtgcatgggcaccgaatgtttagaatatgccaattttcccaaataatgtccctgatgatgcagtaaatattaatttttttcggaacccgcaaacatacatcttttttactttcgctgtgattaaatgtcaagttatatataaagcttctgctgcatccccacgtggtactgtccacgcacagccctaggggattgagctgggagccgagtggtctcggaaacgctgtctgtccctgacagaacaacagacggaggacagttttcagactcagcatgtggcaggcgttttgtccaaaacgagtgatgtctcaaagaaaaaacgaacagtatttgttgctaaggataaaatttgagctttggggtgaaaattggaattttagaaaacttgtatctgccattgtaaacctgatggctttctagtaattaaagtcttcttggagattggacccgacattatcggccaggtgaggtgactcacacttgtaatcccagcactttggaaggcggaggtgggtagatcacttgatcccaggagtttgagaccagcttgggcaacatagtaagaccctgtctctacaaaaaaaaatgcaaaaattacctgggcatggtggcatgcacctgtagtcccagctactggggagggtgaggtgggaagaccgctttgagcctggcggtggtgtgggtgggggaggtgctgaggctgcagtgatccttgattgcaccactgcactccatcctgggcaacaggaaaaaaaatgttt

SEQ ID NO: 101753 - DNA, 1899 bp, Homo sapiens
aggcagatgggaacgtcttttcggtatattcacataactttgctatataccccgtgttccatggtttccgtagggccacatatgacttggttgaaatacagttctgagaaaggtccttagcagtgccttttaaggagtaaatacagtctttttttaaatgagcattcattgcttactgttagcacgagggatacagcagtgaccaaggtggcccctgtcccagtcctggagacaagttcactggggaacttgagagattattccagctccttcctttaaatcaggtgttgccaactcgtttacctggagcctagggctctttagtggccctttgggttgctgttagtgtatgtgtgtctgtgactatttcactattttaaatacggcatagacatctcagaagtgtcacccaggaagacagacacagccctgttgtgaaactccctgcttaatgcacacttgttttcctacttgctgtgtacatggggaggagatgtctgttcttgtagacttgtttcagcaagtttcataagatacctcttgttttggaaaagcgcgtatcttgaattttttcaggctttccaccagaggctgtcccttattagtagttgattgaattcagactatgtcaagcagagctcattgtgctgtggtgagaagacagggcacaaataagataatttgtgattgactgcccagccgtacccatggttaccagacagcccagcccatgttgcatgtgcatatgtgagcctcgcaaaggcttgtctaggacgtgcggatcatcggttgggccttggagggtgctggggtttcttcatgtaaggaggaaatgattggaatgggcattggctcccgttttgttcgcggtgaagttggcaggttctgctgttgatactgtgagtttttctacagccttagggtcataattcccttaaggtcagttctgtggagcccagtagggtgcttctcttcagtgtttatttttaagctgtgccacgtcttcattgtttggaatctctgtaaacaagacacgtttttcctttttatatgcctgtcccataataccaagtggcttatttggctcttgaagagctaagattgaaagtgtttaacaggtgactccctactatctgtgggtccctgcactgtgcccttgcctgagaggtctcatctctctggcaggctcagaagaccactagaaaattctctctaaacagagtctctcacttacatttcttatttaaatgacggggtcccttacagtggatactaagatcagcctttttatgactactatcaaatgatgtgtgttaattgcattacaaaagttctataattaacagttaatggaaatgtactaattgggaaagaggaggtcaaagaacaaagtccagtttgctcatttcatgtacgtgtacacagtcatctgtgagacagtctgtgttgtctaggcctcattttattttttgagtagtaattttgaggttaagttgttatatgaagttgaataggtaattgtacatattttaataagaattctgtaaccatgtccataaaacttaataggcggttgtaatcgtgtgtaagttgtaaaggaggcatttctctccttgggtatcaaattttgatgccgtggttttgttttgcgtatgctgatatagacatttaagtggtacttaatatacctttataataaggtaaatcaactttttttccaaaatgaagataccttaatgtgtttgattacaaaagtaatacacatacaggaaacttaaacattatgtaaaaatagaaagtaaagacactagaaagggtgctgtccagaaaagctccacgttacagctgttttgcactagtgaacgggatgcgttggaggctgtggccactgccctggcc

SEQ ID NO: 101754 - DNA, 1064 bp, Homo sapiens
cggtcttaagagcgaaatcctggcggagtgcagtccctcggggctagcatccacgttccgcctgcgccctgcccgggctgttccgagggatccccgcaagggcactgccccagctttcactcttggagtcggggaaataaggtgtccacaaaggatgcaagcaagtcattgtcagtgcagacccgaagggcgcgtccggagtgcaggtatgaaagacgggcgcatgcgcgcagtccggggccgggcttcgcagcccgggctccgctctagccccgcagcgtctcggtggccggtctcgtcctccgcccgccgcgcgggggcgccgctctagccccgcgccatctcggtggccgtccgcccactccgcggcgttcggggaaatggctgcgagaccctagaggcctgcggcctgcggtaagtggcgtcccgggcgccgggtagaagagccggccgccgcttgggccgccctcgggagcggggcggggccggcatcggagcccggctggcgagagccgcggatcccgcacaggccgctcccgccgagaagatggcggccgcggaagggaaggagcgggcgggcgggcgggcgagcgggcggggccggtcagagccgccgcggcctggggcgcgggcctcagacgccggccctggtgggctgcgtgaggtcgaggggactggcgagcactcggtggtcgcggctggaacggttccgagggtgggagtcggggcggccgctcgcggggaagagcgcagggctggcctgggcgagtgcggcccggggctcgggggctgcgtagctggcttgtaagcgcagctggtttccctaggcattctcggggacctcggcgcttcctcccgggccttgggtgcggtcggggtggccggcttagcttctggcgtgccttcgggggattccggcactgcaggggcggctggcgctgcaggaagcgcgaagagcccggattcgcttttctgaagagtgtgtccttacctccccgcgctggttttcagtttttttgtggaatagtttgttgcgttggtttgtactggccgtatttgtgaca

SEQ ID NO: 101755 - DNA, 1104 bp, Homo sapiens
ttggtgagagagcaagaagttgagagatgtgatgggaatgggaaacattggagtgtggtgagcaggggtgaggtgaagacagcgtagtatgttgaaggtgttcagaagccattagggccatgcacttatgtactgagaagtgagcagtgagctagatgccacaaaacgctgcagcagcaggtgagactgaggagcagggaggggggtcaaggataatttctcagcttctggcctatgaatttatagggtggtgggaccatcctctggatagggaacgccagagaagagcctggaagtatgtagtagggaggtcagaagtcctaagctcattttgcatgtgttaggtaggttttgaagtgcatttgaggcattcacgtggagatgccaggggagcaggtgaatgatggtgcccagatccaggcagagataaaggcaactacagccaggtgtgcatgaagtctctgtggagaagggatgggtggagggagaggaggagagcctgggccagagccctgaagccaccagcatggaggctcaccaagagtgcaggagagcaggaaagaggtaggtgggtcccgggacaggagagggtgcagggccacacgggttggcatctgggacagtgacaaggacttcagcctgctggattcatcaactgcctgagctttcctatgacagaggtgggcatgtggatgagagaaaccaaaggcttggcccttacagtcagctgaggggcaaccaggtgttcagagcttccagtgtcttgcaagctgaggtggtggctttgaacttgagttgtttcatattgaaagagatgaacagaaagaggagtgctaaaggtatattaatcttaaaagaacattaatgagtttttaaaaaggggagagcagtttgcccaggctggagtgcaatggtgtgataatggctcactgcaacctacacctcccagctaatcctcccatgttagcctcttgagtagctgggactacaggcggaagccaccacacccagctaattttgtttattttttgtagaggagaggtctcactatgttgcccaggctgttctcaaacttctgcgtgcaagcagtcttcctgcctcagc

SEQ ID NO: 101756 - DNA, 1128 bp, Homo sapiens
tccaaggcccccagagcgggggcggcgcgcaccccggccacatcccgcctgcccgcccggcccggccccgggagacgctcggcccggccgcccgggcccgccgccgccatcttaccgtgcggaacctgcctcccgcgctgcgcggtctgggcggctgcggctccgcagcctctcctgggctggggagaggtggcggccgccggggcgcccgagtagaaggaggcagaggtgggggccgcggcggaggcgggggcgggggcgggggcggggagcgggagggcaggcgcaccggaggccgcccctcagcacctctcgcgacagcaagagagcgcgagagcgcgagccgatgaccaatgaagcgcccccgcgagggggcggggcggacggcctcccggaagcgcggaacctcagcttccgtacttgcgcagaactcccctcgcggcgaccacgcactacgggttggcgccagagtcaaaaggcgtcggccctctggcaagatggctgctgcggaggcgttggagcgcggaaatctggaaccgggatggcgacgtctacactgagtcggaggcgaaggtcccagcttttttcctgtcgtttgcgtgaggccgcacggggtggggcgggggaaaggcgccgggtgtccgcggccgcccctcagacggggagggagtcccctcccgaccggcggccttccagggctagtgtccctgaggtccagggagagacggctgacccgagaccgggctgggcgagagctgtgctgtctgcgcgttgaagcgagttcccccgctttactcgagatgttgttgagcgcgtcctcactcgaggccaggtggggaatcagaagggccctgccctcagggcgcctcccatgggctacgccgaagggcgggacgcggccagggcgcgcgggacaaaggagaccccacttgcttgcggggcggagtcccggcggcggcgcggggcagggccggggttactcggtgactggagaccctcccggcaggagcgcgggttgaggccgcacttgggtatttgcgcgtttacttgcttattgcctgtccgctcaggaggaatgcgaagtctgtcattgcagggtcccatgtttccgttgctgggaagtacctt

SEQ ID NO: 101757 - DNA, 1111 bp, Homo sapiens
ttccaaaacccatctgcccaagggttttaaacatgcagttctgtgcgccacagtcccttggtccacgctgctgttgaatgaacgctcaggtgggtggcttccacattcctgccgctttgaacggtgcttctgtgaacagcgttgtctgtgtttggtgcatcctggtgagtttttctagaatataaatgtattaaaagtagaattgctgggttgtgaggagcacacatgttcagctttgtaaggagtaccagattgtttttgtagcacagtccgttctcctgataccagagtagaaaaagttgaagtgaacttattctttgctaagcattggcattctcagtctggtgggtgtcccacggcagcgttgtctttccgtacatgctcagtgtgggattctccggctcacagctcttccagcgctgccctctgcccttggaggagcatctaaacccctccctcagctgttatttttttcctgtagaaataaatcagaatgagttatgcagaaaaacccgatgaaatcacgaaagatgagtggatggaaaagctcaataacttgcatgtccagagagcagacatgaaccgcctcatcatgaactacctggtcacaggtaatggcttacagtgaggatgctgttgcatgaatgtgattctccctttttgaacacataaggagtgctgtagcactgaggtttgatgacgtagttatttgtgttcagacattatgaaaacacaatgctaacctggtaagtttggaagttatcatgtgaaagccttttctgaagatgagatttttccaggtctctgagacctaacacaaacccatttttcagcctttgacagttttacagttactcaaaataattgagactgttgtgaagtaagtatattgaaagcctaaatagttgatctcttctggccagtctgcaaaaatatgctggcctgtttctggaaagtatgcccaactcagaggatgggaatggggaagagcagaagcgtgcagagggaaataacagtcaggctgttcttgatgtcaactggaggaagggcagtgctgtatatggcaagaaaatagatgtttttaaaagacatgacatgaaaaatctccctc

SEQ ID NO: 101758 - DNA, 1519 bp, Homo sapiens
gtatagctgaccatggagggcccctgtgctgtggaggctgagccagtgtgacttgcctaacctggcaccagagctgcggctgctggcgtctggacctattatctgtcctctcaaaggagcccacaccaacacactgggccagcagccattctgacctctttggctaatgggttagagtttttggatgggataacaaggaatgaagtatactcttctcattttctatatgtattttgagagcataacttgtaaattataaagatattaataccgagttcctgagaaagtgtggttcacatcagaggttattaattgaggcaattggagtttctggagatacaaagtctttgccttaattccttgctaactttcctagcagtgaagatggtttttctattcagagggctttaaggaagcagcggagaagtttcgaatggaatctggaatcgaacctagtgtggatctggaaacacttgatgaacgaatcaagatccgggagatgatactgaaaggtcagattcaggaggccatcgccttgatcaacagcctccacccagagctcttggacacaaaccggtatctttacttccatttgcaggtatgtttcaggagagagtagtctggtttgtgaatacttgataagttaaagttatttgcaatgattgagaaataactaggctaatttgctttaataatgttatttcaatgcatgtgagggggagaggtttgagtttgctcttttatgtagttcagaagcggttttttgttttaaaaatgcaaatttgataactcagagatgcaagaaaagtcttccctctgtgatgtacttttgattgggacctggtaccacctgccctaagtccctggcctgggtgtgtgggggtcaagcttgtctgtctctgcctccagcaacagcatttgatcgagctgatccgccagcgggagacagaggcggcgctggagtttgcacagactcagctggcggagcagggcgaggagagccgagagtgcctcacagagatggagcgtaccctggcactgctggcctttgacagtcccgaggagtcgcccttcggagacctcctccacaccatgcagaggcagaaggtggggcctgccagagggaagctttcttccattccccatgtgctctgagggggcttcgtgacaacgccaagtgtgtggctttgctgtgtggactgagagacaggtggcttctgtgcctgggatgctaagtggttccttcatggcttttttttttttttttggaggtgaagtcttgttctgtcgcccaggctggagtgcagtgacgagatctctgctcactgcaacccccgcctcctgtgttcaagcgattctcctgcctctgcctcccaagtagctgggactacaggagtgtgccaccacgcccagctaagttttgtatttttagtggagatggggtttcaccatattggccaggctggtcttgaacccctgacctcaggtgatccagtctcccaaagtactgggattacag

SEQ ID NO: 101759 - DNA, 3891 bp, Homo sapiens
tccccaggcaaggactatgtatttcatgtcctgagagtgtctcgcagttaagagcttaatgtttgtttaaactgcctctttttaatagactctgctggtgctctgcgtgtatggtggtttttatcagatgtatttatattctaggtgtggagtgaagttaaccaagctgtgctagattatgaaaatcgcgagtcaacacccaaactggcaaaattactgaaactactactttgggctcagaacgagctggaccagaagaaagtaaaatatcccaaaatgacagacctcagcaagggtgtgattgaggagcccaagtagcgcctgcgcttgcgtggtggatccaacaccagccctgcgtcgtgggacttgcctcagatcagcctgcgactgcaagattcttactgcagtagagaactctttttctcccttgtacttttttttgacctggcatctttttatagggaaaaatggcctttgtaggcagtggaaaacttgcaaggaaagctgccgtctctttggcagtctgatgcagagcctgcactctggcactcgctgaagaatctggaaggttgcggtttgctcttccagtgttcgggggcctctggctgctgaaggattcggtctaccacggagggctgtgctgttaggctgcatcccactcaaaatacaggaaaagcacgaatcatgattctgctttctgttagcttaggcagacattgggccttcacctacaagtttttccttacccctgtggtttttgtgtttttttttttttctttttccataggaaagaatatataaatttgtaaatcctaattcaaagatggctcatgtgtgagggcattgagtttgatttgttttccctttggtctgggttgtgtggcttttgggggatgcgtgtgagggggctatgtgttttttaattttttaaatatatattttggtgctgtgtgtggtaagagacttgttcctagtggatcaatgaaccatctcttctgggcagttttgttgaaaataaaggtttctctttgatttcaagaatgaccaaaatggcctctaaaagatgttaatcatctcaaatgaccttttgtctttggggcgttcttccccctgtgatagcggcagtggctttttctggtacctgcagctggaaaggccacttggccctgtgctgagtgagcggccttcattagagcgaggcagcccttggccggtggggacgcagagccccagcaggtggtgcacgactgttggcggaaggaacgcgtgttcatcctcagtgatctgccctccagcatctcggcagcatctcatcctccatcgtcagctggctctgccgatgtcctgcttctgttcactcacagaactgtcccctgctccgtggtgggcaggagggaagtggtgcagggctgcgtgcattgcctgcgagtcgggacagttgatgggcacatggccttgtagctctgggcacagatgtgtttggattcattgcagcggaccaccgggcactgttgaccccactgagcagtgctaagtgttggtttagtggatgttcgtggaattgctgacccatccaagggcgtcctttggagccagtggagcctgccggcgcatctgaggggcagaatgctgctagcacttgaatctgggatctcgccttattctcaagtagcaaggcatctcgacaagcatggtctaggtctggtggccagcttgccagtacctgagccggtcgggtcatctgcctctgagggaccgtcctcaccgagctcctgcatcccttgagtgttgatcaggaggcgtccacagcattgttctcgcctctgaatgatgcttctttctgtgttggagcctggcgaagttgtgttttcaagccctctacttctctttccagtgggtaggagcttttggcagtgtttactttacctagatggcttatataatccagtaagagatgcaaagataaaattgctgcggttgttacagaagcatggcggcctccagactgacccattggttgccctttagattttgtaaggatgcggtgctggggaggtggtgcttccctaccccctagaaatgctgccttccaactaccactctcccagatgtgacccttgcgattatttcctctgaggtttgaggatgaagataagttggagggaaagagagtaactaataggggatgaaatatagcagaagctagaagaaagcggtgaggtgagagagatgcatctgcacgttttcttcaacagcaccaggtgattcagcatattcctaattacctttcactattcgtgtatataagatcgtttacttgcataatatatcatcaatttgacatattcttaaaactagagggtgtgagaagcacagcaataggaagtctctccacaaactaggggaacacaaatggggtcattcacgtgcctggactgtcactatgtggctgtcacgtgaagtgctggtgttgatttccatttcagccagtgggtagctgataagccagtgccagcatccagcatgagcagatgtcggggagactgggaagtctccagcgttactgctctccttcccttcatgataagccagtgccagcatccagcgtgagcagacgtcggggagactgggaagtctccgatgttactgcctgccttcctttcgtgtgaggggctgcacttgcttttcttgtgatctgttagtggacgaggtcttccaaggaagtgctttgcacactttctttgctcctttttacagtctttgtctttgcagcaagcaaatgaaattaagccactttgggataatgaacattcagtataattctactttgtctcattttggatctcactgttgtctttataaaaatggcacattttacaaagtagtttattcttattatactttctgctggagagtgccttgaaataaaatgtgagagtattctggtactctgtgttccagatgcatgaaattgggtgaggaataacccctagtctggaatctttgtgaagcatagggttattgcaaggcaaatgggaactaacacatcttgccatttgaatcagggtctccagtttctagaaaaggcagacactggttgggaccaaagtctccatggcacatgactgaagactggtggtcgtgtgtgtgcggagtccacggaagcctcggggaggtggagctgctccttccattccgtcaggacgtgatctgaaaacatgtagagaagatgagttgaggacagcttttctaaggcaatgtgatgtctttgctttcttatttctctttctctgcgttgttagttttgaagagtggaggagctaggggctccagaaagaatcttacacatgtgttgaagacattgatgtcatagggagcggggagctgcattcccttctgggctgttactgctaaatctcagtatgaacagaccaggcggaaagcttggtggccaagcagtctgtgtgcttccccgctgatggagaacgttgcgttgttcacaatagggcctcatgggtgtagccgcatggcagacccatggctggcgcagctgcctgttgccgtctgtcttcagtaactgctgctctgttaactgttctattctgatactacgcgtgttgttttttacaacaggtatgtttttgtttcagaaatatgtattgcttttctcatattttttgcaaattgtattgtcaacatgggtcatttaaagtcctgtatgaaccataacctgctgtggtacctttgtacatgtttgattctgtattctttattccagtgtggcatatgtgcccctctgtatcttttgagaagtgcggaataggttgcttctaccacctgttcttaatgtaacagtaaaagttttcacatttttctcagaactgttatctg

SEQ ID NO: 101760 - DNA, 1743 bp, Homo sapiens
cccagcttgttgtgctacgatgacttggcacctgaggcacattctgttttctagaaaccttcaaagtctggcacgtctcaatgtcagatgtcatcctgtgcccatgagcctactctgggggtctggggggcagcaatggcggctgcgtggtaacggtgggcaccacctgcggctggctttgccgtgtttgtgcacgctgtcttcgggcagagcagagacgccaggtgtcccaagacctgtggctcttgctgcggggcatcggacttctggagggagccccaggagctccgccaggcggcccccagcctccctcgagggagcgagggaacgggccctgcctctgagccgtgagcctatgagtgagcgctctgcggttaaaagttacaggcgctggccaggcaggcgcttcctgtgtgtggccgtctgtttgacgatgcccccctgcagggtagcatcagcgccctgtagacacggcccgtgggtttgggggacaagctcctgttgtcaccgtggctccgcggtgcctcccctcgcagagtccctccaggtcaggctcagagccctctggatgtggaggagctgcatggggtggtaaggtggtttccaaacttctaaagcggctgagaacacttggtccaaaagaaatcctgggaggaagctcagtttataaaacagggaagggcagctttcttgggggaagtatgtgtctgtgcacgcatgcggcaggtgtctgtgcacgcaggtgtgcatcttcatgcgtatgcgtgtatctgcatcagtgtgagcacaatgcagcactgccaagaagtgtgccggtgaacacgtgcgtgtgcaggcgcatgtgtgtgtgttggtgcgaggactctagagcacagctggaggccggtggtgagagtgtgcacatgtgcatgtgcgtgttcgcggggtgggagggctagcttggaagcaggggtgtttccctcagccgtgcgggtggcacgaccctgagcgagcctcacccaaaaggagtctgtttcctcagtggcaccaaaagccctgccctgctggtccctcgggtggggaggtgagctagagggacaggtggacgtcctctggaatcacagcccaaacctgagcagataggccgggaggagcctccctggatggaccctgagagaccctccctccacttgttgcaggggtttacttccctgccctgaccagcctgctgtcgcagaaggtgcgggagagtgagcgagccttcacctacagcatcgtgggcgccggctcccagtttgggtaagtcctggcctaagacggggcccaggagaggccaccaggtgagccccttgccgagtggcccctggtctgcgtgggggatgggccacatgggcttgcagggccaccatggtgaggtgggtcccgcaggcgccttttgggctctgtagcccgaggctgtgctctgcaggtaccagccccgggcaccgcgcttgctttgtgcatatttctgcctttctggagtggctggcaggtgatgaggctgggacttggggacatgggttggaggagtggccacatcatctcattttctttcatctgtgctaacgatgccagatgccgtccccaccatccgctggcccccaccctcgacaggagagtctgtgagcgcaggagcgtctgggccagggtgggcctatcagctggctggagggcggcttgtcctcagggtgggcctatcagctggctggagggcggcttgtcctc

SEQ ID NO: 101761 - DNA, 1065 bp, Homo sapiens
ctgccctgccgggtggtggtcaagagctgcacattcccaggagcagggctggccctgccggagagctttcctgggcagtggtgggcacgggggcgctgtccagcctgagtatcctcttccagatggccagatgccggccctggccccctctaaggccaaactcccccctgcagggctggatcttcaacgtggttccttggttggtggcgattccggccagtctattcagcgggtttctctctgatcatctcatcaatcagggtgagccccagggaggggaccggggctggaagccacaccctggttcacctcgctttcgaggggcaggatgctcccatcctggggctgcagcttcagcacacggagagctgggacagaggggcacttctttccaggctcggcctcctccttaaagggtggggttagactgtggtggagggtctggtctcacggtgactgtggagctcacccctgggggctggatgcagcccctgaccctccaggaaggcacctggaggggtcagaggttacaagcatccttgaacctttggaagagcttctgtctttgttccatgtgctccagacccacgctgggatgagccccgagcgggctgcgtgtttcttcccctagtgcagtgtccgctgcacagacacgtacaggcggatgcacacgcgtgcccacatgctctctccacacgtgtgcctattcttagaatgttcgtgtttttcctaattgcaaaaggaatacacactcgttgtggaaaagctagaaaatctggagcagcagaggaagtggggccgctcgcctgtttccgcctctgtaactgctgtgtggctgttctgtgtttctgcccaaacccacgccttgggaaccttccaaaggcgcacatgcggcctcgcggctgcaccccacatgcgtgtgtgcacacgtttttgcctgcagcacgggatagctgtcttgagccccaagcctcttcctcccctgctgcccctctgcagccattcgggatgggaccccctctggggtgtcagcacgaaagggctaacgggagccccttccttggc

SEQ ID NO: 101762 - DNA, 1431 bp, Homo sapiens
acccatgaggacctctagctcccaaccccacagcctctccaaggacccaggcgccagcagccccaggacacaggggactcagtgtgtgggacttggtcactccatgtcagacacacgagcagagaggaacacaaaccactgtggagcctgaagctccttaagaagagtccacaacagctggtgggagggtggggtgggcctgggtccagaccaggctcgctgctctctgggcctcagtttccccacctgccagcgggctcggccctgtcctcctcacaggctggtgtggccgtcagggtgggtggggttattgttagtaggcgcagcctcattcccaccacgatctgttccgcgtggttcccgccaaacctccctcggtcgccgtgttctccgcaagcctcctgcagcgcccgcctgccaatgtgaggctggcaccaggctgcagcctccccaatcccagcccactttgctgtgtctctggcgggctgtcctccttggtgggagctgtcctgcacactgtaggatgcttaaaggtatccctggcctccacccacccctagccagcagctcccagtcagacaacagccagaaatgtctccagactctgcccagcctccccaggtagccaccctcgagacacgacctcagagtctctgtgtctcctagaagcctgacagagacccccagggcagtgggtgggtggcgggctagagacccttgcctgtgtccgggaccctggcgccgctctcccctcctgtggatccctccgcactaacagtgttctcagtgggcagacgcctgggcaccccttgggccctgcccagcatggccatggcgcaggctctcgaacccgcatggctttcccaggcctggtgattctgctctccagggacggttggcaccttcctcgggggcgggccccacgcaccccagaacacacagacccacctttctggcgttctttctacctcccttttcgttgcctgaggagctggtggtttcatgagttaatgatacatcttgcaaggtgtacacatagagaaaaaaacctaaaaatgtggaaaagcacgccaaagccttatttaaataataactattaaactattcaaaaagaagactgttattttatttaacacctttgttttttaagaatgaacacgtgttaaagactttctgtaactaatttcatgaggaaacgagtgacacgttggaatcaggtcaaaggagaatcccaggaacggactcctaggccgggagtgttgaaatgagcatgccagcagagccaggctgggtttcggggttcctttgccgccaggggtcctgcgtgtccacagatgacagcgatgtaccctgctatcagctgtccacccagctttcccaagatgtggggcccccatggagtcagacagcccagctgtgctgtggaaagac

SEQ ID NO: 101763 - DNA, 1101 bp, Homo sapiens
gctcaggggtaggggacatgggggcatagacccctggccctggcagggcatcctgtgctgctcacttcattatcaccaaccaggatccccaaacctgagtcactggggagccgtggccgccatcagcatggtgggatggagggttggctttcagccctcccaggttccttgattctgaagcaaagatgactttgatgctcaggccccagccagcggaaggacaacaggcttctgccattccatggaccaatgtgggtccaaagggtctaccattctgcacagggccaacttcagggcagctgtccggggctgcagatgctccctcacaggccaggtggggctttcagctgtgacaaagtctggatgtccacccctggtgaagccactaggaggctgtgggggagccgagggtagtgtccaggagccattgagtccatctcaaggctctctctcctcttggatagtgtgtgcccgtgtgcatgtgtgtgcctgagcatatatagggtgccctcagagagtgcattgggtgatgatgactgatgtgggcagtcttttctttgatcaatggaagcaaaatcatttatggcccacgctgagcttccttctctggtttcctgttaaacacagcaaatgtgtgtctccaataaaaagctacacagcaacttaatctctgatcgattgcgaggaaaggaaaataaaaccctgctccctggggatgggcagcctctaggcagttgttcctgatatagaatgtgggcaataaatgcattaaatataaatggagtgacggagaagagcgataaaccctggttcctccacgctaattgaaaaccacgtcaagggttgatgaatgtagaggtcctctggggcagcgggaggccctgaatctgtttgtgctgggcgctcacccttcctggcaggcaggggctatgctctctgtctggggtagggggtggggttgggcaggtggggagggcatttgcagcaggtcccaggagacacccggcatctgcccgcccgagcttgctccacttcctgggagcttccctggacggtctatccgactgttgacctgtcaactccctaagccccagagcgtcc

SEQ ID NO: 101764 - DNA, 2905 bp, Homo sapiens
cacattcagtccatttttagcaaaagaggaggtttcaggttaaatgtttgggtgtcctgcccgctggttttctttattagtttgcatcttgatagatggccagatgagggtggatgtgcctgggatgcatctttttgttttgtttttatttcgagatagggtctctctctgttgcccaggctggagtgcagggcagataatagctcactgcagccgaaaactcatgggctcaagcgatcctctcgcctcagcctcccgaatagctgggattacagggtgcgccaccacactcggcctgggacacctctctagcagagtggtgcagcgtgtgctccttagatcgcacattttcatctttgtatgctgccttgtaaggagactgaaggggcttctagaccctgctactcagggaggccagtgtgggaaaagattcgggtgtaagtctcaagcttgtgtgtcacatacactctggaaaagatgattctcttacgggagtgggcagcaaacctggtcagaggagctttgccttgagccagtctagccgtgggggagtggggaggggcatgctcttccccttggcgtgggagtgagctggggagtgggaagggcctgaactggacaggcccacaccggtcctcctgcccttcattagccacatgacacagcaccttgttagccagttggaaggattttggtgtcctttgtgccactgagaagtttaaatgagataaaatacagaagaacagcttctgtctccctggcctccttgagagcctggtgcgtgccagctcctccctctgagtgcagagaatttcacattgctaagtgtctttccatgtggaatgatagtggcacatgagggaaagacagctgtgggaagtgaggcttcccagcagacaggtggcccatgtgaccgttgtggttgatgcttttctcctggtagagggggtggggagaatgccatgcccagtgtggccagtcccccacagagcaggccccagtgcagctcagagttgtgtgctggtgtggcttgggtaccattcagggtcccgcctccagatttgcaggtgctgctaaggggcagcctcggatctcacttttgggagggattcattggtgtggttactctgcgttcaacttttgttttttctttttacaggaacggcagagtcgaaacaaacaatgagggcgaaccagtttcttacatgttctaacgtttgactttgaaaacagtttaaaacacgtgtgcttggtcagctccagtgtgtcgtcccgtgcgggggttgagtgttgcatctttgcctttcttgtcgttgatttttgcccagatggatctgcatttatttgtactttttctatgtattataatcctgtagaagtcactaataaaggagtattttttttgtcagcttatcaatcagactgatctaatgtgaaatgtaagtatccttaaaaacaaagcatctattttggcagaaattgtgttcttaaattcagtcatttgatattctgtgagacttcatatttctcatccctttattgctttttagcaaacataagaaaccatgagtcattttgtcatttagagtattctgataaaatctcttgaaaatactgaaatcaaaaggttaatgattttttgttcattctgatttgtcattttattatctgttatcggtctaaagtgctaatttacccatttgatttttctgctagacagataacttttaatttttcaaatttggcagacactttttttttttttttgaaaatctttccttccagatctgttgcccactgaacagccacccgtccctcactgtcctggtgtccgattgggctggatggtgttggggcatgatgtgtggaggaactggaaggtgctttaggtctggttcagggtcgggcattctttgttgtttgcacatctttttaaattttacaccttttcttaagaattctaatgccgtcttaagtttttataccaataatgctgagctttaagtgtaggatctggtagtacagacagtgtgatggatgatgctgctggttgtaaatttcatcgtgtgtgtctaattttttttcctgttgaatgggtaaaaacaaaacaaaactttttttagaagatgaatttgctgtcatgttttgtggaatgagggaccgttgagctcactaccacctggagtttgagttgaagcatgaaaatggtgcccatgcctgacgctccagcgcctggatctgcacgtgcccttgtagaggatccttaccgtcctagagagcagacgctttctgaaaactacttgctccaaaagaccctctgagttaacgtttcagctgtatcattagacttgtatttagagcgtgtcacttcctctgaactgttactgcctgaatggagtcctggacgacattgggtttttcctctaggagaatacaagccttaataaacaatactatttagcaaacttggtgtcacctcattcttcaccctacttgatgagtttatgtgttggagctttttaagctgcagagccattcggggagtcaccgtagaaagccctgtgtttctcaaggtgtgggattctcgttccctcgctttggaagagggagctgttaatttccttaagactataaactacatggcaccgtcacccacccctcatcacatgaatgtgcagacgcagcggtgcgtgcagcacctgggcaccgctaccccctttctggacttggctcctcaccgtctctctccattcatcctccaatgcctcttattatttatgcaataagagtttaatacctgtttagtttgttttccttttgaggtaaaatttataagcagtgaaatgcacattgtgtacatctgcagaagttgacaagtatgtgataaagttatgcaatattagcc

SEQ ID NO: 101765 - DNA, 2504 bp, Homo sapiens
cgtggcactgactggtgtcctttctggcaacggtgggacaaatgtgaacatgccagtttcaaagccgacctcgtgggctgccattgccagcaagcctgcaaaaccacagcctaaaatgaaaacaaagagcgggcctgtcatggggggtgggctgccccctccacccataaagcataacatggacattggcacctgggataacaaggggcctgtgccgaaggccccagtcccccagcaggcaccctctccacaggctgccccacagccccagcaggtggctcagcctctcccagcacagcccccagctttggctcaaccgcagtatcagagccctcagcagccaccccagacccgctgggttgccccacgcaacagaaacgcggcgtttgggcagagcggaggggctggcagcgatagcaactctcctggaaacgtccagcctaattctgcccccagcgtcgaatcccaccccgtccttgaaaaactgaaggctgctcacagctacaacccgaaagagtttgagtggaatctgaaaagcgggcgtgtgttcatcatcaagagctactctgaggacgacatccaccgctccattaagtactccatctggtgtagcacagagcacggcaacaagcgcctggacagcgccttccgctgcatgagcagcaaggggcccgtctacctgctcttcagcgtcaatgggagtgggcatttttgtggggtggccgagatgaagtcccccgtggactacggcaccagtgccggggtctggtctcaggacaagtggaaggggaagtttgatgtccagtggatttttgttaaggatgtacccaataaccagctccggcacatcaggctggagaataacgacaacaaaccggtcacaaactcccgggacacccaggaggtgcccttagaaaaagccaagcaagtgctgaaaattatcagttcctacaagcacacaacctccatcttcgacgactttgctcactacgagaagcgccaggaggaggaggaggtggtgcgcaaggtgaggctgggtgttgcaggcaactgccatgcagatgtgtccttggtgccgtacttagaccaggtggcccggtggtgagcagatgcggcaggtccgccgagctgagtctcgtgacaggcagctcccagttggccgcaggtgggcgggcccaggtcctggcagcctcgtgggctttccctgcggagagtactgctagtaaccagtgatggtatttgggtagatgtcaccgaacgactttgatcactttccaattataattgaataattgggaccacagtgtacacattctgtttttctgttacaaagaatttgagggtaactttctcctctcctttttgaattgtgatactttctggaacagtgcttcccagcctccgtccatgaggaacacttaggtgatattcacgaagcactgcggtgggcacgtagggcatcgagaccccacctggccaagggcccttgcttcccagggcactgtccctcagtagttgggaatctctggtctttgatctggaggtcgttgctttatttttcttttaaaaacccagtatcctgcagtttttggaaacaaactcactccatctaggtcgtaaagaaaatggtggtggtggggtaggtttggaatccagacattttataatgacaaatatggatcctatatcaaaaattcattgactgggcctttttgagacagtcctgatttcctgggatacttgtagccaaactcctgagtctgtgctgtcatgtgatgtctgacgggattgagtgtgtttgctcttcagaagggctcagatgcccgtaaactggcaccagcaatgggaaaatgatgatgctgacatacttcataatgcttcctttattcgagagagttcatcctgagattctctcctgctttttaaaaaatatcccttcctgaaatgtcagttgataatagatgggttttcagtgtttttttcagttctctatgttaaaggaattattcacctgtgagcaccaagtgtcctaatgtattttgggcagaaaggcgtgtacatggcatatatagggatgtatagagtagagccgcctgcactgtctgcagtcttacattatgcaagtcctgaacaacttggggcttgtagaactttggaaaagtatcagtccctctcttttgtgagaaaagaagtggatgtcatttatttccagttactgaattctgaattagttactgaaattctgtgttttaggtcttttttttttttttaaatggagttttgctctgttgcccaggctggagtgcagtggcgcaatctcggctcactgcaacctccacctcctgggttcgagtgattgtcctgccttagccttccaggtagctgggattacagacaatagctcggattacagacttttaggtataaaatgaatactgaattgctaaagttgcagggataattgctaatgaagctttaggtccttagctggctaaactggaagc

SEQ ID NO: 101766 - DNA, 1028 bp, Homo sapiens
acccttgaaggattctgggagagctttggtccaggtatgggagagtgtcccaggaggaatgtcaaggcccagaggtgggcgcccagggcctgctgagtaatcagcgagcttggggtctgttctctggagcaaactgcctcacggccctgcacatcctggtttgccaatggaaatatctctgccttacaaagctgtttcagttcccatgatgccgtccgtgtctgtcataagcgttgtcgtcagcaggcaggggtttactcctctacctctggattcctttgcaggtaagagtagagggggctgctaccttgccagttctagagaggcatagcttcgtcatttagcctgaattcagagccttgccaatgatgcttcgtattttgagacggcaccctggtttgtgttcgttattaatttctctgtcttgatttggttctcacattggcgactacagctttctttctggaaggagtagccccatgctgtgcaggttttgtttttgctccacctgtgcttaagcaagaggcggttggcattctcagcatctcgtgttgtagaagtggtgtaacttgtcacgtttgcttttgcagagtaacagttacccctcaatgagcgacccctacctgtccagctattacccgccgtccattggatttccttactccctcaatgaggctccgtggtctactgcaggggaccctccgattccatacctcaccacctacggacagctcagtaacggagaccatcattttatgcacgatgctgtttttgggcagcctgggggcctggggaacaacatctatcagcacaggttcaattttttccctgaaaaccctgcgttctcagcatgggggacaagtgggtctcaaggtcagcagacccagagctccgcgtatgggagcagctacacctaccccccgagctccctgggtggcacggtggttgatgggcagccaggctttcacagcgacaccctcagcaaggcccccgggatgaacagcctggagcagggcatggttggcctg

SEQ ID NO: 101767 - DNA, 1061 bp, Homo sapiens
attacgattaagcctttatttaaaatttatcctaaattattgaaagtttcccgtcccccttctaattagttgtataaacatcagttctatactggttgtactccttttaaaattaaagcataatttctgctagaaatagatggaaatagactttgctaactttgccttccaagcttaaaagtaatcttttaaaatttgagggtaatattttgcaactttttgttctagtacaaaatggttcgttacatcagaaggatacagttcatgacaatgactttgagccctaccttactggacagtcaaatcaggtgagtttattttgttagcatatatttgtttttaagttggttttaattgttttgtacctttactgtcatttctgatttttaaattatcctaaacaacaaagcagcagactataaagtattaggaatgatagactgctcatgaagatgtgactcctgttaaccttgggcatcagtggggtgaaaatgattttccctgtggaggaggcggcatcccactggggctgggatgcaaacaggtctagttggctctagtgtttgtgggtcagtggtgtgtcttgcctttgacgcagtggaggtgtgtgtgtgtttctgaagcttcctggttattcttagctctggatgattggaattgtggtctggggaggcagctaagagctgggctgtggagcgactgtggagccagaggccgcctgggtttcagtcctttttttgagacagcgtctcactcttgccacccaggctggagcgcaatggcgtgatctcagcctgctgcagcctctgcctcccgggttcaagcattcctcctgcctcagcctcgggagtagctggaattgcaggcacccactaccacgtctagctaatttttgtatttttagtagagacggggtttcaccatgttggccaggctggtctcaaactcctgacctcaggtgatccacccgcctcggcctcccagagtgctgggattataggcgtgaggcaccgcgcccagcctggtttcaattttaactccaccactgactggcctgtgtc

SEQ ID NO: 101768 - DNA, 1049 bp, Homo sapiens
ccgccgccgccgccattggagtcgacgcctcctcagtgcgtccgcgtcccgggctcaccgccgctgccgcctcgccaggggcccgcgcgcccagcagccgccgccgccgcccggccggcgcccggggaattggcggcggggcccggggccgcgcgagctagggtgacaggcccggcctctaggggaggcccgagccggcgggcgccccggccccgcgtctagttgttcatgaagcatgtcggccaccagcgtggacacccaggtagcggggccgggttacaggggccgcggccggggccgaggcgcggggtctgggttgaggtcctggggctggaacgcagagcccggggtcgcggaggccgggcccaggcgggaccggggtctcggggccggggtcgcacgtgaccgcgcgtcggggccggcggagctcgcggcccgttggagaccagttctctggtgaataactttgtgtttccctcttcccccgggttgtgtgtaccccacgtcccggcctgcggcggtgcagagaacaaaaggacaagataataaaggtgagcggagtcccgggacggccggcgcgggctggagtggaggaggacggggaaggaacggtccaggaagctgcgtctggaaccggaaactttctctcttccgccagcttcagggagataaaacttgaggttgtgcgacgattctgggagatttgacaggtcgaagacaggggcttctcaagaagtgaataaatgattgctcagagtagtttgggcccgtctctccccaccgcatgatcatggatttgctttggggaaggggaggtaggagagccgggtggacatggccgcaggggttgagcgacttgcctttttccgcccagcaggggctgctctaggagaggggcagtccaaggttctgcaggctaagctccacatccccggtagttgcagcccgttttccaagtctgttagcatctcctgtgacattatggcttgggataaaccctcagagcgcactcatgtgaaaactgttaagtgacacttcacgtttacttg

SEQ ID NO: 101769 - DNA, 1021 bp, Homo sapiens
cagtgtctcgcttgtgtaagcccaacctggcccaccctgtttccccaaacgcctccaaagccggctttccttgaccactgaggaaaatcaaggctgagaggagccagcaggcgtcagttaatgcaggcaggcagagctatggtggccgccagggcacggtgcccgaaggaccaggccccaacctaagcgtcaagggaggtagtaagattgatgggcgctatcagcgggacctgggagccgggtaaaaacaagctgacgctgccacccgggaagggcctgcatgggttcaggagggccgggcacagccggctcagggccccctccgcaggagggctggctgcgcgtggtgctggggcgctcacctggcctaggacaggaaggtgcgcacgcggctgcggacgggggctctgcagatggggcacagctgcaggccgggggcacactcagcacagaccaggtggccgcacggcacaaagacgatggacacggcgcggtccaggcacaccttgcacgtcctctcctcctgcagccgccgcagctgcgcctccacatccctggctcctgggggctcaagaacccaccacgccctctgggcctcggctggactgacccctcctaggaggacaggcctgcgaaatgtccccacaccctggcccccaccctctatgggccatggaaggtcggggtccctcagccctcccctgccccagccctcacccagggggtcccgggcctgcacctggctcctgggcactttcagactggacctctctcctgggtgtgggcagctcagggtacccagaggcagggactgtggacagttaggatagacttgaggcctaactcccaaggagaaagctgggccggcccagatacaggtctgcagcctgtggggtccagttctggccgggagtggaggggctgcagagtatccccgctcccgacacttcttcccacccctcccacagcataacaggatccagaggcttcctggaggcgccaccagagagcctgtcccttg

SEQ ID NO: 101770 - DNA, 1205 bp, Homo sapiens
ccacagggttcagtctggtgggtagggctgcttcccttggggcctcccatgtgcagtgggtgtgggacccaggcatgcgcggtgcagggtctgattgcagtgagtcccagccagcccagtgtgaattgggggtcttgggtgtattgcagtgagccccagccagcccaggtgtgaattggggggtcttagatgtattgcagtgacccccagctgcccaggtgtgaattgggggtcttgggtgtattgcagtgacccccagctgcccaggtgtgaattgggggtcttgggtgtagagaagcgctaacacttagaagaaaagcataacacattttctgcgtggaatctgctggacctataaatgaatttttatccccaaagctgtcatattaagttgttttgatccttcttctagtacttctgtggctggctttggggacttgctggggaccctgtggtgatgtggcaggagggtctttttaaatgatcagaaagcacatctctctgctgccacaggaggcagcgtgcatgtcctgtgcgtggggacgttggcacgtcccccagagccccagccttgcctgtgttcagggccccacgccctcgggaggagcagggttcatgccagcatcttcggcctcttgtccgctttgttttcagggcccaggggaatcgctacgtggggtttgggaacacgccaccgcctcagaagaaagaagatgacttcctcaacaacgccatgtcctccctgtactcggtgaggacttggccctgcagagcatctcccatgggcagaccccgccctgagggcacgacgggccatagtgggcagtgtggcagtcctggaacatgtgctctttgccttgttctgatctaaggacccctcccttaccttcagcgacgttttctttcaaaaatgtggcttaaatttttcagatcccaaatgtattcaatcacttcctttttttttttttttttaagacggagtcttgctttgtcgcccaggctgcagactggagggcagtggtgcgacctcagctcactgcaacctctgcctcccaggttcaggtgattctcctgcctcagcctcctgagtagctgggattataggcacctactatcacgtcaggctaatttttgtatttttagtagagatgggttttcaccaggttggccaggttggtttcgaactcctgacttcaggtgatctg

SEQ ID NO: 101771 - DNA, 1050 bp, Homo sapiens
gtgtggcctcgactccactgacccaggatcaggagaggctgagctcctttctcagcagcttcttcctatggccccagcctccgtgccctcttccctccaggggggactcggtgcctgcctggggaggaaggagaggcgttgcaggtcagcatggggtggctgcagccggcgttggcctcaggcacaggctccacagggcctgttcccaccagcccggcccggcagggccgcatggtggcgcgtgagggaggaccctggagggggaccttcctgcaagaattggtgggggccgcggtctccgccttctagaggtggcggcctactgcccttcgggtgttgtgtgcaaagccccgtttcctgctccctgcgcttgtatcctgctgccttccctcctgctggtgaagctcgtgctgccctttgctggcctgtgctgccactgccgacccgtgtcccgtggtggagctgtcgtggggctcacgtgacttcccttcctacaggcgtccgagctgggccacagcctgaacgagaacgtcctcaagcctgcgcaggagaaggtaacgggcagctccgggtggttgtgcctggagcccttcactccaggggacgtgggtgtgtcaggggtgttagggggattgtttgtccagcagctgggactcagcgaggccaagcctcacaccccacctctccagcacaggcgtcctcctcggggcctgggctcctcttggaccccccagctggtcccttcccctggcctagggcctcccttgcagtgcccccagcccagcacccccagcccacctccgttcctctgcctcacccctacagctggccccagagcccagcacccccagcccacctccgttcctctgcctcacccccacagctggccgcggagctgtgcccagaggaggctctggtatgggaatgatgcctgccatcctagggggtcaagagccccgccagctccctgcctccttcggggcctgactgggacaagtggggaagacccacctggggcagcgtgggctgtccttaggtcacgttgctatt

SEQ ID NO: 101772 - DNA, 1029 bp, Homo sapiens
gccggcaggggccacgtttgcagacaccaggcctcacagtgacatggtttcttgatgctggaatccctttggggccactgtagaactttctggggctcagcctgatgggtatccacatgcccctgatatttcggatgccctcacccgggggattcctgcactcctgaagctttaagctttcatctctcccgcccccattaatgccgctgtcttcatccgtgcaggtgaaggagggaaagatttttgatgatgtctccagtggggtctctcagttggcgtccaaggtagggagcctgccagatacgcgggcacagtcgaagccagtctccatattccacggccctgggcgtgagagcagggtgtgccccgtgcagccctcagcccagcttggcagtggccgctgtcctctgagacgggaggagagctgcccagcctgacagcccgagggatatggaaacaacttggcccactgcggcccggtcagccactaactgtcacttctccctctgctcttatcttgctgctgctggccttttcctcggtaagtaagtgccagcgccgtctttgctgccatcagtcccactgctctgcgggccatttggggcgtgcattttgtcctgtttcctggcatgaggcgctctgcggacagacggggagggaagagcaggcctcgctcctcccccccaagcatgtggtgggagctcttgaggtctgtgcacgaggctgtcctcgctgccatgtcccgcacacacctggcaccgctgcagagtggccggggcgtctgtgtctgtacgtgtgtgcgaggcaccccttgtttctggattttgcctgggtcttctcagcgggacggcgcgtgccggcttgcgtgtgggggcctcctgaagctgcctgtgccgcgacagggcctgcctaacctctcttcccgtctccttccaggtccagggagtcggtagtaagggatggcgggacgtcaccacctttttttcggggaaagcagagggccccttggacaggtatgctgtgtcccct

SEQ ID NO: 101773 - DNA, 1045 bp, Homo sapiens
gcctgccccccgtgcctgctgacatggtcttcctggtggacgggtcctggagcattggccacagtcacttccagcaggtcaaggacttcctggccagtgtcatcgcaccctttgaaatcgggccggataaggtccaagtaggtgggtgctggcccggcccgcctcctgccccacccgggtgtggtccccacagctctgccagaggaggctgtgacctgtgggggtccccgtaccagccagggctctcaccttgtggggtgggacgcctgctccacatggggtgttctggggacccctccgtgtggaggccctggctctgcaagcgtcctctccctggggactggctactgtggccaggtgaccccacagaggcacgtgcagctctcaggtgtggccttgtgccaagctccctgggcatctcagcattggaaactcagcccgtggccatgcccctgctccccaggcctgactcagtacagcggggatgctcagactgagtgggacctgaactccctcagcaccaaggaacaggtgctggcagctgtgcgccgcctccgctacaagggggggaacacgttcacaggtacggcccaggcctgcccctccctctgtcctgagggcggacctccttctgccgccctcccagatcccgaaagcttgtgtgtaaatcgagctccaagtggtgtggacctgagccctgttcacacctttatagagggcagagtcacccccttgtttacctttgatgaaaacgagggcctgtgtccagcgcgtggctcctctgttccacattagcagctctggctgggtccacacccggcccagtctgggtgctcaccttgcaggtagggtctggctggggaacttggggcccttcaacaggtagaccctccctgctcccttgggctgctgcggggcctcctgataccccacaagggaaggagaggagcatctctgctgtccggttgctgccagccgagcaccaggaggggatgctggcagctgcctgtcactttattcctgctgctcccaaggccttgccctg

SEQ ID NO: 101774 - DNA, 1012 bp, Homo sapiens
ccccagggactgccatgagcccgtctgtaatagccttgttgagatgtaatttacacaccatacaacctgcccatttaaagtgtacaactccagtggctttggtatattcagagctgtcacccatggccacagttcatgttagatcattttcatccccccagaggaaccctgcacccctaagcacccgcccccccagccaccccaagccaccttctgtctctggatgtgcctgtcccagacgtttcctgcaggtggaatcacacagtgcagacttttgtgtctgggtgtttcccaaagcccttttcaccccccggaggccacattcctcccatgacctcaaggcagatggccttagacaaaactgtggggtggccttgtgtccccagagctggagccacaaaccttggcccaaggtgaagcctgggaagtgccactttgaatcctgtgcacctgccaggcggtggccgtgcccacccactctggtgtgagggtgccccgtgcgtgggtgtgatctctgtgtgggctccttcctaaagtgtccctgcatggccccccagcacctctgcctccgccccgggcgctgaccctggccgcagtgacgcccagaaccgtccacctcacctggcagccctcggccggggccacccactacctggtgcgatgttctcctgcttcccccaagggtgaagaggaggagcgagaggtgagctgggccggggggtggcgggggaggcagaggagtggggcagagcgagtgggggctggcctgggacgtcatgtctctgcaggtgcaggtcgggcggcccgaggtgctgctggatggcctggaacctggcagggactatgaggtctcggtgcagagcctgcgaggccctgagggcagcgaggcccggggcatccgtgccaggacccgtgagtgctccaaccccggctgcctgcccacaggcgggtgccccatcttgttcctcagccttccatggcatgggagacctcaggccccctcggtcccagc

SEQ ID NO: 101775 - DNA, 1050 bp, Homo sapiens
agacagttcacatcaagtgttttgggagcctgccctgggtcagtgctgagccaggtggggatgggcacccggacgggtgtgatggatgggggtatagggtgctcctgggtgtggctgcccctcctctgaggtgcccaggctcaggggctacacccccagcctgtgtctccacttccttcagagaaagctcccagcccaagccagctgtccatgacggagctgccaggggatgcagtccagctggcgtgggtggccgcagccccgtctggcgtgcttgtctaccagatcacgtggacgcccctgggagaggggaaggctcacgaggtgggcaggggtgggtttgtccttccgaggggccccccgtgggcccctagtcctgaagccaaagtctagggctcagagccatatgtgcgcccaccctgtctcccagggatgcctcactgcccggccccccaacctgaggaccccactgcacccggtgacccctggggctctcctctccctagatctctgtcccagggaacctcggcacggccgtcctgcctggcctagggaggcacacagagtacgacgtcaccatcttggcctactacagggacggggcccgcagtgaccctgtgtccctccgctataccccctgtaggtgcccctccacttcccctctgctgggtgtggggcagggatggcccaggggatccctgactcacccgctgcacaggcccaggaccctagactcccagaactgctggctccagagccctgatcactgggcctggtcgttggagtctgcagcacttccttgagctcacacgggtataggtgttcccccagtggccgagtgcacaaaccacctagtgtcccgcagggcagcccaggcagcagccctggttgggggtatggtgagggccctggcaggtggcgtggtgtgggtgtggtggggtgcggtgtgggcagtggcaggggtgtggtgtggttgtgccaggggggtgatgcgggctgtggtaggggtgtggcatgatgtggtggaggcattacgcagagcagggtagg

SEQ ID NO: 101776 - DNA, 1040 bp, Homo sapiens
aggaccagacctgctgcctgtgcccagggaggggccctgacaccctctgtccccgtcagaacagggccccaagccactgcattgctccgtcctcacatgccctccctttcctcgcaggggagcctggagctgttggtcagatgggcagccctgggcagcagggggctagcacccagggcctctgggagtgacaggtgagcccctgctgcctgcatctatctgccaaggctgagggcatccaggaaggaggagctcctgaggggccaacgggtggggcctcatgctgtccagggtggggtgctgggagcacaaggcccagcagaggcaggcgaggtggccctggggaaagtagggtcaactatggaccccgtaggggcaacaggaatgtggggtcacagggtgtggggtcacagggcgtggggtcacaggacgtggggttccggagatggattggcgtgctgggagtctgctgcacctcgtgggatgcagagttgcgtgctggggcggaggaggccctgaccagggttagcgcagcagggagagtggagctcaggtgtttgctcagtgggcacctggtccaagtgtgggaaagctcacaggagtcccaggaggggcctgtgaggccctgggtatgtcgatgagagaggcagggtgggggccatagtagcaccaggtaacctctgccttcctcaggaagcgctgggcaggcggaccctgtgtgcaaacttagctgaggggctggtcccagcagcaggtgtggggacagggtcccaggagcaggtggtgggtacagcacaactccggcctcaagtagcttcaggggccagagcgtggcgcagggtgtgtgacctggggcccatgaggggccggcacctttgagctaggggactcggcaggggctaggagggctgaggagcacaggcaggagacccaggggctcctggtaaggctggggcaagagggcagctgcctgagatgcccaagaatcaggtcagagcccagggctaagaacaagcagccttgcttctcctccacagacc

SEQ ID NO: 101777 - DNA, 1056 bp, Homo sapiens
ggggtggggatggggttgggctctgcgtcccactgagtctcattcctctgtccccgagccgagctctcctgggccagggtctcgtcaggaggtgcctgagagcagaatgaataattgaggttaggaacccggcatgccgagtgccccagaaatgccgctgtgtccccgcgggcagtgacgtgagtggggaggagactcaggcccacattgcccacacctgcctctgaactgctgctggtcacccccacccccgggtgcctgtgaccggggtcctgaggctggggcttttgtgccaggagtgggtgggacacagagacccccgtgccaaatcctgggcatccccagccccctggcccctcccacatcccccgtgtattcaggaccccatctgctgagctctgacctgcccccgctctgccatcagcccctgctgctcctcggccagagctcccaggacgcagggagaccctgggagagtgaggtcatcccggggccatggaagctggcaggagacactggtctcagaggagggatagagacgcagatttcagatgtaagaagcccgatccacattgcataagtggacccagctgccagatgtgtgggcagctgcagggagtggcccggggtgctgggcccagctgtggttgttcttttctgggtcaggagtgactgcggagtggctgggacgctcctgccgggggaccctcctgccgggggtggccgcttgcctgggggaagacccctttccctttctttttttttttgaggctcaaaaaaaaaatccaaataaagcaccatattcccaccacgccaaattaaccttgacaacaatgttggcgtatttgcgtccagtgctgtttttattaattaaggtaaaatttacatatggtgagatgcatgctcttcagtggagacccagcccctagaaggtccctccagcccttcctgtcggcgtccctccccatctgtggctctgacttaagcaccgtggattgacctctccggctcacgaccttcgaggagtcagaatcctgcagttggagcctttgatgt

SEQ ID NO: 101778 - DNA, 1029 bp, Homo sapiens
tgtgccaggtacggacgccctggaccctgcgaacaggtggggcgggcgaggggcccaagggacgggctccagagacacgcgcagggcaggaggggtctcacggaggggtctcgcactgaggcgcccagagctggtggtcccgctggacgccatccctctgcccgggatccacacggcccacgtgtgcccgccatgcccgcgccccacgccattgcagtctgccatcctctggccgtgacggtggctgcagcttccccatttgcgccgttgcctctggctgtctgcacttttgttcatgctccaaagaacatttcataatgccttcagtaccgacgtacacttctgaccattttgtatgtgtccttgtgccgtagtgaccaggcctttttttggtggatgtgttaccccgcacacttcaatctcaactttgtgcaccgtccattttctagggatagacgcccagggaatgaactctagttttctaacagattagctgagatattaacttactcacacggacaggttgatgccagagccgtaagaatgcgccagtgcgggtttgcgggggacttcgggtgtggggtcctgcggccgcgatggccgtggaaggttctggggatccctgctgccacggggacgagttcggacgccaggtggacctgtgcactcagtaaaacgcagtgattcaacctggacggtgtgtggcctcctcactcccactgtctctgggcggccggtctgagggccggggacttctggtcgatgctggggctgagtcgggtgcggtgctgtggaccgggtgtggggacggatggtccctctcctcagggcacgaacgagctggggtgttgtgaaacagtggggctgggggccacagtgagtgaggagcaggggcggctgggtcctagggctctggccagaggaggggccgctgtggggctgctgtggtccctgggctctctcttggggcgccgagctctccctcccctctgaggcctgcagccacccagaaagatgctggggcctggg

SEQ ID NO: 101779 - DNA, 1938 bp, Homo sapiens
ccggtgtgaggaggggcgggagtgatgacggggtgttgccagcgtggcaacaggcggggggttgtctcagccgagcccaggggaggcacaaagggcaggcctgttccctgaggacctgcgcaaagggcgggcctgtttggtgaggacctgcggccttgggtcccggtggggtttccgggcagctacaggcgggtgtggccggccgctgtgcgtggcctctgccttcacacctgacctgcccggcgggctttcctgttccccacctcaggggcgcccaaatacagagctattggttggcgtcttctccctgtaccttctgggatctgagggctctttccatggaagccagccccgaggtggagaccttcgcctgcagccgaggagcgggtggggcctgggaaccaaactggagccagagtggacgtccagccctctggtcttggcctccagagggagggcctggctcacggtggggccagggagccggctccaaagggtcttcaaaaagggggtccttgggggctccagctgcctcgccctggcctttctgtgggtgcgtgagagccagcagcaccccagccttggagaccgggggggcaggaccccaagtcctcccctctctcctgactgccctggccgggtgccggcactgcgagacccacctggtgagcaggcctcacagttcttagccagggccccacctcgcctgtgtcccaccagtgccccgacagacctggggcagggctgggccatgatgcagcgggccaggatagcctccaccgtcagcacagggccgccctccccgcctttccggaggaaaccactcccacctcagcccagctgtgcgccctccctagctctcctgccccctggagctgatggccccttctccactgaccgattccttagcggggcctcttggggtctcgggcctcgggtgcaccgtcccatgcccgtcctgttgtgggcaccgtggcccttggggcaggcggctctaatgcgggagcgagtccctagctccagacttaagaaccagaccccgggagcatctggcatttggcgtgacggcgtcgcaggcgggcctgggctccctggagagtggcctccctgggagtgagcagggctggggtcgtgggcgcaaatactcctgcagagcaagtgcaggggagtcctgggcccgtttctcctccacctgcgttttcagtgcacttggcttggctgggaggtcctgaggccctgaggccagcaggggaaccagtcctgagggagaggactttgaaagcagcatttgagggtcgtacgcccctggctggtgggggtcctggcgctcagggtgttcggggagccatgtctggcgtccattgtggggagctgctgccctggcctctctgcctacccccagcccggccagggcactcccaggccctgtcgccattgaggtgcctccgctgggctgtctcctcacccctccctgtgctggagcctgtcccaaaaaggtgccaactgggaggcctcggaagccactgtccaggctcccactgcctgtctgctctgttcccaaaggcagcgtgtgtggcctcgggccctgcggtggcatgaagcatcccttctggtgtgggcatcgctacgtgttttgggggcagcgtttcacggcggtgcccttgctgtctcccttgggctggctcgagcctggggtccatgtccctttgccgtcccgtcatggggcagggaatccatagcggggcccacaggcaggggtatgagtgcgtcccacccaacgcagcaccagccccggccaccgctccccgtgtccccagttccgtctcagctacctggactccaggaccctggagaagggagacctggcagtggagggaggctgtgctgtgtgtccccctgcaggtgtgaccccgcctgctctttcctcccccgccaggt

SEQ ID NO: 101780 - DNA, 1049 bp, Homo sapiens
ggggcccgcgccgccccccgcgctccgcccccgctgagcctgagcccgacccggggcgcctcccgccaggcaccatggtgcagaagtcgcgcaacggcggcgtataccccggcccgagcggggagaagaagctgaaggtgggcttcgtggggctggaccccggcgcgcccgactccacccgggacggggcgctgctgatcgccggctccgaggcccccaagcgcggcagcatcctcagcaaacctcgcgcgggcggcgcgggcgccgggaagccccccaagcgcaacgccttctaccgcaagctgcagaatttcctctacaacgtgctggagcggccgcgcggctgggcgttcatctaccacgcctacgtgtgagtggccggcggggcccccgtggcgacccccatggcgacccccatcggcgaccccatcggcgaccccggccaggctggctgcggcgggtttggctccctgcccctgggtctgggtccggggccggcgctccccggcgggagtgctgggccgagaccggagagcgattgtacagcgcgcgggcaggaaggattccggggtcggggccgctcaggtcggggtgggggctccaggcccgcaggacagagacgtgcggccgccccagccccctcctcagcctgggaggcccctccccgcggcctctgcgccgaacaaagggccggccggggagggacggcggcagcgctgggtctggactctccgggactctcggggacccgcggggctggggccgcccgaccaagcgagggcgggggggaggggtctggcctgtcctccgccatcctcccgagccgctctccctcagactagggtgagcttctgggttcctgagatgggggaggggccctcccatgacccccccaccccagcccgggctgagcgcagctgtctgtcctgccccctcggcgccgacgcccctccctggccccgcgaaccccctcagctcctgcgctcagctcctgcgctgtcccatctctgcagccgccggccgcccccgtgcacatcccgggctcagga

SEQ ID NO: 101781 - DNA, 1105 bp, Homo sapiens
attgttgcacatgtactgagggtgtttttaagtgaattgcttagtaggcttctaggaagagtcagatttatagcattttcaaccaaaataatggtgagtgcctaggcttcccgagttagctctttgggtggcccctgagcccctgtgagtgcacttgaccgggtgcggaggtcctgggcagcctgtccctgagccggcccctcccaggggtctgagatccatgaggtgtgtccctagggcttcagtcctggggcagaggcataaacagaaccagtcactatggaggtcgaggattcccatgtgggcccttcagcttgggctgcttggccacggaacagcccttggctccctggcccccggcccccatgcagcccctgggctggcccttggtggtctctgtccaagggagagcccctgggtgttcaggaggctgccccgggtgggctgctcagggcagctgccgaaggtggagcccagagcctgtctggaagggctgtctgtggctgtcctgagacctggccttggactcacaaggaagaccaggctgaggcccctccaggccagggtcctggggcaggcatctcagggagcagccagcccaggcctcctgccgtctccaacagggcatgtcccgggaggaccctgagtgccagattcccctggacgctcctgctgattctgtcggcagttgaaggcccgtctgaggccccgcaatgcgagggtcctgtgtcccacttcactgctccgaagggaactggctggctgtccgtccagtgagcggcccagaccccacctctgcgccattgtcaccagggccctgtcctggctgccctcacccatgtcaagctactgaggctgtgtcttgtttgttttctctgttacatttttgtttgctgttgtcacagtcagctggtttcggcgtgatgttgatcttttgatgtacatactccgttttaaactcatttccactctagttgagttctgcagcatgcagcggtatgaccctacgggggtcaggagagccctgcggcccccacccaccagctcagaacctgtcactaatacagctgcctgtgaccctgggacccgcaaccttccagctgct

SEQ ID NO: 101782 - DNA, 1904 bp, Homo sapiens
gtcaggaggaagcatttccattagaggggcagccggtggccagcctcacttggaaggtctttgaacctcgggggtgcagggaggtggcagtggtgcaggttgccttctcctgggttccttgaggtgccctcttgtacccggctcacacccttcccctccccgagtttcctgctcaggttcccgtctgagagcttgtatgtaggacgtcagataggacagcataaatgtttggatccagaaacgcagaacagtttcctattttgagacttgacacctaattagtcatcttactatttaagctgaaaaatagtgtcgtgttttgggtaacgttctgcaaatcgtttgctaatggcggctgagttgcttcacgccctttagggcaagagtgggacttgcctgtggacttctccgcggtcccacagggctctcgccacctggcagtggcctctgcatctgcaaagagctgcccgctggctgccgaagcttgtctcagggcagcttgtgtggcctcgcctcttcctggcttccccgtaacccttgctccgaactccgttcagaaggtgaatggcatcctggagagccctacgggtacagggaagacgctgtgcctgctgtgcaccacgctggcctggcgagaacacctccgagacggcatctctgcccgcaagattgccgagagggcgcaaggagagcttttcccggatcgggccttgtcatcctggggcaacgctgctgctgctgctggagaccccataggtgaccctagttcccaggcctctcctggcctcctgtggggatggttggcaagggatggcgctgagggtggggtgggcccatggggactcctgccgtctctcaagcagaactcaaggagaattttttagctgctgtataatttctcgccatcgtgggtgtaaacctagggttgggcttttttgctgaattagggcacggcagatgcccacttcacccatttttgataaaccagtatctggggtgtcagattcttggctgtctgcagggccgagttagccgaatgccacctgcctttgatacgtgagaacgttgtctgagaaccgtgacttctgtgcttgcttgtgtctggtcagcttgctacacggacatcccaaagattatttacgcctccaggacccactcgcaactcacacaggtcatcaacgagcttcggaacacctcctaccggtgggtcagacgagtttacacctgtctcggggtcctcaagagaaccagcttggcatggtgctgagtccacagccccatgctgtgctgtggtggagggtggtggtctttctagacgctcccccgaagtgtgcagagcgctggtgcccaggggtggggtgcggcctgggctgcctccaatgcccattacttgtgaggaagcagctttgcatctgtgtgctgaccttgggcgggcgtcctgagctcctcgcaggtgctgttgtagcagctgtgcagtaggtcagggctggcccccagtgcagctttgcacatgaagtaggaggaggccctgctgcttgtcagagcccagcagagtcttggtgttctgtcgggttcctgtggccggaccagtggcagggtgctgtggaagctgtcgaatctcctccctctgtccagtacccccgctcgtcttctagctccctcctacgcccgggccacgtttcagttatgctcacttcctctgaccgccgaggctcctgcgtgtctccatacagctcacgctgcagggccacgctgtgggtgttggagacagctcctcctcgacccacggtgctctctcccaccaggcctaaggtgtgtgtgctgggctcccgggagcagctgtgcatccatcctgaggtgaagaaacaagagagtaaccatctacaggtaggctcctgggctcc

SEQ ID NO: 101783 - DNA, 1114 bp, Homo sapiens
cctcccctgccttccctgctatccctgggagtatctggggttgggtcatcgctggtgtgtgtgagtgtgtgtgtgtgtgtatgtgcacgtgtgcatatgtgtgcgcttctggcctctgcagctgagtcctggccctcggggggcctggcacctcctggggacaggcacaaagcagccatgatggagtcgggagctgggggaggccccattgccccacgtggctgccctgtgactctggggtgcttgttagaagaggtatctggttctgtctgtgtttaagcaactccctaaggaattcttgtggttccagtttggggggcctgtactgtagaggcaagggaggggcaggacatcccccagactctgacttctgaagccttttctgcccggggcctctccgccagtacaggcagtgtcctttgccagggctgccatgctgcagaggggagtgggccactgtttagcccaggaaaacctggctctcccttagctggaagttctgggcctgttgtggttggcagggaagctgagtgacggtgctaatcacaggggcacctgcaggggtttgtgggagatgcctctgtgggttggggcgataggctgaggggctgttcttccctgccctgaggagggctgagtgtagccgccactcctgtcctgtcttgggctgtctcggagaggatgcgtagaaccctcgggatcctgctggcctccgtctggtccaccctgaacctcaggccttctgggggcagaggaggattccctcaggatcactcgggtgggggcctctcttgggcacctgagaccctcagtgggtgctttgtggcgcgttcacggttggtgggggacgcccagccctgcccgccgtgtaggagccgttctgtcctgggcatccccctgtggtctgggacttagtggaccctgagggtgtgtgtttacccctgcctcacacctgcagaaaaaagcctggagcaggagctggccagccccatcctggacattgaggacttggtcaagagcggaagcaagcacaggtgagacccctcagtgaggccacgaccactgtccttccatggcccagctctcctgtgacctgtggaggcccggatatatt

SEQ ID NO: 101784 - DNA, 1051 bp, Homo sapiens
gcacacacacccacggaacagcacacacactcccacggaacagcacacacacccacggaacggcacacactcccacggaacggcacactctcccacggaacagcacactctcccacggaacagcacacacactcccacggaacagcacacacacccacggaacggcacacactcccacggaacagcagactctcccacggaacagcacacacactcccacagacagcacacacacacccacggaacagcacactctcccacgcggggccgctgggtttcctgcagtttctcctcctccaggcctttccctggaccctggtccagtccgtcatttgagcacaggtgcctgttagaacgagaccttcttgttaggacgatgagtgtcccagccaccacctcttttggactccgggaggcctggaacgttctgaacgctccgtggggctccagtcttctccgcagccagggcagcagggtttgctgtctgtcctgcaggcagatgaggagtcagggctggggcctgtgtgggggctctcctgagcgcacagccgccgaggtggagcgtgttctgcctgagcgccgacctggtcgggggaatcccagttgcttccaggtggagccactgtcctcagcgtaatgctcaaggctctggcctggctcctcggccaccctgcaccctcagggtcccctcctgtagcttctgctgccccatcactgtcactctccaaagctttggggactctgcccagagccaccgcctcccagaagcccctgacaacctcttgacgaccccctagtgaccccatccctcccctctgacggcggcccctgctctgaggcggcttcttttcctcggtgctgttctcgtgctggccaggcctcctctccccacctggaggctcctgagggcggaggcctctcacctccaatgctggcgtcccctggagggctgaatttgtttccgagggaaggaaacttccacagttgttgccttcagttccaaagctgcagcctgatttccccctccaggctcgagcctgttttcttctcg

SEQ ID NO: 101785 - DNA, 1051 bp, Homo sapiens; identical to SEQ ID NO: 101784

SEQ ID NO: 101786 - DNA, 1051 bp, Homo sapiens; identical to SEQ ID NO: 101784

SEQ ID NO: 101787 - DNA, 1050 bp, Homo sapiens
gaaggtgctgagctactggtgcttcagtcccggccacagcatgcacgagctggtccgccagggcgtccgctccctcatccttaccagcggcacgctggccccggtgtcctcctttgctctggagatgcagatgtacgggccacccctgccagggcctgagcaccggtgacacctctgacatcagcggggtggaagtggtgggggtccccatgagccgggtgctgggggtctcgggcctcgagggctaaaggggtgctggtgcacttccccactgtctgctccctctggccacgctcagccctttcccagtctgcctggagaacccacacatcatcgacaagcaccagatctgggtgggggtcgtccccagaggccccgatggagcccagttgagctccgcgtttgacagacggtgagggcctgtccctgggccctgctggggtgggaggtgggggagcactgaggcctgaggtcctgagcagtggcctctccggctctaggttttccgaggagtgcttatcctccctggggaaggctctgggtgagtgccctgaatgccccagctgtgcccatcctggatcctggacccctgctcccaagagctggtagggaaccctgcagacatcctgcccctgccttgaccccggcccctgcacttccaggcaacatcgcccgcgtggtgccctatgggctcctgatcttcttcccttcctatcctgtcatggagaagagcctggagttctggcgggtgcgtctcccctgtgttctgggcggggtgggtgagggcagggctggagcatgaagcaggcagtggtcacagctcctgcttgccctcatcggatcggcggcgtgaccagggctgccgtgtccctgcctcttcctcccacaggcccgcgacttggccaggaagatggaggcgctgaagccgctgtttgtggagcccaggagcaaaggcagcttctccgaggtcggcacttggccggggctctgggcctgctgccccctcgtgcctcccctgcctctcacagcttccccaaggctgaccactgg

SEQ ID NO: 101788 - DNA, 1081 bp, Homo sapiens
ttccgtgttggtctggggtgtgtagagagatgggcactgctcatccggaagcccctccttgtgcgctgccatcctgggagcctcagccgcatccgctgtggggcagggggcttgagggaggaggagagagacgggccatgcaggacccctggcttgaggcagagccaatctaccctttgcccattcactgctctcagttccctgccagcctctcactgtgtgacctcagacgggcccagccccacagctttcttcccgcagcccctccctatgtccatccagccagccagtttctcaggcagcagccccacctcggcagtcactgtcccagggaacgctcaatgttccaaggaaggctctgcagccccagggaccagatgatgaggctggccctgatggagcctcgggcctgtgtcctgcaggaggagcccgtggctggtgcacagacggacagggccaagctcttcatggtggccgtgaagcaggagttgagccaagccaactttgccaccttcacccaggccctgcaggactacaagggttccgatgacttcgccgccctggccgcctgtctcggccccctctttgctgaggaccccaagaagcacaacctgctccaaggtgccctggcttgcagaggccacccaccctgagggcagtgctgccgccgcgtgtggggtgggggccatctgggtccaaggtggtctctgttctctagagaaaaaggggcagatggggacagacgccccttcctctacaggcttctaccagtttgtgcggccccaccataagcagcagtttgaggaggtctgtatccagctgacaggacgaggctgtggctatcggcctgagcacagcattccccgaaggcagcgggcacagccggtcctggaccccactggtaaatggggccccaggtgggaccctcagactcctgcgtggaaggcagtgtgggccagagtcctgggctgcttggggtgggcatcctcgggccctgcttggccccgcctctctgttcccctatgggagtgatgggggcctccacctccaccaccagcaccagcagcaccacctccacctc

SEQ ID NO: 101789 - DNA, 1333 bp, Homo sapiens
gttcccctagttcacccaggggggaacctagcctgttgggacgaccccagatcccttctgggcttggtactcactgggatatcctcatgcctgcacccagcctacggctctgagctcctgagtggggctttggcctgcccgccactgttccagcccccatccagcaggctggtgtctcctctgatgcccccagcacccaggcgtgtacctgcctgggttttcccgccctggtctgaggtgggtgaggcctggcctccctagccagccctgcccccccaccccagggaactttccagatgctctcgaccagctttgtggctctacatctcttcatcaggaagaacggcgccggatcccaagctgaccgtgtccacggctgcagcccagcagctggacccccaagagcacctgaaccagggcaggccccacctgtcgcccaggccacccccaacaggtagctgactcctgaaccgtgtgcagcctacgacttggtgggtccctcagtggcttcacgaggctaactcttgagtgtggccggggctgcccctgtggggagccatctcatggtggggactgctcccggttctgcaccccgcagttgtcctgagcagctctccaggagttcctggaggaagggcgggcagggcggtgggactctcagtcctccaccccagcgccactctgagccatgctactcccacaccaggagaccctggcagccaaccacagtgggggtctggagtgcccagagcagggaagcagggccagcacgccgtgagcgcctacctggctgatgcccgcagggccctggggtccgcgggctgtagccaactcttggcagcgctgacagcctataagcaagacgacgacctcgacaaggtgctggctgtgttggccgccctgaccactgcaaagccagaggacttccccctgctgcacagcaagtggccctggcgtggggaacagccggtggggtggggggcaggggacaaaatgggggctgtgccgggtctgattgaagctccccgcagggttcagcatgtttgtgcgtccacaccacaagcagcgcttctcacagacgtgcacagacctgaccggccggccctacccgggcatggagccaccgggaccccaggaggagaggcttgccgtgcctcctgtgcttacccacagggctccccaaccaggtagggcacctgcctggctgctcctggcagcgccccaaccgcacgcagccctgggagtgagcagcaaagccccaggcccccctcagactcaagtctctgtctccaggcccctcacggtccgagaagaccgggaagacccagagcaa

SEQ ID NO: 101790 - DNA, 1073 bp, Homo sapiens
ggtacggggcaggggtctcccctcggaggaaaaggggaggggagggctgctttttgaagactgggcaggtggttgtgagcagaagccaccatgactgcagactgcctccatcactgatgcagggctcccacctctccatcatccccggctgtgtgggcccctgggacctgcctccgccactgcccaggaggcctcagtcctcagcgccccacctcggggctcagggtgtcccccagggaggggatggggggtggactccttggagccgtgtggacgtctagtttgtctcaggcactaccagccatgttcagcctcgggctgagcacagggtcctcactgctgtggtctctgtgggagacactgggaccctggtggagctctggctgtttccctggggtgaagggcatacgcccttctgagagtcccgggcccacaggcaggacagggccagacgtgggggctgctcctcacggccttacctcccccagacgtgcctctcaatccctgacatcaagacggccttcagcgactgcaccagcaagatcggcaggcgagattgcctgacccaggcctgctcggccctcacagggtgagtgggggctgcacctgcgggggctttggggaccgagaccccccgcctcacacccgctgtcttcacagcaaaggggtgcgcgagggcatcgagtggatggtgaagtgtgtcgtgcggaatgtgcaccggccgccgcggcagagggacatcacgtaggcgcagccgcgctgccgtcgggacggctggtcccctggtgctggaggagtggcctcctgttggctcccatgctgctgatctggggggtgggtttgctttgctttggggttcttctatttactttgttttctcgaagacaaactttcctctatgtctggaaaagcgtaggcatccggaggctttggaggggagtctggcagcccggctggcccaggccctgcagcggcagcctttccacagggcgcagcggcggcctttcgaggccctttctggggggtctgagggagacctggttgggaattggggctccagtgctcaggctggc

SEQ ID NO: 101791 - DNA, 1050 bp, Homo sapiens
cacctccaccagatctccccgcaaccccagaatgcatcccagaagggtcttgcagttgggggctgccctcttgccccttcctcatgtgagcccctcactgtggccatgacacaggcctggctctgctggcccttggcagggtggggactgagccccaactcctggtgcttcctcccagtattatgcggagtgtcacggcgtcatctacgtcattgactccaccgacgaggagaggctggctgagtccaagcaggcgtttggtgagtgcggcctggctgctctgggagggatggatggtgagtgggggcaggtccagcttgggcagctctgtgcctggggcaggctcagtgtctggtcagaagtgctcctgcctagtgggtgacggggggggggggggcagagggagtggctgtcacagtgtccacgcctgtgggcccctgggcagtcagaggcaggatgctgggtgtgaggcgctgcctctcctgccctccccagagaaggtggtgaccagcgaggcgctgtgcggtgtccccgtcttggtgctggccaacaagcaggatgtggaggtgagccccacccctgcctcccgcagcagcttcccgagtccccagcctcccccacagcaaggggagcaggtgtgcacccagacaccccaggcccagtgactgcccagggggtacagagccattctcaaggcctgccctgcccccagcagcttcccaagcctggttcctctccagacctgctgctgccagccctggaggttctcccacctcagggcaggcgcccagaggcctcttcctgctatgcagggcacctctccccaggagggcggccgtgtctcaggagtgtgtggccaagctgtggggacacccaggtgaaactcagagctcaaagaagtgatgctggggccctggtgggagtcagctctgacccttacctgttcctgctacccttggaggtggcatctgtgccagccccacccccagggcagcccctcaagacccctctgaggtgccactgcccccgggagcactggccacgctgagt

SEQ ID NO: 101792 - DNA, 1053 bp, Homo sapiens
gttggcggcctctgtgtgggacctgtctgtaggccagagaagttcctgggggtgggggggcctcgctacctgcagaaccctggagggcgcctggccttgggcctcctctccactgtgggaagttcctgggggtgggggggcctggccttgggcctcctcctttccactgtgggaagtgcaggtgcacaggcttctctcctctgtgggaagtgcaggtgcacaagcttgtctggcactgggatggggttgtctggtactccctgctcagacaccctaaggatttcggagagttgggctgtgcctcctggcttctcatgctctcgggtgtgtgtgtcttaacacactgaccaccagcttgtcctacctggtcagcatccagttctaggtctctgggcactcatgcctggacaggagagctggcacagcctggaggcaaagtggcaaatgtgagctgttgtctgctccacgtggacgcggagtttgctgtgtttttttctgattgagatagaggtgcactcatctggtccagggctcagcacttgtacctgaggctgcaggggctgtgccctgtcttgcccaggagtgttgccagcgagcccaggactgaccagcccaggctgcagaggtctgagctcagtgactctggccctgtcctggcagggaaggctcgcttcgtagatggcgctggtcagtcttatccgcatggccacactccctccctgtgcgaggtgctggcacagagccccacaggtgcactccctcaacgggccaggctgtggtctaggttcctccagcccccaaaccctatcttttttttgagacagggtctctcattctcacccaggctggagtgcagtggtgtgatcagagctcactacagcctcaacctcccaggctcaagccatcctcccacctcagcctcccgagtagctaggactgcaggcgcacattaccataagcttttgtacagacggagtctcactgtgttgcccaggttggccgtgaagtgggctcaggtgatcctcctgcttctgcctcccaaagtgttgggat

SEQ ID NO: 101793 - DNA, 1072 bp, Homo sapiens
cgcctgcaggggctcctggggagcgcgccggtggctcgctgctcccgggtggggcgcggggctggcgctcgagggtgccgtggcccaggcggggctgcagcgagtgtgttccccgttccgcgcgcgtgaagcgtgggagcgaagcctcgggggagggcgggagcgcggctgagctcactgtgaacacccggctgggtagtcccgcgagcaggggaggggccggaaccgatgtgtatgcggagaggtcgcagtcattgctgtgagcaggacacagtggcggctgacctgggagaagttacagagggacggggtgggagagggacgaggagtcgggaatggcccccaggctctcgtcctgagcggtcggctggacgtggggcgccactgaccaccgtggagaagcccgggggaggggaggtgctttctggctgcacactgacctatgttggggtgcccagggcaggatgtacacgctgctgtcgggcttgtacaagtacatgtttcagaaggacgagtactgcatcctgatcctgggcctggacaatgctgggaagacggtgagtgcccacgcccttgcgcgcacctttcccacggcctggcggcgcccccttcggttttgtgctgtcagctgcacgttcactacccagacggaagccaaatttcacctgagacggcaggatagtcaccaccagcctcctgaagagcagagtgttgctctgtttctgtttctgtcttttaaagaacagacctgagtaaggatatttggaagccagtatagcccctccttgatgtgtttcgcctctgcctctctcctcagaccttcctggagcagtcgaaaacccgatttaacaagaactacaaggggatgagtctatccaaaatcaccaccaccgtgggcctaaacagtaagggtctcaatagcaggctgtgggtttggggccttgaggatgccgtgatattcacagtccagctggcccgtggccacagccctgtcgggcccctctcaagtctcatttgagtggcaccagcatggtttgccccatcccctgggagagctgggactgggtgtgtc

SEQ ID NO: 101794 - DNA, 1186 bp, Homo sapiens
actcgctgctgctgagggaggccgtggtggagggggacggcatcctgcccccactgcgcacagaggccacagagtccgactcagacagcgacggtacgggtgactccagctatgccagaggtatggcagcagctgcggagcccaggagccaggaaggtggggtcaccctgagaggctcctggccggtgagggcaccaaccatctaaccaaactattggagagtgtgtgactgcggcgagggtgccacctgtgcctgaggaggccgtgtgggtaggggtagatccgtggcggcctttatcttcaaggagtgtgggtgcaacagctacagtctcattgatgggaggccatggtcgtggctgtggccatgggagaggaggggcctggagttgccgaggaagtcacagaaaatgaccaactgatggggcctggagtgcaggaggggcagctcctctgcatggcttctcagacttgggacctgggtgcctgggatcctggcagacagaggttgtgtccagacagccagcatggaagtttcgggaatgggaactggtgggcagtgtccagctctccagaggggtgtgtgtatgcgtgtgcgtgtgtgtgtatatatgtgggaggtcacctgacccaagcatggcgggctgagtccaggaggggtctgcatgttggaggtgtacccagggatcagtgatggtggtttctgaagccccatgtccctggtgaaggaggactgaaccaaggactctgtgagggcaggtgaggcgctcacagcctcgcgaaggtggagaagggcaggggcaggagagggctgcggaggaggggccacggtgcagcaggccgtggggactgccatgcactctgcctggtgtcacatgcccacagcagcctcggtgacgagagcacggagcccaagaggtggggtgtcgtggctctgcccaggatctgagctcattggtcaaagcccgggtcaccatgcacaatcctctggcctggctgggccactgccctctgtccatctcttgcagtggtggggtcggacgccgtggactctgcacagtcctctgccctctgtccgtctcttgcagtggtggggtcagatgctgtggactctgggacctgcagctctgcctttgctggctgggaggtgcacacgcgaggtataggctccagactcctcaccaagatg

SEQ ID NO: 101795 - DNA, 1008 bp, Homo sapiens
caggacccaccacagacccgctggaccccaagggccagggagcgattctggccctggcgggtgacctggcctaccagaccctcccgctcagggccctggatgtggacagcggccccctggaaaacgtgtatgagagcatccgggagctgggggaccctgctggcaggagcagcacgtgcggggctgggacgccccctgcttccagctgccccagcctagggaggggctggagacccctccctgcctccctgccctgaacactcaaggacctgtgctccttcctccagagtgaggcccgtcccccgccccgccccgcctcacagctgacagcgccagtcccaggtccccgggctgccagcccgtgaggtccgtgaggtcctggccgctctgacagccgcggcctccccgggctccagagaaggcccgcgtctaaataaagcgccagcgcaggatgaaagcggccagcctcgcagcctgctcttcttgaaagctgggcgggttggggcggggggcttctctggaaggcttggagctgtcccctctggccttgggggactggctgcccccggggcgcccgggcctagccgaggcggtgctcctgccggccagactctcggtcagtgcgggcacggggtcccagccactcctagggggcagcgcagccggcagggtggccgcccccgggtgggacttggaccctggactccacgggagggctccgccacccagcctggtgttacataaggggtggtggaggtgggcagtcgagcgttaaagagtaacctgctgccgggaagcccgccaagcaatcgcggccccttccccggctctggcagctctgcgagcgcgcccgtggggaacgggccctccccggcggggcgcgcgggcgcgcgaggtgggcggaggcctcggagctgtgccgggccgggcctccctccctaggccagcgcgggagcgacccggagggggcgggcccggggcggggcctcgaagcgctggccggcggga

SEQ ID NO: 101796 - DNA, 1436 bp, Homo sapiens
ccggccggccggccatggagcgccccccgccccgcgccgccggccgggaccccagtgcgctgcgggccgaggcgccgtggctgcgcgcggagggtccggggccgcgcgccgcgcccgtgacggtgcccacgccgccgcaggtaccgggcgccggtgggcgggggcgccgaccaagtttctctcgctgcaaagatggcgtcagtgctgcccaaacttcgggcccccgggggcggggcagcggggagggcggccgcgtcggtccgcgcgtgtccgtgggtcccgccggggctgcgccgggcggccggggagcccttcccgccgcgccgggctgggggcggggccgggggcggggccgcgccgtccacaccggccgcagccggttttcgaggcgggcgccgagcggatccgcggcggaggttgagggacccccctcccccggccaccgcctccgctgagtctgccccctccccatccgcagggctcttccgtgggcggcggcttcgcgggcttggagttcgcgcggccgcaggagtcggagccgcgggcctcggacctgggggccccccggacgtggacgggggcggcggcggggccccggactccgtcggcgcacatccccgtcccagcgcagaggtgagcgggaggcccggtgcctcgggactcggtgtgcgcaggggcggtgggtggggtgcggagacaccggccccgacggaggccaggtcagggccccaggtttgtaattaccagccacccccaagctcttcagccctggaggagctgagcagaaatgatcgatgactgggagtccctacacctccctccaccgcagttcctcggggctagagctcagaacccggagcgggtggctgtgcgtctctgtgcagaagaggctgcgcggtcggcatggggcgactgtccaggaatccctggggctcctgaccgccacctcccaacccctgccaggccggacacctcggtctggctgccagggcaggggcgggccctggcctggctcgctggggcctggggagctgcccgtgcttccagcccagtctccccctggctgctgccggctgctggccactcccacctcccaggcctggcgtgaggcccacagctgctgttgcacaaccctggttaatgtgtgatggggggaggcctgggcctggcccgcccctctgccagggcttcagacccctgcccagccccagtatctgaaggaaccacagtggagccaagcccgcgatgtggagaactcaggcttcaggagaccctggccctgctcctggcggctccgggtggctttcagctctctctgcaacctgagctgggggaggagccaggcctcatgcccagggctgggagtggggagcctggtgtgcacgcgtgcccaggcctgcacgtggaccgaccaggggaggggcccagagctctgg

SEQ ID NO: 101797 - DNA, 1120 bp, Homo sapiens
aggaacataaaggaacataaagatttgaggaaccaggggaggctccagcagatggttccagctgcagtggagatggggaccgtccggaaaggggatgggctgttgggcagatggtgggacgcgtctctggcctgggagcgggctcccccgacacgccaccttccctgccagatggtgcttctgggtattccagaatctggaatgggggatgcctatccccctcctgagcccacctgctgctctgggtccctggagcccaccaagtccacaaccacctgctctgaatagaaagctgacattgaacctaacacgtccgacgaggacgggcaagggcaccgcggggcgctctttctgaaaagcagcacattcccgtaattccacgccgacacgtggagcgccgcgcacatgccaggcacacaccgccaaggacgccgtggcaggctttgtctttcgatctccctagaaagttgctgggtcggagccacgtggctccacttcccacggatggggacatgttttcccgcccctgaaagccccccgtccccacacattggcaatcccgtaggatctcggtcatctgaaccccgtcgggcagaagctggaggtccacccgccccagctgcccaccggctgggcatggagatgccttcacctggcagcagccggcagaggactcgagaaatgaccacagaaaggcacacaccggctcccagtcacagctctccgcagatatccccctccgacgcggctgttcggtcacccagttcccctcctgctcccacacacttgagagctctctcgcctgggcagctgcacccagctggagcccgggacccggacgccaaagctctggccgcagcactgaggtcaaagcaaacgccggctccagcgcacagaccagaggcacccgcagttctgtcccaaaccacttccagcaggggaggtgccttcgctgctgtcacttgcttcacagagctccttagctggcctcagggtaaagctgtcagcgcccaaggagctccaggcgaggccaagccgtcctggcactggctgcccccagggctgggcaagtccatccagggctgggcaagtccatccaggcctgggctggaagaagact

SEQ ID NO: 101798 - DNA, 1118 bp, Homo sapiens
cggggacggcttctgaccagctcgttactggagaaggtggccgtggagatggcggagcggctgggcccgggcgtcaggaggcgttttgcagagaacagttgcagcttgtctttgttttggttgtggtttaaagactgtttccctgtggtatttaaaggatgaatcgagaactttaacttgattctggatcgagactggaattgtgaacagttgccgactaaagggcatttggtggacatggtgctgcactttcaggtggtccaggccagcgtgccttggcgttctcatcaggagagcatttctgcagtccagaggtgttcacgctccgacttcctccaccaaaaccctctgttggaatcacttggctcctaggaaagagacacaccgcagagaagtcatgggtggagacctcgggcatttggggttggccagctgatcaaagcgttcaaacacctgcctccagcgagacccttggggcatcaccgggctcacaccgcatgccgggaagatcgtcagtgcttctggaactctctagaacccagcagctggtgcgcgttcctgtgggtgagactcctcctttcctgtgttcccagggcctgggtcccttgtgagggtcgctgatggcagaacagaagcccctccaccctccaccctcagagccacaggatgagctctggggaaccgccagacccagcccagggagccggcacagcctcccccagctcaggtaagacaccagggtggccagctttgtctggggcaactgggccaaacacttggggcatggtgtccctgacacccatgtgtgcgtggccacggcccagatgagcccgggcacctccgaggaggcactttggtggcacctgctctccatgtgccctcctctcccaccctcaactcagccaggtacagagaaaacccattttaggtcagccgagttattcgcttttgcaatagtaattgttccactcccacagcaacaggttgtatgaagttgaattggtttttatattttgagcaatttttttcccttaatgtaaagacattcaattcatgttgcagtgggttggaaacatcagttcctagagctcagtggtggtggccggtcccttccaggc

SEQ ID NO: 101799 - DNA, 1018 bp, Homo sapiens
ccagctggtaatttctgctgcgtcaacgcctggccccgaggcagcccgggggcgtcttggcgccccccgcccgcgccccccgccggcacagcccagccgcacccggagccgcccgcgccgagtttgccaagagtcggaactgcgggaggtgggcgcgggcgggtcccggcgccctgaggccggggggtcattgtctccccggacgccgggcgccggcctggtctccatcttaatcgccggccgaaccggggcgcaggggcctcggggcggggcggctcggggcgcggagggctcggggcgcgcggggcggacggggcgcgcggaggaagcggggtccgctgcgagccgcgtctttgtttctctgtaaatagacatgtcagtttcgcgggggagcgcgagccggtgtctgacaactcaatccctaaggcaaacggggaattctctgcgccagagggagggctcctgctagttggggttcccctggccccgctgacagattcactgtttgtaggtttaacgaagcacacacaatagggctggaccgaggagccagggtacagaccagatggggcgaagaacggatattttctgacagcgaagaaatataaacaaaagaaagtttgagattcgcagcgaatttcctctctcgctttccgtgctgcaatctcaacgatgcatttggagtggattacggtggcaagattgtgatcagcattgtttaaagaaatgctaattagaaacgtgtttagcgcgcggcctgggcgcagacacctgtgcgccgagaactcacgggcattttaattgtatcgattgtagaatctttcatattggctctattatcagagctaacttcccgtttgggtaacagactggatacatctctgctgctggcactcacgctgcctctgcaaggcactatttcactctacaagagtggaaaatagtttgttcatcaaaaggaaatgtatagaaggggtttttcacatgaataatgaagcaagcgacagtatttatcaga

SEQ ID NO: 101800 - DNA, 1050 bp, Homo sapiens
cttgaacccgggagacggaggttgcagtgagctgagatcgcaccattgcactccagcttgggaggcagagtgagactccatcaaaaaaaaaaggtggaaggtctgttagattgagctgctttctctgtagcaagggtttcctgcctctgacgatagtattctcactgggaagccagaattcgggtttgcctgccttgggccggcatttgtcgtgccctgaagcagcacaagtggcattggcttttcagctcaggtggtctgaggtgtggctgccctcgtctactgcccatgctgtcctcacagacctttcagagaagaggtgttagtctccagggtctcacccactcccacctgtgcttttgtcctgctagagacctctaccgtatttacttggaactaacttatttgacactttgtggcctcattttgtctctggcagatatcaacctgaattctcctaacaaaggtctgctgtctgactccatgacggatgttcctgtcgacacaggtgtggctgcccggactcctgctgttgagggtctgacagaggctgaggaggaggagctcagggctgagcttaccaaggtgctgtggcttggctgtctgtcctggggtgaattggagttaaggccctcttggattagtgagaggccagggtactggccacgctcgggaggaattgccctgggtggtcacctaccctgctctgtgttccgactgataacggggttctctttgtatgtgcccagctccatgcactggactcagagccacctggcagtggagacagggcatgactcccttcccatacctctgtgcctggcccttcctaagtgctccctgaggagtgttcacacatgaaccgcctctgagcagccatctgctgggagtgtctctgttggaattaacacttgataatcatttttaagaccccatgaatctttcttgtcctggatcttaagttttcttttaaacatatttattttggctggatgcagtggctcatgcctgtaattccagcgccttaggaggacagggtggtaaggtggg

SEQ ID NO: 101801 - DNA, 1696 bp, Homo sapiens
gcctgccttggcctcacaaagtgctgggattacaggcgtgagccactgtgcccggccagggtcttcaccatttttttgttgttgttgttttgttttgtttgagatggagtctcgctctgtcacccaggctggagtgcagtggcacaatcttggctcacccgcaagctctgcctcctggattcacaccattctcctgcctcagcctcccgagtagctgggactacaggtgcccgccaccgtgcctggctaattttttgtattttttagtagagacagggtttcgctgtgttaactgtgttagccaggatggtctcgatctcctgacctcgtgatccgcccgccttggcctcccagagtgctgggattacaggcatgcgccactgcgcccggccggtcttcacctttttaataccatgcccagtcctagtaaagagctcggacaaacctggcatggtcatcctgggccattcctcatgaccacaaatggacatggtgattggtagctctcccagaaccatttagttgtggggcatgggatagttccctggagtcaagttcctagtaccagataaaaacaaatgtctgctggctgggcgcggtggctcacgcctgtaatcccagcactttgggaggctgaggtgggaggatcacctgaggttgggagtttgagacgagcctgaccaacatggtgaaaccccatctctactaaaaatacaaaattagccgggcagggtggcacacgcctgtaatcccagctacttgggaggctgaggcaggagaatcacttgaatctgaaaggcagaggttgcggtgagccgaggtcgtgccattgcactccagcctgggcgacgagcgaaactccatctcaaaaaaaaaaaaaaaccaaaacccaaaaatcagatgtctgctgtagatgctgttattcctaggacgagttaatgctttggtaagcggaaagttcttgtgtaactcatggcactgtgcatgaggatgttagtcacttcctgcagtagtgatggctcatcatgtcaactgcatgctttgcaggtggaagaggaaattgtcactctgcgccaggtcctggcagccaaggagaggcactgtggagagctcaagaggaggctgggcctctccaccctgggggagctgaaacagaacctgtccaggagctggcatgacgtgcaggtctctagcgcgtaggtacctgccccaggcgcacccctgggggctgaagagaacgggcaccacacgtgccccggcatgtgggggggcgtcgtcatgcccagggacgagttgcagccgtggagttgagtggcctgtttggaaggatccagagagaggctctgagcccttggcccagcgactgtgccttgtttgttcaaaaagcttggtgtctacatgtgttttatttatttttaagtttttgtgtactttattattattttttttgagacagagtctcactctgtcgcccaggctggagtgtagtggcgtgatcttagctcgctgcaacctctgccccccgggttcaagcgattctcctgcctcagcctcccaagtagctgggattacaggcgcctcccaccgcgcccggctgatttttttttttgtgtgtgtgtgtgtgtgtgtgtgtgtgtttttagtagagatggggtttcaccatgttggccaggctggtcttgaactcctgaccttg

SEQ ID NO: 101802 - DNA, 1253 bp, Homo sapiens
catttgggaagaggaaagggaaacttgcacgcatgggccggtcagggcactgagaggcctttctgctctggcactgcctgccaggcgtgcacctcagggggcccgtccgctctagcaggcaaatggggcgtgttctctgtagtcagaggggctgtgagaagacaggaaagcgagcttagtgggtatcaggcaagggggtgaaattgggttgtgagatgagaaagcagcgtcattgcagggctggggggccgagactcggcagggtcgccgagagctcagtgagcgagcaatgcacaggcggctcctcgccgcaggggcctctgggggccgaggggctctgggcctgcaccccctctgtagacacctggcgagtgtccaccccttggcccagctcctttcctcagttttcctcgggcgtgctcccagtgctttgtttgcttggctgtgggtggtgacccgcccatgctgtctggttgatttaactggtgtgtcttccagctacaagaagactcaggaaactctttcacaggcaggacagaagacttcagctgccctgtccacagtgggctctgccatcagcaggaagcttggagacatgaggtgagacgcaaccctgactctgctgccctgagacctggccaggagtgaggtgaggtgttggaggtgctacaggaagcctgcctggagatcagggctcagatgcactggctcagggatgtggccatccatcatggccccgaccagtctgtgtgcagacccttgcctgggaggttcgtccatccccgttggctgcttttctgccgttgctgtgttcttcagggagggttggctgccagtgctgttgggtaacttgtggtgctcggggttggtgagggaggagtctgcaccttgaagcttcactgagtggcagcgactccagcccaggggtcagagtcaggtcagtgtgggacggcagtcctccaccatctctaggacaggggctcggcgtggtacttcctcaggctgtttcccaggtctcagaaagtgcagtcagacgccaggaggccctgaatgagccttctctcccagaggctggtgaaagcctcctggccatcagaggtccctcagcaagcagggctggggccaaggagtgagcagggggccggcgctttgtggctggcatgtttgctcttccttccctgttctaggctccctgactacagcatggtgatgaggggattgagccagaagcctgggtatgatgcttggctggg

SEQ ID NO: 101803 - DNA, 1043 bp, Homo sapiens
ctgtggagctggccaagcccagctgtcatgctgtggcacatttcacacctttgcgctgctggatggggctggttgtgctccaggtgctgtggcttctccaaacaggtgtgccttggggcataaggcgtggacagggcgtggacccaggggcctcttgggcacagccgtgaggctgagcagttgctagtcatgatcttgcgagagcctcctgttgagtcaggacttgaggagactggagacagtgctgctgtccccggtggtgtgcggactggaggagccgtcctggagggtcttcccctgctgggcctgactgagcacgagcagggggcctcccctggggctccccgaggagggctgtgagtgggtgctggcctcccttgcttacacttcgtttcctcttctctcctgctgccaccttccagggctcatccattttcacactcctttaggtaaggctgagcctggacacacctgtggaagacttttctctgaattggggcagggtggactccggcagggcccttgggcggctgtgctagtagagggcagtgaaagtgggatcaccccttccaggacagcagtgccagccaggtggttgctgcatctcagggaacaaagcagcagcgtgggatcgacgcagaggccccccggaaccccccggcccttctgtgtcccctcctcgtgcttcccttcaggctcacagaccgcctgctgccgggtctgtgaataactggcctggcgtccaggcctgagtttactcctgaaaaggagcttttttttttttttagacggagtcttgctctgtcgcccaggttggagtgccgtggcgcgatctcggctcactgcaagctccgcctcccgggttcacgccattctcctgcctcagcctctccgagtagctgggactacaggcgcccgccgccacgcccggctaattttttgtatttttagtagagacggggtttcaccgtggtctcgatctcccgacctcgtgatccgcccgcctcggcctcccaaagtgctgggattacaagcgtgagcca

SEQ ID NO: 101804 - DNA, 1045 bp, Homo sapiens
ccagctccctggttcaagcggttctcctgcctcaggctcctgagtagctgggattacaggcatgagccaccacgcctggctaatttttgtatttttagtagagacggggtttcaccatgttggccagcatggtctcgatctcctgacctcgtgatccacccgccttggcctcccaaagtgctgggattacaggcgtgagccactgcgccgggccctcaaaggagccttttcacgtgggagggctgtgccgactctcaccaccttcctgttcaacatctgtcctgtttccttgttttccttcagatggagttttgtcttgtttactacccgagagcccataggtgtgcctcccaaagggccctcctgcagaccagagcaagctcctctaggccaagccggggcgccgccagcacgtgcccttctgctggaaccgggaggtctagagccaggcccagaacaatctgtgatttcttgtgtttttacttgacttggtggtttctcttttgccaaaaggtccttacttgacttctgaaggctgtttgtaccaaatacttttcaaaagcccaagcctggtctcctcacagcttcctatggcagtgctctcccccctcccagtgctatgcgctgggcaacttggggtgccccccatgaggccaagggaggaccctggggtcgagtttccttcgggggcattgtgtggaggggcaggcagctcgctccaactgctgggagtgggggaatcccagctctgcccatccctgccaagttggggttgtgtgtggatcttggtgttaactcttgcttccttctctgcttctgccatgcttccaagcagcagctactccatccgccactcaataagtatgccagccatgaggtaatgtatgcctgctcgctgcggctccagagccgggtgtctctggtgggggttggggcagctcccgccggttacaccttgcccttcccatattcctggattaattgaggactccattcccttggcaacctctgatgactaagggccggtaaaaaccccctctaggct

SEQ ID NO: 101805 - DNA, 1022 bp, Homo sapiens
cactgactcaggacacagaacgcctccacactgcccttcctggtccccactgcccttcctggtccccactgcccttcctggtaccttcttggccatgctgaccttcctcccgccctacccccggcaacccctagtccactctccctttgtataattgtgtcatttcaagaatgtcacgtaaatggaacgatacagtgtgcagctttttggcattcactgtcttcatttggcatcgttctctggagacctgttggggctggtgcccgtccgtgatttgctccctgtccctgctgagcagtgttcgtgttacataagcttttgtagagcattgagcatgggcctgggatctgccttgtgttgtgtgctctgtctcaggtttttctgtcttcatcttttctctcctgtagtctaaggttgtgggtgacagagagaacggcagtgacaacctcccttcctcagcggggagtggtgacaagcccctgtcggatcccgcacctttctaagcctgtggttgcttcacccgctgcagagcacacgcaacccagcctcagcatcacagccgcagctctgttcagcggagcagccagccagggcggatgagcagagccggccctgaggacagtcctgcccatccacgcggagatgtggctgccgcgtttgcatgaatttgaagaacacaggcttgtacacagatgttttacactcacgtttgtagatgaaacagatcactgtgctgtccttcctaggggtgcaggaagtggacagggcggagggtttgaaagaatattgagccaaagcccaggctccctttgggaatcatgttagcccatcagaatgttgaaggattgaagagttctaagcataaaataagtggcattttctgacttcttcctcctcctccttccctgactcacagaaggaatgcaatcacccagcaagtcctacctgttacgcaattttttatctcaaaatgccgaacgagaaaactgtccattttctgagacccccagaaaggaaactga

SEQ ID NO: 101806 - DNA, 1017 bp, Homo sapiens
aacactccagttatctccaagtgggcagttagaatgagtgcttctaggccgggcacggtggctcacaccagtaatcccagcactttgggaggccgaggcgggcagatcttgagatcgagagatcgagaccatcctggccaacatggtgaaaccctgtctctactaaaaatacaaaaatagctgggtgtggtggcgggcacctgtaattccagctactagggaggctgaggcaggagaattgcttgaacccgggaggcagaggttgcagtgagctgagatagcaccactgcactccagcctgggcgacagagcgagactccctctcacaacaaacaaacaaacaaactgcagtgcttctaaggtgagactcatcgtgatgttctgattagaacgttctcgtgccacaaagtcctgagatgtgtccaagaagcaccgtcttctgtcagacacacctcctgccccgccataggccttcccactgtggcagcagaatctgtgctaggccttccttcgtgaaagaggacaagatcagggctcacgtgactggggccgctgtgactctgagcctctgcgttctgtcagatgagggtagtggtgcttcccctgcgtcctgctgggagaaaaaaggaggcagtaaatgaaaggtgtctcatcacctgcttcctaaatagaagggacaaagaggctgaaaaacagtaatagtcttgttttatgaaaatgccacccctaatctaggagctgggactgccatgccaggacccctcagataatgacatccctgaagaggattagcagctagtctgttatcagtcacaggcagttcaacccagaagatttaaggattagattacccaacaaccttgagtgtagattttgtctctcatcaccctttgcattaactttgggtgcatgtgtgttaatgaggaagtgtgttctgctttattcttggtacatcacagacatttaatagatacaggtcattagaaataaaaattgttttaacttgtatgagttttg

SEQ ID NO: 101807 - DNA, 1018 bp, Homo sapiens
cttatacctctttgcattttttatgcagaggttgctgtaaggattacaatatgcatgtttattttaattaattaatttattttgtttatttatatatttgtttttaaggaacagggtccctgtctcctgggctccagtgcagtggagtgatcatagctcactgcagcctcaaactcctgggctcaagcggtcctcccgcctcagcctcccaaaatgctgggactacaggtgtgagcccctgtgccggcccacagtacacagctgcagttcttcaggatctcttggggtggccgtattctgccgtctcacacttctccatgccatggcgtctgtctgtgcacgtggcaaactccacaaggcagtgttggattcttttgctttgaacggtcttatggaataaagtccatcagctctgcccttggtactttcatctatactttgtgatactttctttttattttttcttctagaatagcctaacatggcagaccagagacagcgctcactgtctacctctggggagtcattgtaccacgtccttgggttggacaagaacgcaacctcagatgacattaaaaagtcctatcggtaagtggacaagtgtggcccccacatccccccaggaagacacacatgccccgtgtggtttagtctgcattttaccaagaaccattgcacatactttatcctggccgactcagcgttgaactggtcacagctcggtaacacctttgtatgtgtaatgtgctccttatagcttaaagttatggtattcatgttctcttgccaacaaaaaatagcacttagtagaaactgacacactgtccacagttccatagggagtcagggtctgaacctgtttgaggcctcacaggagccgcagagcgctggcatggtcctgtggtctccttgttttagcacagtgatgacagagacccctcactctgttgtggccttctgattgagcttgaagaactgcactcttgggtacagtttcattgagtaacctgtaagagac

SEQ ID NO: 101808 - DNA, 1264 bp, Homo sapiens
gtgtcaacctgtcttgtcaaacaggagggcactgacactgtgccgcgagtgtttgtggtggcagctgggactgttgaggtgtgaacgtggaccctgaggtaaagcaggcgcatagagctgtccccgccgtgacctgcggtagccgtagatcccagggactgcgaggcggggcagggcggcaggcagttggggcggggctgagggccgagggctggcggtgacccaaggcgacggaggaaagccgtgtggggtggaggtcagcgagtagcctctcccggtggagagtttgtccaggtgcccgaaagtcgctccacaggaccagcgttgggtgcgcgccaggctgtggccctcgtgcagtgccctgtgtgcttgcttttcagaggccacagacacgccgatcgtcatacagccggcatccgccaccgagaccacccagctcacagccgactcccaccccagctaccacactgacgggttcaactaaatccaggaggagctgtggtcagaggaggagccggcgcctggccacgccaaccttagaatcatgaactgtagtcacagagatgggaaggcagcctcctgcctgccctggccttgctggggcccctcctgcctccacgcccacccagcgtcgacccttgacccacgaagtgcgtagcatgcagtatttaaagcagtgtagctacggtcttctgtttttttcccttttttaatagcatgtatggggttctgttccatgtctgtgttgtggacattccgcggcatgaccgcgtgaactgcacggtggagctgcctcagggctgtcggtcaggttggtccagtgaggggtgactgcagccggtcaggtgggcgaggagaaggggggctgcccctttcctacctgtgcttgaggggccggaggcaggtgctgcctggcagagctgtgttaccgtcttggcctcggggtctggtccacactctgtgctcccagccttgaggctgcagtaggactctgatctcacctgccagaagagaggcggggccgcgtcctcctggcgtcaccggcgtcactgtcattccttggtgtctgtgctgggcatggttggcttgggggtctgtggtttcctgggccttgtggcagggtttctcccgtgggagaatttggtgtggaaagcataggaggccccttccgaggttgacaccgtgtcctccgcggtgtttctcgcctggtcgtctcgtcgtgtggacgctgccgttctggttctcggaggtgtgtccttcgccg

SEQ ID NO: 101809 - DNA, 2986 bp, Homo sapiens
aggatacatctggacgtgcttaggaacagggtgctggttgagggcccccagctgacccctactgcagatccgcatgtggaccatgagccggctgccagcactaggtcctgggcagctttgtttgtcccacttttctttgtttcttctcactaaaatgatcacgaagacctttgacaagaggagagatatgcactgtgatattaaattagaaataatttatcaaaatcagacctctcctaaaagaataagaaattcattgtttggcccatcctgaaaggtgaggtggcgagacagtggggtgcctccgtgccgcttcgtgcagcagcaagttcagcctgagatgctggctgtactcagcctttgcaatttttgtagatgtagcttaggacgtgagttatttttccgcagactggccaagagccaggttctaagcttggacctaaggtagaaagctgcccatcgggggccctagctcagccccaccaggccctctgttgggcctgcacacagctctgtggctagaacactccaaggcccttcggtacccatcagagtgggccccttgccaggtggcttttcagttacagagtccagtggaccattttgtagaaccatgcagctccctgcggaaggtggggtagggtgggaaagaggagcaggtctggaggtttgtggaacccagtcccctgcagaatctgtaaaacctaataaatcatggttgtggccattctcacggtggtgattgtgattagacgacccccgggaagcccagacactcggggcctggagttcctccccctgcctgacctagaagcagaaccgttttcagcgctctgccctgttggctttaaggctttgtcttaatttaaggaaaaagatcctcccgggttttatttctctctttcttgagtggactgtttccctataattaaaagaggtggtgagtcctggggcagcttccgcgcctccctgtccacgtgctaacagatcaggacgcccccagcacccctgcctgcttttgctggtggcagtgacgggaccccgactcctcactctcgggccgcagacaatgctgtgagcaagtgtggccatgggcacagaatgtccctttggacgccgctgctgggggctgccaggggccctctggggtcgtgctttgaggcccgtccggttcacgagggggtccgggcagcactgactgcttccgacctgcaggaggcgtaggagcggccctgcgggccctttcacggcagctgctgctgtatagatttgtctccactcagtgacgtgggatttttttgtcttccttttggctttatttttaaactgctttagatattactgctcagtgtttgtgaactttcctagttctctatgttgttagtgcagccagcacccagtggggacctactagaaaaaggaactggcatgcacacgtgcccagcaggaaaagcttcgtcttcacgtcggctgctgccatccagaagaggccctggagcctcacgccgtcgaggctgctctcaggcgttctgttccgggcgaggcttgtgctgcaaggaagggcaccagcatgcaggctgccactggagggtccgggtgctgcgggcagagttcagcgcttgtccaccctcccttagctctgactcagtgcatcctactgtggggacatctcgtgaggggacacgaaatgactgatctcaccctttcccagtattcagagctgtgaacccctgtggcgcaggactggcctgtgtctgttattttggttgtaaatcattctcctgtggaattggcaaaagctacatttttactgtccttaccagcaacagtttgcgtcgtcacatgctgtgagtgtgggctgtggtgtgtccgtgtgtgtacatatgtgtatatgtatatatcacgcagcaggagtgtcattcatgctgctgtcccctggtgaagtgacaagtacaattaaaggtggctctgaaatggcctctggtttcttgggagtcgggcagggacctgcaggaggctttcccagcaggtgcacagaaggaagcgctgagcccactgtgtgcagagggtgtgtgcccagggcactgccacggcccccaccagcattggcctctgctctgcagggtggggtgcccatcctgggggctgtgtgtcatgctcacctgacccaggtgtgtgtcccggtgtgaaatcgaggaggggactggaagcccttccctgccttgaaacatgaaagctgattttctgagcagcagatacggtcagtggcaaagctgcatctgaagggcggcctgggaaggggccctgtgctggccccgggtccgccccagaggagtccacacagcaccacctccagaaggggctgggcccggggtcctgcaggcggcaccttttggtagagtttgtttccctggaaaatggggaaaatgtttcaagccaggtgaggggggaagttaacactgaaatatgtattgtttttaaaaatcaaatgcacacgcatggaagctgcttgtccatgcactggttttgtcactggcgtcctggaatccgaccgtgttggggtgcaggcgctgtcagactccggctgatcctggctcgagcacacacatctaagggccaggctggttccgcatggtgatctccgtcttgtatgtctgaatgttggcctaaaataaagattactgttgtaaaataaatgttttcactgcggaccccacgtatgtcttactcgctagtcccgcagatccctggttttggagagcagcagctgatctcagccctccacaccccttgcggctggaaccttgcttccctcctgcctggtccagatgtggataaatgccccctcctcttgattgtgttttcacctccgttttctaaataccaagactggagcaaagaggccaagcgtggtggctcatgcctataatcccagcactttgggaggccagtgtgggaggattgctttgagcccaggagttcaaga

SEQ ID NO: 101810 - DNA, 2712 bp, Homo sapiens
actgagccacattcgactgtgctgtggcccagagtaggatggctgaaggtgagggaagggcaaggggtgccctgaagtgactgaggcagcctccagcaccacgggcctcagacagccccacctgcaaggaggaagccttaggcagaaggtgctctgggcagcgcttaccccagcgcggcatcagcacctgtgggtggcgtgggaatgggagttctctggaccggcccagctcaggaagttagaacctgggaggaacaccagtgaataggaccagggcaggctacccctccccaccgtgagcggcccctccctgccgtgggctgctgtggccgagagcagccccgtggaggggcatgttggggaccacgtggcctgcagcgaggcgacgtgattccagggtggggcctggtggttccattcacagctgcgtgcctgggctcctccgtccctcgcctggccagcacagtgctggcttccccaggcctgtagccttgcctcttggccggctagggcagccagggtgcatgcccatgccaggcaagaccagtctgcgtccactctgctgttcagacagcccagccagtggcatggcccccaggagcccggactctgcgcccctgctcaggacagcctccgcctccccgaccctgggctgtctcctgcccacttcccaagtgagggatgtagccgcctcctgggagcagaatgaggagaggaagcacctgtggacacagacagatgggccggtcctgcctctgaggcagctcccaggagtggcctactattgaggagtatgacctccatgtggagtcttcccttttccctgagcttctggcagcccctgcctcagtactagaagctccaagagaaacccatggtaggaggaagctgacacccatggctgacctgtctgcccctgggagagagcttagggctgccaggacttctctgtgcacatccttgactgactctgcggagggtggggccgaaaccctgtttctgtgggcggggaggtggctgtgtcccctgtgccctgctgagccctgggcggggaggtggctgtgtcccctgtgccctgctgagccctgggcggggaggtggctgtgtcccctgtgccctgctgagccctgggcggggaggtggctgtgtcccctgtgctctgctgagccctgggtggtgagccctgggtggctgcaggtccctgcaggatcccccgtgagtgggggtagggcaaggcagttattttcagatggtgccagagggtggagtttcagatttgtttatgcctgtcggaagcactctggggctagggatggggtgcccagctcagcactgacgttcaggacacctggccaagaggcgcctcagatatccttgtcctgctgcggggggttcactctgtagccccaggcaggccggggtactgtagctttttccaggggatccaggaggggtgcaggcacacggcgcacagtggtcctccgcaggcctgcggtcctaggctggccgaatgtgccagcccacacacaggagggggcagttcacaccgagggctggcccgaggattgtcagggccacaccaggcaaagccagcgctattaatatcaggcatacacaagcccccagctgggtgatcctcttatgcctgtggccttggcctctgaggacggcagtgagtgctgttccctcagtacggtggaggcttcaagggcctcctagctgctgtgcctctgctgacatttggcaggcagcttctgccagccaagggtctcaccccagccacccggctctgcacccactgtgctgcccacaggagtggtcctgcccatggaagggccagttcaggtggccggagctcctgagctgccctaggggactgctgtgggtctgaggtggtgatgtcccccacggctgcctgcgcctgagcccccacgcatccacccctggggccactctgctgttcaggagcacccacccgtgtcctcgaccatgagcagccccccagcttaccctggcatcaggatctcagggtgccgggcccttggagcagaaggcaggtgagtctcgactggaggtctctgccgtgaggggcacccacttgtgctgtggtcctggccactcagacctgtgtttggtgcatgtctgtggatatcaggaatcaaacaggctggcaggtgctctcgggcaccgggcagagcccagggtcgaaggtgccattttgcttgaggctgttggtctgggcgcgtctctcttgtgttggttacggcttggaaccctccgggttggaattaaccttttgttgttgtggccagaagcactcctgtccatctgtgcacaggaagtgaggtttgctgtgcaactttctcctctgtttttatttatttttaatattctaaagttttttgtgtggagaccgtctcaccatgttgcccaggctggtcacgaactgctgacctcaagcagtcctcccactgcagcctccaaaggactgttcaaggcatgagccaccacacccggccaactttcctgtcaaggggtgctgcttgtgaaccgtggggtgaggctttgtccttggctctgagacagaccagctttggagaaggtagtggggctgggctcggtgcagactcagcctgacgccgtcacaggcctgcggtgaggcgggcttctggcagatcgtcctggcctgcttgtgaccgttccgctgcatgg

SEQ ID NO: 101811 - DNA, 3063 bp, Homo sapiens
caagctgcccccgcgccgggacgactggcctccaggatgcagagacaagggggcccggggctccaccggccggaaggtgggagtcagcaaggcgcctgaaaagtgagcatggtgcgtggggcctggcccccatgcagccgccacaccgccctctgttcaaggcagggccagctccgggacctctgtcctccagttctccatcccccacccccgcctcttcatccgtccagtggggcagccagccactctcccttccctgaaggtggcccttcccctgttaaggctgccacagggcacacctgggttggggctccccaaggtgtgcccagcagaagtgcaatagccaggagggttgcccctcctcatgggaatgtgtctggggtcttggtgccacaggggctgcagcgcagagtaggcagatggcctttggccccccggctccgcttcctcaggccctgccgggtcccttccctggctaccccaaggctcaggcatccctggtgacctgtggttctgggctggtgagggcacctgagcaacctggcacgggcagccaccatcctggcctcacctccacccaacactggaactccagcacccccagctacctcccaggacagacccctgtctgaccactgccatgctgacctgacaggctccggcctgcccttggccacccacttggtccccttgcttctgttttctacctctccaggcctgcccactacccccacccctgctcctcctttgtcagtgcgatccctgctgtgctcaggccctgccccccaggcctgtctgtaattctcccagcttggggcaagggaggggttttgcttcttgtacctacagggcagcagaagcttgatgcccttcaacacagctgccagccctgggggtgtggggcccctggagtgtgctctcctccagtgttcagccttctggcactgcaggcctaggttggagcagcctcgtggagtagggacggactagttcgggccctggggtcttgctggggcccataggcatgtggggcaggaagctgggcagagctggcctggctctgagtggccactgggggaaaggcagccttctgtctgccaatctgggtaggcccagtggccaagctctcatgggagccccctccccacttttttttttaacctgcccccattgtttctggttgtgtggtcatttgatatgggaactgaaggccagccaggggaggggcttggccaaagtcacagcaggttgatggcagctccagagctgtctttgcccctttgtggccctgaggacggctgggtctataggtagggcaggggtcaggcagggagtccagggtgcctggaagaggtggccacagcctgtggctccctccctggggtcctgccttccaaccacggcattgcagggaggatgaggctcagagggggtaggtttggagggaggccattttccagggtgggtgggagtgggctgagggctcggccccactgaccctggacgatgagaattttgatgtttgcccgtgtgcgtgtgtctcctgggtgtagtggatgccagtcttgttgctgtgacaagtaacaaccttttttttaaattgttttttatacaaacactcgcaatccgacatttggtgctaagggtttcctggtgcagacggtgggcctgggggctgggctggaccagggcgtgggtctctggggttggggtcccttgctgctcagggaggcagtactgactgggcactgcctctgcccccagcacccaccctcccccattccccagggagaaggggccccactgggcttggcctgcagtagtagggagacaagttccaggagcactttggggactggggttgcagaacacttcctgtctctggcttcatccttgggccagaaggctccaaccctcagcagcccttgccagatgtgccagggagtgggtgtggagacccggactccccccacccacgcacacctcggcctgatgagaggatggaggctggggcagagatgggcgtgacccagcgtcagagggtcgggggaggcattccttcctgtgtcccagagcttcactggtggagctggaggagccggaggtggagggtggggtctggcagctgctgctggggcagcctcatgaggggaggggaggggaggggaggggagcaggcactgggcgggggcctaggtgcactttgtccttgccaccaatggcgggaggagggtggacctgaacacctgcagggtgtggtgcctgccccagcctctcaggtacttggcccttggggagaagagaagagggtctggtttttgctgggggtgagtttccgggacactcccaaagcccacagataatccctggtgtgggaagaggagtcctggataccttgatgtttagcactttaaccccctttgtctttaaggtaggcgtgggggctactgccagaagtggctgttgggtctgaccccctcctttctgccctccctctgccacatgctggtccgcagagccctcctcccaaggggtggggccctgggtggagctcagcagggtctgcccactccctacgctggcccacataggcctccaggagccctcagtgagagggaccagcatagctgacccccagagtgtggtgggcgccggccctgcccgaggcccagtcggggccctttctgcagatctacctctggctcagcgcacgccccctgccctgagaacaggaaagggcccggaagggctgactcaccgggccgacgctcacacgaaaatgggatgcactttatttgctggtgcaaaggcaggtgagggtgcctcctgtgtgaccgttggccctcctgcctggtggcgctgaagggaaggagccagtgagcctgaccccgggaggggccgtccccgtgtgccgcgtttggcggggccccaggcggctcccccaggcccgggtctggggccccaggctttcccctgcctcgcggccgggcgtcccgtgctttgggtttcttggtttgggttttttaatgccagttctcagtacataagtgcattttgaaagag

SEQ ID NO: 101812 - DNA, 1021 bp, Homo sapiens
tccagcctcatgggctaccagtaccaccagcggcgctgcgggaagccgccctgcgaggtggacagcccctccttcccctgcacccactgtggcaagacgtaccgatccaaggctggccacgactaccacgtgcgctcggagcacacggcccccgtgagtggctctctgttctgtggcacagtgcttgttcctgtgtgccgtgtgtgttccgtgtgccttgggtgccaactgtatttgtccatgtaccgcccaacgcgtgtgtttcccacccctctctgtaagagacgtgtgtcctggtgggcgggagggtgaaacctccgtgttccctcgggttgcctgcgtcagccatgtccccagcacactgggaggcctgtgggtccaccggccttagggtggcctcgccgcgcgctgacctgactcttgctcccgcggctcactctagcctccatgccttcctgccctccagccccctgaggagcccacagacaagtcccctgaggctgaggacccgctgggtgtggagcggaccccaagcgggcgtgtccgccgcacgtcggcccaggtggcggtgttccacctgcaggagatagcggaggacgagctggcccgcgactggaccaagcggcgcatgaaggatgaccttgtgcccgagaccgcacgggtgagctgccccccccagggctgtggacagcgccgtggcctctgcgtggggcatgccttggcctgagacttgggacagccactgctgtgacctgggccacccgctgcccccgccatctgcggcgagtgtcgcctgctgccgaggcgagtgttcttagagcagctggggtgtcttctggcctcaggctcaccctggtgctgtcgaattcacagctcaactacactcgaccagggctccccacgctgaacccccagctgctagaggcatggaagaatgaagtgaaggagaaaggccacgtcaactgtcccaacgacgtgagcggaggcagccgggtggggggcgtggggagccatacagggc

SEQ ID NO: 101813 - DNA, 1023 bp, Homo sapiens
cggcacagggacgggagcttggtgcagtgccagattgggccaggggtcctcagtgcccaccttggctgttttccatctgtgtctggagagaagattccaagggtacctgcctgggtaggctggcattgcatcaagtcagcatgggaaggtatgagggccccagtgagaagctgtgcccccactgctgggcctgggcagcttgtgagccagcagccatcatcagagacataattggcccctggaggaatgttgccagcctccttcctcctgcgcaaggcacctctcccaggggcacaccccctcccagcactgggtaggagtgcatcaccttcggcatcatcttcgcagctgtggggctacgcacactgtggagctgcgtacactgtagagctgcgtgttgggaagggggtctggaagttggtgagggtctcaggacaggactagatcctatcaaactgatgatgactcctgggttatctggggagaccttggctggcagcccctcccctaagtcagaagcccccatcacttgcttttcccacgtgaacaaaaccacaggaaggcaggcccctcttccctgaccagagaggacctgccaagggcagggctccagggcagcctcaccacgtgttccaagtggggcccgtcaggcttcacagattgtctacttgctctgcagagatgacggatcctttctgcgttggaggccgtcggctcccggggtccagcaagagtggtcccgggaaggatggcagccgaaaggaggtccgacttccaatgctgcatgacccaccgaagatgggtaagaggagtcagggccagagtcaattccagatggttctgggcagcaagtggtaggagtggaccattgccctgggcgtcctgtctccaggtacccagctaggcccctagagttcccaaggaccttaccagggtaggggttgccttggacatagcccagggtcctgggttcttgtcctcagctggccgcagcccctgcccccggtgccctcgtgttgggac

SEQ ID NO: 101814 - DNA, 1032 bp, Homo sapiens
ccattctggccgcagccccggcgcccaccgcgccccggatctcgaccctgcgcgcaggccaaggagggggccgggcccggagcccccccgccccccgccgcgcccgagcccccgcgccccgcgccggcgccgtcttcctgcctcctccttctccagaaaaagtcgccattttggttcactgccttcgcccccccaccccgcgcccgcgatcggccctgcccggccaggccgaggcccgcgccccgcgcccgctcccggccccaggtgacaggtgggtggcgaggctggccccaggtgcgcgtccctggccgcgctcacccgcgcgccaggcctgggccggggtcccgggccgaacggcctacgcggcggacccgctgctggcgtctcctgcgcgcagcgcggcggagccccctctccccgcgagggctctgtgtccccgctgggctcgggagggccgaagccccttctcatccggggcgccagtcgcgtctctgcctcccaggctggccctggcctcaggccccactattctgaattcttctcccaggcttcagaaaaattggaagtggggcctcagcaggcacctgcaccccaggccaccggggtcatcaggtgctgggatgactcatgccggccctgtctcctttcaaaagttgcaaagtgaggacttccagagaactttgtccccggacactggcctcccccttggcaatgggcagtgactgtcctgacctctgacctcagctctctggccctcctggacacagcagccccttcccatcccctcggatccaagttaattagaagctatcaggagggggccacctgcccactcaaccctcaccctgcttcctgtcccacccccttccgtggcttttccacagggctgggcccagagtctcctctgctccccagctctcaggatggggttcccagcagcacaggccctcgggggccccagccttgggcagcagggcgttctctctggccagcatcctgggccttcactgctggtgcttccacgacttgttt

SEQ ID NO: 101815 - DNA, 1046 bp, Homo sapiens
gggctgtagacttgcaagatgaaaggtgtttccagttcttctctttttgtgctgggtgaggtcctcgaaacaggtcctgcacacttccttctgcctttggaggcttgggaacccctcattggggaggtgatttcccgcactagtgtggaggagatggggcagggagctagctctcaagtagaggaagcctctggttctgcccttgactgccctgaccaggcacccccacacacagccactgcccacttcagcttctgccggaccctcctggagcacacggtgtcagctgagagcatcccctgccacttgcctcggacacctggcaccagcctcacgtggcatgactcccgcagccagagggcggccagcagcaggccaatcaagctcctgcagcagcccggcacagacaccccccaggtacccacccactccacccacctccgtccctgccctccttctccaccactctcactctgcctgccacgcccctcccctgcagggccggctgtactctgaccactatggcctgtaccatacaagcccctcgctgggtggcctgacccggcccgtggtcctgtggagtcagcaggacgtctgcaagtggctcaagaagcactgtccccacaactacctcgtctacgtggaggccttctcccagcatgccatcaccggtacagtggcgctgagggtgctgtgggagtggggctaacctgcctcagagcgtctcttccccacactcagcctgcctttctcttgctgttgttttcgtctgtctagtttctcctgtgaatcaacctcccctctgttcttcatctccgcagaatctgtcttttctatctctctgcctttctttttttttttttttttttttttttttggtgagacagagatttactcctgttgcccaggctgagtgaaatggtgcgatcttggctcaccacatcctctgcctgccaggttcaagcaatcctcctgcctcagcctcccgagtacctgggattacaggcatgcaccaccacgcctggctaattttgtatttttagtag

SEQ ID NO: 101816 - DNA, 1021 bp, Homo sapiens
tgctaaaagcgtagggcagcagtgtgcgcacaggacgcacacagacaggtgtgcccataaccagtacacacaagctctacacaactggacagggtacagctctgctcggacagggcgcaccaggggcgagggcgggcagctgggctggttcagagggagggggccatgggttcagagggaggggaccatgggtcccactctcacagacaggtctccggactgcatcagagcactcgggaagcagcaatgccccaggctgtttttagcccccaggggccagttagggtcccagtgcaagctcgacctagcttcttccgcctctccacgaggaggcgctcccgcgcacgcgcctaccacgttcctgccccctagccgcggccggaagtcgtcgaaccaggacgtcgggacttccgcccagggaatcaaaagtgggcggggcgtgtgcggactgagcgctctgcttccggggcgcgggtgacgcgacgacggcgacactttgctacggagtgcatcggacgtcgaagcctagagtctctgcgtctttccctcttccgctgcctcattcctttccttcctagccttggtcgtcgccgccaccatgaacaagaagaagaaaccgttcctagggatgcccgcgcccctcggctacgtgccggggctgggccgggggtgaggcctggggcggcgcgcgaggggcggggacccggctacaggagcgcagtgctttggggcgtgtttgggggcgggggtctatggccgcgcagtctgaaagacgcttggtggatcggcttaatccctgcaggaagcaacgggctttggggtcaggacatacctgtgtgtgcaccctgcttgccgcctagatgtgacacattgactctcagcccagtgttttggtctgtaagatgggtaatgctgtatacggtctgcagtgaggagtagaggaatctgacgtgtagtggaaacacgcgaccaccttcctcaggtcgggctgacactccccccccccgcccgcccgcccgcc

SEQ ID NO: 101817 - DNA, 1110 bp, Homo sapiens
tgggaaggagggattttgaaagtggattcattagtacttggggacagacaggatggggaaagtgggagagggaggcaaaaattacatcatggtcccgtggcatctgggacagctgttatcagctgaaaccccccagagcagctgtaaggtgggcacggaagagctcagtgtgggccaagttgggtttaagggcctggttggatgtggagggggagatgatcgaagccttagggtggagagagattgccttggtaacatcatcagggtaggctgaaactttcaggtaagcagagaagatcagaagtgtttgagactgcagttcattgtcaccaggatctttggaggtttcccaaaggtgttagaaaaagaggtgttagtaagtgataaccaggagtggagaagagcacaggaacagagttattcagacacccggtgtcttgggggtctcctgcagcgccactggcttcaccacgcggtcagacattgggcccgcccgtgatgcaaatgaccctgtggatgatcgccatgcacccccaggcaagagaaccgttggggaccagatgaagaaaaatcaggctgctgacgatgacgacgaggatctaaatgacaccaattacgatgaggtgagatgtgtccggctttcgtggctcctccagccagtctctgggagcagctgacctaaccagtgtgtgttggtgtctgtaatgaatggcttggagtggctcatgcatttaaattttagctattcatggaacatctttactgagagtgagagggagcaggaaaaacacggagaaatgtgcactttttgtccctcagaagagatgttcttgcaggtgttaggaccactgccttggcattttctattgcccagtcttttttttttttgagacggaatttcgctcttgtcggaagagatgttcttgcaggtgttaggaccactgccttggcatttcctattggccagtcttttttttttgagatggaatttcgctcttgtcggaagagatgttcttgcaggtgttaggaccactgccttggcatttcctattggccagtctttttttttttttttttttgagacggactttcgctcttgttggccaggct

SEQ ID NO: 101818 - DNA, 1124 bp, Homo sapiens
tacaaaaaaattagccaggtgtggtggcgggcgcctgtagtcccagccactcgggaggctgaggcaggaggatggcgtgaacctgggaggtggagcttgcagtgagccgagattgcacaactgcactccagcctgggcgacagagcgagactccatctcaaaaaaaaaaaaaaaatagatctttttccatacagaagaaatttgttattatcacaaggtgttgtctgagtgaaatgaaggctgttttccttctccttctgactgctctctcagggttgtgggaggggcaccagggaccctctgagaactttgttttgcacctggtcatgtccagctgactcttagcttggcctgtctcacaggtgtctgactccgtgagtggacagaccgtcgttgaccccaaaggctacctgacggatttaaattccatgatcccgacacacggaggagacatcaagtgagtgctttgcagaatcgctgggctgggatggagactctagttgcctagggtattttggattttatatggacagtatgctgtcaaaatgggacatggcggttctaagaaatgtaaagtggagtagtttgttttttccatttgaaatgtatctgtatccattcattgcgtacactcaatgtgttacatatgatactgcaaagtccctgcctgtgctgggcaggaaagcagctggctgtgtcccacatgtcccatctggaccttcggttctcagcgtttgtctgcggggaggctacagaggcttggaatagtgcgcactgaggttttgagttggtttttgtaactcaggacatcaggactgatagttcttacattgtgactgtgaagtgggtgccctcatcccaggtctcgggtgcacccctgacagcatggcctgatgccgtgtgcactctccctctcatagtgatatcaagaaggcgcgactgctcctcaagtctgttcgggagacgaaccctcatcacccgccagcctggattgcatcagcccgcctggaagaagtcactgggaagctacaagtagctcggaaccttatcatgaaggggacggagatgtgccccaaggtgaggtatttcctgggaggcgtttcctgggaggctgcgtgattgtg

SEQ ID NO: 101819 - DNA, 1952 bp, Homo sapiens
gtaagatggccctgcacctgcccccgttattgctcgagtgctttagcagcctcttcactgtcctcactgtaccagagtgaacatgggcctgtgtgtttccaggtgagtctggattcttgcactggagtcggctctgtcatctcctccctgggaagggcttggaccagactaatcctgtagcagagcaaggcctggctcagttcctgcctgcctgcttttgattaagtgtgatcaggcgctggtccctgtgttctgacccctcttgacgctgctgtacttgcccttcaggccaaccccaacagtgaggagatctggctggcagccgtgaagctggagtccgagaatgatgagtacgagcgggcccggaggctgctggccaaggcgcggagcagtgcccccaccgcccgggtacgcagtggcaggcagggctgggccgtctggggtgcatggtgtgcacatgcgggccccacgcctggcttgggtggtgatgggagtgagatgacggcaggcaaacgagaccacagcacactcatctttgtgatgtgactaaaacattcatgtggccgggcgtggtggccgggcgcggtggctcacgcctgtaatctcagcactttgggaggccaaggcggacagatcacctgagggtgggagtttgagaccagcctgaccaacatggagaaaccccgtctctactaaaaatacaaaattagccgggcgtggtggtgcgtgcctgtaatcccagctgctcgggaggctgaggcaggagaatcgcttgaaccccgggggtggaggttgcggtgagctgagatcgcgccactgcactccagcctgggcagcaagagggaaactgtctcagcaacaacaacaacaacaaacatgttcatacggccgggtgtggtggctcacgcctgtaatcccagcactttgggaggccaaggcaggtagattgtgagatcaggagttcgacaccagcctgaccaactctgctaaaaatacaaaattagctgggtgtggtggcttgcacctgtagttccagctacttgggaggctgaggcaggagaatggtgtgaacccagcaggtggagcttgcagtgagccgagatcgtgccactgcactccagcctgggtgacagagcgagactctatctcaaaaaaaaacaaaacaaaacaaaaacatatatttatccccaccttttgtgtacacaaacaggctatgaaaagcttacaaaagtacacacagtactgcaggtaacagtgttgaggatgagtgtaccatgaagcacgtaccctggagctgatgccctgcgtgacagtgcatgtctgccccacaggtgttcatgaagtctgtgaagctggagtgggtgcaagacaacatcagggcagcccaagatctgtgcgaggaggccctgcggcactatgaggacttccccaagctgtggatgatgaaggggcagatcgaggagcagaaggagatgatggagaaggcgcgggaagcctataaccagggggtacgtctctgcctgcaccctggggctgcagctgacccggcattcacaaaactgagccccctggtgcagggtcattgcccttcgcctctgaggagatgtggagggctgggggttacagctgatggagctgcagactcaggacccaaaccctggtcccctcgctgagttctgtgcttttccttatatgaagctgcacacactgctcagaagtgcagagtgtggcacacctgcagtaaaggctggtacgtacagacctgtgtgcacaggtccacagcaccaccgcacacctgtacacccacaaatgcagagtgtgaggggtgtttttccatggacatggcagccctgagggactcggtcacccactgcagatgagaagctgggcatggctgtgtcccagttcttcatagacaccacctgagctgctctcttacttgttggttgcag

SEQ ID NO: 101820 - DNA, 1016 bp, Homo sapiens
gcgggaggattgcttgagtccaggagtccattgcttgagaccagcctggccaacatggtgaaaccccgtctctactaaaatacaaaaatgagctgggcatggtggcgggcgcctgtaatcccagctactcgggaggctgaggcaggagaattgcttgagcccgggagtgggaggttgcagtgagctgagattgcgccattgcactccaccctgaatgacagagtgagactctgcagggtgtccagtctgtgccctcagggctgccatggttttgggtgggccagagtgctcatcctttgtggttctccttgcacaagttctgcgagccgtgtgtgggaggcccctgtcgtggtctgaggacgtcccgggttagaatctgtaggctgggcacctttccggaaccagaggctggagtgcaaatctttgttctttgtttctgaattataggtatcctgtggtctgaggccatcttcctcgaggcaaggccccagaggaggaccaagagcgtggatgccctgaagaagtgtgagcatgacccccatgtgctcctggccgtggccaagtgagtggggcccccacaggattgctgaacctcggggtcctaatgggctctttttccagagtctgtctgcctcttcctggtcattgtaaagatgcccggcagcagggtgggcttccccgatcctcggctgccgtcgctcctgctgtggtctggggcaggcgcctctcctggcagacacacctgagggtgccgtggtcagagactcactggggacgcatgtgattcacactggtgcgctggccgccgggtcacagactcactggggacgcgtgtgattcacactggtgcgctggccgccaggtcagagactcaccggggacgcatgtgattcacactggtgctctggtcgccgggtcagagactcactggggacgcatgtgattcacactggtgcgctggccgccgggtcagagactcactggggacacatgtgattcacactggtgtgctggcc

SEQ ID NO: 101821 - DNA, 1031 bp, Homo sapiens
ctgactagcttcccccactggtttctccacctgccaccccttctgcctgcaaaacaccctggcagcttagagggcacatccgggtccctgcaagaggcccacgatccaggcacaggcccctagcccctgccagggccacagcaatgggctgggggaggacagtcaccccgctggaagcaggcctctgcgggcaggcaggggcccgggccaccctgtgaaccacagcgggtgtcaggagccagggccggccgcactcacggtccgtctgcagggcagcggtcagcatctcgcggcacttgttgcgcacggcatcacaggtgacaggcaccggaggaaatgtggtgatcctcggagtcgacggtgccctgggcagctccggcctcttgcggctgcagagagccagggccagctgggttcagactcaaggctgcaggcaccccagcgagacactggtcctagaagcagcaggtgccacagcataatcccccaccaacccctgcttgttctactctgccagagtccaacagtggcctgtggccctgcctatcttgagtccagcccagatgtccatggggtgtgcccagcagccaggagggagagggccatgaggtccccagtgggtcagggtgtactctccaggtgggaacaggatcccagacccagcagtcagcatctgggcagcattaccagtcgatcagaatgaacctggcagttcctgccacctctggggtgcccacccactgggccgcaacacaaatactctgctgagggcagctgcagctgctgcctggtcagggagagggagagacccacagctgtctggggggagacaaggcggggccgcccaaggccaggttctgctgtcacagacgacacccctgggcacgtacagaatgggagaaggatgcccctcagggctggaccccaacatggggctgcccaacgaccaggctgcatccacctagccctcccctcatcccctctgtggaagttggcagaagcaggcagcttcctggaggaaaatcaacttg

SEQ ID NO: 101822 - DNA, 1054 bp, Homo sapiens
cagggcaccgtcgactccgaggatcaccacatttcctccggtgcctgtcacctgtgatgccgtgcgcaacaagtgccgcgagatgctgaccgctgccctgcagacggaccgtgagtgcggccggccctggctcctgacacccgctgtggttcacagggtggcccgggcccctgcctgcccgcagaggcctgcttccagcggggtgactgtcctcccccagcccattgctgtggccctggcaggggctaggggcctgtgcctggatcgtgggcctcttgcagggacccggatgtgccctctaagctgccagggtgttttgcaggcagaaggggtggcaggtggagaaaccagtgggggaagctagtcagggctccctcttgcagatgaccacgtggccatcggtgcggactgcgagcgcctgtcggctcagatcgaggaatatatcctttgggtaggggctgtgggcctgggtttctggtggagtcaggaggctgcctggcctggtgccctctggtggctgctggatgccactgcccagctgtccaggggtcacctgcctgggtggtcacctgcctgggtggtcaggctgtctcacctcaggagggcccccggaccagctgaagggctgattctgtctgcttgtggggcctaggtcccctggggctgtagcctgaagctgggtctcagtcaggaatgggcctggggcaggcttggccctgcagcccttcacctctccaccaggtgtgggtgggcagaccgacccctgtgtggctgggcagaacctttccagcccccaccccaacatggcccccagcggggcaggtggtaggtggagggcagcgacgttgtcctcaggtgggtccttaaaacacttgcacgcatcttccgggacgttggaaacacagacatgaagtataagaaccgtgtacggagtcgtatctccaacctgaaggatgccaagaaccctgacctgcggcggaatgtgctgtgtggggccataacaccccagcagatcgctgtgatgacctcagaggtgagcccctgttggaggggc

SEQ ID NO: 101823 - DNA, 1071 bp, Homo sapiens
agggcctggcctggcccagcccagcctgaacggagggccctcgaggtgttgatgttggtgggagggccgtgctgcctgctgcctggcagtgactgcaggaccctcagtccctgccatggaggtggacactgagtgtgctggggagactgtggatcccatgagatggcagggaccctgttaagaggggagtgcggctgggtgcagtggctcacatctgtaatcccagcactttgggaggccgaggcaggcggataatgaggtcaggagttcgagaccagcctgaccaacatggtgaaaccccgtctctactaaaaatacaaaaattagctgggcgtggtggcgcatgcctgtaatcccagctactcaggaggctgaggcaggagaatcacttgaacccgggagacagaggttgcagtgagtccagatcgtgccactgctctccagcctgggcgacagagcgagactccgtctttaaaaaaaaaaaaaagaggggagtgtgtcgaggcggccgctgcacctggcagatgggactcgtgaggggctgcaaggacagcctttccttcccctcgaaggctgcatggggcctgggtcggtgcagagcctgcctctctcctgctcccagccactggtcagaacaggctctgcctgtggccggaggctcacccttgggccttccggaaggcagccgcgggcactggggacccctgctagttccccccaccattgggaccctcttgccctcagccaagtctgggccctcctggtccccagccaatgtgagctgcttcaggctcacacaagggcctctgccccgataaactctgtctccctcccccggaggctcagctttggaaggttggagtcacgaggcggcctcggatcaggtcacctgtgggagctcagtggctgcgaggcccgcactgcccatgttgaggggatgccgtctgcagcggagcatggaggtgaccctgggttcacccagccctgttcacaggtgcagacccgcagctctgatgagcccatgaccacctttgttgtctgcaacgagtgtggaaaccgctggaaggtggg

SEQ ID NO: 101824 - DNA, 1087 bp, Homo sapiens
ctggtggccacagcagagtcctgctctggggacgcctgcttcatttacaagcctcaagatggctctgtgtagggcctgagcttgctgcccaacgggaggatggcttcacagcagagccagcatgaggggtggggcctggcagggcttgcttgagccaaactgcaaaggctgtggtggctgtgaggacactgcgggggttggggggggggcgtctgtacctcaggggatgccccgctgtggtcacccagagaatcacccttcctggtctacagatggaagctgcaggttggtgactttgcaaatgcacttcctacagatgaactattaaaagacctgcaacattgaaaaaactcattttttccaccaaaaccttggccaggtaacctaccttaggcacctgcaaagaacaggaagtgatggctgtctcgcaacagagcctgggctgctcctcctgctctggggagtctaggccgtggggactgttctggggaggctcatgctgtctccatgacgtctgtggcaggagtccctgaggacgggagctgcctagctacagttttcttgccaaggcgaggtgttttgtgaatctgtgctgatgtaatgtgcaccttcacgtatttatgcatgtggcaagcgttacttcctgtgcacgtagccagccctgggtctgtctctggggtaatgaaaaaggaccctaataaacacctgctcactggctgggtattctttgtaaccagtgtttctggctcctgccacctggggatttgcttctggagtgacttttctgggattggcacgtgggtgggaggaggctatgggtttaggctgaattcttgtacctgtcctgtgctgctcaacaggctgggctctgccctcagtgaaacgtcccccaggaggctgcaaccctggggagagttgaagccagttaatggtgtgttggccgggctgttaccttttcttcagcacacacggtttctctctaaacaaccgatggctgcacctctcccctgccccctggaaagagaggtttcctgaggatacagtgggagggtgctgctcccacccaggttgcagggttttcttaccc

SEQ ID NO: 101825 - DNA, 1100 bp, Homo sapiens
ttgtgaagtgtaaatgaggccatgactggcaggtggtacctggaaaaaggtgcttgtttttactaaaaagctgtctgaactttcaaattaaggcagagttcaaaataagtgatagttacttagtggaaaatgaaacctatccaacatacagtttgaggttaccttctagagatgtggcattgagacaatgttggaacattatatacaggcttctgggtgaagaggtggctttgactgaggacggtatgcgattttccagctcttttcctaaatagacccttaagcatccaaacacatgattccgcttttaaccactgacccaaattttaagatgactgtggtaggctagggtgcagcctcagaactgagtggcttatccaggattaaagttgacctcattaggacttaattccatctaagtctaagtcagctggctgtggaccgtaatctaacaagggctccgaaacaattcaaaaaattcaaaaagggtgtgaaaatttaatgactggaccatcctattgatttgcaaaacctaatattcagctctaaaatcttgagtgtgaagattgagtgttccaccataaaaatagaagagaatttgtgttaagctatacccttcacactttttgttcacttgtaagaaactatgtgattattttcattcctgggaaaacctcccaccgctgtctccagttgtgtacgtgggtgtgtatgaaatccgccccaggccccttgtcaccccacagtatttctttacgatcctcattctactgttagaaatccagaggaatgtgaggaggaaagcaagtataaacttcatcataattataacaagttgttaaaaaggttgtgttcatttcagaaaatgtcttcatgaggtctggtggtctttttccctgacaatttgtatctggtgttttgtaaagcattaccattttatatgaagttaaagcagttactttgaaaaagttacatggggtaagtataaaattggaaaggatatttttgtagttttaagaagagtaagacttctccgcgtgaaaaagtgttttcttgtgaattagctgaagctaccctgtattttaatagttaggctcaga

SEQ ID NO: 101826 - DNA, 1102 bp, Homo sapiens
tacgagctctgatcactgcaacctctgcctcccgggttcaagtgattcttctccctcagcctcgccagtagctgggattacaggcatccaccagcatgcctggctaatttttgtattttttagtagagacggggtttcaccatgttggccaggctgttcttgaactcctgacctcaggtgatccaactgcctcggcctcccaaagtgctgggattacagtcatgacccaccgcacccggcctaaatttgaatttcaaataaacgtcaaataacttttagtattgttgtttaccttaatttccaattgaactgggattttttttccttctaaatctggcatctctgggtggggcaggggatgaggtgggtgttgacaaaagataatctattattttcagaattcagaatttcaaattggtatctgtttagaacttctattgttctgctcttacctttaacataaatcgctctttttaaacatttttaattatagtattgcctaagtgtaatcttgaacatgggcggtgctgtgagtgctggtgaagacaatgatgagctgatagataatttgaaagaagcacagtatatccggactgagctggtagagcaggctttcagagctatcgatcgtgcagactattatcttgaagaatttaaagaaaatgcttataaagacttggcatggaagcatggaaacattcacctctcagccccgtgcatctactcggaggtgatggaagccctagatctgcagcctggactctcgtttctgaacctgggcagtggcactgggtatctcagctccatggtgggcctcattctaggtaagtgtggaaggagagtctgaaaactcatctgtctcagggaaggaggcatctcctttgacagaaaatgtagtctgctaatggcctgcctgggtcgagaccgcagccttcccagtagttatctgacattgacacatcactgggtggtggatagagggatgagggaggaaggcctgcatgcatctcatgggccccggattctccagagggacctctcctgttctctgtcccctcttcctgtgctgccacagcctgtactgcgcacctgccctctggac

SEQ ID NO: 101827 - DNA, 1016 bp, Homo sapiens
tctaaacagtatatgtaactagcttttgccattttaaaagaaggcattaaagttcttattttagggattaaaatttttagaaacaccaagtgcagtttcaccacccccacatctcactcattgtgtagtattaatagatcttacataagatgataagaagatgacagagacagcagcgactggagattgtgtgaaatttggataaaacttttgatattcactttcatactattttgtttggtatttctagagttctagttatatagtataattctttttggaagtaattcttggacatttgtaattcttttcttccagctcctcacactgtaaactgtgttacattgctgtgggattttaacctgtggttagcatagatttactgtatagacttgttgcaatgtgatacttttagttgcaggaagcattttttacttccaggtttgacttctgtgaaccttcctttgttactgggaattgcctggagatttctccggattgttctcagtatgatcgtgtatactgtggggctggcgtgcagaaagagcatgaagagtacatgaagaatcttctcaaagtgggagggatccttgtcatgccactggaagagaaggtcagattcccttcataactgacatttctgcacactgtgtgccaaggtctgttctgggcagtgtacggatacttactcttttaacaatttcctgcatttcacaaatgaggaaacagaggcagggacaggtgagggagatgcagggtcacgcacatgccctagctggggccagaagctgactcaggtgggtgcttcagagcctgcacgtgaaacgcttttctccaccttccttctctgtctctctctttttccttcttctgtcccttccccctcacctccctcttccttccccttctccttccccccagctgttctgagttttaattctaattgttaatctattataattgttctgctgttagaattatatataaaatagagtcattctattctcatcattagt

SEQ ID NO: 101828 - DNA, 1083 bp, Homo sapiens
aaccaaaaagattcttgctgtttcttttgctcctctgatccagccctgccattcagagtcaggaaaatcaagacttgtccagttacgtaagtataccaatctttacttattttatcttttagatcttttctctctggttagattttaaaaggaaacaaaatttacaacaaaccttttgatattaaaaagcaccactcccatgctgaaactgtaaaattctacaagcaatttcaggcattataaaaattataatctatttttaacctatttcaggtaattttagccgtcttttaaatctacaaagagctgttgccggtcacaccattgaaagccgaggacgcacataaaagggagctcattttgccatgtgggagacttagcctatttgccgcctccactgggaggggcttacagaaagagccatcagccagagggctcctacagagtcatggggcttctgctccccagggcgccaagcgcctgctgcctcatgggtagacaaggttagagaacacattccagctaatctgctggggtgtggataggagactttccgtggaaccttacacagccgagcctttgtgtttcactatttcaggatgcaaactgagcaaggaactgataccagggccagcacgacagcaaaacctcctaatgttttaaaatttaaacggctcacacagaaatgagagttccaattgattttatttaaaataaaactatcaggatgctctctgatcatttagaaaatttggaaaatgcaaaaaataataggaagggaaaagttttgcatagtcttacaaaaaaaaaaaaaagttttgcaaaaagttttacattttggcaaatctcttccagaaaggttttttgatttattaggaatcacctatgaaatgattacactttgctttggtctctactaagtacaggttctaagaactagacacggttcttgaaatttgataatgagcaacaataggacatgcaaaacggttaattagggaaggtttggcagagggtgatgtctgtgcttggccttcaagggcaaaaaggagttccctaaagagagaagaaaggggagaaaag

SEQ ID NO: 101829 - DNA, 1146 bp, Homo sapiens
gatacgtacaatggtacagtccttctgaggaagggcatgtgaggtgttcgttgtgatacgtacaatggtacagtccttctgaggaagggcatgtgaggtgttcgttgtgatacgtacaatggtacagtccttctgaggaagggcatgtgaggtgttcgttgtgagacgtacaatggtacagtccttctgaggaagggcatgtgaggtgttcgttgtgagacgtacaatggtacagtccttctgaggaagggcatgtgaggtgttcgttgtgagacgtacaatggtacagtccttctgaggaagggcatgtgaggtgttcgttgtgagacgtacaatggtacagtccttctgaggaagggcatgtgaggtgttcgttgtctgtggtagacctgggtctgtgggaggctcaggattctggtccggactggagtagaacctggggagctattggctggcctctgttatttaaagccacagaatggatgtaaaaccaaggactagcagtcatactgagacggtgaaatggtggaaattggaaccttagggagcagcactgggctggatggaagaggaagagcctgcaagagaaaagagctgcggaggtcagagggagcggctgtgccttgggccaggggagcagtgagccacgttccttatcccaagcagactccttggagatctggagaggccggagctgagggccgggaccccgagggcctcggaaggagttgtttcagcctcttggggcaacagccagatcccagtggctctggaagtaatctgtctagatgtgagatgatgaaggaaggaaggatggctgtacttgaggagggagccgggtcacagatggggcaagaggcacgatcgtggtgttgagtgaagagaaaggactgaagacaaaggaagtgccggagcctgtcctggagaaaggagaagggacctcttgtctgtggagtcagaaaagcaggaaaggttgaagggagaaggtgctacttactcactaccaggggcctgggacacaagcctgtttgagggtttctgaagaacagtggagatgctgagattctgtgcaggcctttctgactttggtaataaacgttgtgcacaacacaagagctctccctatagtgcagactgttattattt

SEQ ID NO: 101830 - DNA, 2110 bp, Homo sapiens
agtttaatgtaattttccctttgagaaatgttgcctgcatgaaatcgtgagctttaattgtcaaatgttctttctccttggtgtgctttggagtttttgtttttcctgaaaaatgtttggatttgcatttccctactttaataaaaatggagcaaatgttcattgtgtaaataactatgaaaatattaacagataaaagaatattaggccgggcacagtggctcacgcctctaatcccagcgctttgggaggctgaggtgggcggatcacttgatgttaggagtttgagaccatcctggccaacgtggttgaaaccccgtctctactaaaaatacaaaaattagctgggcgtggtggcgcatgcctgtaatcccagctactggggaggttgaggcgggaggatcacttgaacccaggagacggaggttgcagtaagtcgagatcacacccttgcaccccagcctgggtgacagagtaagactctgtctccaaaaaaagaatgttggagacatattcactgtattactagtaggtgggtattaatatacacatgaacacagcaaataatagaataatgaaactgggctgtgtcaggaagacaaattgtgacccaggtgttgattccaccactgattaatatagccaagcaatattgcttcctttccctttcaaagttaagaattgatgcatttggaaatatcttttgaaaagtaccatatgattgtaaattagagcactaattgacatttgcttagcatgctctcatattcttgtaacatattcataaatttgccagttaattgaaatgatgctacgggtcttaggtgtgtaggcgttgtggtggtgtcactccgatgcatttgactgtgtctcactcttctgtgctgcagcaccagtggcagttcgcagcctccaggacttggctcgcatcgccatccggggcaccattaaaaagattattcatcaggaaactgtgagcaaaaacggaaacggactaaagaacacccccaggtttaaacgaaggagagttcgccgccgtcgaatggaaacgattgtctttttggacaaagaagtctttgccagtcggatttccaacccctcagatgacaacagctgtgaagacttggaagaggaacggagggaagaagaagagaagaccccgccggaaacaaagccagaccccccagtgaacttcctacgccagaaggtcctgagcctccctctgccagatcccctgaaatactacttgctttattacagagaaaaataagtctcctgtttgaaagggggaaataggaagagcagattgctgagtgtgaagttcgtgctgcctgtgtgctgttgaagggtcacctggaggcagacgttgtggggaagggaactgctgggctcatccacaccatggttttcttctagttcctgattgacctctaaaattctattcagttgtatgatttgtttacatagttccacaagaccttcattgcatagaagattgttttcccaaagtggagagaatcttcatagagaaaaagagaaggctgtttctttttcggctctgacgaaacactgaagtctgcgtaagagagactgtttgatgaccgtccctcatgcaacatgcacggtactcactaaaaatgaaaactgaagtggaaactaacctgtgttgcttataaagtgtgaaagcacaagcttataaatgtataaaatcttttctgggtgtgacgcacctgcgtccaagtttgaatttttatgatatgtaccacttaattactggcactgagtatcactgaatttcttagttttctagtggggaaacattattgagaagccctcccttattttaagtaagttgattaaatcttatgtgagttgccagttgtaatttttcaaaggaaaaattttgatggggtggaggaatgaattgccagataatctttctggaattccgagagaattccaaagagggtttttttttttttttttaggacatcttttgatacctttaaaagaaccactgtcaagtaatccttaaaagaatatcttggaaaaggaaacagattttttcctgtgtgtaagcaataagtgaagttacatttgccctaaccct

SEQ ID NO: 101831 - DNA, 1041 bp, Homo sapiens
ttttattgtaaagtatctctgctttatccattgctgaattcgataggatgttgaaatgctggtcaccaaaaaaggaaactgagcaaattcatttcaacaacatcaaaacttcagcttctcatagtaaaaagctgaatgttactaatatttttcatatctaaaaaaaaattcttagcaatgaaattgctgttaaaacacaaatttcaatcaaatacttttgtgtatagaaaatatgtatagtaggtagatagaaaagtataaaatgtttgttgaagtatcttattttagaatgaatggagaaatgccaaagatgaatccttcactgcattatgaaaatatttcacatgttctcttggactttatataaatctgtaatagattttagaattgaaaaattctttgtgaaggtcttctaaaagtgttccaatttatctcaaaatctccatatataggatcagcttaaaacataaagaaaaccttgaatttctcaaatgtttgagatgttcaagacagtctcttaatccgttaatgcttttggaaacaattgacaaaatagggcaggcagctcatctcatgtcctgaagttggaatttaaataattcctatttgcaaattagaatgacagtgttggaatttggaggcagtagttgagcatattctctagtatatagctacacctttaataaaatgaaggaatgtcttcaatcatattttagtgggctatttataaatagtcttgaagtcaatttagtttatttatttaaaagataatgcatcctgaaagggatcatttatgaataacaatctgaagtcttttcataaaaaaaattaataaactttagttgtacatttagccagtgttatttgaagtatgtaacttttaaaatattaagtgtcttgtatgattagaatatgtgaatgagtaacttattttgtatcaggaatgttttggtactgtgttttcactcaaaccactgacttaacagatactgctgtgtataacatgtactaaatattacagttattgtgcataacagattg

SEQ ID NO: 101832 - DNA, 1060 bp, Homo sapiens
ttggaggacaggacttcaatcagagattgcttcagtacttatataaacagatctatcaaacatatggcttcgtgccctctaggaaagaggaaatccacagattgagacaagctgtggaaatggtcaaattaaatctgactcttcatcaatctgctcagttgtcagtattactaacggtggaggagcaggacaggaaggaacctcacagtagtgacactgaactgccaaaagacaaactttcctcagcagatgaccatcgcgtgaacagtgggtttggacgtggcctttctgataagaaaagtggagaaagtcaggttttatttgaaacagaaatatcacggaaactctttgatacccttaatgaagacctctttcagaaaatactggtacccattcagcaagtattgaaagaaggccacctggaaaagactgagattgatgaggtggttttagttgggggctccactcgtattcctcggatccgtcaagtcattcaagagttctttggaaaagatcccaacacatctgtagaccctgacctagcagtagtaacgggagtggctatccaagcagggattgatggaggctcttggcctctccaagtcagtgctttagaaattcccaataagcatttacaaaaaaccaacttcaactgaattctgcagaaataatggttatttgtgaacttgtctgatgatctcttcccatttatcagattaccttttccacaaaagaaagtctctaaaatatcacagatttacctagagggcaacatttagatacaggaaaattttacatagtgttttgtcttaggattagacgtgaccagattgatcctgtttgattttggagagatcctattctaacaaatactctaaaatgataaaattgaggtacaactctcttaaaagagtatggataactatattttctggattctggaggttgataaccatatgcacttaacattatattctataaacattaagtagtgccagttatgagattcccagttcttactaaattgtattagcaggagctggtaattacttgtattatc

SEQ ID NO: 101833 - DNA, 1134 bp, Homo sapiens
cgcctcagcctccctagtagctgggactacgggcgcccgccaccacgcccggctcattttttatatttttagtagagacggggtttcaccgtgttagccaggagggtctcttgatctcctgacctcgtgatccgcccacctcggcataatgattaaatttttatcgctcatatattccaaagtagaatatgaatgttagaaaaggctgggagactttttgaaaattaagtgttaattaataaagagtagaatgacttattgcactgaaccttggattttatttctttatattgtaatctttcagaataattttaaagatagcatttagaagagcctatgtttactgttcccatttcatgcttctgttcggtttgtgactgctctcattattactcagtggtggagttcatgtcacagaagacacaaacatgctgtaagtgggaagagattacttgatcgcatcctctcatgaatttttcttcccttaaccaatcttacaggactgaagattttgagggtaataaatgaacccacagcagcagctatggcctatggtctccacaaggctgacgtcttccacgtcttggtgatagacttgggcggaggaactctagatgtgtctttactgaataaacaaggagggatgtttctaacccgagcaatgtctggtaagaaaaatgcagggagaggctgggcgcagtggctcacgcctgtaatcccagcactttgggaggccgaggcgggtggatcacgagatggggagatcgagaccatcctggctaacacggtgaaaccctgtctctactaaaaaaaaaaaaaaaaaaaaaattacagaaaaatgcagggagagttgaagaggtttgggcagtgctttctttaacatatccaatgtgtaatgcatcctttttttcccccagaattctttgacttcattttgatagttttctgtatatgtaattttataccatttgtatatatttacagcaaaaagttaaatctcaaaaaatgctgggcatcctataagtcgcataaatacattgccagttacccaattacggctcacatagccagtaggacttttcatggtgatggtgaagaaagggaacagagggaagaaaaatttctttaaaatga

SEQ ID NO: 101834 - DNA, 1026 bp, Homo sapiens
tcgcttgaacccaggaggcggaggttgtggtgagccgagatcatgccaccgcactccagcgtgggcaacagagcaagactccatctcaaaaaaaaaaaaagtaaaactaatatggattcattgtacagattttaatgtataacatttaacaagttctaatcttggtaaatgtactagatagatttcaaatgcattttttgattttgtaaagataagggtaagttctcatgaaatctagtatttatgtatatatgtatgtctgtatgcttttactcttttatttatttacttatttgcaaatcctattcacaggttttaaacaaaaatggaatggttgagttttctgtgacaagtaatgagaccatcacagtgtccccagaatatgttggctctcgactattgttgaagttaaaggaaatggcagaggcatatcttggaatgccagttgccaatgctgtcatttctgtaccagcagaatttgatctaaaacagagaaattcaacaattgaagctgctaaccttgcaggtaacagtacccttgactgagatgcatttttctcaaaattgtgttgggttgaaaaccttctgtagtaaggtttaccacttcccaaaccacacaaccatagtcaaaataaacaaactatatggtaggtgtattagggttctctagagggacaggactgatagtatatatgtgtatatgaaagggattttattaaggtgtattgactcacactatcacagggtgaagtcccacagtaggctggctgcaagctgaggagcaaggaagccagtctgagtcccaaaacctcaaaagtagggaagccaactgtgcagcttttagtctatggccgaaggcccgagagcccttggcaaaccactggtgtaggtacaagagtccaaaagctaaagaacttagagtccgatgttcaagggcaggaagcgtccagcacgggagaaagatggaggccagaagactcaggcagtctaatcctccgacattcttctgcctgcttttattccagg

SEQ ID NO: 101835 - DNA, 1032 bp, Homo sapiens
taaaaggaattaaaacgaaagaacacaaactcgaatcctggacctgattaggggcacgaccaaagaaagaaataactaacggttctcaccctccctttcattccctcccgcggaaagagaaaggctggaactccgcttcccagaatgcaaagcgcggggcggggctaaagagatagcctgttttccctcaagtaggatcgcgggaccacaggtttgattataaacgccagtctctcgccacggcgctcctccccctcagtctcactggtcctgccggccgttgcgtggaagggggactcagtcgtcactggcagcggttgaatggaggctctttgccccgcgccctcacggtagatgaagtccttgctttggtcagagcgatagcttctccgattgcctcagagcaagcggactacatttcccagggggctgcgggactgccgggaggagtgggggcggtgcctcacgtctggtacagtcatcacaagcctgttcggcgggactgtgatggccagagagatgacgatcttaggtgggttcccgggggtccttgttgctcttgcgggcgtagaggcgatctgaggatgccagagtgggcaggggtggttgactcacctcctggatctagctggagcagcggaaggggagtcagaaaggtgacttagagacggttttcggctgttcggagtggatgggggcggggacgcctctaggagggccccggcccctgcaggccaaggtaggatagacggcgaccagctgtgtccatcccagggacatcaggcttagggaggcgttcctttcaacagcacctaggtttttgaattgcctgttgaattggggcaagctatggaaggctgcgagaacgtgcacctccaggacccctttgtggaggaagggggaggagctacatccggatctgtcggctcagggatgctgaatttggaggctttttccatcacatcgggtttggaattacctatcccccacccacacacacacccaccccgcgtctccaaggtgatgaaatgc

SEQ ID NO: 101836 - DNA, 1050 bp, Homo sapiens
ctactggaagtcctagccagagaaattaggcaagaaatataataaaaaggcatccaaatcagaaagaaagaaaaacaaattttcactgttggcagataatatgacgctgtatgtagaaaaccttgacaattacacacacacagacacacacacacatacacaaaccattagaactaataaaccaattacgcaaagttgcaggatacaaaatcaacacacaaaaatcagttgagtatatgtacattaccagtgaacaattggaaacaaaaatgaagaagacagtccatttacaactgaatacaaaagaataaaattcttagtaataatctaaactgagaagtattataaaatatctagacactgaaatctataaaagattgctaaaacacgcacacacacacacacacacaaatagggggcatgatgccataagccaaccagcccacaatgtcaagtttatcatccagaacaccaatgcggcagtggccatttcgattcggagtgtcttcttctctgaggtgcccataatagtcattgactgggttcaaattgatgccaattcctcagttcttcatgatgagttcatggctcacaaacttagattaattcccctcattagtgaggacattgtggacaagctgctatcctcccgggactgcccatgtgaagagttctgctgagtgcttggtggagttcaccctcgatgtgcagtgcaatgatgaccagatttgacatgtcacatcttgagacctcatctccaacagcccccaggtcattccagtgaaacaagatgatgaccctaatgactacgtggagcaggatgacattctcatcatcaagttgagaaagggccaggagctgagactttgagcctatacaaaaaagtgttttagcaaggagcatgccaagttgaaccttactgcaggggtggcttttgaatacaatccagacaatgccatgaggcatgcagtgtaccccaaacccaaggagtggccaaagagtgagcacttggagctggatgaggatgagtcacaggtgccctgtgacccc

SEQ ID NO: 101837 - DNA, 1040 bp, Homo sapiens
atacttacgtgactttcttctttattttcctttcaagttcccactcaaataacacctagatgtaatagaatcctcactgtccaggagcacagtttcgttctcaccctcccttgttattattttctccttagatcttactacctgtatgacatattgtgtatttatttgtttgtctctggtcttcctctagaatgcaaatgttatgaaaacaggagatctactgattttgttcattcttttttccagtgcctacaatagttcctggtatgtagaaggtatacaataaatattggcggagtgaaggaacaaatgggatttgcttgattctgctgcagaagactaagaaaaagacataaatgaataaataactagtagaatgttaacacaatcagaaaaaggaccatttcttttcatttggatgtctcaaatctatttgttgtttttgttgttgttgtttttctggctgggcttgaaatgtaggcatgcagccaggaggctccatgctgactaatgagatagaggtacccatttagcccagcaatattcatacattgtatatgcattcatttttctctagtgactttttaatatattttggtgaagatattcccaagataatgaagatatgttgagtgggcattaaaagtgatgagtctttttttccattatcaaagacaaatacaggtgtgtgatgtatgcagagaattagaagtagggaaaaaaatgagggaatccaaaataatgaaaagaaattaaagctctccaataatcgaaagaaaggccaaactgaaaacataaatctccagactctgcaaggatttatactgatgtggggcatgtggaccaatggctttcaggatgtgattcattttgaaaaaagtgtcatttccattgccaagtagagttcatggtttagtgaaaatttcatcttcagtctgatcacatgagccaaattctggccctatatattctgatgtgaggaatgaagtatttctagtttatttgtgagattccaagcataatatccaggagggttagtc

SEQ ID NO: 101838 - DNA, 1019 bp, Homo sapiens
ccatgtccatactatgacaatcttattgtcaacactatataaataagcttttaaacaagtcatttttcttgatcgttgtggaaggtttggagccttagaggtatgtcagaaaaaatatgttggtattctcccttgggtagggggaaatgacctttttacaagagagtgaaatttaggtcagggaaaagaccaagggccagcattgctacttttgtgtgtgtgtgtgtgggttttgttttgtttttttggttggctggttgttttcgttgttgttaacaaaggaatgagaatatgtaatacttaaataaacatgaccacgaagaatgctgttctgatttactagagaatgttcccaatttgaatttagggtgattttaaagaacagtgagaaagggcatacatccacagattcactttgtttatgcatatgtagatacaaggatgcacatatacacattttcaaggactattttagatatctagacaatttcttctaataaagtcatttgtgaaagggtactacagcttattgacatcagtaaggtagcattcattacctgtttattctctgctgcatcttacagaagagtaaactggtgagagtatatattttatatatatatatatatatatatatataatatgtatatatatatatattgacttgttacatgaagatgttaaaatcggtttttaaaggtgatgtaaatagtgatttccttaatgaaaaatacatattttgtattgttctaatgcaacagaaaagccttttaatctctttggttcctgtatattccatgtataagtgtaaatataatcagacaggtttaaaagttgtgcatgtatgtatacagttgcaagtctggacaaatgtatagaataaaccttttatttaagttgtgattacctgctgcatgaaaagtgcatgggggaccctgtgcatctgtgcatttggcaaaatgtcttaacaaatcagatcagatgttcatcctaacatgacagtattccatttctggaca

SEQ ID NO: 101839 - DNA, 1029 bp, Homo sapiens
caggtgtagtaaaaactcctgtgagtcctactttccctgagcacttgggctgtgcagggtctagaccagaatctgggcttttgaatgggtgttccatgcccagtgagaaaggacccattaagtgggttatcactgatgcggagaagaatgagtatgaaaaagactctccaagattgaccaaaaccaacccaatactatattacatgcttcaaaaaggaggcaattctgttaccagtcgagaaacacaagacaaggacatttggagggaggcttcatctgctgaaagtgtctcacaggtcacagccaaagaagagttacttcctactgcagaaacgaaagcttctttctttaatttaagaagcccttacaatagccatatgggaaataatgcttctcgcccacacagcgcaaatggagaagtttatggacttctgggaagcgtgctaacgataaagaaagaatcagaataaaatgtacctgccatccagttttggatctttttaaaactaatgagtatgaacttgagatctgtataaataagagcatgatttgaaaaaaagcatggtataattgaaacttttttcattttgaaaagtattggttactggtgatgttgaaatatgcatactaatttttgcttaacattagatgtcatgaggaaactactgaactagcaattggttgtttaacacttctgtatgcatcagataacaactgtgagtagcctatgaatgaaattcttttataaatattaggcataaattaaaatgtaaaactccattcatagtggattaatgcattttgctgcctttattagggtactttattttgcttttcagaagtcagcctacataacacatttttaaagtctaaactgttaaacaactctttaaaggataattatccaataaaaaaaaacctagtgctgattcacagcttattatccaattcaaaaataaattagaaaaatatatgcttacatttttcacttttgctaaaaagaaaaaaaaaaggtgtttatttttaact

SEQ ID NO: 101840 - DNA, 1050 bp, Homo sapiens
aaaattgtcacatggcaatgatcagttataacaagcaaacaaataaaagtgcaagcatatatatatacaggcacacaaacacataaaaattcacaattctggccgggtgcagtggctcacacctgtaatcccagcactttgggaggccaaggcaggtggatcacgaggtcaggagttcaagacaagcctggccaagaaggtaaaaccccgtcgctattaaaaaaaacaaacatactggtttctcctcttattcttgatccaatgcaatatatttaacaaaacatactttataataagaagtgcatgaagatcttgacttcaaagatggggaacatttttaaaacagagtatatactatgtgggtaagtgcagagtgtctaagtgtactaaaaaccctaggagctttgatcaaaagccagctggttacatcagttctgttggtaatctttcttgctgatctgtgaccttgaccttgtgcttgtgtctgtatgtcaaatctattttagggatggggaaaccatagttgagtttagtaggattgatgctcccatctcaaaggatatccctgcatatatactataaacactcaagcaattccagaagaagaaagatccattttccattacatttcttattttgatagagattggaaaatattatgctcttgaaaactgatagaaagcaccagttactccaaagagctgttgagaaaggtgagaagcaaacactctctgttaattttgtatttacactcttttcttatacttatgtgctgccaaaataatttgttaatgattattttgtgttcattaagaaaaactattgtttctttgataacagtagaaggtagtgaatagacattagtactaatcataaataggtatgtactgtctgtcatgtaatagttttctggagctttaaaaattgtaggtaaaattaactttatttaacaattttccagtgtcagtattttcaagacagagtgaagtacagcatccagaaatgtattgtgtttttgaaatagaaattgtttggcagtttagctctttc

SEQ ID NO: 101841 - DNA, 1042 bp, Homo sapiens
atgaggataaataatgtattaaccaaccccgtgaggagaatcaaagacaactctatcctagtatttcattcgaggaagggtgagtatggcttaaagcacctgtgataaagcagggcttttaaaatgtaaaatacactttgtaggaatcaacggtcagtgacaagagctcccaggaggttttatacactgttttggccagtcaagaatttgtaaagaattgcatctctgcagcacccaccacagactggccccaggaacatttgtcttcctttgattgccctttgctaagcccctgtcaacaatgggttttcactatcttatcttggccttaacaaggtgacagacctggtcagtggaacctggcagcaggtttctaatgtttgaaaggtaactgatggattagccttgttttttgtgtccccaaaaagaccaatagtcagactaaaactcaacagattatagctcagtgcaaggcagaatttcatactgttggagttacgcaaggaactcttactgagcagcgactctgtggctaggctatgtgagcattaccacatttgttcagcccaggggctctatgaaacaggtattagtgcttttgcacgtttaataatgataaactttcaagagtagccaactttcctatgatcaaagagttggtaaatggtagagccggaataaattgaacccagagccatccgtctccaaaagaccaccttggaagatagttcatggtcactagaggtttttagaaataagctagatatccagagatagcaaatgggttataaaggggattaagcatcagacaggatgattgattaggcagatgacttttcaactgcctcccaacctttaaattatgattctgtcatgtttggagaattactttacatgccatgctattatgaaaacagtagccagtggcaaaattattagaggaaaatagatttcacctcataaaaattagctgcccttccaattggatacaagttctttaaatttgtgtaatctggtattatgaaggataagatgtttgtaa

SEQ ID NO: 101842 - DNA, 1029 bp, Homo sapiens
actcccatagcttctggttttgtttttctaatatgcttttaataataccattgcttgtaaggaaacccaccagataaaggccagcttcttggcatggccttgattcaaagtccttggtcccagttgcatttccagcctaatctccactcccattggactaccacacttcctgtgtcacactcagctcttccttgcctttgagtgctatttctggaccctagaatggctgccattctcttctgcctggctagcccttactcattttttaaccatcactgactaccacctgcatgtgtacatatgaactaaaaacctggttacagcctatctgtgttcctagagcactttttacatatttcagtcattgcatttagcacagtatatactctctctcctttggcacagagactaaggaagaaaatcaccggcactgtgcactctcgggtcttatttactcactaggtgttattactctgtccttttcctgtcctgttcaggaaaacatacctgaatccaagtgagtgaaagtgtggttatcacccaagttatcttgaatttatttagtctgtttttttaaaagggaataatttgcaacctcttagaccttattaaattctgtacttaacactaaatacttacactaaatactctttagaactaatcatgacataccttatatctgatgatgacaaaccagcatgttatagatggagacacactgattttagcatatattgtgatttaagcattacagctgtttgttccaccagactatttatttcttgaaagccaggactattttattcacctttttccttttgttgttctagagtaatgatttaaacatttgcctactttagctactaaattaaattttgagagcattgccagggaagaatcaaacaccctctactggcattaatactttctcttttggcccatgcactggtaatgctaaaacatcaaatgtcatgctgatgtttttataacaagaccgagattgctttaccttgttttacttgtgttact

SEQ ID NO: 101843 - DNA, 1001 bp, Homo sapiens
tcattgttagtttccagcattgcttccatccactcttaattccctttctcacagccagccatcttcgttcagagtcttatcatttctcatctggagctcttgtgctggcaggcctgtttactgacatccttgttcgagtcttttacaaccaccagatcttcctaaaactccagcttgcttgtgttacttgtctgatcaaaaataatgtagcaattgcaatagcataatgaacatagaaaagtaatagaccttccttaatcctaacttactgttactatgggaaacattaatacaattaacatttttttaatttggtatctttaaataattgacttttccttaagtcttttacttagtatcttaattgatataacttacgttgtttggggaggaagatccctactagactaagcctccatatcaactcagattttataaagtcgctatatgcgaagcctccatatcaactcaggtttttttttttttccttttccatgaaaggtttcaaatgaaggaatcaaaataattttaaaagtgttgatcaaactgtcaatacactttctcttcttacacagaccctggtcttttttcactgaaattaactgttgtgaacctgatagtctccttgattctctgctacatttgcccttcaaccatgtggcctgtggtttgcatatctgaaaattttctgattctaacgtcagagcttatgcattttatttagataactagaatttcttcattctggattagaggtatatgagtaattttcaaacctcgcttgcttcctttttgcatttatttatttaaaaaaatgttcatagtacagtctatgtaagcttctagcttgaagctttgtctcctgctgttgccgcccctctctgcacctcctccccacctgccatcttctagcctgtcctccaagctagtgcttctcaaaatatctgcagtaaaggccaataatttgtttgtctgtttctattttattttttttagtaact

SEQ ID NO: 101844 - DNA, 1056 bp, Homo sapiens
tattcttgagaattcagtgtgtagattacttctggagagaggaattggaaagcttgaaagaagaaatagtatttttgttgacaacacttaattcgatttatcaaaaaccagagaaaatggacagttaatacaaatcctacaatagcaatccctgatttcagataaaaagttaattaccgttttgaggaaaaatagaagcatgtttgattattgtgtgtttattatagtataggccagtgattacttttggaattattaaaattcctcttacaaaggaaagagcattattagtatttctgagaaatgataaagtaattggattaaattaacacaagtaggtgggcagagcaacaaaaaagacgatgagcaagtggttaattctacttggattaacactcctgttttctagtatagctacaacctaaatgaatttgtcatgtcttaagctcttggaccttatgctgcttatttctgggaaggagaaatccaagtgaactaggtaaaggcataatgattgattattgtgctcataatccgttgtgaatagttcagtttcatctagctaactgaaaaactctggtcaaagagagagagcagatacagcatgctgaaattcaccatgttttacctgaccacagtgtttcaaaaagggaatggcaactttgagccaaatttgctctttacctgtaggcctcatatggataatcctaactgctttttcttcactattctgataatgttcagaaaacctagtaatgaagttattttaatcacccacttaaatgcttagcttttcttgtaatttcatcaagaaaatctttaaaatgttattttttaaaagactgcataaaattactaataattatttggttgcaagtcacttttcgtatattcatttatattttacttataattggaatttaaaatcaatgacgcaattatttgtaaatactaaaatttttttattcagatataattaggtgttaatcactggttggcagtctgaaatctgcttttatatttgatgaaacagttgatattgaaccccatttctga

SEQ ID NO: 101845 - DNA, 1033 bp, Homo sapiens
tgggtttccttctttatttctgttttgtctttactctgttttcctttttatttcttaatatctcattcatctttttttttaattgccaggggatccatgtgatacaatggggtcaataattacttatcttcctgtagtttttgttattgctgttaagttaaaatgcccaaaacagttactatctgcattttacggaggaagaaattgagtccttaagaatttaaagacgttttgaaagtcattcagctagcagttgggtagacctaggatggtcagtcaaatcttgatttatttcacacttttttgtttatttttgtcaaagcagtctcagaaagaggggtttgtgtaccaggtgttaaggaatagttaataacctttggtgatggatcccgcagtaaaatccaagctaaccccacaaagggatctataataataagaactgggtcttgagacatgaaacgagaattggctggctgcatcacttttgttctagtaccttattttcttctcatggtcttcataaaagtcttaggatttgttgaatattctagtacttgaaatgtaatttccaggctgagaatttaaaaaaagaatagtacagttatgtacatgttcatgcagtggcattgttttacatgttacgtacatttggaattttatttaaaaagaagtagggagacttgctatttatttgcagacaaagagagccagatacctttagttgaccagaacactcacaggccagctctactttttactgatgagtagtattccaacaccattaatgtaggtggttgggtctgttggttcaactggaaacatatctcaaagtttatggaccccattcctctattctcttgagaaaggtaacaaataagatgagggggcactgtgtggaccagtggtgataatgtgccatgaaccaagtgcacgttggtctacacccctagaaaagagagcaagagagaagaaacctatgtgtagaccttttcatggaccacacactggccacgttcctgatgttggtgaaaca

SEQ ID NO: 101846 - DNA, 1043 bp, Homo sapiens
ttgaaattcaaattgatccctacactatcttgcaaatattacaaatgaagaattacaaaagttgtggtattttagcttatcaaaatgcacccgaaacataaaatatttttctttaagttcttaaatcagaagaataggaaagagttgaaaataaatgtgatacattttatcattatattagtattttgttgaaattaataccttgaatcatgctatggataaacatttagcctagaactctaaaagtagtataatgtgaatcagatttaaagaattgagaaggctggcaattcaaaaatagaggaagaaaacactctttggggttatgaaaaaaaggatcctcttagtattaagatttcttaaaaagctatacacagttttaagatagattgttcttgaagataatggggcaaataattacctgctaaacaaattatgagtcctgtgattctttttttggttgaaataatttcaagaactccagcatatgttgcagttttggctagaaaggtgattgtgacatacatccattcatccattctccctctctccttccctccttccctcccttccttctttccactttcaatacatagggctggggtagcaaaaaaaaataataatagtaaacagttttgtaaaacttgataatagaattatctgacagggttaatagttgtgtttgaaattcagagctagtatggttcactctccccagaaaataaaattttaatttcttacacctcagggaataaaaactctaaattaaaacccatcttgcctctttaactttgtgtcacttagcaaaaatatctttaaggatggaaagaagagaccccatgtgtcttaaattccaagtcactgtgtgactaagctcggagttccaataaatattaaactagaattctgctgggaatttgagtcatccgcttaagctactcctgggaccaagacaactctggttgacctgatgttgatgtttattcagagctttggtggaaaggagcctctcacccttggacttctaattaacaaagtcattc

SEQ ID NO: 101847 - DNA, 1004 bp, Homo sapiens
acatatggactgactatgtggcagcatatataaatatttcgtttgctaattgcagttagttatcagattgcacatgaacagacagaatgacatatgagaagttccaagaacattgtgtaacaggacatacaactgaaatatagttttctcacacttggtgagatttgagctcagcaaacacaacttattctgtattcattcattaagattaaaatatttaaaaaatcaccaaattgagaacatcgttatgttgtcatgttcgaggaccaatgccaaaaagaatgtgagaaactagagcttaagagccaccagctcacaagttgcttgacataatttggaatcagttgatagttcaatatctggtttccccaaaaattaagtacccaatacctctttttatcattttggagcttaactgatgagctagttagaaaggagagaaagcagaaaacagaataatttttaaaatcacaaaatctctaaaaactgaaatttcaagtcaactctttataattttcaaggcaaaactgacagaattagaaatgtttaccattggaagagaagcaaccataaaaaataacttaatgcgcttcctgttttatagatttatacatccatctcccatagataaagtgtctctccaagatcccaagtctagtttgtcaaggataggattcgaattcttacctcctagacttgtgctttctccagctttgcatgctctcttgattactattaaaccttttcggtttatctctagaatatgacttggaagccaaggtggttttgtgaaatgggtctgagtttttccattgatgatatttgagttcaaatcctggttcagtttcattgccttcatctagaaaaatgataattagaccttgttttcaaaaataattttaacattagaaacgaagtacgtacaatgcctcaaacctaagatgttctgaaaatggtagctgttattatcattgcatctttgaggcctgggtacttagtatgga

SEQ ID NO: 101848 - DNA, 1021 bp, Homo sapiens
ctgaggcgggccgcgtggagacgtgaggcggccgccgtggccctcacagtcggcgtttcgccgcctgcccgcggtgcccgcgcacgccggccgccatcgccttcgcgcctggctggcgggggcgctgtcctcccaggccgtccgcgccgctccctggagctcggcggagcgcggcagccagggccggcggaggcgcgaggagccgggcgccaccgccgccgccgccgccgccgccgcgggggccatgaccgtggagcagaacgtgctgcagcagagcgcggcgcagaaggtgaggcgagtccgccagccggcgggccccacttctccttccgacgggctgtcctctcccgctgcggccgggcgccccggcctcgccgccgccgccttcccgggcttcctccccggtcacccccggcccctgcccatcgcctcgggggcgtcgcgcccagagcccagctgcgtgtgggaagcagagtgtagtttgcgggcttcaatccacttccttctgccgattgttttcccgtagcagacggtgccaggtattgagagcgaccctcacattcctacagtgctctgtgtggcatcttaatgaaactttattctctccccttaaatgagaaagaatagctagttgtcatcctttctgaaccgattttgtctttcaaaggtagtagtgtaccaggcctgctattttgcaaaacggtctccaccaaaatcgaattacctgcctcgcggggcaggcgtgttgaccaggtggactctagaagtaggtggtttgcttggtttcttttccttttaaggtttccctttcttcttcttcttttctgtttttttttttttttttttttttttcaatatagaaactgtccctaagagaggaaacctttctggccatgttattccaggaatcttttgtcccctaagtttgaccttgttctttcgttcaccctttactcttgcatcagtcacacattcaaatggtcactcactaaagaaaacaattaaaaaactgtttgtgaaa

SEQ ID NO: 101849 - DNA, 1290 bp, Homo sapiens
tcttaacagtttctttgaagttgaagtattttaatattgattgtttaatttacttttatggttagtactttaaccattttctttttctttttcttttctttttttttttttttttttgtgacggaatttcactcttattgcccaggctggagtgcaatggcatgatctcactcactgcagcctccgcctccctgggttcaagcgattcttctgcctcagcctcctgagtagctgggattacaggcatgcaccaccacgctcagctaatttttgtatttttagtagagacagggtttcaccatgttggccagcctggtctcgaactcgcgacctcaggtgatccgcccgcctcggtctcccaaagtgctgggattacaggcgtgagccaccacgcccggctgctttaaccattttcttgaaacttagtttgtaaattttttctccctgtgttttgttctagaagttttgccattttaggtttacgatccatttggaattcatttctgtgtgtgttctgaggtgtcactaagtcaaggttcatttattgcatgtggaatctagtcccagcacctacttttgaaaaagctgtcctttcatcattgaattatattggtacctttatggaaaattaattgatcatgtatgagtgggtttatttttgaactcagttcctttctatccttatgtggtgccgttctttcttgattactgtggctttgaaatgtgccttgaagtgggtgaatgtaaattcttcaactttgttcttgttagaaatttgttttggctattctagaattttttgtatttccatatacaattctgaggtactttgaacagttggacaaagagccttctggggtttctgagtaggattgtgttggatgtatggattctttctgactgtttggacatctttacagtattttagcctttcaatccaagaacacatatatttctccatttatttaggttttgttttttaacggtttaaaggtctttgcatatcttttgttacagttgacttttttgatgctattgtaagtggtattttttatttttatttttattttttttgagacgcagtctcactttcactgcaaccgccgcctcccaggttcaagcgattctcctgcctcagcctccctagtagctgggactacaggtgtgtgccaccacacccggctaattttttgtatttttagtagagatggagtttcactgtgttatagccaggatagtcttgatctctggacagcatgatccaccagcctcggcctcccaaagtgctgg

SEQ ID NO: 101850 - DNA, 1779 bp, Homo sapiens
tagcatgaccaaaaactgtatttgctttaaagaattgtgacaaatataactgctaggaattatatagtattccagtttcagagttctacttagagcacgtttattttgttttattagtataagggagtttatttttggattataagctaattaggcaaacaagtacagaaactagagatgcataaagatttaattggacaagagagctataataggaatctgattattagcatcaacaagttaaatacatattttatttaaactgcagacatagtgatttaaggatatgatttgattcataaaagttttgtttacctacttgttttccagaatataggcactctaatttaaaaacagactgtgttccaaaagattttgcaagttgggtttttggaactgaaaatacatgttcccatagaaaccatgtttcctggtggtgtgttcttatttagaaatgtaactctgtgtgaacttagcttatagtgctgagtaacagtattttttgggagaaatacatttagagtttctactcatgatgtatttattttatctactaattaatagggatggggaatactcttttacattgtaattaaaaaaattttttttaagacagagatttgctcttgttgcgcaggttggagtacaatggtgcaatctcagctcactgcaacctccgccttctgggttcaagctattctcctgcctcagcctcccgattacagggattacaggcatgcgccaccacgcctggctaattttgtatttttggtagagatggggtttcaccatgttggtcaggatggtctcgaactcctgacctcaggtgatctgcctgcctcggcctcgcaaagtgttgggattacaggcgtgagccactgcaccctttttttttgagatggagtcgctgttgcccaggctggagtgcagtggcgtgatctcgactcactgcaacctccacctcccgggttcaagcaattctcctgcctcagcctcctgagtagctgggactacaggcgcctgccaccatgcctggctaatttttgtatttttagtagagactgggtttcaccatattggccaggctggtctcgaactcctgaccttgtgatccacccatcttggcctcccaaagtgctgggattacaggcgtgagccactgcacctggcccagatggggaatactcttaagggtcataaacatgatgcagatatggttgaaaggttgggtgacaggtaggaaaaaggactctgtggcaagggaggatggaaaccatcatttatctaggactaactatatccattgttctttgctagctatttctcataaagtatctcatttcttttttctggattgcatgaatgcttaatgttttagctctggaattctataaaaagtaggaagagacttaaaatttagaattcttggcatttttaagctttaatggaaagggtataccttcagatttatgtgcccatagaggtatatgagtaatttattttaatgctaaagtgctgttaatccaaaaagattgagaaaaacttcaatctgtgacagtaggatatgcagcatacctgaaccatttgttacccgccaaaaacttgaaaaccaggattagttgcctggtgagtaataaacaactcttcaagagaatgcaggttttggtcagtaggagttttactacttgtcacaaataaggagaatacttggagtattctttagggcattgttgcctctagggaaagtgacagggaggttttatggggtgatggagaggg

SEQ ID NO: 101851 - DNA, 1651 bp, Homo sapiens
aaactctcaggtttttaatttatattgaaattaccaatatttccttatatctgaagtgcatagtactgtattttgcacatagtagacacttaaggatgttattgtgcagtaaaaataacaggaaggaatctgaagacttgtaggtaatcttgacttctttgcttattaatttttgtggtgtttgcaagtaactgaatctctttggacgttgcatcttgcccctttggtttagcagtgggaagaggttgaacccacctccctgtacttaactagagaaaaaaaatccatacaaggagcatctcagagcccagaagaggagctctagatatggaagtggattggatgggaaccaccttggatttggaattgctggtcagggagaggaccatatttaggacatttccagttgaggatcagggcgtatcacaggtcagaagtttcataaatgggaaggtacaaaccttgaaaaacagactagggtcttaatcacaacagaaatggcaacaaaacccccacataattgcaggaaatgaaggttcagggtttcaaatacaggaaaaacacaactggaagatgccagtaacaaagggaaaaaaactttgcaaatgaggtggcttctctaacttaaacttaggatttttctcattgctcacctcttcccatttctctctacctaggtttagctaagaaaattctttcactttttttgttttcttttccacctggccttctccccgatcaccagttcttttcattgtttcattttcagtcaagatttatgaaaacatgaaccatactagagatacacctgatttttttctaggatatttgtctgaatttatagtaaaagataaaacagcaaaataacagtttcaaagaccttgctcttctccataatatactcagtattcttattgcactttatcaaaccaccataacaaaccacctcaaaacccagtggcataccaaaatattgtcactcacactcacagatttgctggttggctgggttgacttttttcacatgtgcctcattcttcttaggcaagtgggctaccaagtcatgttcttcttaagcaggttgcagaagttcaactgggctagcccagcgatgcaggtagtttcatgtctgcttgcatgctggctgctaacatgccattggtcaaatcccatcatccatgacaaaaggaaatacatcatgtgtgaggaagtaaaagtggcaaagagtatgaatacagggatgggagaattgggaggctagcataggcagtgtaatcttttctgggatttatattcgtgtttgtattttactttgtggttattaatttgtgtatatactattttgtattctgctttagcgtaatgtgattttgtaaggaaaacttctgtatagattatatatttttcacttaaatagttgtatgtgtaactgagactctgcttctaagttgatctgcatcaaaatcatttgaagtgcttattaaaatgccgatccctagaccttaacccagaccctctggaatcaatctctggggatgaggcctggacatcttcattattagcaaactcatggagtcatccttctgtacattaaagtttgagaactactttcttaatggaaggacatgcatttgtattagtctgttctcac

SEQ ID NO: 101852 - DNA, 1168 bp, Homo sapiens
ttctaaaataccctgtgaaaagaagcagttttatggattaataggaagatcatggaagaaaattgttacaattacaatgaaattaaaataataagtaaacctcctccattgcttaaaggaaaaagtcccagcttttcagttaaggattgttagtctctggtctcaaccaacttttccagcattaaggactactattcctctataccagggattggaggctcaaattcccagctggggtacaggtgtgcctatatgctgaaccctccgctattggagatgcctggagtggctggagccatttaatatggtcgttctagccacaagcagctttattcttttacacccatgtgaggtacaagatatgcgaggatgcaagggcaaggaaggtaatgtgaatgtgtgtggctggccaagttgggggcgggggcaaaatgaagagtgaatattctatctaaagagagctgctactactacttttattacactctggctttgtcacaatgattattgccatgcaggaatcgtgtaaccaggtcttctggtttttttttttcctcccagagcgtgagggaagtaatacctattattgtacacatacaatctcctaatctttatcttttgccagttatttcaaaaaattttgaatgacattgtaaaaaccaaagaaaaccattttcaattatgatttgtttcataaaaaacatgtctaagaacatggagtagatggtgattcttgttatttttgctctcaggacccctttacactcataaaaattattgagaacctcagagcttttgggtacataaaatttactattttagaaattaaaacggagaaaagcttaggctattagttcatattaaaatgtcagtctattatgtttgaataacatattttatgaaaaacacatttgctgaaacaaaatggttagaagattacgttgctttacattgttgcaagtcttgaatgtctgccatattagaggagaactagagtctccaatgtgcttctgaaggtttgcattctattgcaataagttgttttggttgaagtttgtgaagaaaatctggctttacccagataataatttagaaaagggaggagtattttaactgataatcagataataatggatattctttttaatgctatacccaaacttaacag

SEQ ID NO: 101853 - DNA, 1083 bp, Homo sapiens
tatattagtctcctattaggatctggtctaattattaaattaataaaattaaataaatttaaatattgtgattgaattatattaaatataatgttcgataactttagatataaaataaatgagtataaaataattttataagtaatttttattaaatataaaaacaaatattaaatttctaataatcgggtgaggttctaatattagtctaataattaagattgtcacaccacagtgacagtcggtgattcattgctcagtgaaaggcatttatttcagtagatgtggaatttgaaggtatcgttgacttgaaggagtctggaaaggcttcatggaggagtggagatttttgctaaatgggtttattgagatcaagcacttagaacagtgcctggcatgtagtgaacactcattgaatgttggctgttattattgctctgagcagcagcagctgggccttgctgaatgggaagtattatgagaagcagtcttgaatgaggaagatattcttggctgagtaatgacatgatttgctgtgaatatgtggcattcatgctgaaattgtgagcctatcctaggtcttctgcctttttgtgctggacttctttgagtctcttagatggcaccaacactctactttcttcaattatgatagagtgctaattcatccctaaactatattggctagtttaatttttggttactgttaaaatgaatatttattagtaaaaattttcttaatcttcagttaaggtgtttttgtttttgtttttttccttcaataggaacatcggaatttgccttttatgcgtgagctgaggtatctatttgcacttcttgttggtaccaaaaggaagtatgttgatccatcaagagcagttgaaattcttaaggatgctttcaaatcaaatgactcacagcaggtagttctgttgcactgacttgttcattaaccatttgtatttaatctgaacaatattaagcacctttcccaagaatatgagactatttgagatgcatgattctgctttattaaaaataacctggaaccatttaaaacatttgggagacttttaagagaaa

SEQ ID NO: 101854 - DNA, 1056 bp, Homo sapiens
gcgtttggaagaggaaggtctgagattctctcaccatcttccttgtgctttttgtttctgctttacatttaccttgtatggcaaatgtgaatgaacaaaaagggcactcacatcagagtttcttttatatgttgttgcatttttaaaaaaaattctaacaatgctccagtgccttttaggcttagtatctactcagctttgtttcttactcgctctgtcatggtaacactaacacaaatcaaaagaaagagaaataattttacagttgattccaaaccatcattttcgggcattcagcattccttctggttctaaatgtgttttacttttttttttcttctttagtatgcatagtatcttttccagtgattctgagtatacaattaaattttttaaaagattacttctgttctctgacttatctttccttctggatggctttttccttgtcttttttctggtttcttttttttttttctttcttttctagagattcatgttgattttggggtatcttttcacatttaaagatgaggcagcatagactttgtctggagccatgtatgtacataggtgggcttttcagtttgagttagagttgaaatggatacaactggcggttaaggccacaatataaatgcttttgcttcagattagcagtgtagactaacttttgaaattagtgattctttttctttagaggccttttaaagtagatgtgcatcaattaaggttgataagtttgattctcttctgttccctaaacacttgaatttgaagtctacaggagtaatttagtgaatctgtaaatgtaagcatcatgatttttttaaaagtgaatttatattttcattgtatcttcttcctaaatatttcaaatacatcatcttttgaagtacacaggagtcttttgagacaccctttggtatgtgatactgttagttttttctttttcttttccgtgtttgtttttttttgagacacagttttgttttgtcacctaggctagagtacagtggtatgacaatggctcactgcagcatcagcctcctgggc

SEQ ID NO: 101855 - DNA, 1023 bp, Homo sapiens
taattatagagctacctaataattgagagagaatactcagagagtatgtttggatttaattggtaatttagacattcaggagacctgtccagtcaatatggcctataatctatgtcaaattctcacttaaataatttatctcagaattttaaaatcttaggacattgttcagtctttttagacctttcaatcaaggtaccagccattagcagcatgctagttcctcgatataaagaagaaaaatcctgatattacagtggattttaaaacagatatatgctacttatatcaactgttattggaatttgtccacgatgcccagattccttttcttgtaaaattgctatgtgattgcataaggtcagatggaagaacttcccttctcaaggaagaaatcatttttataaaatattgttaacttatatgtctacctcaactagtttctttctttccagccatctctgtttctttatccatctctgtagctgcatctgtgtagccattcatccatgcattcatctgtcagggagttttggcactgtaatagtaagcaaaggacatacgtgcttccccaatcagttactgttaagaaattgctgatagttgtctagctgttaaactccatgaatgtggctagaggtctttatctgtgtcattcactattatatccctagtggtaatatggtaactgcatacataatacttattgagtgaatgaatgaaatgtcttggtgcttatcaaacaagtttctgaggtctttatactgaataggtgcttaataaatattaagtgatacgatgtctctgtgtttatctaaaaggagactttgttcttgtgtttttgagaacaaattgcttttgtctaaattttaatttttttttcttaaagatgcagttaaccctttcctgtttcaagtgcatactcatttttttcctcttcccccccacatacataaacaaacaaaaatatgcttttcctgttaagaggaagagatgtatttgaaatagtctttctctctacat

SEQ ID NO: 101856 - DNA, 1038 bp, Homo sapiens
taatattgtatctatctatctttctgtctttctttctgtctctctgtcttcctgtctttctgtcttcctgttttcctgtctttctttcttttgtttttttctgtctgtctttctgtctatctttctgtctttccttcttttttgttttgagacagagtcttgctctgtcgcccaggctggagtgcagtggtgcgatcttggctcactgcaaacaccatctcctgggttcaaatgattctcctgtctcagcttcccgagtagctgggattacagacacccaccatcgtggctggctaatttttgtattttagtagagacgagatttcaccatgttggccaggctggtcttgaactcctgacctcaggtgatcctcccgccttggcgtcccagagtggtaggccgggtacgctggcatctggccatattgcatctactttcatgatattcggaaatgctaatgattacctttttctgatagatacatgcacagaaacagagaaataacaagaattaagagggaagagatcaagagactgaaagattacctcacggtattacaacaaaggctagaaaggtattttaacttttatgaaattaggagataattatcagaaaccatgtatttggtgactagatttttaatttcaaatttgctttgagtgatttataattttaggagtagttaatattgtgtgaatagttttgagttttgcttgaaactaaaaatctatagtagactttaaaaaattattctagtgtttaaaattaaatatctcattgtcaacaggtaatgttcctactgctgaaaatagatacaaagttaaatgaatatagttttgaccttcctttttgcatgaaactaaagattactcttgagattttcattaaaatgaatggtatctgagtttttctccttaaaacaggatacaaactcagctgcctaccaagtcttctcagcagcttcgtaaaggaggaaattgtgtcaggtgtaagatggtatgtgccgggagcctagagagcaatctgtgtgtacaggg

SEQ ID NO: 101857 - DNA, 1065 bp, Homo sapiens
cctaagagtagattcacttagaagactgtatgtcctctgggagtttttttattatttcagtagattttatggttatggattaaaattttaatcacattttttttcagttcagaattatactttagcatgttttggtatgtacatatataagattcagcattttatgatccataaaaatagtactatcaaattagaatttgtttctgtaatgtaagctgataagccagggaaaataatatcaccatgcgtaagattttcttgttttttagaaataaatatgattaagctgttttaactctaaagctacaacttcatcttataataatttagttcttatgtattaaaaatctcatttggatgttagatcaatccacatatttctttaagattttttcttttgaattacaagccaatttaatactgtgggtttggcacgatctttgtcaagagtttcagcttgaaaggttaataagaaatactctatgctttgatacagcacaacagaacaacagggagccctatcttcagaactgccaagcacatcaccttcatcagttgctgccatttcatcgagatcagtaatacacaaaccatttactcagtcccggatacctccagatttgcccatgcatccggcaccaaggcacataacggaggaagaactttctgtgctggaaagttgtttacatcgctggaggacagaaatagaaaatgacaccagaggtaagaagtgtctcatagcatggttactgtcacctcagatggatatgtgtaatgttaatattgagaagggaaatcacgtctggattttatatttaaatattatagtcatttttcttttccagaaagggttttaagataaactagtttggctccccatttttataatctcaatatcaggttcacagggaccaaaagattttccctggattgcttagctgattaatgacatagcagatggcctgattttctagtttgctgctctaaatttatatcaaactggtattcacagttactccattggagaaatgtcatacaatatcaatgtttgtacatatcaattag

SEQ ID NO: 101858 - DNA, 1057 bp, Homo sapiens
gctctaacagatttatgagtatctatgatcccattactagtctgtaacagagtttttactggcatgcagcaaaataagaaaaataaggacagtgctctgggtggggtgtgtgcacttgtgtgcgtgtgcgtgtgtgtgtgtgtgtgtgtgtgtgtgtgtgtgtgtgtgtcaagttgccatctgtcctttcttggaaggaactctcttttattcttttctattctattttttcttttttttcagaataagttattctgaacttttctctttcctactttgctgctgttaaagtgtacttaaaaaaatggattatggtagattttattacatttttttccttaaatgtgaaaatataattccctattatcattccccaattttatgctgatttattgatttttgaaaaaaatgaactatgtgacatggttggaattatattgaacaatattgattgttggatattatatgaccaacttaactctttatagacaatatttgaaaaagaatggccctaatttagtaagaagtacataaggtatgatggtgactaacagcattagtagctgtcaagattttctttagtatttttcaaataagagggaatttttaaaaatatttgaactcattaacaaacattaatcaagcaaatagtgttgatgaagcactatattaggcgttgggtaattttctactcctcatggcaggttgtttttaaaagattacattcagaggagtggaagctaggaagcttttgacacctaagtagtggcattgagggagggaagaagtgaatgtacttaaaatactctttggagacaactgacagatgtgggtcattggctagaggtaagagagagggacgaatcgaatgattctctcagttcataatggtatgaataaccaaatagaatgtattttggaaaaaaggtaaagcagtgggcaaagaggttcccactcaggggaggaaagagaaatatgatgagttctcttttggccattttaagtttgaagagcttttttgagacggagtctcgctctgtcaccaggctggagtgca

SEQ ID NO: 101859 - DNA, 1041 bp, Homo sapiens
tgtaggattattttctactagaagtagaaataattgtcatgggagtgccataattttattttcactggtgattatagtcgatttttattcagttatgtgtgtgtacaagatatgtggtgaacatgttttactttgttcttaagtttacttgtgttatagcaatatgtaaggaagcttagctttcattttcattgaaactctcctttatagatttgaacaaaattcacttttattggctctgcacattttctagataaatcatatttgtgttgtttttaaagtatgcatttgtactgtgtcttttattaagaataactataattcattttctacagatttcaaatggtaatgttttttaagaaaagttttaggaaaattttcctattcctctaacatgtttgtaggaaaaacattagtccttatcttataagtagaaacacatttgctgttaatcattaaatgacaccttatatccttagatttgcaggaaagcatatccagaatccatcgaacaattgaattaatgtactctgacaaatctatgatacaagtaagtgaaattttgagctagtaatcattgtcaaaattatttacatatattttaatttacctttacattatcttaatctaatttttctttacatgttttgttttaaaattttggcaaatcttattgtaaaataataagggcttgcaatatgtacaatgtgacagttcatctgaatggggaaacttttataacaaatttataacaaaattcatgacaagttttccccattcagttgtattttcacaccgtatgtgttgtgtacccttactattttacagtaaaatctaccaaagtttttcaaaaggctatagcatctttaaaaagtcttatgggagaaaatctatggttgttaaaggatattaagatttgggaagaaacttaaggactccattacattttaacttctggtgtatatcatataatctattttgttaaccgtcaatttagaattctgaagatgtagacacatttgctatatgtaaaactgccca

SEQ ID NO: 101860 - DNA, 1077 bp, Homo sapiens
aaccctagagaaaattgttctgtatggcatttagggaatttatagctgtgggccactagtgatggggtttttaatagggttagaggatgaacaacaattgtattatatggtaaaagccgaacttgttctgctgttgttcctaacacagaaatagaaattactaaagtgtatggtagggtattagttgcgtgagccttccatacagaacaacacaatataaccagtacatgttacattgaatagagagtaattctttttgtttaaaaatatgagtaggtaggtacagtctggaaataatgtatcagaaatattaatagtgcttatctctgagtaatgcaaagagttttaaattttccacatttttcttgtttgttctagtaaacatttttattctttggtttgataaattgaagacaaaacctctttttttgtcttctttgacagtttttttatacggactttattttataatctgattcccttgtaattcttctaagaccacttccctgtgagtagcctgtgtttcatctacaccagattactcatcgtttctattgcatataggaaattttcctgtcattatggcatgttcatgaagtatccttcatcttaaaaatgttcttttatctttagtgttcatgaattttttcatattctttaagatcttcctcatatcccagagtctttgtgagtttctctgagagcacttctctagtagctattgtcttttccctcttaattccaaccttttcttactaccaaatgtattatgttcttctctattgtacttatattttggcttgccttccagtgtagagtctcatatatagcagggattttatgaatctttgatcagaccttacaatgtgctattccttctgcctggaatcttttctattcttttctccaagataatcctctacaaatccttcaagactcatctaagttagcacctcttctagaaagtgtttcttaacaggcagcattatctcaagtatgtgtattgggtccacagtgcttttataaaaccttgtgcgtaacttttattgaatttagcacattgtattataatagaat

SEQ ID NO: 101861 - DNA, 1035 bp, Homo sapiens
ttttcttttggctctctgaacatagccatggtcacgacatttcctccagtatagtggagagggacctgtcagggagtcaggagagacggggcccagtgatggctctgccatgggcatgatcagtgaccatgggcaagtcatctcatgcccaggctgtgatttcctcagctgtgattttaaagacacttttctcttaagtttctgtctttctgctagagaattctaatgaatcataatcatagattaaattgaccatttgatctggaacttaaaaagagaagtgtaaaatttagcagtatttctcctgtctctcacccattcctccatctgtaatctgattacatgggaatagttgagaatttaagacctaattgtcataatttcatgaaatgtgtttaacaataaaactactagatactgtagattagagtattatttaaaactactagatactgtagattagagtattattagaaggataagtaggatgttgcaaaactgtttgtgaatattttaagaacgtcctgtgcaaaaacgtcattaggctactctattgtagttttcaactacatctttttatagcggtaaattgagcatgtttggtgttatactgtgttatcagtgaatatggcattctgagagaagctatttcaagaatttgttactactaaaccttttagttcctgtagtcatttatcttttattagtgagcataagcagctctaatgcagattttgtggtagttccttttaatatttgaagattccccttgacaactaaaaagagtacgacatatcataattttacaacacgtaattttctgcttagtaagtgaattcagtgccagcaataacctgctaattgcaatgaggccttaaatatataataagacttcctttagccaaaatgttcaagagatatggtactctgttaattttgttttgatgaactaaataacaatacaaattattttttgtttgaacaattttgaaaatgtattaatatatcatcttattaaaatgtattaatttaaat

SEQ ID NO: 101862 - DNA, 1033 bp, Homo sapiens
gtatttaatcagcattatgctgttgaaattcttcaatagtaactgaaaaggtttataaaacatttatgttccctaagtgcaatttttttcccccaaagggaatctgttttgtaaggattaatattctaagtgataaccatttgcttcaaatttatattttcttttcctaagatagaattgttttggattggtttgctagtgagaaatcatcaccacaaactccgaacagatttctgaatttacctgtttatatttcactcttgtgtacagagacctagcacagttcgtctcttatatgctagaaagattaaaaatccttaattaaatgtcatggaccaagcacatctctgtagaatgtgtgtgatagtagtattaggttaaaattattcaaatataaacaatttaaagtagcacaacaaagtagtacaatgactcatagctgtcattttatagaacagccgttacatacctggtgttggcttagctgcatattatctctcatgatcatgatacctgttcatgctgatcatttcctgttgaaaagttgtggattttgataaattaaggataagttgtggattttgatatatgtgtgtgtgtgtgtgtatatatatatatatatatatatatatatatatatattttttttttttttttttttttgagacagagtcttactctgtaacccaggctggagtgcagtggtgcagtctcagctctctgcaacctccgcctcccaggttcaagcaattctcatgcctcagcttcccaagtagctgggattacaggcatgtgccaccatgcctggctaatctttgtatatttagtagggacggatttcgccatgttggctaggctgatctccagctactgacctcaagtgatacgcccatcttgacctcccaaactgctgggattataggtctaagctaccacgccatgccaaaaatagtgtttattttaaaaggggcagtaccagttgcagctattggttttgttttgttttattgttcagttaaactctttttctata

SEQ ID NO: 101863 - DNA, 1096 bp, Homo sapiens
atcaaattgcctacatgtagttatattgatttattctactattgatatttgcctaaaaaaagacattaaaaatgtaatctcatatttcaaaatgtatttctttgatctttgtgagggtcagtttttttcataaatattttggcaattggtatttatgttgactgtcattcatctttatacgtttattacactgagtttcttttagttaagtgaacattgatcttctaagacaattgattcatctgtaatttgcaaattatattttgtggtttataatttgtcttttaaatttattttttgtgtcttactatacataattttttagatcttataaaatacagcaactctttttatagatttggtcctgtgatcacttataaaattatgcaaaattttaattctgctgctttcatggttttataatactttttgttttgattacaggatagaagattttagttttctctgaatagtaaaatatccagatagtctaaacataaaatactgactaatgcctccttttcacgctgacttgacacatatactaaatcatacctatactaaatcccttatcagggatttatacttaatgatatactaaatccctacttataagtagctctaactgggtctctgtattccactgatctagttttctgtttttggacaatacactgaataccagtgatcttattgtagatcgtttgtaatacactttcacattttgttagaagaacacttagtaatttttgttcttttataaacaggaagtttggcaagcctcatttttcttctgatgatttttaaaatcaattgccacttcctttccaaatccttttagaattgtatttatgtattaatttaacatgaagcagataattttttttttagtattttgagtcttgcccaaaaggaacatgatacgccttttcacttttattgtcttctgttgtgttctttagtgaggttttataattttatttcataatagtcttatgtccttttgtttaatttattcctacataattttttttgcctttatgaatagggtcatttacttccattttttttttaaccaggttattgaaagggtagg

SEQ ID NO: 101864 - DNA, 1729 bp, Homo sapiens
ctctgtaggaagtttttgaagggaaaagtgaattgattacctttatatttctgtatcaaggaatacaatagtatatattcagttgccattaatggagatgagtttttcaaaaattaatatggattctgaatttctttatttttaaaactattttgagtgcttatacaattttataatttggggaagttaatctctagagaagaaaaaatggcccctgtgttgatgatcggcataagccaaacatgactgaaaaacacaataatgttttctccaccgctgttgcttttgtttctgttgttgccatatgcatagctttttctaaagagagattttcagttctagataggttgagattgttttctctaaataccgtttgttctaatactgtttgtgaacatatttatgttgtcttccttattaatacttacagatccttaatttaaaaaggaaacaaaaacctattcttttttttttcctgcattgcattaagaaattaaatgagcaagccgcagaactcttcgaatctggagaggatcgagaagtaaacaatggtttgattatcatgaatgagtttattgtcccatttttgccattattactggtggatgaaatggaagaaaaggatatactagctgtagaagatatgagaaatcgatggtgttcctaccttggtcaagaaatggaacgtaagtttaaacaatggtagtaggcacctgagatgtccggattaaatgcagttagaattagatgttatttattcttgccattttttatattaaatacaatattaagtattaatattttcacattcacatgattactctttttccatattgatgaactaagctgtgtgcattgcagttgccatttatgtttttgtctccccaaaatggcaattatcttacctattagagtaagttaatattagtaaatcatgttgacaatgatcgtgtaataatttctatctttagttagatttaattgtttgtatttgcagcacacctccaagaaaagctgacagattttttgccaaaactgcttgattgttctatggagattaaaagtttccatgagccaccgaagttaccttcatattccacgcatgaactctgtgagcgatttgcccgaatcatgttgtccctcagtcgaactcctgctgatggaagataaactgcacactttccctgaacacactgtataaactctttttagttcttaacccttgccttcctgtcacagggtttgcttgttgctgctatagtttttaacttttttttattttaataactgcaaaagacaaaatgactatacagactttagtcagactgcagacaataaagctgaaaatcgcatggcgctcagacattttaaccggaactgatgtataatcacaaatctaattgattttattatggcaaaactatgcttttgccaccttcctgttgcagtattactttgcttttatcttttctttctcaacagctttccattcagtctggatccttccatgactacagccatttaagtgttcagcactgtgtacgatacataatatttggtagcttgtaaatgaaataaagaataaagttttatttatggctacctatgtgtttgtaagcaggtatattgtatattagtgtattagtaatactagataaatgaattttgtctggggattaagattggatagttaatagattaatacaatcttttaattctgctctaatgc

SEQ ID NO: 101865 - DNA, 1032 bp, Homo sapiens
tccatgaatcacaggtcattgttttctaatcatacccatgtgagttctaaaccaatacatatttgcagttgtcttttcatcacatatacctggatgtttcgcagacactttcgacttggcacatctgaattcatcactttttcccaaatctgattgtctcatactcccttgatgaaatgatgtaataatcccaaaatgaattattctcaattctacttttacctcccattgattaccaagtgtcagcatgtcagattttttaatactccttagtactatggctgatgaggtccgtcatctcttagtttgactgttagatttgtccctgagtagcactgtctttgattttgcccctgaaattcatcttcacactgttgacagaataatcttttaaagtggtttgttttacatgtctgtcttccactgctggactgagctcttaacaggagattgtatctcttgtttttgtaatcctagcacctgttaaaataactagcaacttagaggtgcagtcttgcaggttttctgaccctccagtcaccctagacctgcactgatacagttttcgttagccatttaaatttaaataaaattgaacattctgttaattagtaatactagctatatttcaaatgctcatagccacatgttactgttgactactatattggacaacattttagaacatttcgattatcataggaagtttcattggacagagctgccccagcagacctttgctgatgtggatgtctttctgtattaacatccttttaacattcagacacctcccaaatgctaaccttaatagattggccttcagcatttatgtctctctatcttgatcctgcaattgatgactttactatgtctgctctgcagagagcaccactaccagcatgtgtccaatcaggaaagccgacactacatatttcaacagaggagatgtgagtacagaggcattagagagtaacccggggatcacaactgtaggatgcagctactagtcctaagggtaagaaaacaaatggg

SEQ ID NO: 101866 - DNA, 1013 bp, Homo sapiens
ggaggggaataaggtcatgctttttcatcttttttacatgacctgataagacaatgaaaccaaaacatgctttcttatagttatggtaaaactaaacccaatgctgcctcttatttcacatttgcatttataaatatatgttgaaatatttttactacaactgaatgtatgattgttgattatttactatagtttttaataattatgaggacaatttaagaataaataatggtttaaaattatgtagaacacatgatctatataaaggctataaaacgtatttatttcaaaatatgcaaaatcactaagcaattagtatgtagtattattttacacaataaagatataattaggaaatgctaagtgattatagatgtgaaatgattaatgattgtacaacttatcattttgttgcagttgagtttacaatcttaaaaaaacgtgtatgtggctggctttatgtttactcgtttgtgtgtttgcttgttgtctggtggtttaaaacattttttagtaatattttatttttgcccaacctgttgaccagatgagagttgtatgtagccatgcattttaagtgtatcttttttgaacaataagtttaaatatattttatttaggaaagaagatatcctatgtcatgtaatacatctggagtataaatgttagtgtggagtattagtaatcatgccattatcgtgccatttagtttagttttatattaactcatccaaatattgtaaattttagcaccattccgactatagacacagatgtatatatttaaggctgataataacttcctgtattctctagctagtgaacaagatcttactgttttatgagaaagttataatgttaccaattccttgaaaccagtaactaaactagttttataaaaattaaaataagcacggtctaactcatacacaattaacttaatagttaatttggttttaattataggctcgtaatactacattcatgcctcacaattatataattcatacatg

SEQ ID NO: 101867 - DNA, 1035 bp, Homo sapiens
ctggtgactaacagactagactggaaagtaggttgtacacttccggagagcagaagaggggagagggcaagaggaaagaaaacagggaagggaagccatgaaaaagagattgctacaatgaattacaacttttttgtattactaaatgcaagaatgaacattagatttttacatgccaggatcattcctaaaaggaggagaaatctctgattatttgtttttccatggtagttgtgatattctacacttacatatatcaaaagaaagagaaagaaagtaatttcaggttggcaaacctattgcatcctggtcataaagtgcctgaatttaacactgagtcattttcttgtccaaatacaaaaatcttgaaagaaaatataggtcaagttttttttttccttgttaaaaaccaatgatctctttcatcgtgaaccttttaaagtaataactcatataaatttacattttacattatttaatttggcttaaaataattattagttctagaatctgatttgtaaatcaaaattgtcataccaaggtacacacacacacacacacacacacacacacactcacaaacacactcgtatcatctgggattttttctcagttaattctgtagaaaattcctaaccagggctgggagtggtggctcatgcctgtaatcccagcactttgggaggacgaggtgggcagaccacaaggtcaggagttcgagaccagcctggccaacatggtgaaacccccgtctcaactaaaaatacaaaaattagacagtcatggtggcatgctcctgtaatcccagctactcacgaggctgaggcaggagaatcacttgaacccgggaagctgaggttgcagtgagccagatcgtgccattgcactccagcctgggcgacagagcaactttccatctgaaaaacaaaaacagaaaaaaagaaaattcccaaccagttcatcctagtccacaagaatctgatttttgtctcccttgtcctttaattactcttccttgtctcctaaaaaaaaaac

SEQ ID NO: 101868 - DNA, 1053 bp, Homo sapiens
gagttgtacagggtaattgctagaggatttgccaagtgcgtttgtcgactgctcctttctctgggaggggaaaaaaggcatgtgaaaaatgcgtggaccattaggaggcgtaatcattttgacactttaaaaaacggattttccatgtcggtgttttaaccaactgatcttgtttgtcaaactaagcacttgctgcgttttataaccaaataattcatttttaaaaatccgtaggtgggatcctaggaggcgcacttagtatagcctctggaagggtaattttttgttgttaggtgctctgaagcaggatctagtggccctttctgttgggatggctctctgcttcctgttgaaatgttaattccattgttggatgccacagctgtgagcattactcatgggatcaacattctattagcaagtctaatcttcgatctgagcctatagcactacctccacctttttgatatatatcatttagacttggcgggctgaaatgtccaaagtaagccttccggagaagatgaagggtcatagaaccagtttacaggtacattcccacctttctttcttttttttcttttttttgtctaggccgaacctgaagatgaagttgagaacacagtgtgttctctgggaaaaaaaaaaaaaatagttttagaccacatctaaagcagaaaagtggaagaacataaattatgtggaggaacttttttttttttttaaatggagtttcgctcttgttgcacaggctggagtgcaatggcgtgatcttggctcaccacaacctccgccccccgcgtttaagcgattctcctgcctcagcctcctgagtagctgggattacaggcaccccccaccatgcccggctaacttttttatttttagtagaaaccatgttggtcaggctggtctcaaactcccgacctcaggtgatccgcctccctcagcctcccagagtcctgggattacaagcgtgagccaccatgcctggcaggaactagttgttgttgttttaacgggaatatttagataattggatttaattttttt

SEQ ID NO: 101869 - DNA, 1459 bp, Homo sapiens
agattaaaaactgactcagacatgactagtggaataatcactgtaaggaccatctttattagatgagaagggagagagtgatgaactgaagagagctctatcatacacacaggcctagtggcaaagaagttgaaaactttcagtcatgcaaaaaggacttgctgaacactagctgtctgccaggagccacaagaccatgcagggactgcaacaatgaatataggtaatggccctgtcctctgatctagtgcagtgagctaagttggtaatcgatggagaccccacaacagacagggtaaggagccaatgtagggaggcttgccttggaggggaggcatttttcctctgatggtggtataatcgcaggaatgaaaagattaagagggggcatatcgggcagccatcttgctcttgccgcgtgctggtgctggaggaccctccctgcttcagatttaccaacagcatgaatcaagaaaagttagccaaacttcaggctcaggtccggatagggggcaagggtacagctcgcagaaagaaggtggtacataaaacagccatggctgatgacaaaaagcttcagagttctctaaaaaaactggctgtgaataatatagttggtattgaagagatgaacatgattaaagatgatgggacagttattcacttcaacaatcccaaagtccaagcttccctttctgctaacacctttgcaattactggtcatgcagaagccaaaccaatcacagaaatgatacctggaatattaagtcagcttggtgctgacagtttaacaagccttaggaagttagctgaacagttcccacggcaagtcttggacagtaaagcagcaaaaccagaagacactgatgaggaggatgatgatgttcccgatcttgtagaaaattttgatgaggcatcaaagaatgaagctggcatggtttttggaagctggcatggactagattgaacaaatcagctatgtggttccaaagttttacagacacagagaacatcacctgttactagttcactaatataaatattttgtatattaataatgctgttcagcatttttctgtcatttgattttgcattttgccttcctctcaggatatttttttggtcaaaatatgaagtattggtgcagtttgagggtgttctgggttttgattcctggtttttttgtttttggtttggggtatttttggtgtatgtttgcttatgtatgtgtgtgggtatgtgtgtatacagtggagagcaaattggaaaacagttctatttatcctcctccctccccagtagaaataaaaaaaatctttacatttgttacttttcttttccccctataaaacacagaattaatggaaagtgagtatcttggatttcagatctgaagagatttttaccattagtggtttgattttaatctgcttggttaactatcatatttttcatacac

SEQ ID NO: 101870 - DNA, 1026 bp, Homo sapiens
tctcttcagcttgttgagatgctttcataattggcctcctgttgagtgaactttaccctgtcctccaggcacatcctgttacttactgcagcatgttctaacctttatcaagcatgccgatactgtcattgttttctcttgccagaatgtacatttcataggtcaggcactgtttacattgtattcccagtatatggcacagggcatgttcattgcataaatggggaaagttatgctagacaggaattcatgtttgtaggcttgggaaggacctagaagagaaagagcatttgaagatcaagaataggtacctcatggaagaggtgagcagggctgggctctgtgtcctgcacaggtcagctttgtgtcagctttgccaggtgttcaggagtggagtttatatcaccactcacatttagttctcctacttgcagccagttctctccccttcccttatttccacctttcatctgtcatagaagtcatcatcagatgagagttgatgctttgtgtcattaaataaaggaaataattgaggctgggaactttggattcagtttatttggtggctagcaagtagttgatgtgaagataattattaaattaaattaattattaaaataagataattattaaaataatgcagaaaacaattaaaaattatccaaccagaatgaccttatgggtttatcttactgtctttcatctaacttctgtttcttaagaaaacaaacctagtaatctagaataataattgttcaattgggtttggatttaggttggttctttttatttttctttttcttttttaaacagagtcttgctctgtcgcccaggctggagtgcagtggcgcgatctcggttcactgcaacctccgcctcccaggtttaagcaattctcctgcctcagcctcccaagcagctaggattacaggcgctcaccaccatgcccaggcgattttgtgtgtgtgtgtgcgtgtgtgtgtgtgtgtgtgtgtgtatttttagtagagttggggtttcacc

SEQ ID NO: 101871 - DNA, 1047 bp, Homo sapiens
gtttcccatttcaaaaagaacctttccttgaccacatatcatacactgtctattttctcccctcatcgagaacaaatttctcaaactagtagtcatttctgtctttgctcacatctctcaagcactgtggtcagataatatcctgttgcagctccccaaaaccttcactaaatctgatttggcctaggacaccgatgatgttctaattgccaaatctagtggatacatttcagtgtcattttttttacataataaattgtgagttcttcctagtggaaggcactgctaaatgccttttaaatataaaagatgacaagacatagggttatgtatcatagtagaagtattaggcttatcagatgacagtgaattgcctactagctactatttattgaagagtgaacaccaggatgtgctgcagctgttctaagaggtttacatgtgttatttaatttctccaatgaagtaggcattattatttttaatcttcattttagagaggaaaacatctagtcacggagaggctagaaattgcctgtggccaagcatttagtgagataaatttgaatctgaacccagatctaactttagaactcctactgtttaagaaatgtctgcatttgttgggagctggactcagagaactcctgctaatgcctttgagatgtggatacaggggaggagaagaaatgattgtcagggaaggcttcttgttggttgattgatcaatgggctagaattagaacatacttagttaggtctgaaatagataatttagttcaacacccctaatttacatttgagccctagggaagcaacttgtccaaaatcatacagagcttttttgtgtaataaatttggcaacagtcagataacctagtctgacatttatttttctgtttttccaaaaaaagaaaaagtttcacccaaacccctgaaccatgtgccacctaaaatgctactagaaatgtagcatagaagaagagtataaattccaaacatttctctaccatggtgattggaataggatttctaataatgcaccca

SEQ ID NO: 101872 - DNA, 1026 bp, Homo sapiens
tgcaacctctgcctccgggtttcaagcgattcttctgcctctagctgggactacaggtgcctgccaccacacccggctagtttctgtatttttagtagagacggggtttcgccatgtgggccaggctggtcttgatgtcctgaccttgtgatctgcctgtctcagcctcccaaagtgctgggattacaggcgtgagccacggcacccggccttagcagtatttaaagccttagttggtagagttaattagtgttaacatatttaaagtgtttttcccttctagaaactgggatactcactatttagatgactttcaaatattgctaatctcaaagcaacttcctgggaagaagaaaggcaaaggttggagttagggtctggcagagggggaaaggaaatggtgcaaatagcatggtggtcacctttttgtatagagtttagagtatctcagtgacttgctaacctagacatctatagtatttgtaattaaatgcacaaaattacacttgtctttatcaatcttcttcttcattttctcgaacctctaaatctacttataaatcttttaacatactagttcctgatttgtctaacttattttcttccttttttttttttttgagaaggactcttgctctgtcaccaggctggagtgcaatggtgcaatcttggctcactgcagcccctgcctcccaggttccagtgattctcctgcctcagcctcctgggtagctgggattacaggcacatgccaccacgccaagctaatttttgtgtttttagtagagatggggtttcatcctggccaggctggtctcaaactcttgatttcaggtgatccgcctgccttggcctccgaaagtgctgggattataggcatgagccaccgcgcccggcctctaacttatttcttaaagttgctgtagtgaatcattttttgactattattgagtgtgtgttttgacacagcgtcttgctctgttgcccaggctggagggcagaggcgcagtcatggctcgttgcagc

SEQ ID NO: 101873 - DNA, 1016 bp, Homo sapiens
ggccttagtaggaggtgacatcaagggctaaaaaaatactctttgatgaactcatgtcactttgatgctcagatataagtcagactgtgcagaagagaagctttaaagatccaagtgatttagaaactggagataagaaaagcaagcagaaaactgggaaatgttatttcagtcactgccaatatgggatgtggttccgtctgtttatttacataatatgatctagtgctgtgcacttattaactagactgcaaatacttgcagcttaataatgtgccgcatattttatcacatcctgaattataaatttgaataaaattgtaagaagatctgatatttgatttaccttttaaaccgtgtttcaacctgcaagtagtttgcaagttaaattgttaatctacttgctgcataaataaaattgggcagtattaggaaagatgcccagggccgctgtctgagaccaagtgtctgtcttttgtcttatgtaatttgtgtctgttgcgtacttcagcacttgaaaaactattcctctgtgaaaagaggcccttcagtgttgctaggaaacccaggaactgttttatatgatctcaagattttaattcatttctagtgcaacacagtgaagaggaattgaaggctttaaccattttttgaaagaaaaacaaaaaacaaaaaaatctaaaagtcattaaaaaatcgttttaaaatatcataagcagcatactcatttaaaaaaatctcagaataaagcagaaatggacagttgtcttccttaaaatcctaattctcaaaagtagttgctgttaacaatttgacatatatcttttcagattattttgttacacatatatgactattttaaggcagttttttaaaattactttttatgtatcaaacgagaaagaaagataatataaaaactaagttgtattttattttgatcactttgtatagtgtaagtactgagaacatgaatttgggggatttcaacttttacaaatgtaggtgtctaattg

SEQ ID NO: 101874 - DNA, 1060 bp, Homo sapiens
gacatgactgaccgtattagtccattctcacaccgctatagagaaatacctaaaactgggtaatttataaagaaaagaggtttgattggctctgcaggctgtacagaaagcatggctggggaggcctcaggaaacttacaatcatggcagaaggcgaaggggaggcaggcacgtcccacgtggccagagcagagaagggggaggtgctgcacacttttaaacaaccagatctcctgagaactcactcactatcagcaagggggaaatccacccccatgatccagtcacctcccaccaggcctctcttccaacactggggattacagttcaacatgagatttgggcggggtcacaaatccaacctgtatcactcacctttcagagattctagccaaattcagttttaaacatctgcttgcatatagaaaccttctaccagtagaaacttacataatgtcaggaagttcacagcgttccttaagggaattgtatcaaataagatgatactacttgtgtcattctacttttacaaaggcacaaattaaaaactgggcatctcttgagtttggactccattcctcgggacccaaaccccgtcctgtatccctcgcatcaatgtgctgcttctgaatggctgcggggcactgtgtgggctgtcagcgtatagcaaatgcttagtcccttgtacatttctttctctagatttcgccagaagtttgagtatcactactcctgaagagatgattgaaaaagccaaaggggaaactgcctatctgccatgcaaatttacgcttagtcccgaagaccagggaccgctggacatcgagtggctgatatcaccagctgataatcagaaggtggatcaagtggtaagtttgatatgtccttgctcgcttagcagctgtctgtgcaactatctgatgtgtccatcaccttgccagtcacatggatgggctgcagggagctaggaaggaagccccccaacttctcaggctttatggtctgggtgaggaaggcaattgctctggtggaaattgaggacacatgtaatggagggaaa

SEQ ID NO: 101875 - DNA, 1042 bp, Homo sapiens
tcgggcctgactcattttatctactcagcctcgttgccctgttccctgtcactcttacctcccccttctctcccttctctctctctggaggtgctggcacctagagtacaggctcctgtctgaggtcctgcagttccccgttcctgtgacagtgcagtgcctgtcccgctttagagcccaggactctgatcctgtgcgtaagataggggaagcctaggaaccatatggagagcgtgggtcttccgtgcttctgctgagtgaagcttgtgaccaggtgcatgtagagaccaagaagcactgtgccctgagccattagcgtgtctgttaatgagaagaagactccaagtcgtccatgctgagtgagaggcacggctttgccgtctacaggagttgtaagataaatgtgaaactgggacttgactctgagtgaccgtttctgggttaaaaacctagcttctaacctaaaacacagtcacatcagaccaaaagaaagaagggttaggaagagattgatgcagaagaggatgcatacatggaatttaaactacatatgttaacagagcccctattttaatatatttcagctagtagacagaatggttaaaaactaggaattggaggactgagctggaaaaatttgcattcttattccttatgtgatctctttagtcagcagttactgtaaacagcgtgcttgggcagtgttttgtatactttaattgtatatacttaagccttaaaacaacatagtaaggtgagaattattatacatatggcaaggaggaaacagaggcccagagattttcatgcccagagtaacaagtgcagttgggatttgaacccaggtccctctgactctcacagctgctctgttatcatttgcactgtcctctgctgcctcccgtgtttcataaacctgtttcctcatgtgtaaagtaggaacagctatacctagcatctcagggtcattacaagaattcagcaaaatactgtattcacacgcattctgtaagcttataaatgatattgaaatgataatcat

SEQ ID NO: 101876 - DNA, 1410 bp, Homo sapiens
caggggatcatggttactttcaccttgatacatgtgaactggaagcatgattgaattctggaaacatctgtgtggctcaatgccagtttgcttgcatccagccttggtctgtcttgcttttaactggattgtttaatttggagaggactatgtttactaacacctgataacaatacatactataaaaatgagtttgttttctttttcctccttccatagaaatgacttcatctgttatatctgtaaaaaatgcctcttctgagtactctgggacatacagctgtacagtcagaaacagagtgggctctgatcagtgcctgttgcgtctaaacgttgtccctcgtaagttatcttctttctgttggtggttttgtttctgttatctttataccacctcctttagttcagtcagcaagtgtgtattaaggacaaagggacactgactttgatcagaacactgtggtttgattattagcttttctagaaaaatacattttattaaaaaaacttcataattgcaatgatatattaagaaggtaagagttgtcaaatcaacccttgtaccatatttagctgttataagtatgagtagcttagaacattcttatatgttaaccaagatagctttgaatattaaaatctttcagacaggttttatcattttaatgcttggaatagattatacagttcagaagacagttctttttatgaatttttcccccggatcaaaaagactaaataatttgtcttaaagttaacacgtgatgaaatcaatctaaaaatgtatagcctaccttcagtatctatacatgtatatatgtatatattttttactattaattcttcttattttagcttcaaataaagctggactaattgcaggagccattataggaactttgcttgctctagcgctcattggtcttatcatcttttgctgtcgtaaaaagcgcagagaagaaaaatatgaaaaggaagttcatcacgatatcaggtaattaagtgagacaggagttgactgatgtataccaaatatatgtcatttctctaaagcattcgttctcttattaaccacccaaagcatctttcttaggagaatgggtaaaagctctggccgccttctcaatacatttgaaagcatttacttctaactgcaagtgcagagctccaaccaccattcgttgtgccccgctccccaaccttctcgtaccccattttaagaaccactgccaaatgattatctcaagactgcctgcttcttgagaagaatccctgcctgcagtggtagggatgaagtagatattgaggtttgaaaaaaaaactgacctgattgtatcaagtaatctggaagtttgtagaacaattggtagtataatttttattttccttaaatattctaaatcagtaggt

SEQ ID NO: 101877 - DNA, 2009 bp, Homo sapiens
ccatatgtctcatctgtgctctccgtgttcctttcctttttttgatatatgaaaacctattctggtctaaattgtgttactagcctcaaaatacatcaaaaaataagttaatcaggaactgtacggaatatatttttaaaaatttttgtttggttatatcgaaatagttacaggcactaaagttagtaaagaaaagtttaccatctgaaaaagctggattttctttaagaggttgattataaagttttctaaatttatcagtacctaagtaagatgtagcgctttgaatatgaaatcataggtgaagacatgggtgaacttacttgcataccaagttgatacttgaataaccatctgaaagtggtacttgatcatttttaccattatttttaggatgtgtatttcatttatttatggcccaccagtctcccccaaattagtacagaaatatccatgacaaaattacttacgtatgtttgtacttggttttacagctcctttgaaaactctgtgtttggaatatctctaaaaacatagaaaacactacagtggtttagaaattactaattttacttctaagtcattcataaaccttgtctatgaaatgacttcttaaatatttagttgatagactgctacaggtaatagggacttagcaagctcttttatatgctaaaggagcatctatcagattaagttagaacatttgctgtcagccacatattgagatgacactaggtgcaatagcagggatagattttgttggtgagtagtctcatgccttgagatctgtggtggtcttcaaaatggtggccagccagatcaaggatgtagtatctcatagttcccaggtgatatttttcttattagaaaaatattataactcatttgttgtttgacacttatagattgaaatttcctaatttattctaaattttaagtggttctttggttccagtgctttatgttgttgttgtttttggatggtgttacatattatatgttctagaaacatgtaatcctaaatttaccctcttgaatataatccctggatgatattttttatcataaatgcagaataatcaaatacattttaagcaagttaagtgtcctccatcaattctgtattccagacttgggaggatgtacagttgctgttgtgtgatcaaacatgtctctgtgtagttccagcaaatcaagctgagctttgaaaaagtttgtcttagttttgtgaaggtgatttattcttaaaaaaaaaaaagaaagaaaaagaaaaaaagataagaaggaggagtaaagggactactcctccttgccaaatgtgctaaatatcattttaggagaagaaagtgggtttattgtatttcccttaagattgtgagggagtgtggatacagtagaatgagccaacagtttctttataataaatacggtctgcaataaattatttcactagctctaaaacctttccctagattttagtagggagttggtttctgttaatatctttgggtgctgtggtggtaaatgctatattatgaacggtggcatgtatttacagttagagtattgtgtgtacactttttaatggtaaacttaagctgaatgtgtaatggatttgtgtatagttttacatatttggaagcattttaaaaacaggttttaaccttatgtaaaattacttttatactcgtgttaacattttcatctgtgccttttggtaatttaatttctattatgaatttctggtgcctatgagctagctatcacctacctgaaaggtgcttagaggtgaaggtactgtttctaaaaacacatcactgtgatacctttctatcctcacattttcaagcttgcctcttttctgttctttgtggatataacttaagcaattgtgttattcataaaggtttagaaatttcaatattcccaacactctatgtttctgattttataacagtagccatttttgaaagtcagatgtttggcctgttttatatgaataaagt

SEQ ID NO: 101878 - DNA, 1713 bp, Homo sapiens
tctcctgacctcgtgatctgcctgcctcggcctcccaaagtgctgggattacaggcgtgaaccactgcacccggcccagtactgcatcttaacagcaaagccattttattctactttataactgagagacttgataccatccatctctttaggttacagaggataatttgaagagaaatgttactgtagaatatatagttctgtactttttttttttttttttaagagatagggtttcactattgctcaggctggtctcaaactgctgggctcaggagatcctcctgccttggcctcccaaattgctgggattacaggtgtgagccgcagcatccagccagttctgtactttgaatatggagtagtttacagctatttttttttcttactggtaatcttaactaatatgattcccttgttagagagcctctcactcccccacccccaaaaatgtctactattcatgacagtaaccaattattctggacaaattgcttctttttaatttgagctatctgccatggactttctaaaatggaaacacagcctgagtgtatcttagggagagtttgattgaaaaaatccaaatcactatccatatagatcatggatataaagagatacctgatttttattaaaaagatactttttcaaatttaagagttaatcttggaaatttggaacaagtaaaggggcaagtaaaccttttgatgaaatataaaaggaactcattgcatgaagttgactatcaaattctgtgatgtgtggcttcttaaaaatattctcagtgtcttttgtgtgcgtgcagcatgtacatttgatgttatgtgaatgttgagttttttcttctaattttcacttcagcagtgtttagggctttcagatgccttattccagtgtgaacagaaaaagttcatattttatgtggttaatgctttgatgtgtcacataaagagtagtttgtagaaaatgttggcacaattttaacttcttagtggcttgtgacattatatattatatatatatatgtacatatatctttataacattcctgtgtttagtagtgtaaatgttctgggcaagttttaatattttgaatgcctttggatattccagcaataaaggcatcatgttctgcaataggatttcttactcatttacctattttaacactaaaatagaccacaactgagcacaaattccttttataaatgttatagaagcagggaagaataataaacacatttgtgaattgtggttcagtttatttatctttagggaaggctgatcatttatcttatagcagataaccccagcctcttattcattatggttaacttttataatttatcttattttataatttaagaatatagtacatatcagttgggtttggttttggtcatcgagactaaaagctccatcaaaacagaactttgtgttttctgctaacttatttaatgacacaagttttaagagaaccacaattcattgattcacttattcttttccctaattgtgaattttagtgataaatacacctgtactactgaggaaaatattctgacacttcacgtgtgcaaagtatagaactgacagtgtcagtttcagattttgtatgtacgatttctggcttatatatccaatggtgcagattttgaaatttgtaagaacaaaatttgttaagaaaaacaacttgctctagttttgtga

SEQ ID NO: 101879 - DNA, 1063 bp, Homo sapiens
ttacaaatttcaaaatctgcaccattggatatataagccagaaatcgtacatacaaaatctgaaactgacactgtcagttctatactttgcacacgtgaagtgtcagaatattttcctcagtagtacaggtgtatttatcactaaaattcacaattagggaaaagaataagtgaatcaatgaattgtggttctcttaaaacttgtgtcattaaataagttagcagaaaacacaaagttctgttttgatggagcttttagtctcgatgaccaaaaccaaacccaactgatatgtactatattcttaaattataaaataagataaattataaaagttaaccataatgaataagaggctggggttatctgctataagataaatgatcagccttccctaaagataaataaactgaaccacaattcacaaatgtgtttattattcttccctgcttctataacatttataaaaggaatttgtgctcagttgtggtctattttagtgttaaaataggtaaatgagtaagaaatcctattgcagaacatgatgcctttattgctggaatatccaaaggcattcaaaatattaaaacttgcccagaacatttacactactaaacacaggaatgttataaagatatatgtacatatatatatataatatataatgtcacaagccactaagaagttaaaattgtgccaacattttctacaaactactctttatgtgacacatcaaagcattaaccacataaaatatgaactttttctgttcacactggaataaggcatctgaaagccctaaacactgctgaagtgaaaattagaagaaaaaactcaacattcacataacatcaaatgtacatgctgcacgcacacaaaagacactgagaatatttttaagaagccacacatcacagaatttgatagtcaacttcatgcaatgagttccttttatatttcatcaaaaggtttacttgcccctttacttgttccaaatttccaagattaactcttaaatttgaaaaagtatctttttaataaaaatcaggtatctctttatatcca

SEQ ID NO: 101880 - DNA, 1080 bp, Homo sapiens
ccaaacgctggactaggtgctttacatggattatctcatgtatgttcttgaggtctatacagtttgttcttcatttgttcagtggctgagccaggataacctctaactccagagtccaaactcttaaccattacatttacttcttctaacagaatccttccatttatcttaaatcatgagtaagcacaaatctttcccacctgagttgattgcatacacatacacacacaaacacacaaacccaggaataagcatgtcctatgtatgcaagcctcgaaagcactaacttgtggctataatggatccctttctaacatagcaacaaaaggaaggaaggaggttaagatccattctgtgtgaggttactacacccgtaggcagccttgtagatccattacaagctaattttaacagagatgggaccagatcataatgaggtctttctggtaaactgtcctcaaagaaagggtccaaaaaggaatcccatgtgatcattaggatagtgctgaattttaaaaatctctttaagatatttctctcttcttcctcagcctttgagcaaactcaaagagaggattatacatttatttcttagttaacatttgggtatttaatcattaaaatatgtctgttcactgataccagggggagcaaagtggatttcgagtgtgtgtcagcatggccaaatcatctgatggctattttggatgagatggtagcgtatttcaagtattgctctgatactaaaatggatgatgtacaacagttatacatatatgttggagaaaatctgaaaaacaaccaccccaagttaatctcttaaaatttggtatatctttcctatgactactatagacatttaaaggtttttattttaacatttaaaacagcctatggacgtttctgttttttgcagaactttaactgctatgtaaatttcttcacttaactgtaccacaaatcttttgcccataacattacaagaagtttaaaccaaatctatatatacatacattcataaagctctcctggtctactatatagcacatctttatcatgtcccgaacacagcagatagta

SEQ ID NO: 101881 - DNA, 1037 bp, Homo sapiens
gcaaataaaaaatagtttgaggcatgacaacgcgtgtttctgttgtgtgcataaaaggggaaaagaacgggtatttcccttcaatgtatttaactaaatagcaaaaacattaaacagaacgtaagaattttaaaatttcctttgaaaaatcaactattaaccatacttttcctaaaagaccacatatcagaatatgcatatgaaaagttaaaaatttgttagtggtagttattgaaaatataataaaacatcttttaactatcagtgtcactatacatagggttttttaacaaagaatttggctcgtactaattttgacatgacatctgacttacatgtctaatgccattgcataaagtagatgtgttcttacagctgctctaatctctgtgccttgtgctttttttaaaaaacatttaagtctttactagaggcctaaaataaagtcaaataatacaatacttcagattcttcagtagtccatatttatacaactgtaattccatcagtcttgtaagggtacttgaactacaaaaagaaaaaaagagatatctctataagagttttgatttttctccaaaggtaaatttttaaaaactaagatcagcaatactttttccatcaccttcatctttaaatttgcagtcttaaattatttgacttaccagaaaaatcacaacttgctaataaatcattgaatggccatggctattccacaaattattgttatttttaggaagataaattctgttgaaatacaaaactgcacaaatcataaaggtatagctcaatagtatgaaaatgtcagtttttaaagtttgcaacttcagaaaactcatttttaaaccttagagacttttctagctttaatattgtactctttaagccatacacaattttaacatctctctaaaccatatctactcttttcctgaaatctagtgactgcctattcaaacatgagcatgtttgtttattagtgtcacaagggagatgcgttttatcaattttttttaaccaaagttattgaaagaaaa

SEQ ID NO: 101882 - DNA, 1050 bp, Homo sapiens
gtcattgctatactatctagctgtagaaaaatgagaaggatctttatgtattgatatgtttctgaaatgtattattatgaaatgtaaaaagcaggatacaatccagtatacatatatatttttaaagtgtgtatagatgtggatagaatatctctaaaggtatatttaaaaaaatgtttggtgtcagttgcccttgagaagggttaagataaagaagataaagggtgagataaaaaaagagggactttccacagtttacccttttgtactttttgaattttctatcatgaatgcaatgctatacacaatataatttttttaaaaaaatcctatacttagaaatgcagatttgagatcagcaaaatcagaaatttaagaagatgtggcattctaagcagagaggtctaaaactgctgataagaacactttgaataatgtgaacctgacgtgcccacctgatttatgggataatctaaaactattattcccaaatactaaactggctacatcagaatcacctggggagctttgtcaaaatacctggcctctagttctgagattttattattgttcattagaccagtgctagggcatgaatgttttgtgtttatctttttttttttttaacttttattttaggtttagggatacacatgaaggtttgttccataggtaaacatgtgtcacagggatttgttgtacatattatttcatcacccaggtgtgaagcccagtactcaatagttatcttttctgctccttttccttctcccaccctcccctctcaaatagactccaatgtctattgtttccttctttgtgttcataagttcttatcattacctcccacttataagtgagaacatgcggtagttgattttctgtttctgcattagtttgctaaggataatggcctccagctccaatgttttgtatttaaaagcctccaagtgactcctggcttagccagctgtggaaaccactggactaaaacaagcatgtccttacaagcttccattcgttccatgttttggtcttttttggttgaag

SEQ ID NO: 101883 - DNA, 1021 bp, Homo sapiens
accaaaaaatgtcatgtggtctgacatagaggcaaaaatgaaaaagctaaaaaatcagcacgattatgttatcacacaatcaaatagtttacgttcaatataatgatcctaaaccatcaggggaaagtttttatgtccaaggatgtttaacaagttacataattatataaacattttggacctatgtatttaaaatgcttaaaataagtctcagtacctgaacataaaaactttagttatacggacattctacttcagtagacatttcattacttgatgatgcctggtaggaaaaaactgctactttgctttcatcttattaatcttagaaaaccttttcattcagtaggcttctaatttatatgtaaatttgccaaaaattggctctgatgtgatttttttcacagctaatagaaatcacctgcgagtgtcaggtgttcattcaataacagaaccccaaaaagaaagacgtattaatcgtttagtagaggtggttgatataagttaacagaagaaaaagacattgagaaatattttttcaccaaaactggaaacatagatattttgaaaattaaagctgatctagcaagtatacaattgatcaaatatctgagaatctttaaaaataataactcattggtatactagagactaagattgtaaaaaaaaattgagatgcactgagaacattcttcatagtcttcacttactctgatagaataaaatgctgcaagagtacaaagagtgccatatagttagaaaggttatcacttcgtgatacagaatagaaaataaatcttgcctatgatgagaagttctgagaacagatgccagcttatctactcaacatattttacaactttttttttttttggtgatttctgccatcctttttttcccccaatagagtgttaaatactattgattgtttctaaataactaaattagccttgatgttttatcagtgatcattgaaaaatggaaagtttaaaagttgtccaggtgtctactaattctccta

SEQ ID NO: 101884 - DNA, 1084 bp, Homo sapiens
tagaataggtggagtgttctttctcttacaaaatgtttgtaagttgaaattgtttttctgcaatataaataagatacttgtagagagcaatttggcaatattatcaagatctataaaaatattcataccttttgaacagtaagtctcccaagaatctattctagaagtataattagaaatgcagacgaacatgtatgaatatggatgtctcttacactttgtaattgcaaaaatggaaagaactaaactgtcaacattaagtaaatgatagaatatttttatgcaacttttaaaattttgtttttgaagagtagttaatggataagtagtatgtagagtgaaaaaaaatagtacaaaacatgtaaggtatgcagattttgttgaagcatagtctctgtttaagcatctatatttatatataatttgtaagcttagagcctgtatcaccttaattgtagataagaaaaacacatacatctaagatatatctttttatccttaactgcttttggtcccagagcacatgggatctttcaaattaccctatacaatattagaatctatagcataagaccatgtttttaaaaggactaagcagtattttacatactagaaaataatttttctcactttgcctttgttatattgttaatggtgacgctaagataggtacgtatatacagggttgagtattaaggaaataacttgctctttggagtctagtggcctggatttgaaccctagatccatcacttagtagctgtgtaatgttgggaagttactcaaactctctctgcctccttttttctttatgctgaggaaaaaagtatctaactcacaggatgatcatgagaattaagagttaatacatgcaaagcatttaggaaattgtccattgcataataaattttttaaaatgcttattattgttaatattattatgtagaaacacttattcctattacctgttgagaactttttcattttttaaatagaaattaaaaccaactaataatttaacttttacaaaaactttaaatagcacattagtctttatatcattgtattttacagcgtaattact

SEQ ID NO: 101885 - DNA, 1078 bp, Homo sapiens
tttagccaacaggagcaacgtgctatctttatggaatttcttcatgaagctaagtgataagatttttaagtagtattttataataaggcctttatggcataaagataagtagattgttctctacttcagatataagccaaagaaatacaagataaaattggaaggaggaaggggagagctgtaaaggaggtatatcttacagagcttcatcttcccagtttttatattttgtttttctgagaaaacatgttttatctttgcagggaaaaaaatgaagaatgaaattgctgccgttgtcttctttttcacaaggctagttcgaaaacatgataagttgaaaaaagaggcagttgagaggtttgctgagaaattgaccctaatacttcaagaaaaatataaaaatcactggtatccagaaaaaccatcgaaaggacaggcctacaggtaaaggattagattggattaagcagaggctgatcaacccctgaggtgggttcaaggccggatgattgaagggtgtgcagaccatgcctacaggtgtttcatctgcaaaatatagaactctggggtgtttgtatattttctccttactcattttaaaacaagtatttgttggcggagtggtggagtcccactgcctggacacaggaggccaatgctatggggtcaaaggagttagtcttttgtggttatagcctggctcctaacagtgcatttctgtttatcacaaatacttagggattttcacaattctagaggacccctaataacacattaatgggcatggtaggagttgaaagaagtgaatcttgcatctaaaagtaaattacatgttatatgttctttgaaaaaaaaaaaagtatggaaaaagggaactaagattatcagacacctgatatgtcgttaatacaagaataatctcatttatatatttgtggtagaagtcagtgtaactattttctagatgaatgtgactcacctgtgatccacgactagtaaataatggctctgggatttgcttttctgggagttttttttttttgtggtattgtttttgctctgtcacccagtctagagt

SEQ ID NO: 101886 - DNA, 1751 bp, Homo sapiens
ttgctggagagtcgcgcctccgggaagccgggtcctcgaacccagggccgcccgccggggacagcggacccgcggggcaggcgcaccctggcgaggatgttgtcggggaggctgggcattgggcgccagggcccttccccttgaacttggggaaaaccgggattgcagaagttgggcgcagctcaaggcggttctttcaagagcgggtggagatgtttgatccctcctcacctacctctctcaaaaccccagcgggagagcctagcagcaggtttcgatggcttcagaaagtccaactcttagccccttggaaaattatttcccctcttcatggctttgtggcgccgctgaggtcgggccggggctcctcaccccacgggccagtcttctcgcgccctccaccttgggaacgtctatcaggagaaaaatgtgttcctagaaacgtttgcgattagcttttcgttacaagggagggaaaagtacaaaagttataaactcctgcgaggccgagcttgattctggattccctttgggttttatccacgcagccgtgagcagaggagccttgtggaacaaagtagaacttgaggagcagccgccgcggtgacgaggtcccaggatgacgtcaccgtgcgatatttaaaatgggagccttttgctctgagtgtgggtggaggacgcctacttactcaagacgcctgaggtcttcttggccctgcttgcctctggtggttcttgccctgactgtaactctccctctttcaccttttggtactcctagaatactggtgggagtgggcttatttttcagctgttcgagctatcatttcttcaaacggggaaaacaaaagtccaaatgagtcatcttgtgttacaaccaaaagcaaccactaagtggttctttccttcttttctatttttttatatgaagcagagcaaacagaaacaaatccagaactcagatatgtggcacatagttggcaaatgtaatgaatgaggagaaagatctagttaaaagattcagtacatttctttagtgtggttccttgtttgctttgctggagtggaggctaatgtagttccatcagcaaaactttcttcccaacccgtatattaaattgccttgggttttcttttccatcgtatcgtggtggaatataaacgtagctttacaaagtggaaatggcttacatttttcaggaggaggctgcacagcagtcgtggtgggctggggttatgtatacgtgtacactcgtgtgtggacccatgcccggtgcctgctagctggctgtagaaggtgaatttctcattctagggttctgggaggaagatttgtgtgccttcccctccatcaggctatctgcggctgccagcacacctctcagataactgtgtagaatttatttcacagtgaggttccttgtttgaatttgcacttggaataaaggagtcatattctgaagagagactgaaagagcagtttgagaaaagaaagctaacaatcagctttatttttttggaaatgtgggaacacaaactactgctaggttagttgtttttatgctaaacatagcagaggctgtatgtttttaatacgtaattggctcccaaaaaggtgatgttgcttactaaaggcagcatcttaataactccaggttacagcagccagatgaatgagctcactgagtagagacaacatacatcaaaacaatcttaggacaagggtttgcccttaaggattaatcaatgat

SEQ ID NO: 101887 - DNA, 1003 bp, Homo sapiens
tgtatatttatttacattatcatgtgtgaatatgttcacccatatttcaggtcactgcattttattctcttaatacaatgttttcacaacggttaccttgctttccaaagataaatatattttggattagaaatctgagttgttttaatttctaatacctcttgtaaaagaagaattaataactttttaaagcagtattcaggtaaatacaatacattattttgttttctaacaaaagcagttcttagttcaggaagaaaagactaatctggcttctatgtcaatttgtctccatagaaatgaaagcctcctcttgcttctttcattattagcttcacaccagtgactgtgatgcattagaatttggacagagtaagtcaagcctcacttccaattcaaatataatgtctatcttcaaattgagtgtgctgtgaaattgttctgtctttgaaaaaaaaaagtaagattattttgtgtgccactttgggtaaagtttcaagaatacttaaactgtccaaattgtattatcaccatcattgaacttagtgctcaaagaaagcattgtgaggtatttttctaaactttagactctatagagaaatataggattgttctacagaagaaaagcaaaactcctaattaaaaaaaaataaacctatgtattaagagaatgttctcgtaagttgcctatgatgcttccaaagagtttttatctaacagattgtgccaaacagctagataaattttaataatgtattacagtaaaggctataaccaatgcagaattaaaatgggctctaaattctgtttttaactcatgtttagaatgtacttatgaggtagatccttgcttgaaagtatctgctgaaaagcccagtaacgtggcagcttcatgcataaagatataaatgacatttgccttaaatttggcagcctaccctggcttgggtcagattttgttgttgaacacaagaaagtatttaagcaaagaaacacttcagtt

SEQ ID NO: 101888 - DNA, 1051 bp, Homo sapiens
ttcattggacctactactattttttggtgaaacttttatttcattggagggtggtgatgtactgggagtgataaaaaatatgtttctggccaggcacagtggctcacacctataatcccagcactttgggaggccaaggtgggaggatcactggagcccaggagttcaagaccagcctagacaacacagggagaccccatctctacaaaaaataaaaaaattaggtgtggtggcacacgcctatgattccagctcctagggaggctgaggtgggaggaatcacttgagcccaggaggttgaggcaacagtgagccattgatcgcaccactgcactgccacctgggtgacaaagtgagaccctgtctcaaaaaagaataaaaataaaattttcttaccatgggttgtggtcagggtttgaaaacttctactccacacttacgagcgttaatggttgaatactggagtactgctgaatgttgtgttggcagttaagtgctgatttttaaaaataggatattgtgttggtgatgtaagcagcatgttttcctaggttgttgtggtaatagtgaatacattttcatgtttcagtgaattcgatgactcttggtgaggtagagcaactgaatgcaaagctcctacagcaaatccagggtaagaatcactgtcagtacttttttgtgtgtgacaaattttgacatagaaaatcatctatgataggacaccactggctttatctacatttaaatttggaaatgagatattcaaacctgttagagtttccagagcaaaaagaataagaaagaaacaactttcaactgcagaggaaatacatttttccttttttttttttttttgcgacagaatcttgcttcatcaccctagctgcagtgcagtggtgatcctcccgagtagctgggacttactgtcattacacccagctaattttctattttttatagggagggggtttcatcatgttgcccaggctgatctcgagctcctgggctcaaacagtcctcctgcctcagcctcccaaagagctggcattac

SEQ ID NO: 101889 - DNA, 1046 bp, Homo sapiens
attggcttgctttcttttccatagaggaaaaaaaaccttttttttttaagctagcttagctttgtttagctttttttcctttcttcattttattaaaataagggtttcactatgttgcttaggctgaccttgagcaattctcccacctcagtctcccaggaagctgagattacaggtgtgtatcaccttacacctagctaaaacttttttataagattggaccaattcctgttacacaggttgagcattcaaaatcaaaaatctaaaactttttgaacacctacatgatgctcaaaggagatgctcattggagcatttcagatttcagatttttgttatttggaatgctcaaccagtaagtataatacaaatattccaaaatctgaaatttgaaacagttctggtctcaagtatttcagataagagacattcagtctgtaccaaacaaagttttcagtgtaagttgaccttgctagttgatgagtaagtatgtatctggctgctctctgtgtagagcctcttggattactttcagttagttctttctagaaccattctagaaggagacccaaagtcagctccttagcaatctttccaacaagaaaaatctgtaatcttggttaagtcgtagatgaattagtgtctatgtttaatcttactgttccttgattctccgtgtctttaccatatactgtttgtggtcagtagtcagggaccaatttgaatctcaatatgaaattcttgatttggtttggaagttagaactggttgtttattactcgaagggaacataaactgttcctctatgtcctgcttctgacactaacttttttccacttaagtaaggggccccaccacttgtgatcaggaagctgtaaagagctaattcaatctggcattagcctctttctcatttcccatcctgtaatggcaaacatcatgtattaactaaaagttgcactttgaagtataaagcctaatgggaattctgaactttagcttggtgatctttaatatacttatcttagtctattttgagctgctat

SEQ ID NO: 101890 - DNA, 1019 bp, Homo sapiens
actgtcattttctattttaaatgtgatagaactgaaccttggcgacctaagaaatacagtttgaagtcacacagctcataactgttggtcctggactttaaagcctggcagtctggttctagtatatgtgatcttaataccattgatctactgtcaatagttattttatagcaatagggctgatgttctaatcctaattggttatccttgctattctctcagccagctttttctaaccagtgtttgctggcaaatcatcattaatggagttcatgccatgatcgaatttttccacagaaccctaaattttcgtaattgcttttctagctttttaaaataagccttttaactggttctcagtcattatatagagaatatacaaatattaccttaggtaccatctcttaacatttcagctctgataatatctcagcatgtaagcatggaataagtcctttgtttttgaaatcatagttcccttcagtgtaaaagacaattctcaatttgaattagaactatttcgtttaatattctatgtatattcaaggttttatatattaaaatcccaatttaatctttgtaagaaaaattagagtcaaataatttcttctctatctggtgtcatttctcagctctcacaaatacgcattttcattttcactacagtgatcagctagtgtattacaacttttttgtttaagatttttgtaggccggcacagtagctcatgcctgtaatcccaacattttgggaggccaaggcaggcggatcacctgaggttgggagttcggtaccagcctgaccaacatggagaaaccccgtctctactaaaaatacaaaattaaccaggcatggtggcacatgcctgtaatctcagctactcaggaggctgaggcaagagaatcgcttgaacccaggaggtggaggttgcagtgagctgagattgtgccatcgcactccatcctgggcatcaagagcaaaactctgtctcaaaaaaaaaaaaattattttagaaaaga

SEQ ID NO: 101891 - DNA, 1077 bp, Homo sapiens
agtatttgagtgagatgagcccgaactcttttctcaccagtatgatcttattatctggaaaaatactttaaaatttttagattaacctcttttcagtgatcacacacactgttggtaatttttaaaacctgaaaaggtttttaaaatttttttaataatgtccctaagatatatgaagaaaaattctccaaatccaaaaagaaaccccaaaaaaaagccctattggaaggatttatttgggttggtgcagttagtgttgtcatattacaattgatttttggtttagatatttatgagtcatactaaaaaaaaccttaatattcctgcaaaaaaaatttggcctgtaatttgagttttgagttgtaacatatcagtagagagactttattaaacctctagattttggacagtttcaaaatagttctttccttttttctgtattatatatttgaaatttttcatgatctttattttctgtttactaagtatggggtatgaaatgttcttattgtttaaaaaaatatagtgggggattatataccttgaaattcctgttaggacttgttattcagaaattattatggtcaccaaacagtatgtgatggaagattatggatttcttgtggattacatagaatatctataacttcagctttaataaatgtagtgattatagctaatttcaaaagatgacataacaggaacagtggtgtgttcctacaatctcagctactccagaggttaaggtgagaggattgcttgagcctaggagttcaagtccagtttgggcaacatagcaagaccccatctctaaaaaattaaataaaaataaaaggatatcttaaaaataagtttcttttacagtacttaaatcatgctggggtgaaaatccaaatttatgttctttggaaatagagttggcttgtatattgttgatacattgtagaattttaattttagatgagtaaagacattagaaattatctagtccaaaccctgtattttacatttaaggaaacagccaaaaagttggactgcccagggttgctgtagtggtgatggcaagctgttgttatg

SEQ ID NO: 101892 - DNA, 1285 bp, Homo sapiens
aggccataggtgacactatgtccgtgtcttttttgtcctatagttgattgggttagtggcacctgaaggaaagagatttgccggcattctagtcctcctccttcgtcccccaacctcgaataatcagagggcttagcagcgaggccttttcagctaccaggttctgtcaacctagttaacgctgtgagaaacaggaaaaacgacctgcacgggacactgctttgctaacttcattgggggaacctcagatgcgcctcgcgaactcggagttgcgaagcttcgcatcgaacggagatcggcggcagcaaaatgcacgtgggtaccgaatacccggggagggcgtcccgccgtgtccggggcaactacaccgaaggccgagcggcggcttcacggtaccggccgggcaccgccggaggggcccaagccggagctgggagagccgcggcatcctggagcccggcgggcgggagagcctcgtcccatcgctccgggattcctcccagagggaagaaagcgtccgagggccacggcggccggtccgcccagcctcagcgtctcggggagccgggtcctggcccggccttcggcgttgggggcgcgcggccgcccccagggagtcgcggacccaagtccgtctttccgtcggtctgtccgtcggggcgcctggcgcgcagcagcgcgaggggccacggggctcggaactcgaaggaggcggaacgatgggactgggggtcggggctcaggtgggatgggagcagggctgcggggtctttaccgtccggctccgcgggccaccaccgccgttccgtgcggctcgggttcctccactattgtttccggccgcagcagaggcggccgccgcgcgcctggccccgccctctcccgccggctccatcccgtaaaggctgcggggagggtggcgcggccgcgggcacacctgcgcgctcgccgggctgctgtgggtccgcccctccgctcctgcaccgacgccgcaccttcgcctcgagttctcctgtgatcccgtgtttcctggccggagtttcttaccgttctctggaacgtagctcctcacacacccctcctcgaggtgcgtagatagacgaatccgttccacctctcccttcagcctagtgcaaactactgccccggggcgggggccgcaggcggcgggggtaggaaagccgcgggtggatggcagaacgggagaggtgcgtgggtggcactttgacttcaggagaaagaagcagaatactgtcactgaacttatagttaagtgccagttgaa

SEQ ID NO: 101893 - DNA, 1099 bp, Homo sapiens
tcgttagatacttcaactggcacttaactataagttcagtgacagtattctgcttctttctcctgaagtcaaagtgccacccacgcacctctcccgttctgccatccacccgcggctttcctacccccgccgcctgcggcccccgccccggggcagtagtttgcactaggctgaagggagaggtggaacggattcgtctatctacgcacctcgaggaggggtgtgtgaggagctacgttccagagaacggtaagaaactccggccaggaaacacgggatcacaggagaactcgaggcgaaggtgcggcgtcggtgcaggagcggaggggcggacccacagcagcccggcgagcgcgcaggtgtgcccgcggccgcgccaccctccccgcagcctttacgggatggagccggcgggagagggcggggccaggcgcgcggcggccgcctctgctgcggccggaaacaatagtggaggaacccgagccgcacggaacggcggtggtggcccgcggagccggacggtaaagaccccgcagccctgctcccatcccacctgagccccgacccccagtcccatcgttccgcctccttcgagttccgagccccgtggcccctcgcgctgctgcgcgccaggcgccccgacggacagaccgacggaaagacggacttgggtccgcgactccctgggggcggccgcgcgcccccaacgccgaaggccgggccaggacccggctccccgagacgctgaggctgggcggaccggccgccgtggccctcggacgctttcttccctctgggaggaatcccggagcgatgggacgaggctctcccgcccgccgggctccaggatgccgcggctctcccagctccggcttgggcccctccggcggtgcccggccggtaccgtgaagccgccgctcggccttcggtgtagttgccccggacacggcgggacgccctccccgggtattcggtacccacgtgcattttgctgccgccgatctccgttcgatgcgaagcttcgcaactccgagttcgcgaggcgcatctgaggttcccccaatgaagttagcaaagcagtgtcccgtgcaggtcgttt

SEQ ID NO: 101894 - DNA, 1616 bp, Homo sapiens
aggaaataattgtacattttttttcaagtattttgaagatacaattgggcaaaaaatgatacggccatggctgtaagatgtatatccaaggtaggttatatttgtaagtatgtgagaaccataaacatatttcagtatagatggaaagaaaacagtatgaagcggacaattcaggaaaagtaatcgaattgtattatgagatcttttgcaaaggtaaaaggcaatgctgcccaggaggcacctgtggaacttggcttctgacagaaggagagaattcttctcattgttacaagaaataaaaaagcagtatcagaagggtgtatattaggtccagttaagatctgcataaaaaaacaaggtatttttatttgatggcagtaattttctctgtgactagaaggcaagactgaaggtgtgctggtaggatggcgtcttaagaagcaattacttggctttgcagacgccgccgccgaggaaaaccgtgtactattagccatggtcaaccccaccgtgttcttcgacattgccgtcgacggcgagcccttgggccgcgtctcctttgagctgtttgcagacaaggtcccaaagacagcagaaaattttcgtgctctgagcactggagagaaaggatttggttataagggttcctgctttcacagaattattccagggtttatgtgtcagggtggtgacttcacacgccataatggcactggtggcaagtccatctatggggagaaatttgaagatgagaacttcatcctaaagcatacaggtcctggcatcttgtccatggcaaatgctggacccaacacaaatggatcccagtttttcatctgcactgccaagactgagtggttggatggcaagcatgtggtgtttggcaaagtgaaagaaggcatgaatattgtggaggccatggagcgctttgggtccaggaatggcaagaccagcaagaagatcaccattgctgactgtggacaactcgaataagtttgacttgtgttttatcttaaccaccaggtcattccttctgtagctcaggagagcacccctccaccccatttgctcgcagtatcctagaatctttgtgctctcgctgcagttccctttgggttccatgttttccttgttccctcccatgcctagctggattgcagagttaagtttatgattatgaaataaaaactaaataacaaacaaaaaaaaagaagcaattacttagaaaatgttgctgaaaagagagcatacaaagtagactaagagaaggacttgttgggcaattttaagaccccataattagtgagatttgagtctccaatacgttttgttagattttcttcatcagaaggctgtagcccacataaagatttttttttaaaaaggaatataattcaccaataaggttttgatttaacctcagaattctctgtgatttccccccataaattactattgtgaattctgttttaaagtaatatttaattatcacatacaaagctgaccttaacattatttgctaaaatataatttctagaattaccttcatatcacatatgtgatggttaattttacatgtcaacttggctggatcacagtgtgtagatatgcgatca

SEQ ID NO: 101895 - DNA, 1057 bp, Homo sapiens
gaaaacagtagcctagatgaacatgttacaaacttttgatatgcttggatcccctgcccacaccccctgcctgcagctttactgaggtatgattgacaaataaaaattgtatatatttaaagtatataatgtggtgttttgatacacatataccttgtgaaatgagtaccacaaacaagctaacatatccatcactttacctagtaaccagtttgtgtggtgagaacacttgaaatctctcccagaaaatttcaattatgcaacatattattaggtctagttatgacgctgtgtgatatgcttgccttttgatatgcctgttaccaggaacggttttagatctgtgaataatgtcatttaaatataacctgtatgactacatagatataaactaagtcaatgtatttaaaaggtagtaagtgaaacctatacatggtagataaaaaaggaaacagactagtaggtcagagagtaaataaaattggtttccattctgcactttgtgctctgtgaggtggtgaaatttcctccttgcctctgtgttctgcccaggtgccagaattggcagctctcctacagaatgttcacttacatattaaaaagcatcagttatcacccctttcataatgcctttgggtgcttcttggctgagaaaaattattaaaataatgagggtttcttactcctggagaagctaaactgttaatggtttctttctacttaggctattaaaaaaaagatggttttctgtccaataacacagccaaggctgtggttatttctcactcttaaattgctttctctttctactttatcaacagagcagtctttcttggcagctctttcagatactggccttcactaattaaattacaagcaaataaaaggaaagaaaagggaaggagaaagcagctttgaagacagtcatgatgtctttcttctccctcctcaggtcgtgtttgttgctccccaatagtagctcaaaatactagagtattcattctgtttctattgtataacccttgtcctggcatatactataaaggggtaataccag

SEQ ID NO: 101896 - DNA, 1067 bp, Homo sapiens
aggtaggacaggttttggggtgttgaattcagatttagccatgtctgtttgatgagtctgagtgacacagaatagaaatagggacatagagatatctatttagactaaatctgtaatatgttctattctaaatggaattatactccaaaagaaaataaactgatttaaaatagcttgttacagcacttcaggtgttttttcttacactaatgattttgttttacggctgaaaagtaaaatggccaacttgagaagcctaggtataatatgccttagattatatttttgaatggaattattgttctttacctgataatttatattggttacttggcctttaaatctttcttcttacctaactttctattctactatttaaggggaaagataaagggtcattataagagggctgtggaatgatttaaaatggtgggtgaagggtaaaactgaaagtgtttattaggaaagtaaagctattcatgtttttacaggtaactgaagatcaaagtaaagcaacagaggaatgtacatctacctaataactttctaaaatttaaatatgtataataaaataaatgttttaaatataatgtttgtgtgtgcttatacagattaaccctttctccccaagattgatagtgatctttactttttcttttctctaaagtatgaaacacttcatgttgcttaagtaaaaactgtacaaaaacaggtcactcccttcctgctccatggatgcaacactttagcatgttttctctattttttcctacagatctaggcagatacatacaaatataaatgtaatttctaaaaaacataaataggaccatactatacttgcttgcgttttttgccgaacagtggcacagtaaacatccttgtgcaaaaatggcaaatgtttgtagataagtaatattaactgagtatttatcatgtgctgggtcttgtgcgaagcccatcacgtgtggaaccttttctataatcctcatagtgacctgttgagaagatgtttctattttttaaatgaggaaacagcatagagcttgaaagtggtaaagtgggaa

SEQ ID NO: 101897 - DNA, 1052 bp, Homo sapiens
tgaattctcagcttcgttacatgggttattgtaaggttgtagatgatcggttttaggcaattggatcagcttgatagcatgatgtgttgcgtgactcttaaagaccttaaaacctatatcaatgctaattaagaaaatggttcatttgatttaattttcaaagttttagcctctttacttgagatcattatgtcaggggtcattagaaactgaattgaaccatatataatgttcttgattagggatgttagcagcaaagagaaggaagagatttctttttcaagctcttacaaattatttgatgttgcagttttgtttatttatttttaaatcaatcagaataggtgacttcattgatgtgagtgagggccctcttattccaagaacaagtatttgtttccagtatgaagtatcagcagttcacaatcttcaacccacccagccaagtctcatacgaagattccagggcgtgtctttacctgttcacttaagagtaagtaaagcttaaagttctaggtcttccaatttgggtatagatataattccggacttgattttataccagtttgaagaatataaacttttaatttttcttaagttatgtgacactaatattttataaactcaggtttatgattaaaaacaaagttgcccagggtgtaaatatacaattacaaaagaaacattagttgaaaaaattaaattgacatagcatttaaaaatttcaagttagcataggtgagggtacattgacagagggggtattagagtgcgtattggtaagacttcctggaatgccttttaagcttaaatttggcatgctcttccctctaattttaatgatccatcatgacccgaagcctgacattttccacattgctcccaccccttgctaatctttttatttaaatttttgattttgagataattgggttataagacatagagagatcccatgtacctttacttggtttcctcaatggtagcatcttgcagtactaaaatacagtatcaccaccagggtatggacagcgatacaatgaagatacagg

SEQ ID NO: 101898 - DNA, 1050 bp, Homo sapiens
tgagcaacatggcaagaccctatctttaccaaaaaaagttagcccggcatggtggctcacacctgtagtcccagctacttgggtggctgaggcaggagggtcgcttgagcccgaagtttgagactgcagtgagctataattatgccactgcattccagggtgggtgataagagtaagaccctgcctcaaaaaaaaaaaaaaaaaaaagaacaaagaaataaaaatggaaagaaagaacacattgagaagtggaggtgagcattggtattaagaaaatgaggaccaaaaaatgtccactgggttgacaccaagcaggtctgtgactttgttgagaacagtttggcagagtcatggggctgtggccagattaaagggaggttccaagtgtaacctactctcagaaagtatggctgaagaggaagagaaagggaggtatctttaaacacctttttacatattttgagttaaaaaaatgtttttttctttgctgcttttcaggtacaaagtagatttcatagaagagaaggcatctcagaaccctgagagaatagtcaagctacacaggtaagtaaaagtctaaaaactggctgctatgttagagtaaggcttagctttattgttatctgaatgaagcatatgaccaaaaaagatgaatttgtgtcttattttgttcttattaccttatttttggttgcttcgttcattgttttgttatggtggtaaatggaagctttaaattatcttcaggaacacttgtggtttctataatcctcattttattgtttgctatttttatttaattttgagttgaaaaccactgtttaagaatgtaatttttaggtgttttgaaactgggcaagatagtcattgtgatgaattgaacatcgtaattcatatgaatactgactaactagtaattacttaagatacatgtaagttaagccagaatgtgctttctcaagcatggatgagaaaggtccactgcttatgatgacgttctcccatggggagcaagtcccaagacaatgcattctgcagaaatgacttcat

SEQ ID NO: 101899 - DNA, 1044 bp, Homo sapiens
agatttcccattcctctaactgtcaaggactggtagcggcttctgggacttttgtaacttagttgagtgtgtggtaggaggaaggggataattctggaggaagcttgataggacaaaagagttggttcattgaaggtgggtcagtgattgagtccttctgctgcaggagtaagggtgggacctttttgtggctttgactctcaggggacaggagcatctcttggaggtgggtcaggagggataagtattcaagggaattggcacccttattagtgcctgggggactgtagcagtcagtgggtgtttttgcataaaccagtgttccctaactttgccacataattgtgcatacacctgtggtgcacctacacatattacttgtttagcaccctgaggtaaacagacaaagctctcaatagtaaatggtaaagtcatggtttgaacctgggctgtgcagtttcatctgtgcctttagctatactgacagaattgggtagatttgagagatactgggcagtcaaattgacaacttgataatgaattgaataaaggagatatggtaggagaaaggaatcaaggaaatctcccaggtttttcacatggacacctgggtggttggtggtatcgtactaagacaggaaattcaggaggaagaacaagtttgggcggggaaagaggtggtaatttgtgcagtttgcaaatttcagggtaaggtgcttgtggaacatcctagaggatgtccaaatgggtcttggatatacagtttggtggtcagaagaggtaggtagattagaagcagagatataggacatacaactacataagttgtagctcaaggggctgacctagggaggatgcttagcgtgaaaagagggtgtaggatagaattctcaaagggtagagaaagacaggagtggccagagatgtaaaataacaagcagtaaggaatgccactgatacccatggaaagagcactttgaggctggatgtggtggttcatcgctataatcccagcattttgggagactgaggcaggaggattgc

SEQ ID NO: 101900 - DNA, 1402 bp, Homo sapiens
acaggtatggtgcaggtttctccttgtgactgatcaggtcattgctctgataccatatcaggcatgtccatgaatcaaaatgtgctggtaagatgaaagcccagttcctgctgctctgctataaatatgagtaatctgaacgatgtgttagggtgttaggtagaggataagagtcactaataattcataaaagttgagtttttctccatatttataaatgatacaaagttacataattaatatatttattttactttagcacaagtttgttaacaagttaactttatcgtgggttaaaaataaatactttcaggtaataaaactatctgtcggggttgataaccattatggtgtttgaaatcttgcacagaaacattgctaagaacctgaggttcatgcttcattcttttttgatttttgcttggtcgaggtaacgtcatggcctgatggcaactgttgctacattgtgtgaacagagatatatgagaaatattttctaagtcagaagttcacttaaaatttaatattgtcaaaactttagtgaatctcagtgtgtttatatatattttatatatgtatattttttttctaggcatattggcgttcctgtgctatgatgatgggctgtgtgatagagagggcattcaaagatgaatatatggtcaatttggtcagagctccagaagttcctggtagtgtatacatatatgtctttttgtgatccttaaatattttggtacctatttttgatgacgtatagagtttagtactaatataaattaccattatacatatgtgtcatttatcatgggtaacaaaatctttcttactatgatgaaacatgaagtagtctttgcaggttaataattaacatcatagaattactggaaagtgtttgtcttgaatatgaatttcatggaattccactatctcagcgtttatttatttatttgagacggagtttcactctgtcacccaggctggagtgcagtggcgtgatcttggctcactgcaagctccgcctctggggttcacaccattctcccgcctcaccctcccgattagctgggtctacaggcgcgcgccaccacgcctggctaatttttctgtatttttagtagagacggggtttcaccatgttagctaggatggtctcgatctcctgacctcgtgatctgcctgcctcggcctcccaaagtgctgggattacaggcgtgagccaccgtgcccggcccttagcgtttattttttactttaagcatatatttccaaattggatgtatagaggaggaggaaatctgagtataagtagactactgtaaagagctgtgcttaggtggtaatatttcaccagacaggaccattactttggaaagtgacagcactttggtgaaatgacagg

SEQ ID NO: 101901 - DNA, 1028 bp, Homo sapiens
gacgttcttgtcattcatgcttgcagtcattcagtaaactgttattgaacacctgctatattccaggcctggtgctagactctggatatactgatgagtgagcaaaagtagacatgatccctgactttacggggtttatgtagtggttgataatttagaccttgtagtttgactacttttgtgagtagctgtgtaattgcagaacatctaattggcattaacagttggcattgcattctgggatgatgaaacagaccagagctgattggcttatccgggagttaatattaattattaaaaaatggtaactactgtatttaacttgaagcatctatgtcatggaaataagagatggtttgggagcaagacccaaaaccaatctagaactgatttttgtaggtgtgtattaatatatttcccttttactttgagttgtgtgtgtatctatccaaatgtatccatgatgctgctctctgaatattcaagtgtaacttttttcattaataattagcaaattaatttcaaactagatgtagcctgaacaaattttgtaaatggtttgggtaattttgttaataaccaataagaccttgagtatattgggtattattttatttatttatttatttttgagacagagtctcgctctgtcacccaggctcgaatgcagtggcgtgatctcggctcactgcaacctctgccatcttggttcaagcgattctcctgtttcagcctcccaaataactgggattacaggcacgtgcccccacacctggctaatttttgtagggtttttttttttaattgattatagacgtaatatactttttttctctaaaaaggacagtctgcagaatcttgcctttccattgttatatttctaaatatagcacttaaacatgtaacttttcactctggattttgttagataatcagtctgttttaaatttctagatttaagcgagtggtattgcaggaagtccattctggctctggtggatggacagccttgggacatgtataagcct

SEQ ID NO: 101902 - DNA, 6830 bp, Homo sapiens
cagcacgagtcttgattgcttttttttttctcgagttcgaggcggagcccgcgaaccccatctcctcagagcgccaccccctcagcttcgcccgttgggcagaattttccaaatatctccacccctaggctgaaaagccagaaagaagttttgagccaacgaggggaagaaaggagttggggcaaaacaggaggcgtttccctacccgcatacatccccgtccccgagacacccaatccccccacccccagcctgcccgcgcctcccgcccccagctcctcgccctggggacagctggcagccccgcgcggaccagacacaaagccgatcaatcccggaggcgtgggggcggagggacgacccgccggggctttcccgggcgctgctctcctcctgctgccccctcgctaggacccggcggacgcctcgtctggttttcacgccctctagcccctacccccacacccccaaaacagaacagacccccatccctgggctggaggacccgcctcttggcagccagctgagaaggcgccccggggagggggaaactgacatcccatctagagccgtccctcctcttcctcccctcccgactctctgctcctttcccgccccagaagttcaagggcccccggcctcctgcgctcctgccgccgggaccctcgacctcctcagagcagccggctgccgccccgggaagatggcgaggaggagccgccaccgcctcctcctgctgctgctgcgctacctggtggtcgccctgggctgtaagttgctcgggttcctctacccttcctgcctggaccagcctgcccccaccctccagccccccacggggcgctggctgacagtgtctgggcggctctgggccgaggtcgccgcggggcgtctgaccttgcgcccaggcgagcgggaaacccagggtgcccgcgagcggacgctgggagcaagggagcgcgaggtcgtgggtttcttgtgaattgcgtctgattttgtcagttctagatacagaaaattaagggttcccactagcaggttctcatctgtttgcaaagttggggtaagttttcagacagagggacgtgattcgaatgcaaaactcactacccactggtaagatgctaagaccccaagaaagatggcatcactgggaggcgggcgccggccacactttgagtccccggggagggggcagcgtccgcgtggtctgggctctgtagcgtcccagctgagccggcgatatgcagcgcacttgtggggcggaggtggagggaattcgtggctgctgagccagaattacttttatcctctccacctgcacatctacattcacttagagaagtctggtctggggactctagccagctgctctgtcctcaggggacatccaacgggacgattgttagaaagattcagaagccacatgatccagtagctggggagacgtcccaaagccaatttcaccggatgattttaaacaggattttcacggattctggactcatgagatttgaaatcctgggaacgttgccgttattttgttttcttcgcgttaactttttaggaaaatggaggaaattacaatagactaagcaatgcagttctacttttgctttttcttttttctctcaccttttttgttttgcttttttcccttccttccttcctcccttcctttctctttcttctttctttctctctctctttctttctgtctctctttctttcttttgtaaaatgagttattgttgctattcacgttctggtaaagtaacacttataatacttaacctgcgggacgagtgtctaataccacaatacaatgatattttctcacgccctcgctgcccaagtgatcatcgcacagctcaagtgatgtgagccacgtccctttgtggaggaggaaggtgcacattgtctcaggcaagggacatgtactgaccaatattatataaagtcaaaccagaaagccaaagtttcacaatgaaacccttgtgcaattctgaaatatcaattggtatcatatggaacacacagaagaaaaaaaatgcactcatgctaaaaggcaacagagaggtaggctggagaaatcgttaacagaacaactgagaaagttatgtattctgctgaaattctaaatttcaaatagaaaagagtgtgccttttagtgtagaattgtcactaattaaaaacagaaaatcgttctgctgtgctattcctattgaatcaccaacatagaaacaatacaccccaagtctgaaattgtagtggagaaacaaccaagaggcgaacaaaagcataaatgaatggggctgagtgacctcttcaagctttaggtaaatataacacattgtctctgctaaacttgattcctataggggatgtatttggaagtgttgtggggacttttctatattgttcctgggatactaaaagatctggcattgcaagagtgttttctttgtatgtgggtgtttttttttttatgtttaaaacaattttagaacagtttggatttaaataaaaattccaacgctagtatagagagttctcatatactccacacccagtttcccacattgttaatatcttacattagtatggtacactttattcaaatttccttcattcttacctaatgccttttctattccaggatgccatccaggctaccatattacatttagttgtcctgattccttaggttcttcttggttgtaacagtttcttaggcttcccttgctttctcttactataatgggtttgaggagttctggtcaagtatctggtagaatgactgcgaattgctgtttctctgatatttttctcataactagactggggttataggttttttggaggaagatcagaaagtggtaaggggcctaggtaaagtgacattttcatcacattatctccagggaacataccgtacacatgacttattgctgttgatgtgaacctaggtcacctgtaatcatactcctaatgtagtgcataccagttttctccacagattacctacccttttttcttcatttccatactagatttttttggaaggaagtcactacatgcaacccacacttcttcaggaaggagagttatgctccatctccttgaaggcggagtatcttcataaattatttggagctcttctgcatgggagatgggtctctcccttcccttcatttatttatttaatcatttatttttctatcagtatgggctcataaatatttgttttatactttgggttataatccaatactattttatttattaaagacttagtggatttcttatgctgttattacatattcatctttttaatattcttcccagatgtaactgtgccattcttttggccactcctatcatttataatatcatgcttactcccttctttcctttttatcctgctgtttatcagcattctttatatctttcttagtagtctggaggattgcttttttgttgttgttcttgttatttaaacgatgatgtcagtatccctgttgatatatggatatttttgtgtgtgtttagttgaattacatttttctttcccactccattaggaaaggaatttcttgatgtttgctcaccactatatgtccagtgctgagcaaagttcctggttaatagtaggtataaatatatgcctgttgattctatggtgccttagtccattcaggctgctgtaacaaaataccataaacggagtagcttataaacaacgtttatttctcacagctctggaggctgagaagttcacaatcaagataccagcaaattcagtgtcaggcaagggcccacttcctggttcatagatggagccttctcagggtgacctcccatggcggaagaagcaaggcagctctgaggtctctttgtaagcgcactgttgtcatgaccagatcacggtccaaagccttcaactcctaataccatcacattggtgattagatttcaacatatgaatgtggggggacataaaccacagcagatggaatggggatgaggtagggtaggtaaaagaagtgtatagattgaactgattgcaatataaatcatgaagctctaacttcatgttaagtaggtggagtgttagatttctctgaggcatcatttaagctgatatgtcaaaaaataataggaatgagtattccgtgtttggtggggtgttgtcatgccttttggggtctctcagagccaaggagctgatcatgaatcagttcctgattccacctaaccagtagcagctggtcctcagatctggactggaacctgatccaggcgcttagcctgagtctaatctctcatcaactgataaagattgtggtaggggagagaggtctgaatcttttgtaaaatcacaaggttctgcctttttgccagaactgacccaaaacagcactccagggaaccggtactaggaaaattctgccctctgtatctattgttaagaagcaactgccataatcaatttgctggagagaagtggttccgtgctggcacagtctcaattatctgatgaacagaaacgctaaaatgggcttgtaggtggatttaacaaccatttcaagactatgaaagaaattatattagaaagaatgaagtcaaaaacaaaaacttcagcctgagcacagtgagttccctatgactgaaaacactcatttatcctcccacatgagcagtttaatgagaggagcccacaggagcttacggatgttcaccacccatggtttccattgcattggtttcctcctgtgggccttcctcatagagaagatgtattggaatatagaggtaagagctgctagctttattgaagtcagaccaccaggaagctataaaggccattcttaaaataatattttttcatcccatagcaatatagtagtaacactgctgagtcaatactccagtatacccctcttgctagactgatgttttgaggaagatggtggtgaagatggaaaaggggaatcagaacctgggtcaggtgcctcctttggcaaaagcagcaaaataaaacttaaaaccagggattgttttcttggacggtgttactgttaacaaggctagaactcagaaaaaataacccaactgtattacttttctatttctgtgaaacacatgaccaaaaacaaaacaatacaaattgattgtcttaaacttctagaggtcagaagtctgaaacaggtctcactggcctaaaatcaaggtatcagcatgaagcattccttctggaggttctagggcagaatctgtttccatggcttttccagcttctggaggcgccccactcacggccctgtcctgccaggctgccacctgtccccactcacggccctgcgacaccaggctgccacctctcttgttctctctcttctgcttccttcttccactcatcaggacccttgtcattaccttgggcttacctgagtaactctggataatttatccatttcaaagtcagctggttagcaactttcatccatctacaactgcaattcctatttaccatgtaaagtaagatatttataggttctggggagtaggatgtggacatctttgtggggctattattctgtttctcacagcagccaaaatgaggttatgcacagcgacagtgttttcagtgctgtagccaagaatattctagattccatgaagccaccataacttttacctttaaagtataactcatagtgatataaagctggttggttttttggttttgtttgtttgtttgtttgtttgttttatttgagatggaatcttgctctgtcacccaagctggaatgcagtggcgcaatctcagctcaccacaacctccacctcctggtttcaagcaattctcctgcctcagcctcctgagtagctgggattataggctcccaccaccacgcccacctaacttttgtatttttagtagagactgggtttcgtcatgttggccaggctggtcttgatctcctgacctcagatgatctgcctgccttggcttcccaaagtgctgggattacaggcgtgagccaccgcgcctggcctaaagctatattttttattagttgtatttcaaattgcatagtatggtggtaaagaacatgcactccaatgcagcactctgtgctcttaccagctgtgtgatcttatacaggttaacacctgtattatgtcagtttactcatcagtgttggtgataatcccaataagagtgcttacctcatagaggtttagggagaattacatgtataacacacttagtaaactgaagaagccattgaagccttttgacattgaatatcagtttgatttgcattttaaagagaatgcattggatggagtatggtgaatggaaggattggggtggggggagtcaaactggggagaccagttagaagttattggagtagtccaggcaattgcttgtgtaagtacttattttatatagtttattgataaatatactcacataattacacatacacatataaccactgacaattgctttttacagttgtcacctaatgatgcgatgtgttctgagaaatgtgtcgttaggtgattttgttattgtgtgatcatagagtgtacttacagaaacctagatggtagagcctgctgcacaccaaggctatatggtgtagcctattgctcctaggctacaaacctatacagcatgttactgtactggatactgtaggcaacggtaaacagttgtaagtatttgtgtacctaaacatatctaaacatggaaaaggtacagtaaaaacagcacaaaagataaatggtacacctgtgtagaaacatatcat

SEQ ID NO: 101903 - DNA, 1687 bp, Homo sapiens
ccttcctgactcctttgcttctcagatagaccatccttaagtttcctgcaaatggtttcaggaaattagaaaagaaatagttccagtatatataagcatactcttataatttctttagaaataaagatcacaatttattatgcttactgctgtataccttccagaaaatcaaatcatattatatatagtgttgtgcaccttgctccaaaaagttatttatgttagtaattaaggtacaacctaaagctcagtctacaagcaggacagaagataacatcttatagaggcctttaaaattgttgcaccaaaatgcagtgggagctattttctaactagaaccaccaaaaataatggaacaaaatgattagtaaaacaaagggaaataaacttccaaaccagtaaccaaatatggaaagggaaaaattccaagcaagatccagttaaaaagtccaaaggagaacgtgtgtgcacccagagaggacagagacactagcaccagctaagattcacagacaagtgcaaaggggtgctatttttaaaggagaccaaagaggaaataatgaccacaaataaaaagggaacatgtcaaacttctgggcaagtgctaaatttgaaaagagagaatggtgtttatgttttttaaaaaatgcactagagggctgggcgctgtgactcacgcctgtaatcccagcactttgggaggccaagacgggtggatcacctgaggtcaggagtttgaaaccagcctagccaacgtggtgaaaccctgtatctactaaaagtacaaaaagtagctgggcatggtggcatgcacctgtagtcccagctactcaggaggctgaggcatgagaatcacttgaacgtgggaggcggaggttgcaatgagctgagattgtgccactgcactccagcctgggcaacacagcaagattctgtctcaaaaaaaaaaattcactagatgcattttcaaataggaatggattttgatcagaagcagaactgacacaatggaataaacaataactcaagtatgcatttgtccaataactgaaacatgcagccatctatgtcataaaacattaaaattgtacctaagcatattggagacatgagattattgtactgtccatatagtgcttttggatccagaacaagtcaggttcttttgtgccgtgtgtttgtgtgtgtgtgtgtgtgtgtgtgtgtaaacgagtgaacatctatgccattttatctagatacagtacttcttcccaacctccattcatctctgttgttgttgctattgttcctcatatggccaaatgcaatttctccctgaaggtctaactccaaaattccttgcgccttctcttaattctttccaactcatcaattcctcaaagctgatgtctactgtatattatactctggtgcttttggtatattctttattctcttatggcacttactgagctgtactgttacaatttttccatgtatatctctctgtattgtgagcttgctggaggcagagacaacacatctttaggtcgttggtacctagagtactgcctggcacatttaatacttgattaagtagaattacataagctggaatttaatgtttatttgttttgtagcttcataaaattatataactttttagcaataaaaacctcaagacatatgtaaaattaatagtctc

SEQ ID NO: 101904 - DNA, 1243 bp, Homo sapiens
tgagacaatagagactgttttagtctatttctgttgctgtaacagaacacctgagactgggtaatttataaacaaaagaggtttacttggctcccagttctggagcctgggaagttcaacattgggcagctacctctggcaaggccctcatgctacattaaagcatagtgaatggcatcacatgtggaaacacctgcaggagcagcaagcaagtatgtgcaaaagagacaaaacacaagtgatggcctcattttttaacaacctgctcttgcagttactaatctagtcccatgagaacaagaactcatttgcttctgtgagaattaacccagtcctatgagaatgggactaatatcttcgtgagggtggcagagtcttcatgacccaaacacctcttaaaggtcctaccacctctcaacaccattatactgggaactcaatttcctatacatgaattctgaggaacacatttaaaccattgtagagcctgataaagtgatcttcatttccaaatcaaagatgattttcctaggtgttcttgtccagtatttttataggttggtgcaaaagtaactgcagttttagccgttacttttaatgattttgtgggatcttgacacttgctcattagcacttaaaaaattacccctggatccaggtgagtcattgtctctgccaagaatctcattcagcattaggcaaatgccaaaatcagatacatgtaagaatctcagctccattgtgctactgccacccaggacagctatctaaagatgctggcatgttcaaaaaacactgaatcagtgatcttcaaacttttttatattacatatcctacttcatttcttaaaagaggatatgtcctgacgtgtgttttaataaattgtaatatgtatttctgtatcaacatattaatcataaaacatataatacatagaataaatatcaaatgaatgagacaatggagaattaataatacactaacggggcagaaatgaagtggttatagccctatattatagtgttctataaagcctctataagtaaaataatgtgagattggtacatgaatagacagacaagccaatggaagagtatataaagtccggaaattatgccaacttcatttagaaatcacgtgtatgtgtgtatgtgtgtgtaaaatggtagcatttgaaaccatggagaatgcttaatcaatattgttacaactgggaaccatttgagggaaaaatggatcaga

SEQ ID NO: 101905 - DNA, 5546 bp, Homo sapiens
aatgttaaaatactcatcagatgaatgcatgccacattcatagactgatggcaagaaaaagtgaatataaaaaaagagttgattaaattcctaaaaatttaaaatgtttgtcttgcatttgtttagtggagactggttccatcaaggtcctcttgtccacccccaggctccttctaaacaagtaaagagaatacctgcagatatcttacatttgacacatcaactcaagcacatttcaaaattggccgtagtttctaaaatattcatttaatgttaaagttcttgtcattaataacttagtatcaagcttcctgtgagttcttcatatgatttaatttctcatagttcctttagccttgaagaccccaaatctataaggattctctagagaagatgccggttatgggaaaagaatggaagaagtagaggcatttagcagccacaatagaatagcctggggcctgtgtcagcagcatatgcacactgtcattgtagccatttgtgtcagaagctatttctgtgctggacaacactttctccaaatacactatgaatttatgagcaagggaatgtagatgttaatggaggaagaagtttcacttcacctcccactcctttgcgtcttaattttagagtggaagcaagattgcatcacagccctccatgggatatatattcagagtcctaataatttgaacaatcacatattatttgcttgtacaattatatatatgttcaactatttatatttggccacaagttaccaaaatttgctgagtaatgatgagaccaatcaagaccagcctttttcattatgtgggctagaatgtttaaggagatttatttctaattattagaaaatgaaaggacaaaacattttgggagtgggctattgcaacacttcttttatagagcagttatcccacttatatgaatattgaatacaaatgtttcttttcagagaacaatggacttagatctattttttttttcttttttgggatgggatctctctctgtcacccaggctagcgtgcagtggtgcaataatagcctgtgctaatttatttatttttttgtagagatgagttctcactatgttgtccaggttggtcttgaactcctgggctcaagtgatgcttctgcctccaactcccaaagtgctgggattacaggcgtaagccactgcaaccaacctgactttcatcttttacctaaaagagtattagtcacatcttctcttacaaggtgactcatggcaggttcaaaaggacagggttggtggacagaatcaccttcactttttaaactcattaattttatgaattatatttgtaatatgtatttgccagtggtacattattgaattcataagttaaatatccatgtgaaatgtctctactagatgttcaaaggacctccttatatctaaccacaaacgtcaaattttgttcacaaagaagcaaaaagtataatataaataaaatggaactagagttccaatgggctagattgagtcagttctgcccttagtaatcatatggttttagaaaagctaccttattgtatgagtcttttttccctcatttgttaaatgaaagggtttgatttaatgattatttgtattgtttataattgaacattttatgtttttaaatgggaaaatgtaccatattttagcctgttataataaaattatgttatatgtagctaagaacatgttttaaaattctaaactgcctcctttagaattctcattggttagaacagagcctgttttggaaggaagcaagaaaataggctccaaaaatgctggatattcataaagttgactgtatagcatgttataaactttttgtttgatgcagtaggcaacaggaagttgttgaaggttttgaagagtggaataatatatcaaaaaataatattggagataaacaataattttgccccttacatatagactagacttgggaagaaagggtaactgtaaggcaggccttaggtaatgagatccaggattaaactggaggctgtcaaaatcgtttaggaaaagtagaatccagaagacattgaaaatagaaattgataaaatgcagtgattgattaaatataggggacatcaaagaaatcaaaacagtaactccaaggttgtaaacttgtagaaccagagaaatcatggtatttaattgagaaggaattatttatatatatatatttcaggaagcaataaaatagccaactaaatgtgtctctaaagaccattggagagtggatgatcatgatctgtacctatcccctgtatttaagtggtaaaatggaaagagaaatgtataaccactctgggaaaaacatggagaagattagtaggaggcaaaaaactgaactctggaaaacatacttgtgaaagaatataaaagagcagagacaatgacaaaacaagtgcccagagtaataatggacaaccaacagaaccagtgtcatggaagctggggaggaattttgcaatgtcaattgttatctagaggtcaggaagaatgaagggaaaagatcagggtgaattgttgggtaacctgaggggattaaaaagtaaagaaaaaacaaaattagcatttgaatggaactttacaattgacaaaacactttcagaggaattattttacttaattctcatgttaacattactgtgagacccacaggactatttttattcacagtgtcataaatgagaaacacgggagcttagagtacttttaggacttattccaaggcaggacttagagttacttactcaaaatcccacattctttgctatctggaagacaaggataaaaagaacatgctggaaagtaccaaccaatagtatattttcagtgtccctgtctctcaccacatataaatgccttccatattcacaactcaaatcaaattcaaagcaatattaacctgaagggtaagccataagcctgtaataaatatttcatgttctgaaaatattatttaactaaatgggagaaatatccaaaaatgaacacattccatattggaaggggtttattatccaatttagtcatcctaacaacatcacagcagatcatttaaaatgaaaatagaaaacatcctcataattttctagcctttttttttttttgctgtaagttcatattaaaagaataacattaatattgtcttaagcaaagataagtattattatacgtcatgcatttcctaaatttcaattatgtgttatttttaaaattgctatgtgtgtctgatgataggacacaaggctgtgtttttccttccttttaaaataaataaataactcttttagctgatttctttggtgccattttgtaatttcttttgtctttcactacttcccaactttagtttccataggaacaggatcaatcggaaagcatttgggattctttcaaaatgttgagtccaagatttctaattagggttcaggcacttatagtttaattaatatgagactttttctgtgttttatttttgaaggtggaaaaaactgggttatgatttcataatatgtttgccttttcaaagatttttattagagatttggatcaaagagctttaagatcatttaaaaatgtgttaatacatgcctgaaaaaattaaatatattatgcatactattcttgacagataagaagacttaaaacaataattatcccagttaaatgcatcaaaattagttgaattatccttagctgaaaattgattctttgaaatataacataaacctagtgtcttctcctatacctcttttatagtttgttgttgttgtttttctgagatggaatctcactctgtcacccagagtgcagtggtgcggatctcggctcactgcaacctctgcgtcctgggttcaagcaactctcctgcctcagccttctgagtagctgggactacaggccacccccgaccatgctcagctaatttttttgtatttttagtagagacggggtttcactatgttggccaggctggtctcaaactcctgacctcaagtgatccgcccacctcagcctcccaaagcctgggattacaggcctgagccactgcacccagcccctcttatagttttattgtgagaacaagtatggtcaatggaaaataatgtagatgatagattttacttttaaaaaattaccattatggtcacattacgttagctgtataagacaaaaacatcctcagtttataaaaaaagcattcaactttctattaacagagagtgtgctcaaggaattaaatcaggaattatcaacaggaaggggattacttcccccagggggtactgtgaaattttatgggacctattccattgtcacaatgatgagtggttgctatatatttgctgagcagggaccaggcctcttaaacagcttgctgtgtgccagacagtcctgcaaaataaagaattttcctgagtccctcatttttcataactctccaaagtcctgctgcatgttcatataagtgaaaacttcataattatctgagcttatactgtaacttacactgttttacctataaacacaaatattcttttggacagtcttatcatataactaaatatacaaatttgtattctaatgctcacaataaccatatatatatatatatatatatattttttttttttttttttttttttttttttgagacagagtctcaccctgttgcccaggctggagtgtgatggcacagtctcagctcactgcaacctccacctcctgggttcaagtgattctcctgcctcagcctcctgagtagctgggattatagaaacttgccaccacgcccagctaatttttgtacttttagtagagacaggagtttcaccatgttggccagcctggaacccctgaccttaggtgatccgcccacctcggcctcccagaatgctgggattacaggcgtgagccactgcgtctggccaataaccctattcttatattcctgtactatttggaatggtttctgattttacttaaatcccatttaacattataagtgtacaccaggcatggtggctaatgcctgtaataccagcactttgggaggtggagacagaggatctcttgaggccaagagtttgagactagctggactgggcaacatggcaagattccatctctatgagagtaaacatttaagaaaatttgctaggcatggtggtgcatgcctatagtcctagctacttggaaggctgaagcaggaggatcccttgagcccagaggttcagtgttacagtgagctataatcatgccaccgcacaccagcctgggtgacagagcaagacattatctctaaaaaaagaaaaataaataaaaataagtgtagacttcattgtgtcttctagtgtactcacgtataagcatttatgaattaaaatatgtatttttttatttctctttaacattaaagggacattacattatttcccaaattttacatatatataaattttatgtatataaattatatgtttgtatatgtaatgtttattat

SEQ ID NO: 101906 - DNA, 1713 bp, Homo sapiens
atttagcatgcacactttctatcaaacttcatttcttaaaatatgagagctgtgtgaattttatttttcaactttcctgctggaagatgactcataaaatcttggcccttacattacatacaagtgttattaattaaattctattaccacaagtgcttacagaagaaatttgaaaaccaagggaaacttcccagccattgttgcttcatgcttcctttgattagtcctcaggaagccaaaaaacaagaaccatttattttgaagtgcagaacatggaaacaatggtttggcattgcttaactgtcatattcacaattgtcaggcaagattcctaagaattagctaccctgatttcttgggtcctgtaaatccaggaaccacaatttcccttttcttttggtaaaaacagttctctgacttttttagttcaaaactagtcctacacatccaactgtgagctaacaccaacacgcacttttttaggatcagtgaactagaccaataaaataaataatttagtgaatatctgcacacattaaaatcagtgggacctttggagctgcttcctagaatggtcaggaaatgagtttttgtgctattggataaaggtcaatttttttttttttaaattttgacacagggtcttgctctgccacccaggctggagtgcagtggcgtgatcatagttcactgcagccttgatctcccggggctccagcgatcactgcacctcagcaatcctgagtagctgggactgtgggcacataccaccatgcctggctaatttttgtgttttttgtagagacagggtctctttacgttgcccaggctggtctcgaaactctgggctcaagggacctacctacctcggcctcccaaagtgctgggattataagcatgagccaccatgcgcagccaaggtcaaatttttgaaactctttcaaattgagtattggaaagaagaacaaaggtatttgtgtccagatatggtaggcaaaagtctaattgtcgtaatataactcaagtgaaatggctgtttgatgtttgtcatagcatgaagagaactggatttatgacagaatctaccaaaagttttgaaattatttagagtcagccttagcacataatcttagcacttagtcttaataaggtggtatcagaactgactttacccccattgggataaagaactaaattgtattctaccactattattttcagcagcttggctttttgagtaagtatcatctaaaattaaataaaagacaacattagagtctagcaaggtaagaaaagagtagtctattagagaaatgcaacttaagtcttagtcttcattatagatggaaacagaatcattctgtctttaggaagtcataacccagtatttgaaacccagtgctgtgaattactagccacgtcaccttggataagctacagcctcagtttaagtaaaatgaagctagtaatgccttccctagctggttgtaaagatgaaataaaatcatgtacataattgcttagcctacctcttggcacacagtagattctctataaatacttgcttctcatccctctcccctcacttcacattgctttttatccaatgtggtgacgcagatagaacatttcacaaatgattctacaataatcgcgtatgaggatgttctatgaaaaatgaattgttagggttatacttttcccccatcttct

SEQ ID NO: 101907 - DNA, 2157 bp, Homo sapiens
aaactttagtacactctgagattataagatttaggaactgggtttcaggaatcattgagaaagaaaatcattttctctttctcaattacagttttctacttgttaaaatttcctttaagaaacatttcttaaattgtcaaaaattactataaaatttctgtgaaaaataacagctgttagcttcaggaattttgttaattcccttgtacattttttatgtgtatattaatatttgaacagaaaaacgatgtatcacagatgttaaaaaagaggattagttgaattggcaaaattatgtaggcaaaaaattataaagggaattagctttaataaattaattatcggtagtatttcttagtagctgaatatttatttccttttttttttctttttgtgtgtataaatttaaggggcacaagtgcaattttgttacatgggtatattgtgtagtggtgaagtctgggcttttagtgtagccgtcatccaaacatacattgtacctatttttgtgattttaagtatcttctccttctagctacctttcttcctctaattctatttacttcagggtttaccaacaaattaagtaaaaatatttaaaatgtatggtcacttatgtggaacttatttgaacagaaagctctgaatctttaaattaaaaaaatttataagatttctaccttgttttagcctttctagtcttagagttcctttttacaaaacttgtacctaataactctttttataaaaacaaaatgttggattttatatcagcatatcactagcagatgttaggtatagcccctgttggctgcattcttgaagtgatttttattttttcttcacttttccagaacaaattaaataggaaaataaacaaaagaaaatggtcatgtaggcctgctggttgaggtcaacaattgtcttaaagttagcctcagaacatctttaacagttatgaacatgttccaaaagcactggcagaagttcataaaataaggtgaagagatgattattttcataactgctaacaactccaagtcaaataattcccagtcaaatgaaaccttttgtgtttcttttcctcccaactttaaaaacaaaagtttttgtattctctattactcatctaagatagtctggtttgactaagaatatatactttatattatgacaattttaaaattactataaaggtgttatttaaattaacacttttaattgaaaacatgactaggaaaaactggagaagtgttacataagttgttttttttttttctttttctttttttttttttttttgagacgagtctctctgtgtcacccaggctggagtgcagtggcgtgatcttggcttactgcaacctctacctcctgggttcaagtgattctcctgcctcagcctcccaagtagctgggactacaggcatgtgccaccacacctggctaatttttgtatttttagtagagacggggtttcaccatgttggccaggctggtctcaaactcctgacctcaagtgatctgcccaccttggcctctcaaagtggtaggattacagacgtgagccactgcacccggcctgaagttttttgtttgttttaaatgtatagtatcacattatcatgtataaaagcaaattataaaaagtatggatatcagttatatcataagtttcataaaaataaaaatttatggccatgtggttttgatagttactgaaagacaattattatactgatatggtttagatctgtgtcccacccaaatctcatgttcagttgtaattcctaatgctggaagtcgggctggtggggggtgatgggatcatgggagcagtttctcatgaatggcttaacacaatccccttggaactgttgtcatgatagtgagcgagctctcctgagatctggttgtttaaaagtgtgtagcccttcctcccttcctcccttctttccctccttccctccctccctccctccttccttccttctttccttccttccttccttccttccctccttccttccttccttcccctccttcctctctctctctctttctctctctctcctctctctctttctttttctgagacagagtttccctctgtcaccaaggctagagtgcaatggcgccatcttggctcactgcaac

SEQ ID NO: 101908 - DNA, 4023 bp, Homo sapiens
ctctaagactagaaaggctaaaacaaggtagaaatcttataaatttttttaatttaaagattcagagctttctgttcaaataagttccacataagtgaccatacattttaaatatttttacttaatttgttggtaaaccctgaagtaaatagaattagaggaagaaaggtagctagaaggagaagatacttaaaatcacaaaaataggtacaatgtatgtttggatgacggctacactaaaagcccagacttcaccactacacaatatacccatgtaacaaaattgcacttgtgccccttaaatttatacacacaaaaagaaaaaaaaaaggaaataaatattcagctactaagaaatactaccgataattaatttattaaagctaattccctttataattttttgcctacataattttgccaattcaactaatcctcttttttaacatctgtgatacatcgtttttctgttcaaatattaatatacacataaaaaatgtacaagggaattaacaaaattcctgaagctaacagctgttatttttcacagaaattttatagtaatttttgacaatttaagaaatgtttcttaaaggaaattttaacaagtagaaaactgtaattgagaaagagaaaatgattttctttctcaatgattcctgaaacccagttcctaaatcttataatctcagagtgtactaaagtttgcctgaaatgaaggaaggccagaacctactgaagaaaataaacattctcagtaggcagtgtgatgtttgaaaagttcaaaggtatgatgatacagagggaacaaagattatctttccctattttgccccgaggttttcctcgactggttttcagggaatttgagtcttcattgttttctctaaaaagtgtaataaaatatttcagaaatcacaagaattgtcagtcataagtagagtttctccgagggcattaattcacacagtgttaaaggagacaaacagactttttcaaagtatactttgaaagtttcacagaacaatggtttggcattggaatcactggcaaaaatgttcagagattttgtcatcaaaaataggagtaggccaggcgcggtggcactttggcaggccgaggcaggtggatcacttgaggtcaggagtttgagaacagccatggtgaaaccctgtctctactaaaaatacaaaaattagccgggtgtggtgacgcatgcctgtaatcccagctactcaggaggctgaggcatgagaatcatttgaactcaggaggtggaggttgcagtgagccgagattgcaccattgcactccagcctgggcaatagagcgagactcagtctcaaaaatttaaaaaataaaaaataaataaaagtaggagtaaagcaacaaggtaggtcccgtcttccctacctcactgaagaggattctggcttggtctcctgtctcattccttcctctgctctctgaagattcagactctatctttggagtctataacatgtgggaagcagaagagaagctaggaaataaaggaatgcaggagaagaaagggatatgggggaagagaaaagaaagaacagctgctatgtgatcaaagtgtgtggaaaaggatatttaaaaagattgcatggacccctttcatggttcttgaaatatacaagcaaaagagttcttttgaaatgactccctggtggacttgacacctctctaagattgagccacatgggtcactgctttctacagacatatttacagctgtcaatagaaaggatcagttcagtcctgtactcttcacatagacaccacgtttgccagtttccctattgaatatgtttgccatttagagctattgaacctgcatatcactggttttcctgttatactagaaatctagtaatttgtgtcccacagacttttgcaaattaaaaaaatatatattttgagtcactgtgttgcccagtctggagtgcagtggtgcgatcatagctcactgcagcttcaaacgcctgtgctcaagtgatcctcctgcctcagcctcccaagtagctgggactacaggcaggtgctaccacacccagataatttttaaaaattttttgtagagatgggggatgttactatgttgcccaggctggtcttaaactcctggcctcaagtgatcctccttccttggcctctcaaagtagttctgcaaattttaacttcacaattagatttgctgtccaggcttttaagggaaaaaagaaattctccagaatagcgtgtgctccttaagagtgataaaatctagcacaatggaagactaatttacatgttgatatatagagatgaataaatcaaagaagagttgtcatgtcatatgaaagatttctctctcctttccaggagtataatcaattctctttcatagttacacaattctgattttatacaaacttttcaaaatcctagaattcatggttctttgccattctttatagtctattggtttattcctgttcctggttgttcaaactggtctaagtctagagcaatggttctcaaccaggagtgatttctttacacccatctctcaggggacatttactatttagggacatttttagttgtcatcacttgggggcatggtgataccggcatctagtgggtagaagccagggatactgcaaaacatcctacagtgcacaggacagccccctacaacaaagaatgattgagtgccagatatcactagtgtcaagatgaagaaaccctcacctagacctcccctctggggttacgttggtgtcctactttcctagatcagcctcttagcttccaccttccttttgtgcttcagagccagtcttttgccttcattctaaccaccaatttctcaaactctcctgtcttcattagaccaatgaaactttccacctggaatctttgttaatctgcaatccttgctagtgttcagcttgcggggatcacggtgtgggcctagtatagcacagtaattaactatgtgggcttcaggtactgactgagtccaaagccaaatgccaccgcttacttcttctatgatcatggccatgtttcttactctctttgtgcctcagttttcccaccctcaaaaatgtgagtacaaatggtaccctgccacagagaattgtaagagtcaaatgagttaatacttgtaaagcgccaagtgcttaataaatgttagctattattatcctttctcaagggtccatcaaggtccttgtcctctaagttacttccttctctgtactctaagtctggaaagcaggtgtaatttactcatgatggtttctcttaaatgtttgcctaaattgtgaatgttttccattaatctaatggctaggacttttgatgtggaaaggcagaacataccctatttttctctctcaggtttggctgtccatatctcttccctgagcactttgtggcataaaggtgagagatgggaaagagatggaaggaaaaatacttcagaacattttcatggatgactcacaattcttagtctgcagatggaagctgatgaatgaagggatgagaggatgggtgcatcatgggcagcacctaagtttctggtgtgagtggccacatggaatgtgatgctttacatagagatgggatttgtaaaaataagacaaagtttgggggcaagctgatcagttttgcctatgagtttgtggtaattgtgggaaatggaaatacagatgtccagcagaaagctgggcttacaaatttaatttcaagagacagattggagctggagatgtggagttatgactttttagcaaataaatgctagttgggtcaatgagagtacaaaatactccataaaaaggaggtagtttagtcagaaaagcagtttctggatggatggatggatggatggatgacgatcgatggatggatggatggatgggcagaacaaggaggaggaagaagaactcacaaagcagacagaatgaagcaccaggatcagaacagaaggatgaagactaggag

SEQ ID NO: 101909 - DNA, 1240 bp, Homo sapiens
acagtagtggtagccaccacagtcagttacttcagtctatagaccggctctcaaaaatcattgaaatgttttggggaaaaaaataaagatgttctgcttgaatttttcatcataatttcatatacagcttatatacatttattatatatatatacaaatttcatcaaaagtatgtaaaatgactcatttctatatgacatgggtattgtcaaggataaattcataaagctatttatacttttaaataagcctaaagagaattagcttttatttgtggggcaataccgtgtgacactagattgcatattaagctgaattaaggatgtaagttatttttcaatgatcgggctggcaggagtgtgttgtctggggtggggtccaaatagatgcatggattctactttggaaaatgcttaaaggccaaagctacaatctagaaaataaacatgtatagtttcatttgctttttcctattttgatcctttaaaactatgtgttatgaattgggtaaacttgtcaccaaactttaggacagttttcttgactattgcatcccattcagacatttgaaaatgaacttttgtataattttaattatcctatctgttttaatctttcagatcataaggcctatgggttttctgccccaaaagaccaacaagtagtcacagcagtagagtaccaaggtacagtatcttactgattttcacaggctgtattgtttaaataactcacgagagtgactcgtgtgatgttattttctatttgttgggattctctgccttaccttctactaattcctctgcctgaaatgctgcttcatgctgactccacctcaagaacatttactccacctcctcagtggaaattttcgatattcaataaaagaccggatgtgcaaagaaggtctcctataacttaaattatctgcacaaagcaaatctaatttgtgaaactgggagatggagagcttggaaagtttctagccagctagatatgatacatagaaatgaacacttcaaactccactctgtgtatttaaggtgatgttaatatagcttactttggggtaccatgttcttatctattttagcttcttaaaaatgtttataaggaggagttaatttaagagcataaagtttctgttttgcaagataaaatagttctggagattgttatatgcacaacaatatacttaatactactgaactatacagttaaaaatggtcaagatggtgaa

SEQ ID NO: 101910 - DNA, 6544 bp, Homo sapiens
ggctgggagtggtggctcatgcctgtaatctcaaactcctgaggccaggagtttgagataagcctggaaaacatgaagaccctgtttctacaaaaaaacaaacaaattagacagacatgtggtgcacacctgttgtcccagctactcaggaggctgaggcaggtggatggatcacttgagtgcaggagtttgaggctgcagtgagccatgaccatgccagtgcactccagcctggacaacaaagagagagaatgtctcaaaaaaaaaaaaaaaaaaaaaaaagttcatcattttaaaaaatgagtaatttaataacaaattacttaaaaaattattaggttaactaagttctcttaagttctaacattttatatgcttaagctatagaacactctggtatgagttagttttaaacggagagaggtgggaagaggaaattaacgattgagggaatttgggactatggagcacctccaggatggataaacagggctgggtgagatgccagaatggaagctggaaaggccacaagggtgagcacagagtgcgagaggggtaaatggaccaggatgtccctgagggaccaaggaagtgaagttcagttccacttctcactttcttggaggttcttaatgctgggtccaactgggtgcagtggatgtatatcctctcccatcatatctgagttaggacatcaaaattatattctttaaccttacattattttttaaaaaatgtatcaaggtgaatttcacataacctgagatttgtagtttttaagtgaacaattcagtggcatttgacacattcacagttttgtgcaaccaccacctctacctagttccaaaatgttttcatcactccaaaacaaaaccctgtacccatctgcattactttttaatgcatgttttatttttaatatagaaaatccttccataatgtattgcaagcaaatgttaatctcactccaaaataagtgttttctattttcttgtttcatctcacctctttttaattaagaatttcattttaattctattgtatatgtgtctccatcattccagttttggctcttcataaggcataaatacatttctgtttcttctacattttagtcttaggactagatgcagtaacttaattttgccgtaagtctataatattttatgatttgtgtatatgtgtatgtgtgtttcaccctatttgttcatttgttatgccttgtttctctgaggtcaagaaattatgaattaattccttctttccagcgctgctgtgctgtatcacttcccatgatagtgccaagagcagaaggagactgaaatcagggcagctctgccaggcttgtaaattacatgagcagccctctgcaaagggagtctaaacctgaaagctataaattagagtttaatagcaagcatttcttcacagaagtaatttctgctaagtcagagctattttggtagtatcaattctctttttgtgttatgtatgattttgatgatttttaacttgagccctgagaatgaaatcaaaggataattagcagtacagaatccaggaaaattaaaattcataatgattctatctatgcgattcctaaatgtgattattttgccacatgttgttgctaatgctttttataaacaaagaattctcttttcttgatctaaaggaaatagatattttggcaatgaaataatccccttaatagaaaagacttggcatattttcctgtttttaatatgccttaggttgagaaaatataatttatatctatattttttgctatctcctacagagataacattttatttcaaattggagtgatttataggtaaatttgtgatggtataaagtatatatttctacgtcaaggcaagcttgcaactataactaagagaaattcttcaagggtgaaaacaataatgaccatttacagagcacatactatatgtaaggtggtgccatgtgcatcacacatgtaaatatagtgtctctttaatcttagtgacaactttgtaagatgagtactgttctttttatcattttacagatgtggatataatgttcaaaaaaagtaattctcccaatatcacatacggagtatatggtagaggtctaactctgaagcctctgctataagctaccatgttatagcgcaataaccctaaagcctgatacagaaaattatgctggcataagtactgaattttggctgaagagagagaagagaattcatgagagttaggttgtaagttcatttacttccttatcctcagatattgaccccatgattccagtatttttattctctgcatttgtttcttatggctgccattacaaaatactacaaaccaggtgacttaaaacaatagaaatttattctctcatggttctggaggctagaagttcaaaatcaaggcattagtacccaagggcctaggcactggctctttccttgcttgggatcttctttctcaaagaaccatataatgaattctctccctcttttaaacctttggtcaaatatcaccttctaaataaggtgaactctggctactgtttttcaaaaattgtagccctgtccctagcacttgcaaaccccctgtactctgctctgctctcttttgtcttcataaccctcatcaactgctaacgtactaagtaattcactttattatgtttcttgtttatctgacttcccctgttaaattgtaagatcccaaagggcaaggatctttgtttcgttcactgatacagctcaagaacaatgcatggcagacagtaagtactcaacctattttggatgaattggataaaccatttctcgacattttacatggccagcgagagagaggctggagtgaagtcactggacttaggaaaattattgctatattttctagtataagtttcatagaggtttttccacagcgcaataaggacagaaattaggaagaattcaccaggaggggtgtgtgtgtgtgtgtgtgtgtgtgtgtatgtgtgtgtacacgcgcccacacgcacgcacacacacatgcgtatctaaatatgtaaaacaatgcaattatttaagtgtaaaattactcttaagacacagaagacatgaggaataggctaaaaatgagtgtgggtgtgtgtttaattgttggaaactcacaaaataccggaaggaaacctatctacaactcaagactccggaaggtcaccacccattctccttaatcaacagaaaagaactgtgtttcctcagacaggtcccttagcacacgtttgtctttgtagcataattgtaaacatgtctgtaaaatgatgtctctttgtaatgtaaaacctgctttaaaaactttagacattcttgaaaacaacttttggttcttttcttccttgcctttcttttctctgccctactttctattttccattaccttttattccatttttgtatgtccagcaatatgtgtggaatgaaaaaaattagaaactaaatattctgcattcttttttaacattcatttgcttaacattaaaatcaaaggtatgaaaaggattttaaaataatttctggtcaaagatactgtgcttttttaggtcaaaccatatgccttgtggggaaaaaagtatttcagaaacatggaattgacattctagagagcctggttaaaaaaatacttttaaaaatatttataactggaggtttccatttggcaacttgaggcagttcccagactggcactgggttttttgtttttttttttttctctcagacatctcgtttggacagtgaaaagaagggggttcctttggaggctccaagtattaatgacacaattgcagtaaatttcttgtaataaaagaacttagctacattgaggcagttacacttgatgctaagatttaatactttaataattatctggactgaggcaaggttatataggcagttgtttgggggtaaaaatcaatgatttattaggagaccatattggataggtattaatgtatttgtagagaaggttgacaaagaagggatctgagtgagaatatagcatgttgtggaaacttttctgagtttcccagcatgtccctggctggattcagtgcctttcttgggtactaagcatgaatcaccatctgcatagctggtattcagcaacactgggctgaaacgccattatcttagttgcctcttctaccagatggtagactccttcaagactgacactgggaataataagacacatagttaatcatagctgccatttgttaagtccttactatgtccaagcctgtgtgctttgcatatcttattgcatttgaagactcacaacaactctgtgaaatactagcccatttacagatgaaaactcaaacttgataaccagggaaataagcacagtgtcatacagttactatgtggaagagctagaaggcttccaattcatgggacctgttgatgtaatttatgaatgaatgaatgaataaaactataaaggagtaatttaaagttgtttacaattttgttacctagttaagtaaaatataaattcatggggacaattagaaaacaagtatttttattgttgttcctagaggctattttagcctgcaaaaccccaaagaagactgtttcctccagattagagtggaagaaactgggtcggagtgtctcctttgtctactatcaacagactcttcaaggtaagcagctgtaggcttgaagaggtgtgagcaagagaatgccaagtacaaccaggatcctttaattggcaaatgagatcggacatgactgattactgaaaatgtgtttttgtaagtgtgagatgaaagcaaccatgtctgagacataaaacacaatagccacaaaagcagagaacagagggaggtgaagcccactgaatccctggactcttctctctcaactcaggcataaagtatgcaaaatgcaattgctcttattggctcagtagattaaactccgttccttccttcctttctcttctttctttctttctctttatttctttctttctcttccttccttccttccttccctttcttgcctttctttcttttttcaagattttgttctcttgcccagtctggagcacagtggtatgatcatggctcactgcagcctccacctccagggctcaagttatcctcccatctcagtccccaagtaggtgggactacaggtgcacaccagtatgctcagctaatttaattttatttatttatttatttttttgtagagatgaggtgaggtctccctatgttgcccaggctggtcttgaactcctgggctcaacccatcctcctgcctcggtctccaaaagtactggaattacaggtgtgagccacttgcctggctatagataaactcctgagggaaaggaattaaaaaatggtgtggtttggaaatggaaggttgcttctcagtcataatgctgtcaccctatttccttaactccatttgaaaggtaggccaccactgagaagctcagggagttaagacttatgggtgggttatgacagcaaccattatcaagtgctttcttttcttttttttcttttgttatacatttctttctactacctactcttgccattgaatatgtgatgaacttataatttaaaatattgataatgatggatgaactgttataatgtccatttgcttcaaaataaaccagtggttaatgatacagatgaaacaagataaaccatgcattgattactattatagctggtcaatgatacattgaggtacaattcacttcactttctaatgttgtgtatgcttgaatctttccattataaatatttctaaagctggaaatacaattttacaagttaaaataaacatgttatgattttaaaatactatgtatttctttaatgttaaagaattaagtgaaaatgtttgaagtttatagaaaatttaaaatatctgctcaagttcttatctgtcaagataagactactagctgtaaggtgttaatagcacagctgtcttcacttgaattttttgtagttgccatttctggcatatgcagaaatgcaaaactattattttatgcaacactatttatttgagccattgtacctgcctaatttttacatttttttaaagagatgagatctggccatgttccaaggctggcctcaatcttctgtcctcaagcaatcttcccactcagccttccaattggctgggactacaggtgcaagccaccacaccgggtgcaaaacactattttaattctgaatatgttactatcaaaaaataaaataatgtttttaaccatcttttcttgtgccgcagtgttacgtgagccaccacacataaagttactgttccagtcaattaaaccagactccctggttttctgaagacatgaatatttttacaagggaactagaaagggaatgaggcaagcatttgagctcaattctttaaaatataacatggggctgggcacagtggctcatgtctgtaatcccagcactttgggaagccaaggcatgcggatca

SEQ ID NO: 101911 - DNA, 1037 bp, Homo sapiens
tgaatttttttttttttttgagactgagtttctctctgtcgcccaggttggagtgcagtgacacaatctcggctcactgcagcctccgcctcctgggttcaagcaattctcctgcctcagactccccagtagctgggattacaggcgcccgccaccacacccagctaattttttgtatttttagtagagacagggtttcaccatgttggccaggctggtcttgaactcctgacttagtgatctaccggcctcggcctcccaaagtgctgggattacaggcgtgagccatcatgcctggccttttgaacattttaaaaactgtcctttccaaaagaaaaattttaaataacagcatctatatacaacttttaggctttaaacttgagtttattaaaagggaaataaatgctttggttactaaatgaactgattagaggaaggtattacacagaaagctacttggattattactaacatcaatgtcttctttttctaaaaggtgattttaaaaatcgagctgagatgatagatttcaatatccggatcaaaaatgtgacaagaagtgatgcggggaaatatcgttgtgaagttagtgccccatctgagcaaggccaaaacctggaagaggatacagtcactctggaagtattaggtgatgtgcatgtatgtgtgtgactacgtctcccactccttctccaccacccagccctgggggcaagcaagcactggtccataaacatgccagcatcaactgggagcctcaaccagtcaagttacagagaccataagcatcaccttcctggcaatctcctggccatttctccccctctcctcattggctgctgaaattttagtaatgcgttatcacaaagtatctctttgttaaaggtggaggcaattcctaatgatcctacaatatacataggagtatctttcctgagagtttatttttcaatagttttcagcatatacacagtttctccaaccatttaaagtagtatcacatgagatggtggagaagcaataacacacaaaaa

SEQ ID NO: 101912 - DNA, 5017 bp, Homo sapiens
tggggaggttgaggtggaaggatcaatgggttgagctcgggaggttgaggctacagtaaaccatgatcacgccactgtactccagcctgggttatagagtgagattctgtctcaaaaaaaaaaaatctatctgcacacacacacacacacacacacactctctctctcgctctctctcacacacacacattctctctctctctccctctctctccctctctctcattaggcttcttttaaatataagtggtaataaaccaattgaagaaaacagtagagatcgtttatctaataaagaatagctgttgtataagctaaagtaatgcttattattataacagataagcccttaactctcagtgagttgcttaatagtaagttcctttctcacttaagtaaagcctaaatagttgggacagtggtggaggagccatattactttatttcatgaaatcattagagactcaacctaatcttctgacatcttcaatatatgacgttccaaggtcaccattgttgttgacacctacttggtagttgcagggggtggaggatacgaatgaacatgtgggaggtttttaattagtctggcccagaaatgggatatatcactttttcccacattccattggccagaactcatgtatatgaccccatctggcaacaagagtgctgggaaacatggtcgactgtgtgcccatgaagaaagaagatgggtttgttggacaagtaagcagtctctatcacagggtccagtaatcacacctctttacctggctattaaaaccattgattgtagagacaaagtcaacagctttgaagaaaataaacaaccttgattagcttataaataatcaatatcatttgacttccattgttcagtggctccagcagttccatcatgtgaagtaccctcttctgctctgagtggaactgtggtagagctacgatgtcaagacaaagaagggaatccagctcctgaatacacatggtttaaggatggcatccgtttgctagaaaatcccagacttggctcccaaagcaccaacagctcatacacaatgaatacaaaaactggaactctggtaaggtcatttcaagatttgacttgataactgtcttgcatttggataaaaaaattattagaacttaagatgacgtttaatagagagctgataccattgcttgctaagtggagagaggcaggggcaccaggaaagatggcagcacttgtaccacgaagtgatggaaagagctactacaggacatgggaacagaaaacagagactgagggagctgactgtgcaaggaccagtaaaagagcaaaggggcaaaggctcctgaaacaaaggagcaaaggctgtgtgtttatcttttcagaatttaaaaagattctagaattgataatcctataaatgataccaattaagattttcgtagaccctaagctacttcctggtagtaactctggctctttaaaggaaatgtttattatttgctgctgcagtgaactcacttgtgacttaggaaagtgcattaacccttttaccagggaggccttcatttatataggtggtgtttcctaggaattagaaatacctagactactgagtactaccatgtgctataaactttaaaaattgcgcggccgggcgcagtggctcacgcctgtaatcccagcactttgggaggccgaggtgggcggatcacgaggtcaggagatcaagaccatcctggctaacacggtgaaaccccgtctctactaaaaatacaaaagacttagccgggcgtggtggcgggcgcctgtagtcccagctactcgggaggctgaggcaggagaatggcgtgaacccgggaggcggagcttgcagtgagcagagatcgcgccactgcgctccagcctgggtgacagagccaggctccgtctcaaaaaaaaaaaaaaaaaaaaaaaaaaaaaaaaatgcatgctgccttcttaagtaacagtgccccaaagcccactaagcctgattcatgatgatgaatcaggcagttatctacagctgtcttctggcctggaaaattactaagtgcagtctcaatttacaacatcaggaaaatgcatgaaaacttgcttggggataccctgaccatgtgaaaatagtaactgtagtcaatcatggtaggattcctatatcattaaatatttccatgactgtagatcaacaacagttgactctgtgactttagtatctattactttagagtccagatattctgtttcctccagtaaaatattcttattgaaagactttctaggaatactgatgacaatctataagcaagctctgtgaagctaattacatttaaaaataaaaagtattttactttttcatctttgattataggaatagaagtggaagtttaaaaaagggtcattaagcttgaagctttttaaaaaaaattcagtcaatgtaatattctatgtcagtttaaaattgtctgccttccagcaacgcagaatcactatgacagcgattatcaaaaaaaaaaacttaaaggcgtggtgataataacaattttaataatttttaaaaatgtttttgagacagagtcttgctctattgccccggctggagtgcattgacgcagtcttggctcactgcaacctctgcctcctaggttcaagtaattctcctgcctcagcctccagagtagctgggactacaggcacctgccaccatgcctagcaaatttttgtatttttagtagagacggggtttctccatgttggccaggctggtcttgaactcctgacctcaagtgatcgctcgcctgggcctccaaaagtgctgggattacagctgtgagccaccgtacccagccaattttaatgaattttgaaaggaggatataatgcttcattcctttcatctacaagtgcacagtaacatttacaaacagatcttctgataaacaagaaagcaaattgctaaagtggctgaataataaagcctattggatgcagttacttcttaagctctggcctctcagcagtcagcaggcgcagtcagcaggtctgagtgattttacactgagcaactgggcagaaaaacctgctgtcacactttgctatatttacttttcaaatttattttttctcagggcagttggtaaaagccccaaggcaagtctgaaaggatacagattcactttcctcagctaacctcaacccttgaaatagcttgtgatgtcaaaggaatgcacctggattgaactaagataggttcttatgtgagaaatgaacaacaaagactccagtgtatggaagccaatgacttccttttaattaccagctataatatgctggaagatcattttgggttttagtctaacatattatttatatgtaaccttggccatgagttcatggtgaatattctaaaagcattctggctttgaggagagtgacagatgattccatagagtggaaaaaaagaaaaacaggaaaactttctctccctccatctaggaggatctaagacaatgacccttcaaggtgaccaggattacactccctttcttccctccctccagccctttcttctttccttccttcctttctccctctctccctccctctcttccttcctttctccctccctccctccctctcttctttcttttctcctcttcttcctttttgtctgccttcattccttccaaatatcctccaaggggataaaaactactgataaaaataacgaagtctattatatcaatcttagcttttggttgctttgacagggatgggaaggagcaagggctggcttttcttttcaaatttaaaaaaattctagagttgatagaatcgacaatcctataaaccgataccaattaagattttcctaggccctaagctacttcctggtagtaactggctctttaaaggaagtgtttattgttggctgctgcagtgaactcgcttgtgacttaggaaagtgcattaacccttttaccagggaggcctgcccttcatttataaatgatgtttcctaggaattagaaatacctacactacttaatactaccatgtgttatgaactttaaaaaacactcattgccttcctaacagtactgctttcatggttaaaaaaaaaaaaaggaacttctctgtatgtattttatctttgttcttctcgtcaaattaagcaaaagtctagcttaaactccttgaagtcatggcagatttttaaattcatagtaaagacagaaagtcccaaatttttaaaaaggaaagacaaacttaatgctaaaatttgagggacagggttatttaaaaagtctacttatagatctatggcttaaaaaaatatatttttgcatccacaaatagcaatttaatactgtttccaaactggacactggagaatattcctgtgaagcccgcaattctgttggatatcgcaggtgtcctgggaaacgaatgcaagtaggtaagcatgaaatattgggaggaacaaatggtttgcaattcgactgtgaagtacagcagttgggggtacaaggagcaaggagcaggaaatgtctgagtgacttgaagaataaacaggagagaatgactaaaattaacttgatatgatgtgttgcaaagaagcaaagatgctgtttttaagccatctcccaaataagccaaaaatacttagtattgtatttaacaactttttttagttttttaaataatcgtttttaaaatacattcttctaagtagtctttctctcaaataaaagctaagtatcttgtagtctaaattgttgaaggtccagaagtttgaatttctgatatttttaaaattcaggaatgtatatcattgatattattcaccaaattaattcaggtgttgacatttatagtcaacgtagcacttatttaagtaatcagaaagtatccctttcaatgctgctttgaaattatcatttaaaaaaattcatcacaacatgtttaaaaattaaggcattgttttctttgtttccttta

SEQ ID NO: 101913 - DNA, 2683 bp, Homo sapiens
cccacctcagcctcctgagtagctgggattacaggcatgagtcaacatgcctggcaccatgtgttttctttgacgttgagtttttctttatttgtgaaattgacacagttgatgatgtaggagaattttaagtaagacgtggggtagggagtggcagtagaatacttgaactcattgaacttcaaagattgcttccagtcttttaatcctgtgaattattacacatctccaaatgaatgcaaaagaatacattttattttttaatctgagaagtttttaaaatttagtatttttccaaagcttaagttctgttaatatttttaatcaattttgaaccatgtcttagaagtgagttagttgaacaggcttcacaatcgttaaagtatgctttatgatatagctgcaaaggggatctttttttgaaccttttcaatttaatgactgcatctgtccgtgtaatccacatatatttatgcgtaatttattttacattccagatgatctcaacataagtggcatcatagcagccgtagtagttgtggccttagtgatttccgtttgtggccttggtgtatgctatgctcagaggaaaggctacttttcaagtaagtgaatttcacccttctttggcagataactttctatggctatggagtttatttatgagatactgtttctcctaggaagttgtttttttgtttgtttgtttgtttttcagacagagtcttgctctgttgcccaggctggagtgcagtggtggcaaaatctccactcaatacaacctccacctcccaggttcaagtgattctcatgtctcagcctcccaaatagctgggattgcaagtgtgcaccaacacacccagctcatctttgtatttttagtacagatggggtttcgctatgttggccaggctggtctcgaactcctggcctcaagtgatctgcctgccttggccttccaaagtgctgggattacaggtgtgagctattgtgcccggccctctcctagcaagttttaacaaactctggagaatattgttcatttattttctgctatagaaaatgttcaggatgacatgcaggtggcttatgaaacaccttggcaaacctagggagaaaaggcagaactgcctagttgcacattccagggagcaccacagaatatgcaagaggcatccttggagtggtgcagtgcagcgagacagagatattcaatgtgaacggatatttatagtatctttgcatgtttttaagatttttttttgtttgtttttttgagacggagtctcactgtgtcgcccaggctggagtgcagtagcgcaatttcggctcactgcaagctccacctcccaggttcacaccattctcctgcctcagcctcccgagtagctgggactacaggctcccgccaccacgcccggctaatttttgtatttttagtagagacggggtttcatcgtgttagccgggatggtctcaatctcctgacctcctgatccacccaccttggcctcccaaagtgctgggataacaggtgtgagccaccgcgcccagacaagatatttttaagttaggaattgtatatctcaagatataagttgatttcaaattctttaagaaatttcattgaaataaataagtgaaatatttcatcagtgtagaacagtgaaatgttgaatgttaaatttaggacaactgtatttagaagagaattgttcagctgggtgtggtggctcatgcctgtcatcctaccactttgggagtctgaggcgggaggattacttgaggtcaggagttcgagaccagcctggccaacatggtgaaaccccgtctctactaaaaatacaaaaattagccaggagtggtgacatgcacctgtagtcccagctactgaggaggctgaagcagaaggatcacttgaacctgggaggtggaggttgcagtgagccaagatcatgccactccactccagcctgggtgacagagcaagactccatctcaaaaaaacaacaaaaaaagagaattgttcagtcaaaaatagaaacctattgtatttatgagagctacttctgtacacagttttgaattcttcaaatttagacctcttgtaacttcacacctccatttgataatgcaataggtttgatgtaaatgggtgggatttaaaaatgttttattctcttaatgcatttcttcactccctctttaatattattggagagctcagaagctgcagcattctatcagggccactggcaatagtgtgtaaaataaaattcttaattgaattataaatttatagcatatacaagttctagacccattgttttacagcgaacattaatttcggaatttagatttttaaaacaattttttttttttgagacagggtctcactctgtcacccatgcctggtgcagtggtgtgatcaaggctcactgcagccttgactttccgggctcaagcagtcctcccacctcagccttctcaagtagctgggactacaggcacataccaccacacctggctaattttcttttattttttgtggagacaggttcttgctctgttgttcaggctggtattgaactcctgggatcaaggaatcttcccatcccaacctcccaaaatgctaggattacaggtgtgagccaccactcttggcctttaaaaatatatttta

SEQ ID NO: 101914 - DNA, 4858 bp, Homo sapiens
gtggctcacacttgcattcccaacactttgggaggccgaggcaggaggatcacttgagtccaggacttcacgaccagcctgggaaacatagggagaccctttctttacaaaaaataaaaaataagccaggcatcgttgcacacacctttagttccagctactcaggaggctaaagtaggaggatcgcttgagcgcagaaggtcgaggctgcagtgagttgtaatctcaccactgcactccaagctggataacagagcaagacactgaccaaacaaacaaacaaaaagagcggctctgtcaattaatacttgttcagtgcttcaatttagcccactttaatgtaactttatgaattgaatccagctgtggccccctgctggtcatcagtgaaagtacagacaaataagataactcttccaaaactcttgtcatctttatctatagcctaaaataatactggtctgagtttttttaatgaggagttagtaaaaaaattttcctaaaatattgaattaattaaaagttgacttgaatattaggagttcgttacctaagaatgttactctgatttttcatctagcagaaaaatctatccaagagaagcatattcttgaatatatgtttaggacagaggttggcagactactatctgtggaccaaatctgccctccccgcctatttttctatggcctatgaacaaaaatggctttacagatgaacatttacaatctatttgatgatagggcccgctgactttgaaccccaattaagagaaatgttatcttccccaaaagcattccatttctctaactagtaggcctgtttttcaagacttttattattattgttattattattattatatttttattttatccataaaaatgtttggaaatttgtttgctctcttgttacttaagtacctatatagtatcctcttggccccaaagcctaaaatggttgctgtatggctctttaccaaaaaagtttgccaactcttaatttagaaggtataaacgtcagcaagtgaagattaaaattaataaaaataaattaaacccaaactcatttttatatgaatctgtatcataccataataacccttgcattaatgatatatactttttcttttgtagaagaaacctccttccagtaagtatactttcctacaatgcatgtctttctcctatgtcaactaattttctattaatcatctgtttaaagtcaaaagagagaagttgggttatttgtgtaggtttactctcacaagaagttactcaagtttatcaagaaatacatctgtattaggctgttcttgcattgctgtaagaaaatacccgagactgggtagtttattgtaaaaagaggtttaattggctcacggttctgcaagctgtacaatcctggcaccaacactgcttggcttttggggaggcctcaggaagctttttactcatggctgaaggcaaagcgggagcaggcacgtcacatggcaaaagcaggagcaaggttggggaggtgccacatacttttaaacaaccagatttcaagaaaactcagtcactattctgaggacagcatcaagggggcggtactaaaccattcatgagaaatccgcccccatgatttaatcggctccaacaaaccccacctccaacattggggattacaattcaacataagatttgggcaaggcaaatatccagactctatcaacatcccacttcacacttcatacctacttgtaaatggtagtacagagagaatgatgattacccagcctacttgtaaatggtagtacagagagaatgatgattacccagacaagaaatatggtcactaatttgatttcataggcatttgtataaactaacttaaaaaaaatttactgtattttgctaaattgaaaattttcaaataaaattttagttaacagtcatttttttatattaattgaataccaattttgtgcctaacactgttctaaggaatggggatacagcagtgaacaaaacaggccaaaaaccccacaaaactctgccttatggagcttacattctagtagagaaaggcagaaaataaacaggtaatactatatagtatatcagatagggccattatggagaaaaataaaacaaataagagaatatacaatacaaagggtaggagtagagattctaatttcaaatagggtggtcagaaaggatctcactaagtgatttttgagaaaggcctgaagagggtgaggaagcaagttgtgcaaataaccatgagaagagcgttcaggcagaggggagagagcaaattgaaagatcctgaggccaggcaagcctagaatatctgagggatgtcagcgggaccagggtggctggaacagaatgagagaaacagaggagatgagcgtacaaaagtagcggtgggggcagattgtaaggagtcccttttaggcagtcgtgaggagtctggctttggtctgagtaagatagaaagtcactggagggctttaagcagaggagtggtgtcattttaatttttcaaaactcacactggcttctctgttaagaataaactatgagatgacaaaaggtggaagcagggagatcagttagcaaactaccacactaagtgaggcaagagaaaatggtggctggtgccaaagcagtgttggagatgctgagaagtgacagtgttttggatataatgttttaataacttgctgatctgttggatgtgggctgtgagagaagcagagaaatcgaagatggcttcaaggttatgagaaggatggaattaccatttacggaagtgtggaagattttaagaggagagagtttgggagtggtgatgggaataagtggagaggttggagtgtttggaattttaatatttgatatgcttatttgattccaagtagaggttatcagtaactgaatattcaaaatctagagtttggggaaataactggaaatggaattgtaggagtcattggtacatgaaatatgggtgagctccccaacgccctgtagtttgtgtgtacttgttttatgactgtccttcttgtatgtacagatctggcagacctaactttggctctatgggcgtagagagaagatggatgacaaactatctgaggctatggcagctgggagtggagaagatatactgaagccatggcttcagacagtttgtcatctcctaattcctttgaagaatcatctgccattgacttcctgttcccagatttctggctcaatcctggtctctcagtctcgtaagatcctaatacaagtctaggttgaagttcagattatcaagaattagcagtaataaagccagtgagttcagaagggcagggtagctggaaagtgttgctacttcccacccctaacctccaggtgattgtgaggacttctgcttttattgagtgacacgaaaagtaattggaaggttttgagcagaggggagacatcatcttacgtaagtgggaagggtgacatagctgcagtgagggaggttattcttctatcagtatctctagcaaatcaagtagtaatctggtggggaataacttcattcctagacatatgccctcacattcattaaatctgtggccttcaaaatatgttcaataacgaaatggatgactggaacactagtcaccatgtaaaactttttccacggaaaaataaataaattttgagattataatagtcaagctttcaaaatattaaatgttaatatattaaattaaaagttagtaagtctctggtttgtgtattccacaaaaatctttagtatactagccacaagctacatttacgtgcacaaggcttcacactgatgttttgttgcatgactttctctgtgaatattgtctgtaaatataagaaattcagtaagaattgtctttttttctacctaagatatatgttcatgttcttgctgagaaaatgtatggaagtaaaattaactaaaagagcatatatgttccagattggaagtgataatgtagtaaatattgtcttttatattccacaaacaggaagagtaattcttcatctaaagccacgacaatgagtgaaaatgtgagtatctttaaagcatatttatagaatgaatatgtttggggaatagggcagggaaatgaagtaattatatggactttgtgaattttcacttttaatacactttgcaccagtgtctatcactggtgtttaaaaggagctaagtagatgttagcttctgtaccctgtctaggatggcatgataaagatacctggcatttccaatagcagaagtgatctttaatcatatcattatttgtttcatggtattttctataattagtctgccttcttagtatcactaggtctggcattatcagctccctttgacagatgagtaaattaaaacacaggttcttacagggtaacagtggtggagctgggacccaggctcttttcttccctgtagcttgaccaagcagagtggttccagcagagctgtggttctaggactcacctttggttatgtgaagcacttggaacattttagggctatgcaatgtcttagtcatttgggctgctataacaaaaataccatacactgggtaatttacaaacaacaaatttattttcagttttggaggccaggaagtccacaatcaaggcaccagtagactcaatgtctagtgagagcctgttcctcatagatggagacttcctgctgtgtcctcacatagtagcaggggcaaaacaagcaccctctggcctctttggtacgggcactagctccattcatgaaggtcctgccctcatcacctaatcacctcctaaaggccccacctcttaatagtatt

SEQ ID NO: 101915 - DNA, 4232 bp, Homo sapiens
aatgcttacccacttttctgtaaaaatttgattttcaaaaactgttccagaaactattacagaattcaccttattttgtggtttactacactgaaagcttactgatgtttaattaggggacaagaaactttgttcccaccatttttgtgcctacaatttatggaaagtctttgtttctgcaatttacagaaagtactcttggagtgtggaatcgaatactcccatccctccaaacagtatgaagcacattgtggctaaactgaatgaacaaaagccatttattttttctttgccttcctctcagttgcccttatcaactaacagctagagtccccttcagttctcttgtgccctaccacagggtttctcaacctcagcactactgatattttgggccacatcattctttggtgtaaggtgctgtcctgtacatcataggatgtgtagccacaggcctggcctccaacaccagatgccggggcatcctcctaacaggatttgtctgcctctgccttccagtcctacctctttactctctaggcaaagcttcagagtaccttgtctgctaggagttagttagttaattccccataaaacaagtttaattaaatatatactggttttggccaggtgcagtggctcacgcctgtaatcccagcactttggaaggccgcggcgggcggatcacgaggtcaggagttctagaccagtctggccaatatggtgaaaccccatctctactaaaatacaaaaattagctgggcatggtggcatgtgcctgcagttccagctgcttgggagacaggagaatcacttgaacccgggaggcggaggttgcagtgagctgagatcacgccactgcagtccagcctgggtaacagagcaagattccatctcaaaaaataaaataaataaataaataaatactggtttttacctgtagaattcttacaataaatatagcttgatattcataagatttatgtttctttaaatatgaattcatatatttaaacctgttttttctttcttttcctaggatttcaagcacacaaaatcctttataatttaaagactccactttagagatacaccaaagccaccgttgttacacaagttattaaactattataaaactctgctttgtccgacatttgcaaagaggtacacgaggaaatggaattggtatttcattttaattttcatgactactaactcacctgaacttgctattttaaacaaatagttctgtcgacacctaaaatataatctggcttcttgtgtctggactaagttaaaagaattaaaatactttgtaatgtcctgggctttgggaaatgttaaccacgtcctaacttctagagaacgttactaaaatataacatactgattgtgaagtcaatccacaggtcatgaaaatataaatcagactctgcacgagagtctgatttagggggtccaacaaatactctgacagatgcaaaaggaacctctggtctcatttctgccagaatcctcttttctcccctaatatcatccttattctgatgctcgttcatcactaacacacccacagaaaggaggaagcgggatgggtcttatgcccaaggatttgcactttgtgtttacttccattcctgggaactaaaagcaacatcaaaagaaatgcctaatggctggagcccacaggtgtgcaccacaggatttgcctggtgtgtgtcactgatttcttcattaaacgtaatttagatggtcaaacacaaacccaagtggcttatttcacccctactgctgcttgccactgcttccttcttgtaagatttctttgaagaggatcagtgactttgacatcagaactcaccactggagcctacacaagtttgcagatacctttccctgcaggagtggtgacttcacatctttctgtctctaaaaattgtgcagtgacattccgggccaagtcccttagtcaggggttgacaattctgcttttggacaaggagggatgtggagggaagaagtaatagtctaccaggaaaatgagacgaaaaagctcagtatgactccctgcatctggtacccctcttgaaacacagtgggcacatgagcaatggctcaaacgaaaagtggatctaatgtgggtttctcaaccgatgaaccacaaaagcttccagctactattacaatgtgaaaattccaatgatccgtttaccagagcaattagactatgttaaaaattcatatcatttgtaacttcttttaattactgaattgatattaaaaacaaaatatggctagggcatgtcctattcttctgggcaaatgtggatgaaaaggtcacttgctacctttgacaactatgaacatgatggttaatcttctttctttttttttttttttttttgagacggagtctcactctgtcgcccaggctggagtacagtggcacaatcttggctcactgcaacctccgcctcccctccgcctcccagattcaagcacttctcctgcctcagcctcccaagtagctgagattataggcgtgtaccaccacacctggctaatttttgtattttagtagagaagggtttcaccatgttggccaggctggtctcaaacctctgacctcaaatgatccacccccatcagcctcccaaagtgctgggattataggcatgagccactgcactgggcaggttaatcttctttcaaaagagtctgctctttctacccaattggcgaagcaaatccccaggattcaccgaacaaatggattaagcacccactgagtgcctagcatgtgcctggacaccaggccaccgggaagatgctccccctttgacttgtctatgacatgctatgtctctcaccagatcccttcctggaggtcgggcttctgtaacatggctctgcccccaaaataaaattttcaccacgagtcagggatcggcaaacattttctgtaaagagccagaaagtagatattttaagtcataaggtccctgttaacaactacttgactctgccattgtagcacaaaggcagccacagacaaaacaagcaagtagtcatgtctgtgttccaataagactttatttacaaaaacagcaggcacagacaagatttggcccacaggcatagattcccaactcatggtggtgaagtacagaaaaaaacacctgtctacaagcttttgtaagaaatcaggctaaatgttacctatgttttggttggaagatttctttggtttgaggaatgctttcctcttgcattggcatgccaagaggatagatgactctgaaagacgcctcttcagacatacctgtcatcacacaagatcaacttcttcagtttaaatgacacaaatccatattgtggaaggaaaatatgtagtgccttagcttcactaatagttgtaaaacttctttttaagacatcaaaggctagaggattcattttatgcagtgcgaacatctaataacactctctgtgtcaaatatatattgtacattaccttaaactattgtaatagctaggtaaaaatccttgtataaaagaatgttttcccccacacaaagggcagagtattgagcactaatttcctattaaaagtatatatatgtatctgtgggtcactggtgtccagacttgtatttgcatttgtgtttacttgaggaacttgaacactaacaactggtaaaatcccattgtaattcttacagcattttgactttattttcctgcagtgaattgtgttgtgtaaagattagggctttaaaatcttattagcaagctttgttttgttttaattattgttgctgttgtaactagatttaatttatttttagttggaggtttgacctaagtctggaccaattgattgcttttcaatacaactttgcaaagaacttcctttttccacaggtggctttgttcgattaaagtctacactaataaaaatagctgaacttgttaaactttttagccccatataacagtgcagggaaagagtcatccacctattgttattcataaaacccaggaaactacaccctcttaccttctgtagctacaaggctagctgctggttagctgcttaagattagaatgtcatcatctctggatggctgccaacttctcaaatgctgagaaaaatgctctgaaaataaaaagcaacaactatttattgaacactttatatatgtcagaggtggggatggatgggggtgagg

SEQ ID NO: 101916 - DNA, 1026 bp, Homo sapiens
gctttttaagctcaagcaaatgtttggtaatgcagacatgaatacatttcccaccttcaaatttgaaggtacgtcttataaatcacagattcattcttgtgggggataagtgaagaatatttacacttacctggatttttagagaactgaatgacagtgttgacatgtgaatttattaggaccatgacgtgtgcctgagaagctgccggctaaatgtttgctgttagaataagagcagtataggagatcacataacatagtgattaaatggtggggatctgaaatcgaactgcccaatcttgaatccttataatcactttcagctgtgtaatcttgagtaattaactggtgcatgtctcctcatctgacatttggggagaattatagtatcttctgcatatgtagttaaatgacataatatatgcaaagtcaattaatggaatgcatggctcatagaaagtgttgcataaatgtttagctatatttctatgtaaatgtttacaaacagtgtttactaaaaaaatcagaaaattgatgagttaaatcttgagcattctacataatccattttattgcaatttggctaagcttgacccttttttccccctcttcttagatcccaaatttgaagtcatcgaaaaaccccaggcctgaagaaataaagtaaaattaatctggtaatttgtcacggattagttgtacaactagttagaagtttcagaataaacatgcatttcataactgtcaaatgttcttttaattctgagtccaaataaattatttggtgatgttgagtgtgttcttgatgaattgagttctgtgtgttagagttgtttttagatcctttcatttggttataataaagcagatggagaccttggatgaactggacacaacttgcacataaccctgcttgttgtggagggatgttacccttcctttagaacatgaagaaatggtttataaattcttggtcatagctttctcagaaatctgagtgtaattttttatatgtcttggaacatc

SEQ ID NO: 101917 - DNA, 1050 bp, Homo sapiens
ccttagctgtcatcaggtccaaacccaaatcttaggaacagtgaggcgcaccaattcatagttccattttctttcatatagttgtctactgtgtgtaaagcacttggctattaaccgtgatgggccacagggcatttttacaatattcttaaagtccgataggagtagaaagcttctaagcaaataaatacaatataaggtaaaatgagttaggtgctaaggtagggaaacgctgggtgcttggggagttcataggaaagaatactcctttccagctagaggcattttagaggcttcttggaaggcagtgtttgggtactcatccctcttgagaatctcatggacaactgtggatcatcttcccagtttaaagaaaaaaacgtgaagaatttactcacatcattttccttatagcatgaaacagttctcaaacccacaggaggccttcagtagacctgtacacccaggggtttactctaggttttaaagatcagtgtatgaaggttggacagataaatgagggtaagaggagagtatcttttaggaggaaagaatggtgtgaactaaggcatgaaaatgccttagtttgtgctagaaagcacaaaatatatttggtgaatggtataattctatttccctggagtatagggtatatgaagagtataaggatggtatggggttagaatgagggattatggaaggccttgattgtagactgagcaagtaagatatgtggtaggcatttgtgagaaattacagctttttgaacatgactgtggggatggaagattactctgaattaggaggataattttaaccagggtattggaaggattgaaatgagaagagagcaaagacagacatgttagcaaaatgtaacctaagcattagttgatgagaaccttgactttatagcagtggtaatgtaaaagtgacagagtcaagacattgaaacactgatgcctggttttggtgagctgctggagaggaagaagagggaacaataaaagaaaactgacttttgaggcgaggtaactaacaaaggtgtta

SEQ ID NO: 101918 - DNA, 1121 bp, Homo sapiens
ctttgatttagttgttacagtattcttaaatggctggaatccatttgtaacaggcagagcagtttctccctctgtgggcctgtgaagtacacattttcaggttgtcatgcccggctgaggtatgggaaaccttgtacattagtttgggggccagtgtacttttcctgttaggagcggacagtgttgcaacagtctacctctactgttttctctgatccatgactaagttcaagggggaagaaatacctcacctcacattttgtgctctaaccctgatgaagcttcaggcctgagtttctaactgttccattatcccagagccttttggttaagacctaaaaaacttgcaatggggaataaggaggagaagggaactgtggtcaggtatagactgagatctgatatgatgtaattctgtagcaattagtagaatttgattctcatgatatatttagaggtgatttataataagtatattaacgtttctgctgcttgttttctgtaacagaatcagcatgattcttcagaggctcttcaggttctcctctgtcattcggtcagccgtctcagtccatttgcggaggaacattggtgttacagcagtggcatttaataaggaacttgatcctatacagaaactctttgtggacaagattagagaatacaaatctaagcgacagtaagtgaataaataactacagtgtaaatataaatattcaaagtatgtaagtttcaaggtggtaataaaaatgacttggtatttgaaagtattagaccttcactgagctcatctctgacatagaggttcattaggtgccctcaaaaaagaagataaggatcttgatttttttaagtcagaaactgtatctttatatgagttacaagggaaaatcctactaaatttattgctgtttaaaatacattcttactgtcatgtcatgtattataaaccacatcaatttatagaaatacatagggtcttggaaatcatttagcagctaagtttgaaaaaagtaactcccttagacattgattagccgaagatcataaaactaattggggaaaaatatattatcaaagtatattttagcctcaatttagtggcctttctgtgacattgt

SEQ ID NO: 101919 - DNA, 2039 bp, Homo sapiens
tgaggtcccagggcccttcccgcggaatcggcgctgagaagccccaacccccctcccgcctcccaggcaccttcgggtccaggactacaactcccggcagggtgcgcaaaacgaccgcccaaggcaacggaggctcacgaggtacaaggaagcacaacgccccaatccgctttgttttacacagtctcactttccctgcacctttatacacttcgataaccctaacgaacaggacgctgactcggaggggagcttgaactaggggaaaggccactcaaagagcgcatgcgtacagagcaaggtttcaaggaggggaaaaagaacgggtcaaattaggcgaagaaaagatggcggaggctgtgccaggggacccggaagcacttaccctccacttcctcctcctgtttggcttctgtctcacctagacccgtccggtcgcagactgtctccgagacgcttcctgtccggtgagcgtcgaccgactgaaacggcggcccataatgcattgcgatggcgggtaggcgtgtgggggcggagccagggccggaagtagagcggaggtggtggcggcggaggctttggcagctcgggactgagtgcaaggtgactgggagggtagctagatcagcgtggccttttgggactccagttctgggttttttcacgaggcctgggctgcctctcacctttactaggaggagagagcagctctgtgtcctggggaccttcacggcctggcccggggtcacagctgacctctacgtttgtagaccttggagtttgccgtagacccagaaataagatcgataccctctctgagggcaaatcggggcggcgcggggggcagggaggcccgggggtctcgggcccgcagcctggctggggcaacccaaggtcaggcgcgcgggagagattttcggccaggcctacccgccccgggcgcacgggagcgtctaggctacttaggcagaacgtgtaccattaagagggaaaaaattagtcataatattgaaagtttgcatcccacctaaaaacgatggtgctaacacttcattaggcgactttatggattgttcataggaatatgcactgaagaggcagcgaacctactaacctttggccggtcagtcatcactataaatagaaccatgctcccacccagaacaaggcctctgctcagactagtgttttcttactgttgccttccccagtctttctgatcatgtcagacgctatcatatgctctcgtggcacccgatggtactggaatagagaatttatgtcaggtggtatttcacagctatttgtgtaatgactatcttctgcgttttagtggacaatatgcattcactaatcagtgaaaaaaaatgaaagggattaaaggagaaggaacaagttttgatatgggattatgtgttcgttttttggatgagttcgtaggacttataagggagatgagaactgttgaatgctgtggatagatttggggctcaggatgaatactaaaattagaaatgcgattggggaatcataggcacttacatggtggataattgaaacaatgaaagtggattttacccgtgttgcagaaggagtaacatctatgcagtcagacttagagcaaattaactgtgagaatacgtgcagcttaatctttcttagatacagttttatcatctgtaaagcagggataagaacactttaactctttgagagtattgctgtaagggtacaaggaaaggatatatatggaagtactttgcacagtatctagggctaagcaaatgtcgggtgaacctattgctgaatgttaagcatgtccttagtttgccagaagggaaagtggcattgaattgcacaatttttttttttgcatatatgtgttaagttagattttgctgtgtaactttgaccagatactttttttttgagacagagtctcgctctgtcgcccaggctggattgcagtggcacgatctctgctcactccaagctccactttccaggtttacgcccttctgcctcagcctccggagtag

SEQ ID NO: 101920 - DNA, 1006 bp, Homo sapiens
gggttgccccagccaggctgcgggcccgagacccccgggcctccctgccccccgcgccgccccgatttgccctcagagagggtatcgatcttatttctgggtctacggcaaactccaaggtctacaaacgtagaggtcagctgtgaccccgggccaggccgtgaaggtccccaggacacagagctgctctctcctcctagtaaaggtgagaggcagcccaggcctcgtgaaaaaacccagaactggagtcccaaaaggccacgctgatctagctaccctcccagtcaccttgcactcagtcccgagctgccaaagcctccgccgccaccacctccgctctacttccggccctggctccgcccccacacgcctacccgccatcgcaatgcattatgggccgccgtttcagtcggtcgacgctcaccggacaggaagcgtctcggagacagtctgcgaccggacgggtctaggtgagacagaagccaaacaggaggaggaagtggagggtaagtgcttccgggtcccctggcacagcctccgccatcttttcttcgcctaatttgacccgttctttttcccctccttgaaaccttgctctgtacgcatgcgctctttgagtggcctttcccctagttcaagctcccctccgagtcagcgtcctgttcgttagggttatcgaagtgtataaaggtgcagggaaagtgagactgtgtaaaacaaagcggattggggcgttgtgcttccttgtacctcgtgagcctccgttgccttgggcggtcgttttgcgcaccctgccgggagttgtagtcctggacccgaaggtgcctgggaggcgggaggggggttggggcttctcagcgccgattccgcgggaagggccctgggacctcacacttctagtcgcgggagctgcaggtcttacccggagagacgctgcacgtggagccctcgccgctgccgttctcagccggctctggagtgcgggcgggggcgacagggccgattc

SEQ ID NO: 101921 - DNA, 1092 bp, Homo sapiens
atgtcaggttaataaacaccagttttttaaaaaattagtttataaatgtcatttgtggattttctttattttatttttcaaacagggtctcttgtcgcccatactggagtgcagtggtgcgatcatggctcactgcagcctcagcctcctgggctcaggtgatcctcccacctcagcctccgaagtattaatagctgggactacaggcgcgtgccaccacgccctgctcatttttgtatttttagtagagacaggatttcgccaagttacccaggctgatttcaaactcctgggctcaagcaatctgcctgccttggcctcccaaagtcctgggattagagacatgagccaccacacccagctgattttcttctatatgtaaagactacttccccctcttctgcttggcgtttgctttttatttggattgggtctctacttcttgtgtgtcatttcgtttatgtggatagttttaaaatatcttaaaaagtcactcttgcaggactgatcctttgaaatactccagccatgactaaaagagaagcagaggagctgatagaaattgagattgatggaacagagaaagcagagtgcacagaagaaaggttggtgtttctgaatttatcattttttttcaaaatatcaatatacctaattaaaaccaggaaacaagtcatagttcttttggactgtctttttttaactgttctcagtattttagggaataatgtattgttttatttcctctgacttaatgtggttgtagctgagagggaaagacagttttaaactaatggtagtaaaagggtaaatgaaatcaaaagcaattgctttcaatagttttctcctttggggcatttgattctttattcttttcctcagcactggttgctttaatttcagaaatagtttaattcaacctgaactcatttaacaaatatttatgagtaactgttgtaaacaactaattgacaagaatatgtgaataaataagatactaatctgcccttataaaggccacgttgtatttgaggagacatacaggtatatgagtacttacgggaccagtactaagcataaaatgtagtgaaa

SEQ ID NO: 101922 - DNA, 1041 bp, Homo sapiens
aagggaaagtcttttatttaacttattctatttttatatctttctttttttttatgtggggaagggaaattgactagtagagatggcatacagattttgaggagacaatgtgtcttcctttctgggtctaaaattcttcaaaataacttgaaaatgtaatgcaaatgcaaacataatgtatgtgcaatgtttatatgtgtacacatacacacatatgtatgtacatacataatgaggcatatttacaaggatgctttaaatttcaagcttagcatttctctatgaaattcagtgttcattttggcaacactagttggtgatgagcctgccacagtatctatgtagaaatgacttttcaaagaccagaaatgtgttttggtttgggattgtgtttttagcatattgttgctttgaaatccagggtaaaaaatgtaactgttagcacttacatctttaacatttagcattgtagaacaaacctacgcgccagctgaatgtgtaagccaggccatagacatcaatgaaccaataggcaatttaaagaaactgctagaaccaagactacagtgttctttggatgctcatgaaatttgtctgcaagatatccaggtaatttttatttttgtaaatttctattgcaacattttagtctgcataggaatattttttgttagccttttctttatagctatagactttatctctgtaagaagatttgacctgtattactgtaaaatttaagtgtttagaaataaaaaggtttttaagcaaagttttctccatttaaagttatattttaaatatttagtactaaaacaaatgaaacatttgttttttactttcacaaatataaaacgagaagtttaaataaattagaatcaaagcttaaatataagtagtaacagtaggaagcccattgacttttgaagctgaagtgtatttctagccagcttttaacttctcaaacgtatcatttaactaaatgatttctacatttctgttttacctttattttctctaacagtaagttttggataagaa

SEQ ID NO: 101923 - DNA, 2499 bp, Homo sapiens
ttggtaatttttatttttatttatctatttattttattgtggtaagaactggtacttctttttttctaatgatgtttataggtagggtttgtgtgtgtgtcttattttttataaaattattttaaacttgtagaaaagttgcaagactagtaaaagaattcttgaatatccttcacccagattccccaaatgttaacttttactacatttgctttattcgatgtagtttttctctaccatttgggaacatataaactaaattattttttggtgacttctgcgttttcatttagatttacaatttttttttatccactgttcaggaattgaaccaaagttaaacatccttgaaattgttaaacctgcggacactgttgaggttgttattgatccagatgcccaccatgctgaatcagaagcacatcttgttgaagaagctcaagtgataactcttgatggcacaaaacacatcacaaccatttcagatgaaacttcagaacaagtgacaagatgggctgctgcactggaaggctataggaaagaacaagaacgccttgggataccctatggtaataaaatgcataattctatattgggtagaataataggaattaagcttgacatagaagacactagggtaagttataatctattttacatgtagagttattaggatgaatgttgattttctgtatctctcttttaattgtaacgcacatttaagctcatgtggtggacaaattctgtcctgcgtgcaggaaatacaaagaagtctaaaaaatttctgctcttagggtgttgagagtgtagttgaagagagagaagatagatgaaaagagatgattgccataaaaggtaacatgtttttaaactgccagtaactcttgtagaagtatgctattggaatctcaaagagatcatagttgccctgagggaaagctgaaaagagtttattataaataagataccattgggcagagaaagacatttaagacaggaaatgttatgtgcaaagcttagacctgggggtatgcatgagtagtgagaaaatggagtggttaaggagttactctgtagcattacagaactgtttttgattgatgaaaatgataattgaaaaatgaatatggtggcaatatatggcataagttggaacaggtagagactaagtgaagggaaaacaggagcatattattatagttgtgactggatgataatgtctacattagcccagactccagatgatttctttgggagtagcaaggaaaaagtggatgaaaacagtgataggactgagcagattgacagattttatgagggtagagagggaagatacaagtattgatctaacttctcaagcttcatcttggtgactaaaacagtaataatcttgataaaaattggttccatcatcattacatatttagtgaacactaccgtacaccaggcaccatgttaaatgctgggcttaattaagatggtgcactatgaagagcatgctttcaaaagcccagttggggaagtagagaagtctggtataggaaatgtttttttcaagagaaggtggatagcacttgattttgatgtggaagtttatattcagctggaggttagccagaaaatggtttcagttatataagatttgggctggagacaaagatgttatatgagactcattcccactgaatttatatttgaagctataaaagtctacgtagtccctgatggaaagcgagaaatggaaaagaacacacaactaaaggcatatacacttgaccctgtaaacatttagggttggagaaaagggagacaagaaataactgaagagacagaaagaaagtaataacttatatgtatagtgtcactgaaattgaggggagagtttggatggtcaagactctcagatgctgctgagaaagtcaaagaatgctgactgatatctattaaatttgatgatcagaggattattcttaaatttagacagaagtaactagagttggcgagacaaaacagaattataagaaatagatatcttagaaatgggggcagatgaggaagaatgctggggtaacaaataaataatactgatcttccaagagttggcggggacctgagtgtatttgtaaatgaaacagtattgtcgggtttttgtcctttttttattttttatttttagagacaaggttgtacctggggagcagggctgatgacagaaaggctgtattgtagaaccactgttttccctaggacattttttttctttctttaaaccaaacctaaaagatacacagtaaatgagagagcttacccatggaactgaaagagagctatggaaccagacagctaatgtagaatttcagtctgtccctccgctgcccagtactgtagccactaatcacacgtcagcacttgaagtgtctctggtcaaaattaagatgggttgtaaatgtaaaaatacccattaaaagaaaaagtataaaatcttttctaattttttat

SEQ ID NO: 101924 - DNA, 1022 bp, Homo sapiens
ggtgctttctctggccaggtgcagtggctcactcctgtaaccccagcactttgggagtctggggtgggcagatcacttgagatgaggagttgaaagtgctttctctgctggtgaataagaaatgagctctggagagaggcatttcttaattgtttataattttattcttgtgaggattctcccagatgttttttttaagtatctatgatactaaaagacttagtacattcattgtatttgcagcatttatttccaatttccattcttactagataagtaagttgaatgtcctggttgaagctttgtccttggtttcacagatttccttccctgcagaggttttgaaatgaataaggtagattctgaattgtgaaacatgtgagtcatgtttattgaaacactttcttataagaaatctcaagaacacaacaaagatagtgcatagatggtagtttcatttttcccaaatccacgttttttccagtctttcccaggtcagctgtttgttgtggctgtctctttctggttctcttattgcttctcaaactttaaagcttattcataggcttttcccagaacagaagtcaaaggtgtcttgtgtatctttccatttccatgcagttgaatgagtcttcctcagaaaagctctgctctggaaccattgctttgtcttttaaagcaacaaagtcccacagcctagatgagtgtctcacggaatttcttggtgatccagccatggttcttcactctgccggggtagggaaatcccatctgctttggaaatctagtgctcagttcagaattgggagatgggcaggatgatgtgtaagggtatttctaacagactttctagaattcacaagtcttacttctcagaatagggttttttgagctcagtgtagttagtactctggtcccttctgtagagagaagtctgcagcctatctgcgaaaggcactgattctgggacagaactgttaataacccagcctctattatccatcctcagtgatctctcaaga

SEQ ID NO: 101925 - DNA, 1051 bp, Homo sapiens
gaggagaatgctcagaactaggagtctggataaaacagtgaggttgtcagttgactgaaaaagtaactgttttgtgcactgtgctttttaaaaacatgtttctttaatcctcacaataacctcatgaggcagtaagtataggtgtctaatttaaacttgaagaagttaatgttgaaagaggtcggtaattttaccaaagtcatatagtcagtaagagctaagaactaaatccagatctgtctgaagccagtcccatataattcttaagtcctcagtcttcagaccctcaaagctcccatctgataggattctgacctctttttacttccccaaccttttccagctctgcgtgtctggaactggatcctggcaaggcacccttagcggagtcttcttgggagcccaggcctcagtacccagaatgattgctggagggtatagtttcaatttcaagagagaggcatgcaatttgtgatgggcacaaagtaggctgaagtaatagagactgggatgtgcaattcttgtgagaggtaaagaataacatctaagtagggaataacaacagataagtaatgaatggttctgtaaagccttatctcaggacctttatagtatttttattttgggaactatatttttaaatgtgaaattatttagtttaattgagacatttaggactgctacaattgtgttgaaaatttgctgtctttaagtagaagcattataaagcttaagcagctttagtcaaaagtggatgttataacaaataatgggaaggaggcctttttggtggagatacgtacctaaataatttaattttggtgtatattttatctttgatctgatcttgaagatttccatatttttacatggctttatgtggatttcaatacaaatgtttacatttagaaaaccatagttctctgcagaactttactgaacactaaaagacattggagcttttccctgtgttatttctcttaaggtatcttttccttttaaagtgactatcaaatatttttaaggtttttatgccagtaagtttcagttc

SEQ ID NO: 101926 - DNA, 1045 bp, Homo sapiens
tcagtgcaatctgctacacctactaccattaaagttataaatagtagtgcgaaagcagccaaagtacaaagagcgccgaggatttcaggagaagatagaagctcacctgggaacagaacaggtatttttgtattttcttgtatttataaaatatatctatctaattaggtatattttgttgtattttactgtatgaaaaatgtgaatttggactatccctctggcagtttttagacagcatttctagaaaaacaaaaattgtttttgccatggctgagatttaaaccacgggaccagtttgttgtctttgccttgggctaatctataacactatagctaatgctttgttcctcttaccaatttaggaaacaatggccaaatccaactatggcagtttttgctagaacttcttactgataaggacgctcgagactgcatttcttgggttggtgatgaaggtgaatttaagctaaatcagcctgaactggttgcacagaaatggggacagcgtaaaaataagcctacgatgaactatgagaaactcagtcgtgcattaaggtaagcctttattacttttttttctgttatcaaaaatagaaactttctaaaaaatagtttcttattctagatgtaataagcattgttatgtaatgatattaaaaacttgtttatgtttttttctttacatattaaaaaacctttttaaaaagatcttaataatttcgaggtacagttttttttttacaaaattactctaagattgtttgtttttatctgatttgaaagctataatactctgtcccaaaaaaaaatgtttaatttttgaggtttttattatttgcatagatgaattgagtgttagtttttaatgagtaagcagaaactgtcctctgtttttacaattacaagcagaatattgacccattttctacacaatctgcctaaatctggatatccaatctttacattgatacaaactctccgtaagtagtataaggttttttgacagaaattactatcagaaattatgcctactacagtgatg

SEQ ID NO: 101927 - DNA, 4236 bp, Homo sapiens
tgatatgagggtataagcactgttaacctcactttatagatgaggaataaaagctttgagaaaatatgactcctgtggtctcaaaaatgttaggttttgaatcttggctttctgactccaaagctcttgttcttaggctcttctactgctctcaaggttttttgttttgtttaataattatttttaaatcaatgttttattctaattgttgaaaatatgttttgaaagtttaatgtatagagttttggagtagtgagcattgaaattttagtaaataatgttgggatgtttcatttgatagtagcattaaatattctacatagcttcaatattaattgctattgtggcggatgcagtactctactaggcttctgcttatggaatagtctgtaaattattgtaagaagtctcattttttctgaagtctctaatttttttttctctttttgaagatattattacgatggggacatgatttgtaaagttcaaggcaagagatttgtgtacaagtttgtctgtgacttgaagactcttattggatacagtgcagcggagttgaaccgtttggtcacagaatgtgaacagaagaaacttgcaaagatgcagctccatggaattgcccagccagtcacagcagtagctctggctactgcttctctgcaaacggaaaaggataattgagccccaggacattctgagactccaaagtctttcttaaaatgtttagagcaagtatagctcttacctttattactgaatttgaatcttcttttatttctaggctgtacagtctgatgcatgatttttttataaatatttcatactcttgtgaatttggatctttttactttgagcatatattttagaatatgtgtatgttaaaggatctccacaatgtctgcagtgtgaaggcaggttcattgtggaatagtttaacagtcaggaaggctaaactggtcagtattaatgtgtagccctaccaaaaatagccagtagtatctgaaaatgaaaaataaatgaagtatctctaggaaacagtctggcttaactatttttgaaaatataactgtttcccctctctgctgctttagatgttgctttacatagaaccagaaaatggaatttctcagctaaagcatgtgtgcctgtttcatctaatcaagcagagctaaaatgttcataccgaataaatttatattaataaattactaaactaagagtatcaggttatttatatatttgcaagcaaaggacagtaagaagttgactggcaaaagagcagtgctgaaggaggagatccaggtttaaatctggcttattaactcaagccaattttaaggattttctgtatagattactcatgtcagaccaagaatttaaattattttgagagaggcatttaattctaataaaccagctgttataaaaattataaaatgatctctgtttttcctgtcagagatttaaaaaactgaaaaggtatacctcaacccaaaaataaaggtttgttttggtttgttatggcttccttttttaaaaaattaccctgtagtgccagtttattatgcaaagcagcttatattcctttgtttctgataaaatgaagactttaaatcagtcagtagtactttacctttcaaggcattagtaaattacttgcaaatagttttaaaaggaaaatacgacctttgttataggcagtcttctctttaagacaatacttttccacttgttttccttttccatattatatatgtgtattcatatagctgtatacatattcagttgatcattttataaacatatgaaggcataaagatatacagaagaaaaattattaaacaactcattttaagattcaaattaactaattcctgcatatatgacattccttacataagcgaacactaaacaaaaatggctagaaatgtctttttctttcttttctctctttgttgtttaaggtattaagcacgaattattacatgagactggcagatagctattaatcctcttacagatttgagaaagttgattctcaaatatttatgcaccttctccttcattgttttctttaaatctgtcctcttaaaaagcttcttaagagctcagttaatgcttttgacttaactaggagaaaaaggcatgataatacaggcaagatggcattgttagcaattctggtagtggtttggaatgaatcctaagaggcagggatcttaaggacaaggaagagaagagagagagggagggatctttgatctctttctctggtaatcttaatgcataattttactaatacatgttctcaattcattcatattattaagctcttcctgcagttgatatctgagcagagtaagatttgtatttccatttttacttttttgaaagagaatatatggacagattattagtacaatttgggcactgtggttttaagaatatctgagtaaaataacaatatgaaataataaacagaagctctaacgtcaggtaacaaatagacagcaagaaaggttttgcaccatcctcttacggcctagagagttgacaagttgcttgtagttttaaaaaaataataaagtatacccttctggtatatcatcaagagcttaagaatcttggctttcatatttaaaatgcttttggggagacatatattaaaattttagccaagatgatagacatgtctcaattatatatgtgtgtgtatgtttttaaagctaaaaacattacttttagatccctagaatgaaaatttttttctcatctatgcaattcccatatggtttttttttaaatcatattttattcattttctccctttagcaattttcattttatttctcataatttgaacagagacagttctcatacatgatcagatgctttttttttcttcttaccatcatttatgcatgacataggtaatgtgactaatttctccagttgattcaagaaactcattactttgcctcaaattatatgtaaaatatttgttttacttaggttacagttatcagaaaggtagtttttttcttctattaaaatataacattgtgaaagaaaataaaatttatgctattctttgctttgtttttataaatgaatttttcatagaatttacagtatattcaaaggaagaaagataaaattattggtcatcatttgtaccttagaagtacaagaatttaagtaaaagaaatgttcatttttgttttaaaatttgttttccatgtgaagtttttattgagccaactttcatacatatcttgctagcctaaagtctaaatatttgtgttggcatcagaaaaacaaatgaggcagaattgctatgtgtggttgatcttcagataaattgactgatcacagttatttttgtatcagtctatgttattaggaaaaattgtttagttgttttctcccctgattaatggtgatattcaagtatgatacaaaaagaattgtaccaccaaatatttttgtgaggtctgctgttttccatattcattttatgctactgcctttaagaaagaactagtgtatccttgaaatagcacaaaaatgttttaaaattcataattgcaaaacaaatctgtgactaacttaatgtcttcagatctaaagggtgtaaaaatattgatacttcaatatttcacttgctgccaggaaaaacaaaattctcaatcttttgtaaatgggaggaggacttttgcatacatttttactctttaaataacgacaacgacacttatactgtcataataacaattatgtatttctttgtggttttaattttttttgtaattttacataaaacagttattttctatttttacgcagataaatatttgtgcataaaatgtaaaaatagtaaaatgagaaaaataaaactattatacagtatgtttctgtgttgcttaaaagttttttttcctgaaaacaaaatcttaaatccccaggatattttgttggatagtaatctgacagtccacttatgatacgttgtacataggattccgatgcatttttaaacttaaaagctgtcaatttgggaagaacatatttcactgaactaaaattagtaggttcatctctttgaggaaattaatgaaattccatctacaaagccaagttgttttagaatagtaacagatgaagctgtcagaaggcaagctgatgattgctaaattgtaaacctttcataaagcctttttttttaacaaacaaaaa

SEQ ID NO: 101928 - DNA, 1757 bp, Homo sapiens
tgagtgtcacccaagatacagtatactttgctgaatctccctccatgatactcttgtggttttatctattttaccaaaacacttccacgtaaaacaggcttccgttgactctgtttgtcctttatggacccaacaggggaggaaaaaataccattgcactgggtttatccacttactgtggagttggggaaccagaaacaaccactggacacgttgcaagcgcgtcaaggtttccaccgccacctggtggctagatggagcacagcatctgtgtaactggtgggcaaaggcgttctgctccaagatgtcaaagtgggggagaaaattatgggtgttctgcaatcttggcaaaagaagagtactgtactccttatctttttactgcttctccatgttcacccttaaaagattgatttttattttttactcagctctcctcttgtttttcaggttgacgccgctgtcaccccagaggagcgccacctgtccaagatgcagcagaacggctacgaaaatccaacctacaagttctttgagcagatgcagaactagacccccgccacagcagcctctgaagttggacagcaaaaccattgcttcactacccatcggtgtccatttatagaataatgtgggaagaaacaaacccgttttatgatttactcattatcgccttttgacagctgtgctgtaacacaagtagatgcctgaacttgaattaatccacacatcagtaatgtattctatctctctttacattttggtctctatactacattattaatgggttttgtgtactgtaaagaatttagctgtatcaaactagtgcatgaatagattctctcctgattatttatcacatagccccttagccagttgtatattattcttgtggtttgtgacccaattaagtcctactttacatatgctttaagaatcgatgggggatgcttcatgtgaacgtgggagttcagctgcttctcttgcctaagtattcctttcctgatcactatgcattttaaagttaaacatttttaagtatttcagatgctttagagagattttttttccatgactgcattttactgtacagattgctgcttctgctatatttgtgatataggaattaagaggatacacacgtttgtttcttcgtgcctgttttatgtgcacacattaggcattgagacttcaagcttttctttttttgtccacgtatctttgggtctttgataaagaaaagaatccctgttcattgtaagcacttttacggggcgggtggggaggggtgctctgctggtcttcaattaccaagaattctccaaaacaattttctgcaggatgattgtacagaatcattgcttatgacatgatcgctttctacactgtattacataaataaattaaataaaataaccccgggcaagacttttctttgaaggatgactacagacattaaataatcgaagtaattttgggtggggagaagaggcagattcaattttctttaaccagtctgaagtttcatttatgatacaaaagaagatgaaaatggaagtggcaatataaggggatgaggaaggcatgcctggacaaacccttcttttaagatgtgtcttcaatttgtataaaatggtgttttcatgtaaataaatacattcttggaggagcaccattgtgctggtgtgaatgattccatagtaacaatcttgaccatttactgacgtacagaccagtgagaagtcttcgcatgttgg

SEQ ID NO: 101929 - DNA, 1008 bp, Homo sapiens
taatttatttgtaattggaacaaagccccaaagtagcagttttgttctaccaggtaattaatgctcatttttaaagccttttattattatttctgaagtaatgagtgcacatggaaaaagacacataataggctaaacaataagcccgtaagccaagccaacatattccaggaacaaatccttgccaacctctcaaccaggatttaacttctgcttttcccccattttcaaaaattatagcatgtatttaaaggcagcagaagccttactttcaggtttcccttaccctttcatttctttttgttcaaaataggtagtaattgaagttttaaatatagggtatcatttttctttaagagtcatttatcaattttcttctaacttcaggcctagaaagaagttttgggtaggctttgtcttacagtgttattatttatgagtaaaactaattggttgtcctgcatactttaattatgatgtaatacaggttctgggttgacaaatatcaagacggaggagatctctgaagtgaagatggatgcagaattccgacatgactcaggatatgaagttcatcatcaaaaattggtacgtaaaataatttacctctttccactactgtttgtcttgccaaatgacctattaactctggttcatcctgtgctagaaatcaaattaaggaaaagataaaaatacaatgcttgcctataggattaccatgaaaacatgaagaaaataaataggctaggctgagcgcagtggctcaagcctgtaatcccagcactttgggaggccaaggcgggtggatcacgaggtcagaaattcgagaccagcctggccaatatggtgaaaccccatctctactaaaaatacaaaaaagattagctgggtgtggtggcaaacacctgtagtcccagctgctggggaggctgacgcaggagacttgcttgaacccaggaggtggaggttgcagtgagctgagatcgtgcctaggcgacagagcgagac

SEQ ID NO: 101930 - DNA, 1880 bp, Homo sapiens
tgactttattcttttgcatataaatatccagtgtcccagcaccatttgttgaaaaagactattcttgccaggtgcagtggctcatgcctgtaattccagcattttgggaggccaaggtgggcagatgacttgagcccagaagttcaagaccagaatgggaaacatggcaagaccacatttctacaaaaaaattatccaggcatgataacatctatttgtagtcccagctactcaggaggctgtggtgggaggatctcctgagcctggggtggctgaggctgcagtgagccttgatcacgccacctgggcaatagagcaagaccctgtctcaaaaaaaggaagaaaaagactattatttcccccattgaatggtcttggcactattacacaaaatcaattgtccatagataatatgggtttatttcttaattcttagttcttttctttgatctgtgtgcctgtgcttactgtagtaccacactgttttgattattgtagctttgtagtaaattttgaaatcagcaagtgtgagtccgttatctttgttcttctttttcaatattactttgagtatccggagtctcttgcattacaacatgaattttaagatcttcctcaccccctgcccccactaccatttctgcaaaaaaaaaaaaaaaaaaaaaagtgcggattgcattggatctgtagatcattttggggaatatttatatataatgttaatgaggttttaaacaacacttttatctactagaactgatatttgcctcgaaatgattccaccttgagccccattcaggaacgttagtattttagaagtagcaagagaactgatttagcatgctatcatcttttactccaaattttggtgagattccagagaaattatttgtgagcttttccttaagccatgatgactgacatgtcagtagtttttgtctgtttttatgccattcttttatttttgtgcatgtgtgggcacctcaaccaaatggatggagcctgaggcatggtctcccacgccaaagtctgccgtttcttttgatgatccaatgcagttccaaagctattttctcaactcaccagctcgtttgtatggccctgtaatttgaaacaaaatctaaaaagaaatccaaattaaaatgattgggaagtgaagtcagaccacagtggtggctgtggaactacttcctggcatggaacactagagcagatgtgtcctgctttttttgtagagtcttgggaacaaccaatgattttagactggaacaagggctggttattctgtttttcacaagcatctgccttcaaggttcattttttaaaagaggaggggaaaaaaatcagtgatgtttgccaccctgagtatggagatgaatccaaattgagattaattttgaaatatgtttcccgaattttgagattaattttgaaatatgtttccacaaacactaactgggaatgacatgagtttgtttcatgtgagacggagtttggaagacatgttaatttgcttgttggtgttcaactcagaaacaaattttgcatgtattttctgagtaagtgccattattagttaacagttttcctgccgtatgcactatgggctgctttagaaagtaaatcatagaaggttagttataatatctcatcaaaaatagtggatccatctattaaccggttccaagttatgagacgtgtccaaaggaatgttgacttggtgtgcacctaaacactatttgtgaagaggctttggacttcgagcatgaaacggggtcagagggtcaaggccagggcgttacttaatttcagctcctgttgatggattcattgacttcagatagtgcgtttaaaaaagcctgtttaatgtgtttgtcttt

SEQ ID NO: 101931 - DNA, 1041 bp, Homo sapiens
tcaaggagccaagccctctggcattgtgcacacccactggaagtgggctgttcttgcatttcacacaaaggcagcatatgggctagtgaagatactcggaaattcagtgatagcatccccagtttacagttgaagaaattgaactttgaacctaagagagtttgccaacttgcccagcccagatagtaaagtgatgaaagtggggtggaagccaagacctgccagaagtccaaaatctgtgttctttctgctgcctattttcctctctgaagtggaattttcccctacttaacctcaatgtgaaagcactgggtatccacctccaataccatactctaacttggagtaaattatttgtttatatctctactaaccctccatcctgtgaactcttccagatatatgttggtcatccttgcctcctcaagatccagcaaggaccctggtactttttagatattagtaattataaatataaggttgaagccagtccccaggataaaaaggcagatgctccttaacttggactgatgaagtgggctcctccgtaaccctaaagacctgaccaaaactccttccttgacatctagcgtaagcaccacacaaaacaaatttctttcctaggccacagcatcctctaaagctgtgattgatcaagctaactaaatggatgtggttggccaagataacaaagcataaatcagggttctgaggacctttattaataaaattttacaacatggtccttctttgtaccatgaccctctgctatttggtcatctacttgatttaattgtgctgtcctgtttgaccgccaaccacagtctgaagctattcccatgacaaataagtgtgaattttcaagtgtcctgttgtgttataaaaggcccgtgttttattttataatttcatatttttttcattcaattttaattattatgtgcaagttcccaggctcagtcatttattaatgtttttattttttaaaaagttattttcaggcagattatgaagatttcttgcaaagaatggcctcaggca

SEQ ID NO: 101932 - DNA, 1034 bp, Homo sapiens
catatatttatccaaagttattagtcaaatcagccttcagagagcctatgaaatactgattttcaatgagaaagtaggtttgatgagggttggagagtgcaagaaagtgaagtaagctataaaacgtagaattagtcaatgttggaatgactatgcagtctttaggatactttttagcactagaagaaaatggaataggatgtcttttttagaagacttgaaattgctgcttcatcctacttattcagtccccatggacatatgtgtttatgatggcagcatttccaggagaaagtggaatctttggaacaggaagcagccaacgagagacagcagctggtggagacacacatggccagagtggaagccatgctcaatgaccgccgccgcctggccctggagaactacatcaccgctctgcaggctgttcctcctcgggtaggtctcgctgcagccgagttcacacttcaggtcacagcacagacagtaagggtggggcactgggaactggaagccatacaaaaagaatgaggagaaatgccttgagcactgttattcagaggttcaacccctgtccattccatcttgaaggtcaaagggtcacagggcagctacctccacaaggtcatctctacacagcaggtactcacacttccccacagagcagccagacaggactcccagggactcacattgcaagccctgacttgatttaatattcctgaggtggtgacaattgatggcatagttcaagttcgaacacaaaagctggaaggatgtcttccagtcccttcaggctgctgtaacagaataccatagactgggtaccttatcagcaacagaagtttatttctcacagttgcagaggctgagaagtccaagatcaagacatcagcatacttggttgtctggtgaaagtttgcttcctggttcatagaacttaaattttgtttatcttttatttattttatttttgtttttgtttgtattttgctgtatcctcatatggtggaatgggcaagagagctctctgg

SEQ ID NO: 101933 - DNA, 1393 bp, Homo sapiens
aagaaaaagaagtttaaaattcggctctcagttttgcaggtggggaagtccaagaacatggtgctggcatctgttgaggacttccttgctgtatcatatatggtggaaggaagaagggcaagaggagggcaaaactgagttttataacaacccacttctcacaataacaaacccactccccccataatgatactaatttactcatgaggacagagactgaatcacctcttacaggacttacccctcaacattgttgcactggggattaagtttccaacacatgctttttaggggttacattcaaaccatagcagttggttactaaattagtgctacttgtaaaaaaatacatgtttgctgcattcagaatattacatgttttcttggagtttttggaaggacttagcgtaatccttgctgttcatgacttaggttggcaagctcaaagggccttaattccccatcagttctttaaagggggataggtcttaggatattagacagcagaagtcttctttttcttcccccattatgtactgctttttggcattgtattcatgacacacacacacataaaatgtcatattttctttaaagtcaaaatatacagtttaaaatggtttcagttgctttcataagagagtaaaacttaggtgttcagtttaatattggaagaccttgttcagttaatgtgtgccttccatgaatagttggtatttgttcacatcaaatcaaatgactgtcagttctcggggtaaaaaaagaccaaccttgactcaaaaagctatattcctgcaataaatatgaacatttatgtttaatatactgctgtgattaattatttatatcctagtgggaggtcaaatattcttcagataggaaggggtatgtaataaattttttaaatatctaaaatgacaaaaatagaggaaaaacataatcatccatcctattaagtctgtattcaaaggatgaactgatgattttaaattcaaatgtttccttaatttataggtcatgagagaatgggaagaggcagaacgtcaagcaaagaacttgcctaaagctgataagaaggcagttatccaggtaaaacctgaacccatttcctaccaaacatcacatgccagcagtctttttaatgagtgtctgcaggtttacctttatctgccagcacctcacgtgtgattgttcatagtcccatgaacttcagctgttcttaatcattgtctagtaattgagttgtttaaatcctgccttatatttgctcccaattatttcaagttataattcattgccataaaactcacattgtaacttgcaatctactttttattaataatacatcttttcagtcaccacaatcttctgctgcttctccctccagcaaaaa

SEQ ID NO: 101934 - DNA, 1026 bp, Homo sapiens
ggaacttgaaatgcaagtatttttaacttaatcattaagttaaagtcagtaagaacgtggtatttagcatttattcattttaacttaatgattaagttaaaaatacttgcatattggtttgcttgaagctatggagaaaaacatttaccttttttccaaaaaggtcttaatattcaaaattattgtttcaatcttacaaattaacaatttacttatttttgatactttcggccttttttatgtgggctacacctaacattttttgaaaaatacatactgcttttcctgtaggttgcactttgtgatcctgtgtgtaattcattttcagtggttctattttatttattttttgttagtttgtattttcttttgtttctttttctcaatttttaaaattttaaaacttgtccttttcttttttttctttattattgcactcttctaccaaaacattttcagtggctttgaataaaagtatcagaactttcccgtggttagcattagctctgagatttgaacaggatgtattaagcagaggaggagggaaggccactaacatgtatgagctccactgtgtgtcaccctctctgccggatgacttacatgtggtatggtatctcattttcccagctctcctatcatgtcctgcggcatgttatcaccacttgataaaaaaattgaaacatggagtgcttaagtttcctgccccaggtcacagctgatctgaaaaagaaatgggattcaaatccaaatgtgcttaattgcaaatccccacatgactctttccttccttccttccttcccccgttgctgccaatgtaagaaggaacaccactccctcatttgctacagagaagacaggggcagctgtgtaaaggcaccaggaatatgccctgcctccttccttccacttgaaagcaacatctggatagacactcaactgcttttattttttgaaaaatgattattaatcaggattgaagtggagggaaaaaatcaaaacgaatgtttctttttaaaatgaaa

SEQ ID NO: 101935 - DNA, 1050 bp, Homo sapiens
cagtacccctgacccctacccactaaatgccattaacacaactccagctgtgataactaaaaatgtctctagacattgctaaatgtgcccagggggtcacattctggttgagaatcctgttctagagtagtagtttccccacatctgactcagagatagaactctcctggtgtaaacacgtgtactttccacaaatttgggggcatgttgaaatgttagaatgtcagcatcatccaattctcgacagatgtttgaaattgaatttgttagactattgtccaagctctcaatatttgcaaggtaaagtggaagttgctgttgctgtcctgactatagtattgaaggtctcgtagttttcctgctctaatgtaagctactgtggcagcagaagagaaaccagcaaatcccttagtttgaagtcattggttcacctatgcaccacccctttctcctctctgtttcatcttagtttcctagaatcccaggatatgctggaggacaaccatctgtagagatgtcctatagtcttgctacacaggttatttgtactttaggattatgtttgatggccttatagtttgtgcagaggtgtaggcctgaccccatgcaggattgagggagggaaaaagattgatttctaggcacatcagaatggtccagatgacatgaaacagactggtacacttacagagaatatgaaaagaattggaacttaacaagtcaggccccaagttccatccccaggttccaagtttgttgccgcagaagctcataattttcaaatcgtagaaaactcacaccacgcagcctttcaatggaatatgccaccttaaccccagggtcgttgtaaagacaggagccataagacagaagtctgaatgcctaggccatttaatctttggccaaatttgaactattgttcttaatcacactattcttgttcttttcactgtgcagtagcaaatgttagttcccattagcacattctgcaataccattggaactaaaactgccaaattagattaggcaacctgggattacactttgctc

SEQ ID NO: 101936 - DNA, 1047 bp, Homo sapiens
cagaataatgtatgaagaaggcaaaggctgaagatcagttagatgggtggacaagaataagtagagagtataagcctcagcaaacagccagagccgagagccacatgctgtcctatgaatgagtgaaataaatggagtttttgtgaaaaaatgcatcgaagggaattggggatatttggcacaaaaggagcaagaaatcctcttctgttaagaaacctgttgttactcggatatactatcagagacaaaatatccagcattctcaaatgttaacttcttacgaaaatagatcttatgtttatatgttcattttggttttgttggagggaccaaacctaagtgagtgattttgtttgttaggttgtttttttgtcagtggactcgtgcatttcagccatcattcccatgtttctctttttgtttttagttatgttctcttattttttccatagtgtcccaaagtttactcaagactacccaggaacctcttgcccgagatcctgttaaacgtacgttgtcattcacctgagggaagggaagaggggaggaggatgctgcttggttcacataactccagcatcatcaccttctttgcatggttttgtgtttcttgaacacctgtcttagtaaaatgtttcttcccattaccttgcttgtaattacatctgattttgccagacagcttgagatgttgggctaagagcatcattgactaagtttcttctatttctgaccaatttcctttttatttagtctggttttattgaatattatatggacaacatcattgtattgtatttgccattactattttatttcctaaaagctatcagtgtaactgagagcaggcttagcctctcactgcttttgcagaactgaagaacaagggctaggtgcagtggaaggaaagtgactttacttagcaaagctagcaatggggaaatggtccaggctcctgcctcaaagcaaccatctcaaattttggattaaaaaacaaaggcttaaaaaggggagcttggaatgcagggcatgaaggaggggtgagga

SEQ ID NO: 101937 - DNA, 1759 bp, Homo sapiens
tattgttcttggtatattacagataccaacaagtatgaggcaatcctgagacatctacctactgagcttttctttccttaaattcacacctcaagaccaaggaaaccgaaaaactcttacagtctccctacatgtgttcacttgtgcccctatttcctgtcattaacatggtagtgtagccaactcctgctagcctgtaaaagctaattattacagtatagaggaattttgtaagccatagccattagtagcttgaaataccaatggtgggagtatttataccatggcagttggcatacactgtaactcaagagtgttctatttgtttgtttttctagacagtgccagtttcccagcatactcctgtctctcattcagtaagacaaagcacttccccttattttccaatacaggacatgatatcccgagttttgagcttcttgttaatagcctgttgcacgctaaccacgcagctcagtgaagagcaagtttattcccataacaaacaggaaacaaaggttgaggaaaaaccacagtggtacccttttgtgagtgttccctaacaccgtcacgggagtcctgattagtctaaatactttacaagtaaatctccttcaggtggcattttataaacaatctttcatcatggagagatgagaattgggtcaggtataattagaatgacagatgtattggctagcctgagagaattaacgcaattcagtaaaaaggctagccaactgcggatatcttctagttacttccgtgacaaattagcaccatcctcttgtactgaagcagtgctttcattagcatgcacagctgtttgcatcatctttgtttgtatttcaatccatatttggagcttaagtgagatttgtcataagacttcagttcaagcttgcttgcctaattttacatgcttctatttagtaaaatatgattactaggtcataaatatttgataatttattgccttattagagtaattttctaaacatgttttttgacgactgcttgccactacgtacaagcacttgaaaaatgttcttttctattaaaagtacatggttccagaattgggaaaatcacgttcttaaaaaataaccagttttctattgtgttggcttttaaaattttttcatcagtagaatcaaatgcaaatattgtctgcttatttttcaacagaatacaagtttgattttaataacttaggctcatgaaatgtcaccacgtagtaatacttagaattacagcaataacttaggctaaaaaaataaagttgttatgaactacattgagctcagacagatatatgtattatgtaaacatttatataaaatgtatataaattgtatattgtattatataattatatattgtaatatatagtatataatatataatttataaatataatacataaattatatttataaattataaagtttttatataatatattataatctaatatattataattatatttataaattataacgtttatttgaaatattgaagttttgtatacttagtggattttaatatttatgtcgttttcattttattccactgttacattaaggaagtaacttattacaaaaataaattatatttgtcttacatttgccctttttactctacttaaaattggagaaaaagagttcaagatagggaatttctgtcagaaaggagaaatagttgtattatgtgaagtttaagtagatattcttgtagagtatggagaaaataatgc

SEQ ID NO: 101938 - DNA, 1081 bp, Homo sapiens
gtgctagcattacaggtgtgagccactgcaccagctgggtgcacctttttgtttgtttgttttgttttgttttgttttgttttgttttgttttgttgacatggagtctcagtcacccaggctgggattcagtggcacgatcttggctcactgcaacctccgtctcccaggttcaagcaattctcaattctcctgcctcagcttcccaagtagctgggactacaggtgtgtgcaaccacacctggctaatttttgtatttttggtagagatgggtttcaccacgttggccagactggtctcgaacttctgacctcaggtgattcacccaccttggcctcccaaagtgctgggttactggtttgagccaccacacccaaccgggcacacgtttttagccaagccataggtctgattaagtacagtcagattccttgagcaggttacaaagctgtggatttgaatggagatctttagttcccttgcagaacaatgagtttccaaaagcagagtggcttacagcctaaccagctgcttctctcagcctttaaccattttgccctcctgaaaattcatctttggtttccaaccacctcttccaatatgcctgactttttgtgattctgttagtagaagagtaaaaagtcaaggggaggcaagaatgaatgaatctcatataaaaatgatgctcaagagaatcccttaattttcaagacagcagcccaaattgtaaacattgagacttttacagtgttaaaaaaaaaaaagtgtttacaggccaggcatggtatctcacacctgttatcccagcactttgggaagctgaggcaggatgatcgcctgaccccaggagtttgcaagcagcctgggccccatagggagaccaaaaaaaaaaattgttgttttggctgtagtgtcacaggcttatagtcccagctactcaggaggctgaggtgggagggtcgctggagcccaggtgaggtcaagcctgcagtgagccgtgatcacaccaccacactccagccttggtgacagtgagaccctgtccaaaaaaaaaaaagattaaggcagaggaaatgttaaa

SEQ ID NO: 101939 - DNA, 1051 bp, Homo sapiens
cttacaaggtatcctataattcactaacgggatttttacttatgattaatatttaactctccacaaagcttggggtaaactgtgaacttaacttgctgtgaacccgaacatgaactcacatacttcagttggaggcctcagtagtagcatgctgtacaaaaatgaaactaaagctccagggagtatttgggaacagggcaaaagggtaatggctcctccttatagagcaagcctcaggcctttacctttgtgttttgaagatggagaggatgcacttctactctcgcccgggttgtagcatgcttgctaatgatgtcaagagaactagtgtcagcactgaccatagatgtgacaggtaacagcctgttattttgtgccccatgtcatggcagccattgattccgaggtgtttgatacacactttgatagaggcagagtgaagcaggacatggacaagcatctttccgtgtagtttaatggtctcaatctagaaagcccactcagataattaggttgcttaaaatgtgatgagactagggaatagagccatatagaagtgtgtgtgagagagaattcagtggtttagtatattcacaaagatacacatttgacaccagcctgggcaacatagtgagaacctggctttaccaattaaaaaaaaatagaatagcagaagtaatcagtgaaaggcattttaatacaattatatctagatttattaaaaataaaattttagtccaatttaattaaaggccagaaactagatttttaaagaatattagtctttctcatattttccccaaatcagttgctttaaaaaaaaaaaagtgtgcagatgcctcaggcacaataactgtactcaactcaagaatttgcaattaagaaaaaaaaaaatcaaacctcaaagaagaaatccagcaactcagaggttcaggttcatttaaacatgcatacatttacatgggcacactttttttgttttgttttgtttttaagatggagtttttgtttgtcgcccaggctggagtgcaatggcgcgatctcggctcac

SEQ ID NO: 101940 - DNA, 1039 bp, Homo sapiens
ttcacctcccgccatgattctgaggcctccccagccatgtggaactgtaagtcccattaaacctctttttctccccaatcttgggtatgtctttatcagcagcatgaaaacagactgatacacttccttaacagaaccaattattttttcccaaaaaagagggggagaagcccagaagcatgcagcttctctcttctttctaaggaataggtcttcacaaagtgcccccaaaagaaaaggaccaggcttttctcttactttgtgactttcctaggttgctttgtagccattttggacacagaccacctatagctgtgtagtagttctcatgtgtatggacacagtggaaggagatgccaggcacatagttcttgctgcattgacaccttttcagggcatcttcttttaccatcttctgtagaaactgcaacagcccggccaactaccagccccagcccacccctagctttgctgctttcattttctctgtaacacttgtcaccttgtaatgtgctagtgtaacatcgttgttttagttttcttatatctttccttccctgtagaatgtaaataccaggaaggcagggaattttgtctgctttattctctgcagcatccctagactccagagcagaccctggaactcaaatatttgttagacagccaaaggtcatatacttccaactctccacccaaaatatatatggatcacccatccttagtagcagctaaacctttggacatgaggaatttgctcgttcacagttttctggcctagcatctgattaaccaaactttttcacatatcaagaatttaaaatgactccaaaactttttatgaccttaggtgcttctccttaattctagttggttcataaagctgtcagaacaataatctgcttttgataatatatgacttttcttgcctccaagatagcctttaaaaaagcaatttagccttttactgtaattatattccaaatttaagtcttgccagaatatcattttccccctttaaacatactttttatgatgccaa

SEQ ID NO: 101941 - DNA, 1142 bp, Homo sapiens
tgagtgaatggcttttcatacacaattttagacattgttcctgattggtctctctagtcaataatagatttatcaaatctaatcgataatagatttctttttcttttctttttttctttttctttttctttttttttttgagaagtcttgctctgtcgcccaggctggagtgcagtggcatgatcttggctcactgcaggctctgcctcccaggttcacgccattctcctgcctcagcctcccaagtaactgggactataggcgcccgccaccatgcccagctattttttgtgttttagtagagatggggtttcactgtgttagccaggatggtctcgatctcctgtcctcaagatccgcccgcctcagcctcccagagtgctgggattacaggcctgagccaccgtgcctggccgatagtagatttcttttattgattagagagactaatcagcaacaatgttttaaaattctcacatagatctctgaatgggaaagcagtcttgaattatgcttgcagggagagagaggggaaggaaggaggaggaatggtataattagacttcataaggctagattttgtttctacttaaataatggtatcacagtgggacatattatccatgcagaaagtgagtgggcatctggtctattatctgtggtctttcaggaatggcagctctttagtttaaaaaacaacaaagtgcagcactgtttatttaatggaaatagaaaagcagtgcctgtgtattagtggctcagatttttttgttctttgttttcagctgtctgctgtatgcctctccagcggggtcttacagaatctcaagtctaccatgatcaaagctgaacccattagctccatttcttaattcctcctgtatcctctgttaccattagtaactattctccaactcaaagcatcagattcctcctcttactcactcccttcatccccagtcaccagttctgtgctgttattttatccaagttctcagtaggcttcacgagcaccgccttcacatcccaactgtcgctcctccacctatctgtcctccatgcttctgctagctcatgtttgttgcaatacaactaaccttgccactcttctgcttcaggcttttctactaggctctgcatct

SEQ ID NO: 101942 - DNA, 2294 bp, Homo sapiens
ctggggatctacctggaatgcgcacaatttctggatacacgaattaagccagaaggcattaattctctggtatctgttcaccagtggagactgctacatcttatttcccaattagtttccattccagttgttcgtataaacctctattatataacatcgtggtcttattaaataaataataaacaagaataaaaagagtaccaaagtgtaacccatgctaaaaaaaatcctgttgtaaattcactcaaaaagcaaataatcttttcctttgtgaaattggttcctaatatattgggtctgcatgttgattattttatgtggagttttcttacaatgaaacacatctactctaccactcactgttttctccttacactttgtagacatgcagtgagaagagtaccaacttgcatgactacggcatgttgctgccctgcggaattgacaagttccgaggggtagagtttgtgtgttgcccactggctgaagaaagtgacaatgtggattctgctgatgcggaggaggatgactcggatgtctggtggggcggagcagacacagactatgcagatgggaggtaaggtggcctttgtgttcagcctcagagatgctgaaacatcttgtatggagtatttgtatcctgtaaattaatctttctgtttatcactgaaaaggtctctgcccactcccatcagagtctgctgttatgcaaaaatctgaactatgaatttttatggcatcctgttgaattaataatatcagtcacccatcacagagttaattttaactatttaatattaaacttgggatcaaaatcccactgataactatcataggttactggtagttctaacagggagttgaaataataatggcgttctgttttggtcattaatttaaaaatatttttaaatgctctctgggattgtcagtcattagtttaaggtgaattttcgttaaaggtttggtttgagattttgggcgttctctgtgtggatgtgtaagggtttttttttggccttttatcatttcttttccttcatagtggaagtcaaaggcattaataaatgcttgttaattttttttaactacctttgatttgttgattgtaaagaaacctattttcgcctctttttcttagggagcttagtcccgttacttcttacctgattctcattcttaactgaaggcaaacatctatattcaaatcataaaattataaaatgagaatctttgggttggaaatgccatctggttcaggcattgattttatgctgtctcatcccccgaagggtgatgattgtatcacttatcttattccttcagtattctcttagatgttccctagagctacagatttccaaacagcacattcaataggagttgtaagtttataatcggcaaactacaggatgcttgtttttttttcttttaatttctggtgtaatctgctactagggcccccatagagtttattgtctatatcagctagaacactgggaccacagtcataaactgaaggatccaggcaaactgggtcatatggttacccccaccaattacagtcttcagtgatgatgtcactatccaggttgatattcagttgaaatgctagccagctccttcctagttaccttcatttacatcccatttcagtacctgaacacagtcatgctttagactctgaaattccttagaaatagtaccataaggtttatagctttgatattcctctctgatcatgatcttccctcataatcacctccccagttcaggcttttagtccattatcctctttttccctgcctgcctttctaatcaggatggaatcaatggataaccattcttacctattccattgaacatccttgacttggctgaaacccttcacattttctaaacatatttttgtcaattctccatagctaggaaaaattaatttctttctttagttgcttctgggatttctaaagtatcaagtcatgtaaccttaccacttaattccatttcttattcatgctgtaacatcagctgggatcttaatgttactagatgcacctaattatctctgtcttgatgacctatcatcttccccatagcagttgatccagcccaacttcattctccttggttcccagcgtaactctctctcatgctctacagatgacccctccaccgtcatccattgtgaatttctgcaacatggtacctgacatttggtaggtgcccagtacgtgtttgttgaataaaccattgaattttctcctgtacttcagcaactcttgtaccttctt

SEQ ID NO: 101943 - DNA, 1893 bp, Homo sapiens
agaaattcaattatttcagctctctgtggagtgataagtcctgccaaattgatttacaataatgaaactaagccttgtttacaaatctaagtggtgatttctaagtccacagaggcgtggtaacagagagagagattctgatttatctgggggtctatccgtgtttgaacagattgtgtgatttttgaaacatgattcaaaagggatgttgataaattctaaaatacatttttattgaagagcttgatgaatcatgtatacttactttatttgttattctattagatattgtcttcctcatccctaggtggtgttgctagtacagtgacagaattcaaatccttctttttcctctgctctaacagagctttgtgaactcatagcaatattgtaatgcctggtaaaaggtggtgccagtttcaagtactatatcctaattacttcatggctaactcttgttattgttaacaatattgttaactcttttgttaaatgcagtgacatcttttttctttctcattctctgtgtactttttgccctaaatagttctgcatcttttaagatacaagtttgctttttcttggaggtttttatttggaaaatgcctgaaatatatagaccaacatttgttcctccaatggttaaattacattgtctcccaaagtgaggcattttaagtctggactatacccaggagaatctaaaagaggcagttaataagctcttgaagagcacagtggggtggttgtgtatttattgagtctcacacttaggagagaaataggctggaccaaatgagcctgggcatcaaaagcatgtgggtggtcgttggtgatatgtgcagtgatgagtgtgtgtgctgagggtcctagaccaggctggcagggaaatgaactgaaggcagtgaagcctcccctgataactgcagagagtgctgcagcatccaggacctcaggatcatgatgaacaagctgtagtggatggaagggagaggaactatgggaaggatgagtttctggccagaaagtggtttactggagtgctgtgtctgagtattacatgatctgaggaccatgaggtccagctttgggagtatggagagtttgagtggagtagagttatagtcccatggtcttctgattcacagacattcatgagcgataagtatctattgagaaagtggaagcatgatttttatgacctcctcttgttgtggggaaatcgatcaacggggcctatattggttgggttctacaaccaaatagaatgtgttcagcaggagtcatgttttgggctcctcacaatgttcagtgttagttctgttcctttctcttgcttccacataggaaagactttgacccaatgaggaattagtcattgtcctttgggtacacttccggaatttgataatcagttgggcacttgattctagtacatttgctaaaagtaattaataccctgcaattggaagcatgcagcaagcgactgggaatgctaagtgaaaggtcagaattgaaagagtggaggaggctgttgacccttaggcatggatgatatgtctgagtgagaaagcaagaagagtagaagacagagccttactttataatcagaattatgaaaagaggagccaatgagagggaaagaatgattggcttgagatagattggtggaaactggagaagattgaatttaaagaagaaaagtgggccaagttcagtggcccatgcctagaatcccagcaaattgggaggctgaagctaggagagttgcttgaggccaggagtttgagatcagcttgggcaacgtggcgagacccctgtctctacaaaaaataattaaaaaaaaaattagccaggcatgttggcatgtgccggtagtcccggctacttgga

SEQ ID NO: 101944 - DNA, 1022 bp, Homo sapiens
tggctcaaaaatattttttttctggtaacaaaaatattttctttctgtttttaagacttgtagcatttttaagtttgatatgtacgtctctgtagttcagagcacttggtaaacagcctcttgcttttgaggcaatttatgaatgcttcattgtttttagctggttattttgttcattgtcaggaacactgttttcccatgggaaagcatctccagttttatgatgtcagtggcaagtcattcagtttacaagaattaccttcatattcagtcttagaaaagcatagaccacaaacggccagttatatcacagttctcatcttttaaatgttgtcttagatttttgcaaagtaatcttaactcaccttagaatagtgttaagacataaatagaactaaaatgtagtagttaagtggttatatttcccatctactaaggtatttatatttcttttcttttagaaaataaaaatgtttaaaaaattaggaataattatctttaggatgactttgtaagactgtgcttttttactggcagcaaatacctgccagatttcaggtatttggcaggtaaattgaatcttaaaagatttcaattttaagagtgtccatattaacagatcctgaataggaccctgtgtatcatttattaagtcatttcttggaggcttcactcaggaaaagggagttaacccttggatggcaatgtttaatgtggccacatttccttctggctgaatgccagggagtggctgcgcttagcaaccaggctttgtttcataaatgggttatttgatgcaggtgaggatgccgtgagttgtttgtcttgttttaattcagggagacaggcatatgtagtgaaagcatggaattgtttgcagatgggcttcagtaagaataggaaggtttctggttcaatttgtatctccaagctaattgctctgatttccatatacacatctggtgttggttcggggggaaaaaattttacttgagaaacatggcttttgtgagttgatattt

SEQ ID NO: 101945 - DNA, 1023 bp, Homo sapiens
accacttgcagtttcagtcatcacattttatttttcttttttaatagcttctctatttttgctcaccacaaatacatgcacacacacacacaggggcaaagccttggaaaattgcaattttccattttaatttgagagacagcccggtcacattaacagaacccttgacggaataggttgaattcccttctctgtccctataaccccatggccttggacatatccttacctggtgccctttcctccctcttatggtccacttttgtgattctgattttaatttcagttctctgttagtgatgaaatgagcaactgcagatgttccgcttacactggaaatacttttttggcatttaaaagaaaaccctacagatgaattattcccctgaaaggggttcactcagattttctagattatgattctagaaaatagttctttacatttgacaatggagaatttaaatgttttaatatgaaaatgtaaagcactcttgtggggtatagttgaattatgcccaggttaagggaatccagtatttatgtcaggaaaccatggatgtgatagaaatagtatcgctacaaagctgggcacagtggctcatgcctgtaatcccaacattttgggaggccgaggcaggaggatcacttgaggccaggagttcgagaccagcctggccaacatggtgaaaccctgtctctactaaaaatacaaaaattatctgggcgtggtggcacaggcctgtagtcccagctacttgggaggctgaggcaggagaatagcttgaacctaggaggcggagaggttgcagtgagccgagatcatgccactgcactctagtctgggtggtggagtgtgacagtgtatccaaaaaaaaatactgagattatgcaagaatctgactcgaagaagtttgaactgattaaaaagtaccaaatacttcattatatgaggccagctatttagactagtcagcgggtggttcaaatgcagaaaacagatggctttcattagccagaaacctt

SEQ ID NO: 101946 - DNA, 1046 bp, Homo sapiens
gcaatttaggaatccagggatgtgataaaatttgtgcatctgcttgtcattagccatctcacgtttatatcgctaagtgaaaatttaacttagtttggaacaaaccaccatgatttagttcacctgtatagtttaaaagacctaagacctgaaatttttttttttttttgaaacggagtctcactctgtcacccaggctggaatacatggtgtgatctcagctcactgcaacctctgcctcccgggttcaagcaattctctgcttcagcctcctgagtagctgggattacaggcagctgccaccacgcatggctaatttttgtatttttagtagagacggggtttcaccatcttggccaggctggtcttgaactcctaacctcatgatccacctgcctcggcttcccaaagtgctgggattacaggcgtgagccatggtgcctgtccaagacctggaattttacactgcattgggaccttataaaattcttgacttgtacccttttggcattttctgaatgctcatgatttgcttctgaaatattttaggcctttggaaacactccttcattctaatcctctcttttcttgctctcaattcttcatgtcatgtaattattttgcctagagccaaatctgatgtgttattataatcatcatttctgcaggagcttggtaacactcctgcttttgttccctttaaggcttcttttggttttgtttattttgtttcactcagaatgatctggttaagttttgcttgatcatccatttcaaatctcttagtacatttttcaaattcagttccaagcatgttaaatgtgtcacaatggaagtggcccacggtcaaatacattttgggaaaccttggttttaaaaaagttaaactgacttcattattacggttttttttttcaaaagcctccagtatccatcttgaatgatccatttcccatatgtgttttatgacagaattctccccactcccaggtaataactgttgacattttctgaaaactgtttttgagaacactgaattagatatg

SEQ ID NO: 101947 - DNA, 1053 bp, Homo sapiens
tcatcagggtgtttatagtaaatgtaaaacgttaagtaacatttgagttaatctgtgcttgtacaaacctcagaagcttaaataatgaaccaatgacatataatttagaaagttttcattagactctttgcgttggtatttgcaatatcagatttgcatgtcatcattattagccttcctctattttgagtgttgactaggtgccaggcgtcatgttgagaaatttatgtgcttatttaattctcacactgactccatgagatagatactccattttacagatgaggaccccacatcataaccttttggccagaattacagttagtgttagaatttaaacctatgcagtctcattccaaatcctctgtctttactcctccagaatgctccattaaatgaattgtttcttataatccggttgttttaacgttggaaaagaacttgagaacatttagcccaaccaccctatgaagtttggcagtacttcttgccattctttcaatagataatttatttgagtttaagggagagtctatgaattaacactagtaccaaaactcccatgagaaaataatgtagacagcttttgttaaaaaagcagaatttttaaaggtgttcattcagttatcttcttgcctaacaagttcctgtgttgtgatagactttgaatttgttaaatatgaattggcttcctgattctagctgttttgccagaggcctgatttagagaagggattaaaccactggtcaaccttggatggaatttgggccagcagttccttctccacagcccctgacacttggctttgtgccaagaaaatcctacaaaaggaaattgatttactctacccaagacagagttccggaggctttggttgtccattgttagcttagaagttggcgcagtgtgcgtgtgatccacgcctaaatagcacagccttgctgtgcgtggtagaagttgggttagtgttgacatgctgttgactcaccctcccgaggatggaagctctggcctgggtcaagttgtggtcactgcagttaacagtttgttga

SEQ ID NO: 101948 - DNA, 1066 bp, Homo sapiens
aagagcttgaagccaatactactatataccattaacttgacaggaattgaaaatctaattgaggtcattatgattagccttgtatcttgctagtattttctcaatcttattttgaatgttttgtgtcaagtgttaaatcctcttataccacagaatccagaaaatttaaatgcaacagaagtaaaacgaatataaaaattctatggttgttgtggaggggcgttcttggctaacccatagggtgtttgaatgtaaaggcagcttacagaactgctgctagttgaattgtggagggtttcacttttaagagtacatttgagacaaaattgcaattttggaatcacttattcctgcttgttcagtgaaataggagaggggggaattcctgagggaagctgggagatttccaggtgatgatagagtagccatgtgagtatttggctgaaacagagtagaagccacctctgtctgttggacagaggtggccttaacactgagtatcaatcagcatggccattagagctgtccaggacaaacataatgaatgttgtggtggcagagagggtatacttaaatgaacaaaattggaggctgactttccttgtttcttggtagttcctttcttcgtatttgctatttggatatttcacttcacttttgtgagctagactcaaaggttaaatttatatcattgtgaattttctgggtcatattgtagggacacagatgggaagcatcccttcagtttattgagagtatttcttatgcgcatgtgtttttaattgtatttattgatttaataaatagccgatgagatgagaaaaaaatattagtgtcttgttgttgcagagaaaaagacattggatgcattcttagaatttattatcacatgcgaagttatttagatttacaaagcaatctgacatgttgacttcattgctcgtttgctcatttctatcagaggttgaacacaaagccaagcctaagcccgtgattcttctgtgtgcagatgagggggaaggtttaatgcagaatgtttagctgaatatttggattgtgcattccc

SEQ ID NO: 101949 - DNA, 1029 bp, Homo sapiens
gtcacttcttttgttttttggtgatttttttttttttttttttttttttttttgagactgagttttactgtgtcacccaggctggagtgcagtggcgtgtcttggcttactgcaacctctgcctcccgggttcaagcaattctcatgcctcagcctcctgaatagctgggtttacaggcatgtgccaccacgcctggctaatttttgtttttgttttttttttttttagtagagacagggtttcactacattggccagggtggtctcgaactcctgacttcaagtgatccacccacctaggcctcccaaagtgctgggataacaggtgtgagccactgcacctggccaattttttggtgattttgataggaatttttttttttgcctgatgctttttttgagagaatctaataatttgtctcttatttaataatttggctttcattagcttccagaaagccacatactgtcttcattgaaaaatgtaaggcatcctagatgatacagactgataaattacttttcagccataaaagatacttatgagaataagagatctgttgcataaagaaaagtcatttgtgttaagtgaagaaatgcattattactcttgctgctttgctaaatttcaaacattgaataactaatatattttgaccccctggagatattttacaggaagaaaaatgagaggtttaatcctactgttgagatagacttaacgtgttttagacctgcccctcatcccaagttactacaaactcatttgtttagtttttccttgtctgtgtgctcgttatttcacagtaaaattagtgaggcaacataaattttatttttaagagaaagtaaagaaaatggctttatccattaaaggtttattcatcttaaaaaaggacttgttatatctactcctactattggatgaattttcaaaagcatattgatactgtgtttggttttgtttgttttcgggacaagtcctcactctgtcacccaggctgaagtgcagtggtgtgatctgtagcc

SEQ ID NO: 101950 - DNA, 1052 bp, Homo sapiens
acacagaatagtaaagctcaggtttgatggtgatctgtaaggagtcacggttcttgctaatcgatgagaaaccatgataactggcagactgcagaagcttttctcttgtcaccggaaccagcagaggctcctgaacgacatttgcaaggctattagtactgcggagaagttactagatggaataatactggtcctgactgaggaaatgaaaaggaacatgcaagttcacgaggttaaatgaggaatggctgattcaaaaaaattaaaaagaaataacgtgatcaacaatattggtttgaaggaatgggagaggttgtctttatgttaagtcttgttgctagaggatctctattttatgttactgttttttgcatactagagtcttctacagatatttgtatgaatgttgtcagtcattctggaaataagcatagctattacttgcatttcacgtggccactaaactatcagtgagaagtgcattaaattcagtagaaatgtacattgtttctgcaaattgtattaccttgagaatcttacaaagcatctttcattaatacatttcttttaaaatctctatcaattacaaatgtaaagataaacctgtacagatgcattttaaatttaaagcttccagaatgtaaggtttagttcgactgcatacctcattacctccccttccctcctccctccccttactcccaggaagtttgcagggtaaataaaacatgcacatgataataaaacaaagtggaatgtactaaaataccaaaaggaaaatacagattaggtatactgagtaaatatgttacagagaaaacttcctgtatttaaaaagtaaggaacaatgggatgagatcatagataatcctggagcatttcctggtagtaaatttccagccaggtttatatcccaggtctggggattggaggttaagtttctgcatatacaatatttgtttacattcctctctgcctctaccagacagacagacagacacacacacacacacacacacacaccctctgtctctttctctctctttctctct

SEQ ID NO: 101951 - DNA, 1022 bp, Homo sapiens
caagctcacggggacgagcaggagcgctctcgacttttctagagcctcagcgtcctaggactcacctttccctgatcctgcaccgtccctctcctggccccagactctccctcccactgttcacgaagcccaggtgggccgtcggccggggagcggagggggcgcgtggggtgcaggcggcgccaagggcgcgtgcacctgtgggcgcggggcgcgagggcccctcccggcgcgagcgggcgcagttccccggcggcgccgctaggggtctctctcgggtgccgagcggggtgggccggatcagctgactcgcctggctctgagccccgccgccgcgctcgggctccgtcagtttcctcggcagcggtaggcgagagcacgcggaggagcgtgcgcgggggccccgggagacggcggcggtggcggcgcgggcagagcaaggacgcggcggatcccactcgcacagcagcgcactcggtgccccgcgcagggtcgcgatgctgcccggtttggcactgctcctgctggccgcctggacggctcgggcgctggaggtgggtgccgcgcctcggaaggcggggggaggctgcacggtggggacgcgataccccccaagaccttaacccaagtctttaatgcagagaagccgggggtccgtcaatgggacccctctcctctccgcccccgcttgcggacgtccagcgcatccccgctttcggcccagccctgccccagggagtcgcgctccggcccgctgagagggagcgggcgaggcgctggtctccctggttccgcgccagcccggggcgagaagggtagggggcgaccctgagcccagaccccgacttagtccctgccttggaagcgggggtcgggggaggcgagagacattcagacaggggggaagggggaaggagcacgtggggaaaaccgaaaacgcagcgtccctaaagccagtccttcgctcttgaatcgttgccctttcctttctcttgggccctggggaggaggaggaggagtcg

SEQ ID NO: 101952 - DNA, 1440 bp, Homo sapiens
ttttcttttatctacctctgcctctgttgactgctgagagtggttttctcaaagcatattcactaccatgttcaaagaatctctgatagctacatgttatacattctacattgcattcagagcccaccatggtgatataaccgcactcctcattgtcttttcccattctccctttcatgtacttttgcttgagatgaagggctctcccgcttcagtgcttttgatcaacctgaattgtccctcaccttctctttctgccacttcagcatcatattttcaagaaactttctctaaacaaccagttcttaacactttgacccatgataccacattttagagcacttaccctttcatacatatgtggtcctgacctaataaaactaagatttttgcagccacaatttatgtcccctcccaaagtatctagcccagtggcttcaacacagtagaaatgcaaatatttgctaactccttgatgttctcttccccttctttttcagcaggaccaccaccctacggtcacgaccacgagatggaatactgtgcagacttgcctcctccatactcccccaccccacagggtccagcacagcgttctccaccccctccttatcctggaaacgcaaggaaataatctatctcccagaacagaacatgtgccaatgggcgatcttgcctggaataaaatgcctctactcagaaacaggcaggaaagaattgctccaaggaatactttttggggtcagataatgtgtcaggtggaatatccctgctaggagatataggatttctactctgctcaaagctgaccccatctggagtattaatgtttggttctatggaaccacattttaagagatctgctgatccacctaagcacattcagggaagagtaatgtaattgacaaaatatctgataatcatgttgtttaagggctaggtgaagaaagtttcagtattgatcctggaaaaaaagaagatctaagtaggatgggagaatgatttggcccacacaaggaagcaactttattctatatagctttaaaagtcagaactagaattgttcattctttcattcatcaataaatgtattttgagtgcctaagagtttactatgtgcctagcactgtttgaggtcctgatggaagttacaggacgggtactctggttttagtacaagaaagagcaatgactagattgctttgtgaagctcttggtagagacacgctccagaagggataacaaaatcaaatagtagatgggttcattgggcctcagaagttctgctcgtattttaggtgggtgtgaagtgaatttctatatgtccaggagtgaatacaacagaaagagttggatcttatttatttaattagggagttaaaacaagaccaaaaagactcaacagccgcttgaagccaagaactcttcaatgccagctac

SEQ ID NO: 101953 - DNA, 1004 bp, Homo sapiens
agcagaatggtttttaaaattattactttggagagcatatctagagaattgtgctttgtatcaaaacatgaattttaagaactggaatctgaatgatgaattggtcaacggtgctagaagaggatttttataactttttcatatctattgaaatacagactatttgctttatcaattcagggaacttatgggttttaaaaaaaaaaagaaaagaaaaacacacacacattatccttaagaacatttgtaagaaaacacttgtcctataatcatggagctctactagaaagtctaaagaatgcttacaagtcttttgagtaaacttacttgtttttccttttaggggcactgcaattgcgggcattgtttttggaatagtatttatcatgggggtcattgctgggattgccatatgcatctgcatgtgcatgaagaaccacagggcgacccgcgtgggcatcctcaggacgactcacatcaacaccgtctcctcctatcctggtgagcaaaactgttgactctcgaaggctcagatttgctagttatcctctgctcctcacagagagaaggaaacattctagatggtcaatgaaaccaccttcaatttcatagagtatttctaggtacatgtagattgaagttctagctgaatcaagattgcttagatccaagtaatacaacccaattctttttttttgaaggtattcatatttttaatgtctgtttcattgactacaattgccagtcagccagaattaagacaaataagcaattcacacccactgtgtctacctgctagtgagtactgacaagtaatttataaagtataatgtatgtctcaataaactggcatctgatccaatagatatatatgtcttgagaaaaagcattcaagaaaattttcatatatcttcattaggtcgagagaacagctttaaacacaatattaaaattctcaacaggccaggcacagtggctcacgcctgtaatcccaacattttggt

SEQ ID NO: 101954 - DNA, 1013 bp, Homo sapiens
taagtactgtcctaagccactgggcctctctaatagcagcctccagtacttagacacagcctctcccctgctggcctggaagccttgctggcatctgctacaagtgtctgctttcccttcctccttgcaccacttcctggccttccatcatccgctccacaaagactcagactctcctattgtggcccattgcccttccaggtggtactctcaggacctagaagagctccaggctgaccctctttcctatgtggcccacatctgatgcatggatagtttaatttcttgcctgttatggactgaatgtttgtgccaccataaaatttatatattgcagcccatatccccaacatgatggcattaggatggtggggcctttaacagagaattaggtttagatgaggttaggagggtggatcccccaccatgatgggattaggatccttataaaaagaggaagaaccaccaaaggttcttctctctgcaatgtgaagacacagcaagatggtggccagaaagtaggtcctcaccaagaaccaaatttgccagcaccttgatcttggacttcccagcctccagaactatgagaaataaatttctattgtttgaatcacctagcctgtggtatttgtcatagcagcccaaggcaactaagacattgccctattttgggtagggtataaatttccccaatcaagccctttccagttctctccctgcactaccatagaccccttctctgaaaaaaaaaaaaaaaacaaaaatgtgttctgttcattgctcctccctttccctttccagttttcctttccactgctcaaaaatgtaatcctcttccagccagtctgatccactcactgatcttctggcatttcatgtgcaatcagacccagcagcctttcacaaacataacctcctgcttatctgtccaacctcatttccagcttctcactcacagatattgttaggtcctgcactactggacttgtacagtgacccaaatgcaccaggtt

SEQ ID NO: 101955 - DNA, 2387 bp, Homo sapiens
acaacagtccccggtgtgtgatagtccccttcctgtgtccatgtgttctcattgttcaattcccacctatgagtgagaacatgcggtgtttggttttttgtccttgcaatagtttgctgagcatgcatggttttttcctctttggacttttgccccagtcgcccttttagagccctgatctttctaagaccaagcctctgtcctctccttgctaaactccacaactcccactttatccccttttcttactggctgtgctgccctggaacttggtctggtcaataggtttttgctactaatgaacttcactgatagggtttgactagtctccacagtattgcctacttctggattgggtcctgggtttgtgtctttcaaaaaccttgctttttatggaactaagccacctctccccacagcagctttatgggagcactaacttggatcttttgccacaccactggaatttcccctggaccctgcaactaaggaagtgactgtgtgtgtattgagggttggcatggctcctagtcctagtctcagcctccagggatctgtgccaggcctgcccatgtctgcagcattcttagaggtacaaagatgagcaagcccagttcttagacttaaagatcatataagatagtaggcaatatgaaatgagtgcaagactaaggatcgtacaaggcagaatatggtaagtgtgttagggaagtacaaagcaccctgtgaattcacagaagcaagatttcaatcacattgttgaactgccatggtgaaagcaacatttgagctaggctttcagtgatagatatcaacagacagataaatgaaaagacatggctaggacagggaagcaacgtgaacaaagacacagaggtaggtaaatgataacaagggaagaatatgtagtaggtgggcgagctggagagaatctggtctgcatccagattgtgaaaaatgttaaacgcttggctaggagaaaagcacttactttgatgactatttgagaccagggctatagtatacagccacacaggttatgcacagccaactccaggggtcccattcatatgcattaggggttggtcaaccttttctgttttatctagcctgatagtaaatattttaggctttgcaggccacgtggtctatgttgtaactactcaactctgcctttggagctcagaaaaagttatagacaatgcgtaaacacatgaatttggatgtgtcccaataaaattttatttatagacactgaaatttgaatttcacaaaatgttactcttctcactttttaagccacttaagaatgtaaaaacagaatgttcttagctaacaggtcatacagaaacaggcagcagaccagatctggcccctaggatgtagcgtgctgacacctgataaagactctgtgggccgggcgcggtggctcacgctgtgatcccagcactttgggggccaaggcaggtggatcacttgagatgaggggttcaagatcagccaggccaacatagtggaaccccgtttctactaaaaatacaaaaaaaaattagccaggcatggtggcatgcgcctgtaatcccagctacttgggaggccgaggcaggagaatcgcttggaccctggagacggaggttgcagtgagccaagatcgcaccattgcactccagcctgagtgacagagtgagactctgtctcaaaaaaaaataaataaaaaaagagggactgaatgtgaacgatactcctaagttgtaagacacatggaccatggtggaaatccattgatgctgtttattaaagaccagcatgatgcagttttgtctgtataagaaatagacgagaggaaaaagagatgtgaaaagggaatcccattctgatggtactgccgtacttcaagcagagtgtgtgtgtgtgtgtgtgtgtgtgtatgtgtgatattgttgacatatttctgaactgccatgtagaaagtgacatttgaactaggccttctatttgaatacacctatttttctatactttttcctctaaattgtctacacaatgtatcatcaacttggcaccatgaccagctctctggatgtcttttataaaagtgaatggcagaagtgtcttaaaagaataaaaggaggaaagcaatcattctcaaggttataatctttggggttaaaggggaagaaactcaaacccttgagtggaggcagtagtataaattttcaagaaataaaacaaagaagccttcactttgcaatcacttgctcctcttttatcacaacatcatataaaacatcttataaaattcattgtgctttctgttaccctccattttaaaagccagcacttgggaatgtttcagaatatcgattcagtgaacttctgttgtacaa

SEQ ID NO: 101956 - DNA, 1041 bp, Homo sapiens
tcacacattccttaaaatatatcaaacattccagaggccaatacaagtgaatctgagtttgaccattatcatacataatatgtacagatactattgcctatttaaacagacaattaaaaattgattatattttgggagatctctataaactcatcaaaactagagaacttgtcatgtaacagaatcgttcagcttgatattctgcaatcaatatttttagagtgcaactttcagaagaatgcatttcagatttttaacttcaatagcaatggatttgcttgtagtcactgaaatctcaaacttttgtcatcatttagcagccattggtcatctattaataaatgcattaatatttatcaaatgacaagtcttttttaatgtgctttaaaaatgtgctaaatacattttgccctacagttcaagttggctttcaaagggcccttataaactatcaaactgtcacaatgcaaattacatagtaagagaaattacagagtgatttaaatagaacttcttggaaggatgtgtgatcctaggatgcaatcagtatttttcattaaatactggtaatcagattatacaccaaataacctagtctgtacatgtgattggcagtgaaaagtatttttagactcaggtactcaacattggctttgcaagtggtataaagcaaagagccatagtctaccttaaatacgccaacttcttacatttcatacaactgcttcattctatagaatttcagggaccagaaagaattgcattgactggaaagaatcaagtcaaaaaaggtggggagggctagtgtggaaacaaacttctgagggaaaaattgcccatatgaaagagcctaagaaagtgaaatttcacttatgcctttttttagtacttaaaacatattttaagcatgtcttttgtgtgaatgacagtataagcattgtgggagaaaaaggataagtgcaaactcttttggagatttatagtatagttattggagtttttagtattatttcagatcaagcatagaaccatatcaatgct

SEQ ID NO: 101957 - DNA, 1781 bp, Homo sapiens
tgaagtattattggaggactggaaagctaagtctgtccgtgtgtgtgtgtgtgtgtgtgtgtgtgtgtttgtgtatgtctctgtgtgtgtgtgtttgtgtatgtctctgtgtgtgtgtgtgtgtgtgtgtgtgtgtgtgtttaggaggagatgtttagggaacagatcatcaacatggaatctgatcagagttttgaaggaaaagtagatatttacataaatagtgaagaaagggacatggttttaagacagactctagcatacaaagtcaaagatacaagaaaggaaatgatccagttgagaaagtccctactgttcagtgtggctagtggggaacgagtaacctttgaatatatgtaggaatatgtaggtcagacaaaagatagatcctttaatgatgtgcttttgttggtcatgcctagcaaaactgaaacaaaataattcagtacttttctggaaatcagatatccgattttatatagaaccgacacattcttaggcatcattaagacaatagacaaagataagaaggctccaaatgaagttgctttttatttattccataaatgaaatatttggaatgcaaactttgagatgttacactatttgaaaccatttatgacaaactatgtgaccttataattatttctccatttaagagatttttgaacatgagggcaactacccgaagatagaagcctcagaatatttaaaaatgagaattgggccaattcaagaaataaacaatttcccaccagattgattctcaaacatttgattcagcaactctgcttcatggaagatagatctgtgatgaatatggaaagggatgtttaactttttgctgctaatgagatttaattggcattccccagaaagtagatccagtgtaaaaatgtggtttatagagtcctcttcggagttggtagaatttaagggaatagagggtgcaattgagtggttaattactgttatccagtagaacaagctaaacatggaactgaagtaaagttgaggaaaatgaaggtattctcttttgtaagagaataattgtacaatactgaatatgaacaaaatattgactagtttggacatagtgagctagatgacaatatatcgcatttaatttcctaactcaaaaatagattttgcttttccactttgccattgtaaagcactcatcggtctgtggattcttcagagccccatctggccaacataaaatccccacaggaaaaaaaaccaagagggagaactaataatggagatcctggtgagattaaatttcttttcttctcaatgaaatgtgaaagatgtattacccgcagtttggcaaagacagctaataaatatcacaaccgtgatttgagagccatgctatgcatgaaagcaaaactgagttaaaagataaaggtttcatattttcgagtggcatttgaggtcctatgatcattaagtatcttagtgttctggattaatcaggtaaggctattcaaacactgacaaacgtaacgcatttaaaaaggcctttggcattagtaaaaaaaaaaaaaaccatttaaattaattaagttaaaataatcttagtaattagatatgaaaagacctctaggaggtacatactgaagaaatcaaagcttgtgggagtcttatttttgttttaataatgacacagataagtaactaatatgatgttaaaataaatatgaacttgatttagaatgtagcaacaacttatgtttgctataagaaggaagtcagtgattttcaaatgtatattt

SEQ ID NO: 101958 - DNA, 1099 bp, Homo sapiens
atttattgagtagggagtcctttccccattgcttatttttgctgactttgtcaaagatcagatggctgtaggcgtacattgaatggcttttaagaacatgaagcaaaacatccccactaagcccttgggataactgaccagtctaaatatttgaataaattaaacagcactaaaaatgagagctatggaaattcaccaagaaaactgtaaaataaatagcctttaaaagtctgttgtactctgcaaaaagcatctattgtcaatatattggcttctcccttgtgtctaaatcgttagattttgtttctgttttcaaattttaaaagtggacttaagtacttactgaatctcacaaaggtaattatttttcgctttcattccttcataccacaatccagaggtaagcctcaagggtcatgtttgacaatctgtaatgtaaaaataaaattgaggagaagaaaatacgaacttttccatttgttccacaaaagccacgcataattgttaatggtgactgaactttgctgccttttaatcacatctctttgtaaagtatcatcttagcagggaagtgatttaaaagcaatgtaaaatttcctttctggataaatcagttacatggacgtgcagacataaatataatattttgtatttttaatgttatagctttgatagggaaacaaaagttttatataatttatataataattaatattaccttcaggaattgagctggaaatggattattttgtgactcttaaatgtacaacataaattatcagactgtacttaatgttttcctaatcatgtatctgaaacttatatatccatcataacttatacgactaagtcagtgacaacctttgcttgttaaacataaatcatttaggtggaataaagaatacttaaaagctagagtaatttttatccaacatttttagtataatttttcttgcagcaaaatatatggaaaaaatagtaatttctgatcctttattcagaaaataactcttcccccttcacatagtactgttttatatcttactgattcctcaatctgacattaagtaaactcttcattatttacaaaataattgtc

SEQ ID NO: 101959 - DNA, 1039 bp, Homo sapiens
agagaggttaatgttacttttttccattttggaaataattttaatcaagtaactcaaatgtgacaaaatttatttttattttttgtggttatattcccaacaacattaaaaaatactcgaggcataaatgtagttgtctcctactctgcttctcttactatactcatacatttttaatatggtttatcaatgattcatgtttccctcaaatagtgatggtttacacctgtcatggaaacaatcctagagagctcagagcaattaaaccactattccatgcttttaagtagttttctccacctttttcttatgagtctcactagattgactgaggaatgtatgtctaaattcctggagaagatgatatggattggaaactgaaattcagagaaatggagtgttcaatagataccacgaattgtgaacaaagggaaaattctatacaactcaatctaagtcagtccactttgacttcgtactgtctttcacctttccattgttgcatcttgaattttttaaaatgtctagaattcaggatgctaggggctacttctttaaaaaaaaaaaaaaaaaagaattcgtctgaaaatgctcaggtttgtaagaatctaatctcacttacataactaagcactccataataagttttattaagtacaaagggagccagaaaaaatgacatttatttcttctagatcagaaaaatttaaattaagccctgccttgctgtttagaaatatgtgggcattgttataatttattcaataaatttatgttcctttgccttcctgtggaaacagttttatcccactaaactaggaattaggggataaatcacaaacaaaaaaaaagttgcagcactgaaaaaaagtaatttattgtttttgcaactggtatgtgaatttgtgtgataaaattatttattcttatttaacaaaaatatgttcaaatttttctatatttaaaatgttttgctgttgtcctactttttaatttatgcttcatgtttgtgtataaagtacacttttacactttgtga

SEQ ID NO: 101960 - DNA, 1020 bp, Homo sapiens
cctagtaaatgctgtcgaagtaaatatctgtataaataacataaaaatgtggaggcttggaaggtcaccgagccctagccacttattttcagccataacagcagtcagttgctcagtggacaattttgttatgaggtgttggtgatttaacaagttggcccaaagtagtcggaatataaagtgaaagatttcatctctgttgggttttattggtgcacactggactcttttgctagaatggccaaagttttctgcgtttggcattcaagatcccaaggagaatgtagtcatcagtttgctacagtgtttcctaaatttgttttagtggtttgtgtatgattctagaaagctttgttaaaaacaccactaggatgatttgctgtctactttttagagtttgtaattgctcaaactactgtcctagatgttttaaatagcattgtaaatttgttgtggaatatcattttatctttagactgcatgaaaattgatcttatgtaataaaaagcaatttacttggattataagaatgcaattatgggctctgtgaaataatatctagcttgactggaacttcagagaacattgttggttgagaggcttaagcacaaatatcacctggctgagtggttttgaacactcacaactatcacttgggaaaccaagctgtcctttcttcaagctctcaaactccatattattggtattttgacattttaaaatgtaaatgggtatgttttcaaaatgagctatatgtttgtgacaatagtaaacattcataactcactaaatcaccaaaagaaatgaacggatgaagcaagcttagttttgcaagaaaccggaaacttcctcatttcacttctctttctttgtctcccctagtcctcccttttattagccacctatttacttgactaagaaaataagtcactgacattcaaaaaccatctactaagtgtttgcaacttgcacagcactaagttcaatacagaggtttcaacagtatatgggagcaaatgc

SEQ ID NO: 101961 - DNA, 1026 bp, Homo sapiens
acaaaaatgttgtgccattttacaagcagcagaagtcccagaaggccacacagttccgtggcctgatatatgcagaagaataataaaaaattttatggctctggggaaaccaatcaatcccaggagtgccccaaggcaggtaaagctggtgtgtcctcactcagcctcctgccttgacagctttacctgagaacacttagacttgcagtgcatggtctgtaaacataaaaacagtcctggatttgagataaacacatgcaccagattctggtgcatgtggtacacttataccacaatgataagtgtacacggatttgtcaggaagtggggaaacttttcagaggttactatttcattaaaacaccgcaagtggtcaatacttacatcaattagtagatgcagcccctagatgagtgtggcagcccctacaaaataaagtaaaaaactggtgatgggttgggggagggatgatccaagtaatttaaagagaaatccttccactaataatcatttatgccacttatttacttattgaaattataaagtttgtgcaaattttctgtttttctttttcttttctttttttggagacaaagtcttgctctatctcccaggctagagtgcagtggcaccatctcagctcactgaacccttttgtctcctgggctcaagtaatcctcctacctcagcctcccaagtagttgggattgcaggcatgcactaccacacccagctcatttttgcagttttagtagagacagggtttcgccatgttggccaggctggtcttgaactgcttgcctctagcctcgcccatctcaatctcccaaagtgctaatattacagttgtaaaccaccacgcccagcctaaattttcttaatatatattttttcatgctgagtgtcaaaccatgagcctcatgtcctaggtgatatttagcattcgcaaaatggtatggagtgcccagaaggcaaatgttttgtcttttgccaaatatacatcactttgctttgcatacatatata

SEQ ID NO: 101962 - DNA, 1857 bp, Homo sapiens
tttaaacatactgaaaaagaagttgccatttgttcatttgtttcacaggagatttcttatatcttagtgattgtgtgcatgagcctaagtaggaagaacttagtgtagccatcggaagtaatactcaatttgtgttaattttggagataacagaaagagcaaaaattttattgttcttcccttttcactttatcatttgaaggttactatagatgtatgtgtactttatgatgtatgttagaggagaactttaaaagttcttttagtatttaaaaccttttctttttcagtacaaatggtttacatctagcaacaaatccacttgtccactgtgtcgtgagacgtttttctgagatttttttcactggaagggatccctgaagtacatcaaacaaaggcattggatttggatccgtctgaaagtgtggatgtggggaagccagtgagcattacttttaaataggaccttctctggaaaattattttggttaatgtaataatcctaaaatcaggtttacttaactttagattgctttgtaaatgtttggaaactttcttttacaaaagaatattacatatttgagagaaaatatttctattaatggtttaatttctttgtatatttaaaaataaatatgaaaaacccctaaattacagaattggaatttgtgaaaagattgcacaactatattattgataaacccattccgtttgttgatctgtgttttagaatagtccaagtgaagcaaaacgaactgagagagctgatttacatctatagatattttaagccttatttattagttatgacaataaattagtattctgatatttgtagattattttaatgataaaaatgacactaagctattaatacggcttgtcttaagatatctggaggcatgctctgaaatcctatataaaagagtttaaactgaactttaaggtgcctccatttatcaagggttatgaaactcagaaaattaaattcttgatgctgacctttttgcttgtgggagaattatttctatatattagtgaaatttgaattgtaaacttgtcagtgaatttatcactctgagcgagtctctagagggtgagaatttgagagaaatagtaatttgattatttcattcatgaagcggagtggtagttatccttctattgagagggaagaaataaatgagtattactgaaacttaaagatcagtggaaaaaaaaaacatttaaaaatgttgtaggagactttcaattttggaagcaaactgagctattcttaccagccaaagttatactaaataagagacttgggggagcaaatgtttttcagccttcagaaatgaaagttaaggattttagcactaggtaaaattcagtataataggctgaagtggagtaagtgaaaacctgccttttgccactcttaaaaattgtgcccaaaatataaaagtgtggaactttagaacttggaataattttattgcagtcttccattacatggaaatagcatatctaatatctaggttacttgagagaccagctaatcatctctgttgcacatgtttaattggcaaaaagcaattcatgataaataaaattactgctttccatctactgggtaaaatgactattgaaatagtatgaatgtggtcagaggattatagttgagagtgaagtactatgtgtgagttatagatctctcgaattatatttatagatgcagtgtcctgcccagttttgtttgcctcctacattttactgtaaaatatttattgtcttctagccttgagcctctgagggtcagtaagtgaagtacagatagcaaaattttactacctcgttaacccttttcttaaa

SEQ ID NO: 101963 - DNA, 1133 bp, Homo sapiens
ctgtttttaaaagagaaatcagaaatccatatttttatgtgaaatttcctgattgaaaaaacaactctgagaagacccccatgacattttggaccactagtttgtgctctctgtcgtaaagggatgtcggagtttttgatacagggtgaggtcagccataaaaatgggattagttttaagcaggaatttgaaaggttaagggcaatggtgtggaaggaatgtatggaagacttgggaggagagtgagggagtcatctgtgggaatggtgaatagattttcttgtctcagacattctaagccaaggtgagtgcattgtaatacaggaagacaatttgagaaagatattagaaatgtgttacaataatgaggggatagaatgtctgctagtttatgaggaaaggaaatttgttacactttgagttgttcttttataccaattgtcttggtgtatttggtttactaacaaattctttgctctccaccagcttcgggctttgtattccatgtatcttcggaaaacaaagagtttgaataaattgctctatcacctgttcaggcttatgccagaaaatccaacctatgcagagacagcagttgaggtcccaaataaggaccctaaaacattctttactgaggagctccagctgagtattagaggtcagtaagatatgtgtttatgttctttcttggacactagattcagactaggttgaattaaacttttccctgagaatgtggagaataaccccaaaggtgggtcctggctatgagaatgttgaaattgaccattttccatatttctctaaataggatgaataattagtttttacccataagactgtgaggaatttaatacatttttgaagcttagtgtggtgagactattaacttttgactctgtaaacaaatatttcttacgtgataacattttataggcatataaatcaggggaaataaagttgaataacatttcattctgggagctcacatgtgagctgagaggacagatatgcatgtatctggttgtactacagtattggaaacaatttactaagaatatgagttttttaaatgccttggagatctgaggatggactgcatcttgtgagtattgagttgggtattccaagac

SEQ ID NO: 101964 - DNA, 1592 bp, Homo sapiens
tgattcattggaaatgacttactgaaaaattcaaaagcaaaaattttgatgtttaaatcaaataatactaaatagtaaaagaaaaagccagaagagaaagcttggcttctcagaagcatcatctatgctttactttacagacagaaattgaaaaatggcaaggtatccaatgactgttgcaaattaaaataataatacttcagataacatgaatggatgatgtgaatagaaccttgctattgaacatttgctggatcagataaaagtcattaaaacagttgagattaactggaatatatattcagttcatgtttctagttaagactgctttattgtttatgtctagtttttatttcattttcttaaatgacatttgattgtttgtgaatcatttaagctatactaactttcttttgagacgtgcatgtttctttcctttttgtcattaggagaaaacaaagatgtgtctgaaacatcctttcagaatgcaatgctgaaacccatgtgtgaaacattaacgtatatctcaaaggaacagctattgagtcacaaacttcctgcaagattagttgctgaccaaaaaacaaacttaccagaatatctccagactttgttaaatacattggccccattactcctcttcagagctaggcctgtgcaaattgctgtttatcatatgctatacaagtaagaattcatccaattgaatcaatgttacagtggtctaaaaaaatagaatatatgcttagtttttacttttaattatttaaagtaaaatttttaaaagaaggagatctgactgcttcacttatagggaccctaagttgcctcatcttttaggttattgttctctatacacaatttatatttcaatagtcctggctatagtagttattttaaagaaaactcattaaaacatttactcattataaaataagtattggtctttctgctcttgagcacgacttaataaacagtttaatatcacatatttaaaaataatgttctaatttctagattgatgcctgaattaccacagtatgatcaggataatctaaagtcatacggagatgaagaagaagagccagccttgtaaggtttttttaaataatttgttttattaaattcttataatccatctcacttataatgtctttagaggactgaagcagcacagaagctatagagttatattcattctacagatagatctttttagttatctgtaagatataaatgaaatatagatttcacccaaaagattgtgtcactctcttaattgttcttaaatcacattttccgtttgctactgttcagtaaaactatctttggccatatggtggctgtggaaagagtgtatcggttcaagtatctattgagcatccactttgtgcagagtattaattaaatgctgaggggaatatgcagtgtttagtgagcactttcttttccttaaggaatttatctgatacagatgatactgtagcgttatggaaaatatagtatatgataagtgctaagaaaaaggatagataacttttttttaaaggtcagttaggcctatataagatagcatgtatgagggcacaatt

SEQ ID NO: 101965 - DNA, 1034 bp, Homo sapiens
atgccgaacgacagtgaatgggaaaagatgaggcagtctcttcctatgcaggtattttggaaattgaagagtacatatctcattctgaagtttggatttcatgcaagcttgaatatttttattttggggaagaaaaacataaataaaatgagtattttgctttgctttgatgtctttgtatgctcatatactggatgtttgctttttgcaagacaccatttgacagtggcagtgggcatggtacaaagacttaggacctagttctgtacttaaggagtcttaaagaaatacacatgttgataatttcctgtaaaagaaaacaaacttctaggtttctgtggttttggtaataaatattctcacaacttcatttttgttcagtctcaattgcttaggtaataaataattttgtatataacgtattcttttcacagtggttacatagacctcttttagagggaagattgagtttgaattatgaatgtttcaaaacagattttaaggaacaggacataaagacacttcccagccatttgtgtacttcagcattattgagcaaaatggtcttaattgcactgagaaaggaaacagtcttagaaaataatgagcttgagaaaataagtaagtatatatgagtatttacatataacataatgcatgaatgaatataattttgaaataatcttgattatactgcagtttaaatctttaattcaagaatcttcagctttctttttcctattttaatgatgagaaccttgaagttacttaagtggtgaatgtgaaattgcaaattagatacgaatatattggaatcttgctataatcttgttaactgtggatcgtaatttggtgttagctactcaggctgtcatgacatcaatgtaaacagatcctgtggcacataccctaaagaaaatgggtgaggctttggtgttttatcaaggattcagaattttctgttgattaaaaaaaaattgatacctgataattttacatatttatggggtacatgtgatattttgatatataca

SEQ ID NO: 101966 - DNA, 1085 bp, Homo sapiens
aactcctcacctcaggtgatctgtctgcctcagcctcccaaagtgctgggattacaggcgtgagccgctgcgcccagctcatttacatatcgtaatattgtaagcaccctaattgtttattaatcttcataccatgacttagaagatatttaatatttttagttctatatcctaaagggttttttttttttagctcataaagttgactcatgacttaaagggttttcagtgtacaaacttgctcaccctaactgtagaccatttctgttttctacttaatttaaaactgccttttttacttgagggcctttatgtgtgagagaatgtgttgatttgttgataaaattttgtctaatacattttaaaatccaggaaagacccatagaattattaatccaaagtaagatatttaaaaatacacgttaatatttttattttttgtctgtttgaacctttttttctccagattacttgattggagacgtatatgttgaaagaatcattgttagacttcatgaaactttattcaaaacaaagaaattatcagaagctgaaagcagtgactcatcagtgtcttttatctgtgatgtggcctataactatttcagctcagcgaaaggatgcttgctaatgccatcatctgaagatttattattaactctctttcagttatgtgctcagagcaaagaaaaaacacatttgccaggtaatagcctactgctcaaatgttttgttgggaatctccggctctgaccttcatagtgagtgtaagtgcccaggctttattaattgaattataatgtgtttgaaagtttaaagcattttgagtaaagggctacagtcttaaacactttcagctctagaaagcaagttaaagatgtacgtagatgttatttctaaagatctcacttgatattcaaagaaatttggaatgagccataattgattaggtggaatcttagtccattcagtagttctggcatgttccttaatttcttgatgtcttagtttcctcatttgtaaaagggggataataatatccctttattatagtaaaaacattcaatctttggtgtatatcaaaa

SEQ ID NO: 101967 - DNA, 3430 bp, Homo sapiens
ccctgggtgcgctactctccaggaacctccacatgttcagctatctgaaagctccctgaatgctgtctttcttgcgtttttatggaggcttcattactaggcatgaatgattaagtaattgccactggtgatcagcttaacctttagctacctttctatccctggaggttggggaggtattgaaagttctagccctttaatcctgccttggtctttctggtgatcagcccccatcctgctatacaggtgctgccagccatcaatcaacccattagcttatgaaatgatatcactttggagattccaaggattttagagttgtgtgccaggagatgggggttgaagaccaaatatatattttatgatattctaccttttctttcagttgatcccttttattgatgcagttctcaaagacccaggattgcaacatgggcagctatttaaccatttagcagaaactctaagttcctgggaagccaaagcagacacggaaaaagatgaaaaaacagctcacaacttggagaacgtactgatacatttctgggaaagactgtcagagatctgtgttgcgaaaatcagtgagccagaagctgatgttgagtccgttttgggtgtatctaacctattacaggtgcttcagaagccgaagagctcattgaagtcaagtaaaaaaaaaaatggtaaggttagatttgctgatgagatacttgaaagcaataaagagaatgaaaaatgtgtatcttcagaaggagagaagattgaaggctgggaattaacaactgaaccttctctcactcataattcttcaggccttttgtctcctctaaggaaaaaacctttggaagacttagtctgtaaactcgcagatataagtattaattatgtcaatgaacgaaagtcagagcaacatctaaggtttctttctactctgcttgactccttttcttcaagccgagtatttaaaatgctacttggtgatgaaaaacagagtattgtccaagccaaacctcttgaaatagccaagcttgtacaaaaaaatcctgcggtgcagtttttataccagaaactgataggttggctaaatgaagatcaaaggaaggattttggtttcctggtggacattttgtacagtgctctccggtgctgtgacaatgatatggaaagaaaaaaagtcttggatgatctaaccaaggtattcctgttgtatatcttttcaaactatttgaataatagatgagtagaatgagcctgcttattgttttctggttgtttcttcactgtgagtgtcaattttaggacaagcaatatattcttgatcatgatttgggaagtatctagggctgctgggtagatgttcagcagtaccagggtgacaaatacttgtaattaaaaggtgaattcttttaatctatacatttaaaaagttggataagaacattttagttttgtattggttacatgggtacttcatttactttttaaaagttttagctgggcatgttggcgcatgcatgtagtcccagctactcaggaggctgaggtgagacattggcttgagcccatgagttctagactagcctgggcaacatacaaaaccccatctcaaacaaaaagttgttctagcagattgtttctaactctttttcttttttcaggtggacttgaaatggaattctcttcttaagattattgaaaaggtatcttagggatttttttttctttttttttttgtatttatgggaatagaaatattataaccgtagtcctatttacacaataaatatggtcagatagtcaggttctgtgttagagaacttcctcattattgtaactttcttcctataatgtgggaagatatttgttcttttcctttcctgtagtagtatttttctggttagtaatattagggaaaaatgaacaggctctggaaaatccagtgtttctttcctagaaggtaacaaaggcagatttaaacattttattatcttttaattaaagctacaactttctgctgttattctagttactttttctactgcagaaatggattggaggttctagctttgggtagaacacatgagaaaattaagttttctctactctggaacactatgtaggtaaataaaaatcttccagtctttgtgtgattgccactgactaagaaaattagtggtaagaataatgaaaagaaatgaaagaacataaacaatttacaaattttcaaaacggcttaagtattctttcctaatgaggatgtaaatgttataactaacacttttccaactgtagagatgttatgactagctacctgaaattcttactcctttttaaagcattttcaaattatttttctgttttcatagctaactcttgaatttgcaagtttttttctattttttaaattgtagtaaaaaaaacacatagcatgaaatttaccatcttaaccatttctaaatgtacagttcagtagcatcaagtatatttacatcgttgtgcagtttccataacttaattcatcttgcaaaactgaaaccctgtatccattaaacagtaactccccattttccccatagttttatttttacaaaataaatacagaatatttattatttttcaatgaggaatatgacttatcaggcacactatttgccttagtttatctagtgccttctctccctgtagccaagttacatgaagagctaaattatcagaaagctccttgataagccttgattcagagcagggggtgcaaataatttgataagagtagactaatgtatccatttccaacttaggaatgtacctgccgtgaagtgcaaatactcacatctgtgtggaagaaaatcctcttcctgagcagtgattggaagttcctagccagtgtttgctgcctgcgcttccatgactcactagcctcctcatctccttacagctaggcagcttctttcattagatatgttcatactggcatatctcagagacatcgtaagttcagttccacaccacagcaataaagcaagttacacaagtattttggattgccagtgcatataaaagttatgtgtacactacagtctattaagtgtgcaataacattatatctgaaaaccaatgtacatatcttaatttaaaattaatttattgctaaacagtgctaatgatcatctcagccttcagcgagttgtaatcattttgctgatggagagtcttgcctcaatgttcatggctgctgactgaccagggtggtggtatctgaaggctggagtggctgtgacaatttcttaaaataaggacaatagtgcagtttgctgcattgattgactcttcctttcatgaaagatttctctgtagcatatgatgctgtttgatagcattttacccaaagaagaacttctttcaaaattggagtcaatcctttcaaaccctg

SEQ ID NO: 101968 - DNA, 3037 bp, Homo sapiens
ctaatttttgtatttttagtaaagatggggttttgctatgttggccaccccagtcttgaactcctggctttaagtgatctgcccgcctcagcctcccaaagttctgggattacagatgtgagccaccatgcccggccttcatcctcattcttgaaagacatatttgctgagtacaggattgtatgttggtagttatttttgtgttgaagatactattccatgtcttctgattaaattattgatgtcaaaattaactatcagtcttattgtccttcttttgaaggtagtttatctttctccttgggctacttttctccttgtgttttcccagttgcataatgtgtctttgtgtggatttcctttatgtatcctgcttgggatttgttggactttttgaatctttgacttggtgtatttcattggctctgtaaaattctcagctattatctctaggtatttccttcctcattcttctcttgttttgggattctgattaaatagatattaagcctcactttatcccctatgtctgttacgttttctttgttgtttttcatctttttgtctctccatgatgctttgcggataatttcttttgctcggtcttctagttcactgattctctcttatttgtatctaacctccagctgtcttagtccattcaggctactttaacaaaatacagtcagccttccatatctgcaggttctgcatgtgtggattcaatcaactgtagatgaggaacccgtggatatggagggccgactatattacgccattttatgtcagggacattttatgtaattcctgagaatttggtatatgtgtgggggtgggagggtgggatatccttgatccaatcccctgcaggtaccaagggataaactgtaccttagatggagtaatttgtaaataataaaaatttatttctcacggttctgtaggctggaaatttcaagatcaaggtgccagcagattcagtgtctggtgagggttgctttctctgtttcaaagatggctactttttgctgtgtcctcacatggcagaaggagtaaacatggtctctcatacccttttgtaagggccctctgatcctattcatgagggtagtgctctcaagacctaatcatctcctagagtcctcgcttcttaatactatcacactggtgattaagtttcaacatactaattttggagggagacattcagaccattgcattgttcttaaactacgagttgagctttaagttttaattatttttagttgagtaattgtgcttgatctttttccgatctgctctgctttttccaggatcctttttcttacaagttttttaaaacttttgttcctttaaatataataagcattgtattatagaatttgtgactgatcattctaagatttaaagtctcagatcttttatttctcctgattgttgctcatggtgtcttattttctgtttgtttggctataatggaggccccaaatgaaggcttctgctactaaagaggatttgtgtttgcttcagtcaaagaaagagaaagttgaattaattctttcagccttcacttttgccttggtaattccttatgccttttcagccatttcatactctaagattttaaaaagtattttttctagctattttagttttcttagtgggagggttagtgtgaataatctactattaccataaattaaaaatcttatcaagttttactaggttttaatttaattcagctttgcattcttttagattcgctcagcttattttgagttagtctctgcattgtgccagcgcattccacagttgatgaaagaggaagcatccaaagtgagcccatcagttctacttagcattgatgacagtgacccaattgtctgcccagctctctgggaagctgtactctatacacttacaactattgaggtatgtaagagaggcacatttagtacactgaggaatgaacctatgagataagaatatccaaaacttactgggaaaatgctttcttggaaataaaataatctaaacttggcataaatcttaaagtgactaaaatggcatagagtttttattttattttgttttgccagtattaattattctttaaaccttatgtgtcctagtgcagtcaccataactgaattttatatttaagatgaaatataattaagattgaaatataattgtcccttttagaaagcagcttttatagaaatagaagttaaataattatttctaatcaatactttattgtaagcatgtcgaatatatgatcattatatgtaatacatttataatttcagttttagtttttaatggtggtgaaagattttagctttttttaggtaaaatacttggtttttctttttgagagcctatatgttttctcttttaattgagaaaagtatgtttatgatctctaattactactataatcttttgtttggttaggactgttggcttcatgtaaatgcaaaaaagagtgtgtttcccaagctatcaactgtgattcgtgaaggtggtcggggtctagctactgtcatatatccttaccttctgccattcatcagcaagctccctcagtccatcacaaatccaaagttggatttcttcaaaaatttcctcacgtctctagttgctgggtaagtaatttaaatttttgatttttaaaacaaaacagattttcttgtttttatactcattttctttcttacttaaatttctccaagttgttttactattcattaaatacttttaaagttttcagagaattacaattgatatttttttcttgagtacgttcaagacttcagtggtagcacacagcaggaagttagataaataaggtaaagctccttgttggaaataggtcaactaggctatttttcaaattagccatttttttaacagcagaatgtgctaaccaattgcaccacagacacatgtagccattttttattttttatgttgataaatacaaatgcctaaatgcagaaaattagccagtgaaatttttaaaacatcaaca

SEQ ID NO: 101969 - DNA, 1006 bp, Homo sapiens
ctgtgtgacatttttaaaaagaaggaataatatatgtagagatgaaaataacataatgctgtatgtgagatgctgtattaagtgcttttacttgcaagttgtcctgctatttaacttgaattacctgggagctacacatttggttgtattagaaagagatgtttttatatgtttccttctttactttttgacagttgtaggaggaagtattttaaggtctggttgaacatagttgaagaatataaatagttctgttgaaagagtagtaaactattttgtttacttctatattctaatcaaagttttaagagtccttgagggaaaatagtcttagatggcttgatatccattccctgggatcacccttgtacatgctaccgagagcggtatactttctcacttattgcaagccttggcttttcgtctactttcaccttgtattagtagtaaagtatgtgattaaatttctttgtatgtttacattttgaggggcgttggcacaggggaaatagaagatagaaataaagcaactttggtagatatttaatgataaaacattttaaatagaaccaccagatatatagtttggctaattctaaatttttaaatatatttattttgttttatatcaagaactgttccagaggaagaaagagaagctaaattctaccgggttgtaacttgttccttattggcattaaagagattactttgccttttacctgataatgagcttgattctctggaggagaaatttaagtctcttttatcacagaataagttttggaagtatggaaaacacagtgtacctcaggtatattaatcttttttatcttaagacatttctctgattccttacccccatcttcttagtttatgttttatgtttattgtttatacttagaactctgcaagcacatctgtgtggtaggctattcatttactgaattacctctcttactagaatgttactctgtttttacttttttatttagtttgggcctca

SEQ ID NO: 101970 - DNA, 1037 bp, Homo sapiens
cagcatttatgaaaattttcctgcatgtgatacattctgattttaaaaattttaatcaatttctttaaaattctgtcatggtccattatattgatatcatgagccactaatggattgtatccatggtttacaaaacattctaatgtttaagaaacagaataatttctaggatcagtattgatggattcttggcaacaaaaccattaatctttggggaactttgcaatagatgaaattttaggctaggaaaaaagaaaataaaataaaagctcattctgaccatgggaatagccaaggaattataaagttaagttttgaacccttcctggactctgacttttttctccgtaattttcttatcagccttcaaacagtggccgagctgcagaactccttgccaaagaacagggaacagtgcctggatttattggttttggaacatctcagagtgacctaggctatgttcctgctattcaaggagctgaagaaattgacagtcttgtagattctgatttccgaatggtgctgcggaaactttcaaagaaagatgtcaccacaaaattaaaagcaagttttcttgttttcataaaaattatcaagaaaatccctttgttaaaataaaatgtcattagcatgttttatgtaaagaaaaatgaacaatttattgctaagttcttttataattgtacttttttctgacacagagtcttaaacttagttgatatttattttctaggtcgtaaattagtttgttacagtgaacttttttaaagtgctttggaattttggctgtatagtttttcccattagggaatgtaactttgaccttgtaactttaaatgaggtttttttgtttgtagatgttttatttttaaaaaaacaactgaagagtttctaccgtagtagcctgtgaaagagctcttcaaactagtctcatatggcataaagagaaatagtgtattctcctattacataaaatagacaaagcttccagaacagaataatctatagccagttattatggttgttaatcctaa

SEQ ID NO: 101971 - DNA, 2264 bp, Homo sapiens
cttccagaatgtgagctactcaaagaaaacagctgtgacttggtcaattttgggctcctgagcgtctagcacagtgcctgccctatagtaggtgtattattgactaaatgaaggacgttttctacaaatctttaaagataaagagaatcataagtatgataaagggccttaatttaaaggaaatagccaaataaattgaaatgaatttgtagtgggggacagtggtggttatatttaggacttcaagaaagcgaaacttcacaaatttgtgtcaaatctctttctcacatatttatctcatattattcaaatatcaaacaattttaagttcagaatatcttaacagtttatagagtaaatttcatttttgaaatgtgaatcgagggtaagttttgagattaactgaagaaagtcatttttgaccttatatattccttgtctattatttgttttaatagaacctgtgtgcagacacattagaaaaggattggaacaaggtaatttgaaaaaggctttagtgaatgtggaatggaatatctgccaagactgtaagactgacaataaagtgaaagataaagctgaagaagaaacagaagaaaagccttcagtttggctgtgtcttaaatgtggccatcaggtatgcttacgttttaagatcaatatgggattttagaaaactctttgaacttactttagaaggtattacctgaaagtacagtatggataaaaggatactagtaacatagatcatgttctctggagaaccagttctgagatgtgtgtataggtggtggagtgttctctggtaccacaccagtaaaagtaagggaagcaagattaagcatagggagaagttgaatgaagaggcagtggcaacagggtctcagccaatcccacagtgatctcttgcctgaattgaggcaaggagctagacctttctacctgtgcatagaccagtcattggatgtggcctgcccctagagcaggaagtaaccttgggcaaggcagctcccttttgttgagactgattcctggggatggatggactagactgtgagctctcagccggccacattctcagcacctgggggaatgagtagtaccttgatctttggcagtgagggcatgtctggctggcacatcacagtatctactctaccagctcacagttattaccgtggtactaaagtcagggtctctcagttacccttagtggtggcaagttaagcttatatgttaggaaattgggctactaggcagtagtcatgaagtcatgaggcttcaagatcaggcagatagccagttttttgttgtttttttgagatggggtctcactctgtcacccaggctggagtgcagtggcacaatcttggctcatggcagcctccacctcccaggttcaagcagttttcctgcctcagtctccaagtagctggaattacaggtgtgtgccaccacgcctggctgagttttgtatttttagtagagacagggttttgccatgttggccaggctggtctcaaactcctgatttcaagtgatccactcaccttggctccctcaaagtgctaggaatacaggcgtgagccactgcgcccagccaggattttttgttttttcacgttttcaaattgaaaatcttattgaggttattatagatcatgtgcagatctaacagataatacagagaaatccctatgcatttttctcagagtcccccagtggtaacattttacaaaatgagtataatatcacaaccaggatattgagattgaaacaacacaccaatcgcaatcagatctcctgagtttgacttctttttttgtgcatgtgtgtatgtgtacatgtgtattacattctgtacacttttgtcacctgtgtagattattcaccaccacagtcacgatactaaatagttgaacatcacagggatctcttgtgttgcccttgtataatcatacccacctccctactgccaccactctctgcagcccctggcaactaccattctattctgtatttctaaatttagtcatttcatcaaaaatgttatgtaaatggagtcatacagtgtgcaacatttggggattggcttttgcttttttctttttttgaggcagggtctcactctctcacccaggctggagttcagcggtataatcacggctcacggcagccttcacctcccaggctcaagtgatcctcccacctcagcctcctgagtagctgggactacacctgcatgccaccactcctggctaatt

SEQ ID NO: 101972 - DNA, 1112 bp, Homo sapiens
ttttattgtcacaagtatctttgtcagagccagaattatttgttttttactttaggattgatttttgacccacagaattcattaaaaaatttatttcatgtccatgttcttgattgttttatattcttaatttcacaaggtaagatgtgttcatttgtaaagaattttcgtgcagtaaaaaagggagatttataccaaagcacatactgtttggtttcatttatcaaactaatgcttactttaggtctgagtattttttgtttactgggttttgtgttttttttctggatggcaatttacctgtatctatttaaaatcaaatgggtgggtgggttggaaagaatgacttcaggtaaactcacaaactctagtactgtttcccaagtatacttctgcattcgatatgactgtattacacattttgctaaatcttttctttttttaaagcagagaaagataatggaaatattgaacttgaaaataaaaaattagaaaaagagagtaagaatgaacaagagagagaaaagaaggaaaacatggctaaagagaatcctcccatgaattctccttgccaaataaccgtgaaaggactcagtaatttgggaaacacatgtttcttcaatgcagttatgcaggtacattgtcatttttttccctttaaaaaagctgtccttttcctcatagaatctgctacttacattattgagttttttccacctgagtaatttatttctatgtatccaaagaaaactttttttttttttttttttttttttgagacagggtctcactctgtcactcggctggagtgcagtggcacgatcgtggctcactgcagcctctacctcttgggctcaagcagtcctcctaccttagcctccagagtagctgggactacaggcatgcgccaccactcccagctagtttttgtatcttttgtagagacagggtttcgccatgttgcctaggctagtcttgaactcctgggcttaagccgtccaccccctttggccacccaaagtgtttggattacaggcgtgagccaccatgcctggccaaagaaaacttaaggaaagttttattgcatgacagtaagagagtttggtgagcac

SEQ ID NO: 101973 - DNA, 1730 bp, Homo sapiens
agaagttataaggaggcattacatctgtttgctgtgtgtgtgctctgtttttctatgctcgagtgttaagcttccttcttgggaatgtgtatatgtttgagaagccttaggcttacattattatttttaacatctttaaggtgacttaagagctgtgtaaccaaataaatattaccttatccatttttattatttacattttgctttggctctttcaattcttaggtagtaagtgttccagataatctaaaactaaaatagtagagctgaattctgcataagacagtctgtgaccaaacagtttctatctcttttgatgtacattttaaacttttaaatggggcagttctgtcaggaacattggtagtatatgttaactaattagattttagtaaagtcagtgattccagaatttgactgaagaaagtaatttcttttcccatattcaggaaccattagaaataaaccttgagcctccaggccctcttactttagccatgagccagtttcttaatgagatgcaagagaccaaaaagggggttgtgacaccgaaagaactcttttctcaggtctgtaaaaagtgagtatccacttcgattgtgctttcagtgcctcagtgagatgctgagaaataatattaatattaaatagtaaaatataaaaatattaatagcattacatttagtcaaccctctatatacaaaaggcatagttttttttcatttggattttaaaatatattttatgtgatagttaaatctcccaagggtgttaatggactaaacggaaatttgtagaaaccagaactctctgagatttgggatatgatcctaagattttctaaaaatagcttcagagcttagtagactgaagattgcttttctgtctttttgtttttctctagagcagtgcggtttaaaggctatcagcagcaagacagccaggagctgcttcgctacttattggatgggatgagagcagaagaacaccaagttagcatgttatgaccattgtattttatgatcttatcttcataagctttctgtctcatttgatatcttacgagttaaaacaatgaaagctagttattaaggccatcatactttaaaattttttcttacaccagctttttcaactagtatgttttcaccattagaatgaatccagagaattagcagtaattctctttctcatgatggcttaagtttagttgatgtttacagcattaatgttctttaaagattctgttgtactaacctatacgaagagagctgccaaatattggaaattgtttctcccaaacccaggtgcagcacacccttacttttaattctgagtctgatttaatactgttttttgaacctaggaagtattttcattttgtaagagtcagggaacattggttgcattttaaaatttttgttacttgccaggatataaaaaaatgtatttggggtatgaattaatgagtactaataatagtgataataactaatatttatttcgcacttatttttatgccaatcactgttttcagtgttttgtattaattcccttacttcgttctcacaaagtttctgtgaggtggatactgtgattttttcctattccatagattgagaatctaggctgtagagaagttcagtacctagtttaaggtcccccagaaataatggagctgggctttaagcactggagtcagaccctgtggctgtcatgtaatcattgtg

SEQ ID NO: 101974 - DNA, 1276 bp, Homo sapiens
ttaaagaccctttgcatagtgtaaacttgtcttgcccatgacatctgtgtaaatggaactagaactaacttttggattctactcatttttaaagaatgttgcagaagaaaatacaagggtactctattccttatatggagttgttgaacacagtggtactatgaggtcggggcattacactgcctatgccaaggcaagaaccgcaaatagtcatctctctaatcttgttcttcacggtgatattccacaaggtaagatgtcttggaaaattcaggcactcagcagattacggcaaaaccaaaaagtaatcaacttgaatctttccatttatgtttgatttttcattttctcatgacagattttgaaatggaatcaaaagggcagtggtttcacatcagcgacacacatgtgcaagctgtgcctacaactaaagtactaaactcacaagcgtacctcctattttatgagagaatactgtaataatatcaaaagcactttttctggaaacacatttatggcttttataatggctgaaataacgataaaaaaagactaattaaaatcatgttcacttaacattaaatacatgccagaagaaatcatgtttatttaaatattgaagggaaaaatacctaaaaatgtacaaaggttttatattgtcatagtggtttttattcctgctttgtttctggaaaggaaatcctgaattacttaagtactttgtgtttaatatatctgggtgatggatcacaacacatcaataaactgacttaccctaaaatcttgttttattactgggaagattttaacttctattgacttatcctactaggtaacactttaaaaaatatttcatcagactggctaatgaagcttcattacaagtgtgttaattttttttttttttttttttttttttttttgagacggagtcttgctctgtcgcccaggctggagtgcagtggtgcgatctcagcttactgcaagctctgcctcctaggttcacgccattctcctgtctcagcctcccgagcagctgggactacaggcgcccgccaccacgcccagctaattatttgtatttttagtagagacagggtttcaccgtgttagccaggatggtctcgatctcctgacctcgtgatccacctgccttggcctcccaaagtgctgggattacaggcttgagccaccgcgctgggccatacaagtgtgttaattttataagcatctatattgacagcagaatataaatgggagcaatgtttctttataa

SEQ ID NO: 101975 - DNA, 1171 bp, Homo sapiens
gtgttaaactttgtatatacttatgtatcaactactttagattataatggcaaagctggcaggtgggcctaaagctcctaaaccacaaggaaattgggacagagatggttggcaagacacatctcatatataaatagcaaatcaggtgccaaactgaccgacttacaccagtgatgcatgcacatattttcactttcagctttttgagttattgaagtgcatgtcttggaatgttcactaatctctgtggattttattgcggttatccataaaagcagtaaactttctcatgcgctgaaagtttacaattgaatttctaacaagggagctagcaaactctgtgctgtagtgttttatatgcagtacataattataccaagaagactgcttaatcttaaatcatgctaatagaagcattcttttcattctaaaggttaagttgataagcatactcttgtgtgattcttttttatgcagatcatcatggcaaaaccagctggtgggcccaagcctccaagtgggaagaaagactgggatgatgaccaaaatgattgaaattggcttaatttttactgtaggtgaaggctgtatttgtagtagtactcaagaatcacctgatgttttcttattctccttaaattaagagttattttgtgtttgtattcttggctggatgttataataaacatattgttactgtcaaagccttattgtctaatgaccacggttattggctctaaatgacttgtgttcctctcaaccttgttaatcacattagctgtgggacttaaggcaagtcacttatgtaagtagaggcctattacccatgtatatctggcctactgcctgtttgtgtaaataagttattggaacacagccatgctcataccattacatattgtctgcagttgctttctaacaagggagtggcagagttaagtatctttatttttgacagagaccaaatgggcctacaaagcctaaaatatttactatctggccctctacaggaaagtgctgccaacacctggactagatttccagtgtttttgtcacagctctggaattcctgactcaaggtgacttgtttcaatagcaattaataatttgttgaagacactcgacttagcaaagtacaaaaaaaatgcttagaaaatagataaactgacat

SEQ ID NO: 101976 - DNA, 4010 bp, Homo sapiens
caggacacctacctacctgacatatttaaaataaaagcacttctcggccgggcacggtatctcacgcctgtaatcccagcataggccaaggcaggcaaatcacgaggtcaggagttcaagaccagcctggccaacatggtgaaaccccgtctctactaaaaatgcaaaaattagctgggcgtggtggcgcttgcctgtaatcccagctacttgggaggctgaggcaggagaatcgcttgaaccagggagtcagaggttgcggtgagccgagatcctgcctgcactccagcatggtgacagagtgagactctgtctcaaaataaataaatagataaaagtacttttccacctaagtacttatcaaaagcagatgcatctgttttgacagggggttctagaagcaagctgagtttctatttcacacatacagtattctgctgcttcataatatatgcacatatatcttcatatttttttgccaaacctttatttcttcagtcaactattatctaatgactttgaacaccaacgtagtgaaatgattttaaagggaatgtttacttgttttgccagggaacagtgttgataaagactgctgaagaattgatgaattttagtaagggagaagaaaacctcatggatgcacaagtcaaagctattgctgatactggtgcaaatgtcgtagtaacaggtggcaaagtggcagacatggctcttcattatgcaaataaatataatatcatgttagtgaggtaagaaaaagccgatttttttttttacctatatcataaatggttttttggtggtgaaaacactaaacgaaatagaccatgaagactgttaataaagggaaagtaaaggtactaggtcaaatagcagaaggatttagtttggggaggggtcaggaaacacctctgagaaaacataaatttaagctgagagcttgaagaaccaattaccagataattgaagagggaaaagcattccaggcaaaaggaacaacttgtccaagagactagacacaagcttggtgcattgcctatcagagtatggagtcaggaagatcccttttaatccatgaacacatttatggtgcacactagacaacttaacccatttctacctaccaccatccctagtacctaataaaatgtgcaaaataaatcactcttgttcacagaacattgattgcacaaagtaaagcaaaaattttctatatgctgttgagttttgtaagggtttctctggtgttttagaactataaaccactgacatcctaaagtgacttccattctcccaattctagaacaatgccatacaacacaggcttaagatgtggtactattggccagctggactcactcagagagtcaggaatcagcttcctggccttagtgttcattgcaatccagacatgttctgagttaaaatccattgtcaaaggaatgtgacatgggggctggtatacaggttcctctttaatttgaactttatatgctatctgaaattgattaaaacttttattaaggtctttgtgttttttaaaggctaaactcaaaatgggatctccgaagactttgtaaaactgttggtgctacagctcttcctagattggtatgtattttggaaaacactaaaagatagttgaacaagatggaatttttattacaacagtcactttcttacagacacctcctgtccttgaagaaatgggacactgtgacagtgtttacctctcagaagttggagatactcaggtggtggtttttaagcatggtatgtaggaatggtaaaacatgtttaagtgtagggctttagcttcttgtatttaatcaccaaatatatttaattttttgatagaaaaggaagatggcgccatttctaccatagtacttcgaggctctacagacaatctgatggatgacatagaaagggcagtagacgatggtgttaatactttcaaagttcttacaagggtcagtatcagcaatattcttagtagtttgtaaggtctgagtaatttgtatggtcttaaaagtacagtttgcagactcttgcacatcatgagaacttcagaatgagtggtttatatgaaatgaagcacctgtttttgtttttacctaagacttaagtgtccattgttagtgaatatgatagtttccaaaaaagattgtacagaggagttaacagcaaaacagagctttaaaaaaaattgtttatcgttgttttccattgtaatgtactgttagttgctaaagcagttcttagtgctatatctgtggatatgcaaaaatgatacggtactattcccattcttcactttggtccttttcatacaccagacactgtgcactaagaaaatttgccccacccactcatttttaccaaatttgtaatatgtatttgagtaacaatgactgataaaaactcctgtttggtggggtactggaatgtgaaaagattagaaaactgcaaactgatttttagtgaatttgttttgtgttcattttttttttggtgggggcgctacatacaggataaacgtcttgtacccggaggtggagcaacagaaattgaattagccaaacagatcacatcatatggagaggtacagctttttctgtataaattgactttctttccattgcttgaataaaagacagtaattaacgcatttttgttttagacatgtcctggacttgaacagtatgctattaagaagtttgctgaggcatttgaagctattccccgcgcactggcagaaaactctggagttaaggccaatgaagtaatctctaaactttatgcagtacatcaagaaggaaataaaaacgttggattagatattgaggtatttgaaaaaacactgaacttaaattgctttatttggggaatgcacaacctaaaaatagtatgagtttaaaagaaatatcaatgagaaacagtgttctgatttgggagcagattattttcttagtttttacataggttgtctgatggaggaacgtttcattttccttctgttttattgatagtcttttgttctgtagtgtgtagtcagcccagttctgtatccattgattcaaccaaccacagattgaaaatatttggaaaaactaaagacatttaaaaatacactataacaactatttacactatgttatataattaatctggagacgatttaaagtatatgagaggatgtgcatagattatatccaaacaccatgccattttatgtaagggatttgagcatccacagattttggcatccttggaggtgctagaaccaatcctcacatactaaaggatgactctataaggtaggactgtgcttggttactttccagtactatttaaggagctatgtgaggctttttgtgggtgtaaacattttcacataaaaggattttaaatgaaaggatgaaaattgtgtttgacaggctgaagtccctgctgtaaaggacatgctggaagctggtattctagatacttacctgggaaaatattgggctatcaaactcgctactaatgctgcagtcactgtacttagagtggatcaggtgagcaaagtgaaattttgatctttaaaaatactcatttgcatactgtttaatagtatattttcccagaactagaacatagcatagttctaattcaaaggattcttagtcctcacctattagagatactatgtgcccccctccaatttttttcttctattataaattgtattgaatatataactttcaaaccttttagccttagaacccatttgtacaaataatttagagagtaaatttaatatataatactaacatggaatttggaaggaccataaagctctcaagcagacattgcagaccaccagcttgaaggaaaatggagtctctagctgtctgcagataagaggactgggcattgaaaattttttctgctatgacaaattacagcttgagatactaaaagatgttaaaggtgtttaaaatcatatttctaccctttttttt

SEQ ID NO: 101977 - DNA, 1047 bp, Homo sapiens
cacgtgttctatgtttgctgtctccctccacgtactgccagcttttcccattaaatgcaaccttgtgagaacagaatctttgctttgttctgtgttgtatttgcagtactgacagctgtggctggtatattggcaccaagtactaggtaactgaatggctaagaccagttctctgcctttggttcttcccagtacatggaaggacctcccctccctaaaagtagctcattccctcagtgatttctgcctcgagcagaagggtgtgctgtatgtccaccactccaccccttatcccaggagtcactgccttggtttatgactttattttagaaagggatatttttggtatatggagaatcaacagtttgaccgtaatgttattttcaggagattgctgatgagtttggtattcaattccttagggctctggtatcagttcctcttcagtattgcatggcatggtttttaagaaggaaaccgaaggtgatgtaacatctgtcaaagatgcaaaaatagcagtgtactcttgtccttttgatggcatgataacagaaactaaggtatgtagacttcaaaccttaaaagtaataattggggttgcactttcagattgtttgagttagctcttaaaccagtaagtacttcttaaaaaactgaacattgcaggatcttacctatttttttatgccagatttatagtcttcaaatatctaattcaactactgaacattaaactggaaatataaagatggtggccgtattatttataatctgacacacagcccttctagtagagcttatacattcagcaagtgaaagaatatgagaatgtgagtattttgtgtgctcttcacgaaaataaagttgacattctgtagcatcctaaaacaagataagctaatgtaatttgaaaatggtaagtatgtttctaaaaatacatgttagaaagtttgaagtttgtgtttatagtcaatagtggctgacttcatctctagaattcttgaaatccaagttgttgatagttttaaaattttgtagcatgagggg

SEQ ID NO: 101978 - DNA, 2151 bp, Homo sapiens
aaaaaatacatattatatatataaattcttaaagaacttaagttaaaagttaaattttaactccacaaaacacttgtacaagggtttgtcactgtgaatgttaatgttgcacactgatgatctcaggagttattaaagtacagtggtgataccgtcaaaataataaaatcacagggctgactttttatagttttcttgttgctctcagttcttactccttggcttgtttctgtaaaggtatctaaaattaaatcctaagaataaaatccacataaaattatgttatatttgaagaaaagttttatactcccccttttctttaaatcacaaatgataacccttacaacaagaatatatagtaaaatagatattgagagtcatgaccaagttaagtggtatctattttagttctcctgaaggcttttaaaaaatatctaggtttggtggttgtaattactttgttttttaatttagtgaaatatgatatggtgaaacatatgtgtggcactgtatgtgcaggccaccaaaagaggatgcactttgaaattcttatttatagtgatacatttgtgctgatcggcataaagggacttggattttttcttgtgaccacactataagtagcgtatagcagtgtagcagtgtgatcagatggagttacctaatctacaagaaaattgagtctatttaagaaatggaaatgaacaattttatgttgctttaaggatcagatgtttaacttgatattaccttttctactaggtacagcatcctgctgcaaaaatgattgtaatggcttctcatatgcaagagcaagaagttggagatggcacaaactttgttctggtatttgctggagctctcctggaattagctgaagaacttctgaggattggcctgtcagtttcagaggcaagtgttcatttataatttactcctactaaatttttgcttacatatacacctgcttaaaacataaactaaaatcattattatagtagtagctaacatgcactgagcagtttgctctgtaccagccattatagtacatatgcttcacatgctgtatcattttagtctcacaaaaaccctattagtgaggccttataatcccattttatctattttttttcccactttattttagatgagaaaagagactaaaattagaaaaatcttgcccaagatctcatagctagtgagttaggtagagttaagattcaaatttgggctgtcatctaagcctccattcataactagtagagtctactatatgttttattccgaagtatattctttgtcattttgtatcaaaaataaacatccatatgcattgggttaccaaaataagctactttaagtcatgtcagaataggaaatgttgtttatgttttaggtcatagaaggttatgaaatagcctgcagaaaagctcatgagattcttcctaatttggtatgttgttctgcaaaaaaccttcgagatattgatgaagtctcatctctacttcgtacctccataatgagtaaacaatatggtaatgaagtatttctggccaagcttattgctcaggcatgcggtaagtaaatatcagtaaatgaaaagatccaaaataaaaatacctttaacatgactagatactttctctgttgtcccaaaataatcttttgatatgtctcattttcttaacagtatctatttttcctgattccggccatttcaatgttgataacatcagagtttgtaaaattctggtaagtagaaaatgcattaatgctacatatctaggtcagtttttttgtgtgctttttttgtttttttgtgcaaaaaaaaaaaaatgtgttcatctaaacctaaatgttacttcatgatttgaacacttaggactttttttgaggcattatttttatttatgtacttatttatttttgagacggagtctcgctcttgttgcccaggttggagtgcaatgacatgacctcggctcaccgcaacctccgcctcccggttcaagtgattctccagtcccagcctcccgagtagctgggattacaggcatgcgccaccacacccggctaattttgtatttttagtagagatggggtttctccgtgttggtcaggctggtctcgaactcccgacctcaggtgatc

SEQ ID NO: 101979 - DNA, 2001 bp, Homo sapiens
tgataaattctggaaaggtattctacttgaagtacctcataccctttctctaattagtcttagcatggttccctgtacttttcactacttttaataaaaaaaattttaagtcttttgatgtgtaagtaggtacctgcggtcccccaaaatgttatactttattcattcaactagagaggaaatgtatgcatcatttatgaatatcaaatgctgtgttttacattaaaaaatcttgtttgattgtctcaacaatcctatgagttaggtactattataattacttcattttataatgaagaaatgttaagaaaattgcccaaatttaaaaagagccagaaagctaagatttgcaaccagccctcttgtgccaaatacctaagctatgctccctctttattagaggcaagatataagcaaagatatcttgtatttgaaatttttgtttcactgtcctgtctaattagcggggttttttgtttgttttttttaacagcacttttcaggattagaagaggctgtgtatagaaacatacaagcttgcaaggagcttgcccaaaccactcgtacagcatatggaccaaatggtaatttctaaattaatatttgtaaagatacagtagtagaatattgtgtactacgtcttctttcagacttgttctgaggatgttatggtatgacttcggaagttaatttgatagctcaatgatagttcatttccaatttttagttatttctaattttcaatcaactcacatctctttagaaaaatgggggtcaatatattactttttatcctgttgagaggatagaaaaattataacactttgactagtaagatagtacctaatgttcattctgacaaacactaaatataaaagtgacatagtttaaggaagaaaattctctccttcctcttgccttctaccaccaattaaatttaaatgatacagtttcatggaataaacatacaactaaatatactaagtagattattttggcctttttacatgttaatttctgttgagcacttgctgcatgacagtcatgttgcaaacagaagatagaaattggcaaaaatgtgagatttggcatcttacgtagtaaatattgtaggacattagaaagggaagaaagaatatgggtctgcagtcagagaatgcccatggggctataagataaacttgaagaatagatagtatgtgttttcttgcaaagctctttttttaatatacaaatttataatttcttaactagattttcctgggtatttggggaaggatttgattaataatggctttctttttctttttttaactgttacttttgaggaatgaacaaaatggttatcaaccacttggagaagttgtttgtgacaaacgatgcagcaactattttaagagaactagaagtaagttgtttctttaaaaagtcaagaaatattttggtgacatcaaaattaagtagattttaactagaagaaatctcttatttcagattggataagggactatttttccagcttgaaaatttattgtacagattgttctaattataaagagtcctctttagattgaatgttttagccactgaaatcttaaaaatctctcaagttattaatttatggagggattggttgtgatacattgctaattacgatatgaaattgattaccattgtcttcattctatagggtgactctgaagtgaattattccacagtgcaaaaacgtatacatataacagtggtttttaaaaagatccaaccatttggttttgtgaaaataaaaacaatcagttgatggcattttactttgttcagctttagttttactattagaatctataaaatagatactgcctgccagcagggttataaggaaggtctggcacctgaacaggcagagagagccattcctcattcccgccttgtaattaaaggataacatattcaacctcagggaattttcctgaagcttagcccttgaaagcactagaacttaat

SEQ ID NO: 101980 - DNA, 1744 bp, Homo sapiens
tgcgcattcccagcgcttcctatggtgcccaacacagagcggacgcctagagacaattttgggggatggggcagatgctctgcctcgggaaaaaaaaagcacacctgccctgacgttggtggctgggtctggaagatacgtggaaattaagctaaggatgtgtggcttccagatcaaaaaccgcaaaaatctaacgccgtgactactgactacggtcagagagcacagactggagcaacctctcacggcctgggctgtctgcgcgtgcgtgagccagaaacccgaggggctccctgggcccgccctatcgatcgacccgatcggggatcgtcagcttggttctggccacagaggttgctcttctcgcgatgcttcagacctggcggcagggaaagggtgggctaattggagagccaggaagagcgtgaggcggccccacgctgctttcccagaaggctgtgcgtgctcctcgcttcctccgcggtcttccgagcggtcgcgtgaactgcttcctgcaggctggccatggcgcttcacgttcccaaggctccgggctttgcccagatgctcaaggagggagcgaaagtaagggctgaaggaaaggaatgaggtgggagcgtcagcatagggctgcggcggccgcggcgaagtaggagggcctactaacgggctgagcgtgctgccctggctcagcggccgggggaagagaagattccagaaagggaggtgattttggaagggctcggccaccggagcctgcgggcacttctcttcttccgcgaccgggagaaggccgagggatcggcggcacgatcgacattgtacaccttgaaggtggacggatgtgaagccgcgcgtgcgttttgcctccatccgtaaatggggctaaggcccgtcacccttaaaggaggttgtgagggtgaaattgaataacgtagatgaaattgtcttgagaactgcgacgtcgattatcacatagctcgcgagttgtaggatggggaagaacgagaactagccgatccagagaagagagtgggaaaaagggccgggtcttggttgcttgcttcccagtgagaaacatacggctttcagcttagttgacagaagccatgcgttgtagccaaatgagttccggtcccaacttatgttagctggcttaatctaaaatgtaactttcttgggttttgtttccttcgtctttaaattatggagattggaccaagaggtggtgtctttgagttctgtgtaatctgcaggataagtgatagaggggtgcagataacacttttgtttaatggccttttcttgaacgttagttcggtagcatagttttaaaaaatatcttactgcactattgataaatttgtctcttgtgctattcaaattgcattcctctgtgtgtcctccagattttgttaattcaagaaatagatcagtgtggttgaatttaaggttttatgcgaggtacggggagcattaacagtttaatagaactaggttcatgtttgtaggatgcacttttcaaataatgtcggtatagtaagtaaatgtcagggttcaaggtaaatgttggtggaataatcttttgaaaatgatatgggctgattcccttgaaaaaatcaggctgagataatagcttccaatttgggtttttttcactaatacagttttggaaaactcgtgtatcacaaaacattatttgtcattccagtgctagtagttttttacagaacactgagctatt

SEQ ID NO: 101981 - DNA, 1018 bp, Homo sapiens
tgatgcaatcatagctcactgcagcctcaaccccctgagctcaagcaactctcccacctcagcctcttgaatagctgggacgacaggtgcatgccagcatgcccagttaattaaaaaaatttttttaaagagatggcatcttgctatgttgcccaggctggtctcaaactcctgacctacagcaatccttccacgtcagccgcccaaagtgctggtattacagagtcaatatcagcaataaaggactgctaggaggaaaattgctcgaactcgggaggtggaggttgcagtgagcctagatcacaccattgcactccagcccgggtgacagtgcgagactccatttaaaaaaaaaaaacaaactgctaggatacattgttaaattgggaaatatggtaatatcttatatttataaatacatgagcttggttttccaaggattgttaatgatcgttattttcattaagactttactgaagtggaaattcattttgcaacatgtcttttcccaaacagtctttattttcaagcaagatatattgggccaagtgaatttgacccaagtagttagctctccattttttgatgattctgttgagaatttctttctcattatttcataaagtgtagctgattatgttgcctctagcttggctggcgtaagctagatgcaaagagagacgctaactaaggtattttaaaagacagtttttctttattggagtcgttcagacactgcttaaggtttgaactccaaactgaacttctctctcatctccagaggaggtctccctggatcaagtttgggagaatttgtcttaagaggcgtgatgagaagagttgctgaaactgttattttaaatcatatctgttggatggagaaagagagtcaaacattttctaggattataaactcagcattggctgaatccaatttaaagaatcgcttctggcttatgaccaatgatgtacgagaggtttgttatatttttactgattttttttttcttctccgtgt

SEQ ID NO: 101982 - DNA, 2407 bp, Homo sapiens
ggcggccgaaccccctgcactgccggagctgttgtttacccgcgcgcgccgtactttacccggggcgggcgggggctgggggccgcggggtccctgccccacccccctccctgccctcgggcgccagcccggcccctcgcccgcggcccgcccgggctgtgacacatcagcaccgccctcgcggctggggccccgtattgtcctccgccgcctcccaccgcatgcccagcctcgcgtctactcagcccggtggctgtcgcgcgtggaatcgcgtaagaaaagccgagtttgtggctggggagagaaggccaccgtgctgagctggatttagcgaagactggttttggggaccggagagcccaggactccctttgttggagttttgcccacgcgttgtaattaagcctcgcacaatatggtgagagtgggcgttgattctggagacaccagctttgtgctcgtgtaatgtaacacgagtgccgttgctttctcattcttacacggcagtttcatgtcattgagtagaattgtgcggaatgcttttatggagtgaggcttctgcgttaaacttgtgctgattccaggtaaagtgtagtagtaattgtgaaagaacgtgtatgaggaaaacgagctacaatgtcatgcttggaggaacaaagaatgttttgtaggatgctttgctttttggagaattgtgtaggggtagggactgttacccatggatgatgctatgggaatttgatcatgtatttgaacaccctttacatcagagggtctgcattgaatgcagttcagaaggataaagggtggaaatcccagatgtgttagtggcagagcacttgagcgcttcacatagtcaagcagagaaatgggaagaggtcggcttgcttcttcctggtctttgggtagtggtgcaagggctgggctgggcttgaaggcacttgccacttctgcctttggacatcttgaagaagcttagggaagaaaggctcccggtgagtcagcttggagtagggtgactttggcgtagtgattcttgtattgttgtttaacctatgtttctgtcaagtggtttactgttgttcggtatgttggttggttaacaaggtaggatgactctctaaaaagttgggttgctgagtcattcgccccagcttgagaggtaattagaaacagctggtgcaaatactctcatcacatgcctccactataaaaggccaaagagcgctctagagaggttgcttcagaaggctgaaggggacccagctggggttgttttgatacaggttatcagtgggtgaagtggaagagcactcttaggcagtggccaatagcactgaggcgggtttaaagacggagcctcgtgacctgctgtctgagaataaatttgcgctggagagagctaaaactggggaagaaatttgcagctaggggtaacccaataaaaaatattgtaacaaaaatatttactactcttactggacttagtttcctttttgtggtttctgttacgtggtctataagtttcaagcagtgagcttaatttgtgcgtcataaaaatttggttatgagtacacagaagggacttgctctgtttctcatggcccttggcttttcatgcatacacaagaagtttcaggagtcagaggagggtaagcaccatatgggtggaattaataggtctcattgggttaagtctcgaaagagctgtttaataaatagccaaccgtaaatacctgtctcattgtcttgattatatgacaccactgcctttacacctggtgtcattgcttcttgctttaaaaaggagcacacaacccaaatatttatatgagtcctcattgcaaacaaagtttaggaatgggaaatgtagagctgggaatttggccctttggtgaaaaaaatgatgattcctattaatggtagttcatttaaaatattctgtattaggaaaaacgatttattttgttcctttaagtctgggactagaggagattagaaatcatgaattttgtaagtattagggcctccaaggtggggtgcaaggaggttcatttggaaggaatatattaaaacttttaaaaactttaatataagaaagacattaagcttaaagatgcagactaacaatcgtgtattcatattatataatgcgcgtgcatgtcctccacccctttgttgctgggggaacatagcctgttaaccactgtcagtaacattctttcaacaaccggaatgctttttcttttaacttacggtttcctcctaagagttctttcagactgttaatattccatttaagttttattttataggtagttctattgtctgtatgttttactttagaagcttgagtgtaaatttcttgttacattgttgatactggggatggaaatacaaaaaatac

SEQ ID NO: 101983 - DNA, 1882 bp, Homo sapiens
gagaattgtcttaaccctaaaacctgcattccctgagcattctagacagagggtttattttatgtggtggaacgatgatttttgagattgttttgatttaaaatatatgtcaaatgaggtaatgtaccgatggccaaggtatgggtaatttgagtgcaattcgccagaatccgtgccccttggagggagtaaacatttcaggactgcagctaaaacattgacttacactctcctgaagcccaggcacctggcttacacagtgcactaacataactgaagtctgggtttgatcactgtacagttgacaaagaagcagtaagcagaatggttaaaaagtagttctggagccagactgcttaaggtcaggttctggttgtgtcacccactttaaagccttgggcaagctcttctacctggtaactagtgcctcattgtttcctctgtaaaacaggggtggtgatagtagaatctgtatcagagaggttgttgtgaggattatatgcgttaatacggggtaagtggttagaacagtgccagctttataagaaacatcaagtgttaggtgttattatctgttgttcagaatcagggaagtacttagttacacagtagtgttttatagctgttgagagctgaattgccggcattgatcacaagtgagactggaaaaacaacccggggaacactcttatgttaagtcagtagcaccatctcaaacatacatccaacttctgagggcaacgaacacaggacatagctttttacttaaaggaatcttaacagtctcagcggagtgcttgaggtagtcactaaccagttaattgaaactggcttttacgaaataaaaacacttgccattctttggctagtcttttccacgttgtagttgacattgtggcctggcagctttagtaacctgtccacccctcccttcttgttaataccagaacagaactagtttctcagtacatattcctgggccctatccagtttgttggaaacatttagaatgtaaatttgtaagctaattagtttcttctaagtattatgttttctttagatgatatgcctgtactaatacagaaaaattatccatgaaatggatatgaatacaatggacatatttatcgtatagctttttgtacctgttagtaattcagaaaggttgtgttattttgaccattctttcagccagattgtaagtttcctgatggtgagaatctgtgtctttctgttttatctcctatggcactctgaatgtgccttggctgtgtttctttaataaactgttggttgctgaactgggtggtatgatatgcgttcattctagttctgtgattttgaaacttgggaatgtttaacagattgaaggagagaacatcgtgtgtggtaccttgtaagtgtgcactgagttgaaattcttttgattatttagctttctactttctgtttttatcattggtgtgattattgagaaggcagctggaattaagtaattctagttcatctcctaagatagacataaaacttgtcttgtgacttatttttacccataattggattagaattgaattgagcaaaatataatttggttttctagatgttaaatgtcttatatgtctaatactttgaatatcactcctctagaacaggttctttgttttatttaggatcagggacaggttagaaaatattcaaatattcataggataataaaaaactgccctgaagcaaacgtgaggaagaagaaatagtggtagccagaatcttggttgttaatgaccagtgtagaaacacagtgggcatgcagtgaaattggctggcagctggttccttctcagtacgggcacaatttagaaaatgttacattaatgcagctgaa

SEQ ID NO: 101984 - DNA, 1058 bp, Homo sapiens
aaggttttcaattcctttgtagcctggacattagtaatagcctacctctaaggctgtagagtaaatagtatagtaagggaaatgtccctccctccccctacacaccttttttccagttatctcttctttttattgatttgtctgcctccaggaccctagggaggtgtttttgtcctaaggaggtgaactcctgagggtcctattgaagaaatagggcgacctatccacccaacttcctctttactgatatcttcacatgcttattgccttattcattttctaaagtgtgccagcgtctttcagaagtcagctaaattagtgcagttgctcatccatcagacagttttgttataaaatatgtggctataaaagattgaataaatttattaggttgtaatttcattaatgtgtattttatatttaaatattattttaaaaaatgtacagtggttatctgatcttggcccaggcctcttcaatttccagtgtacctgatgtctctttatcaactgtttttctgaggtgtatctcagcctggccttgggtactcccctaggtaagagtcataattcaggttaaaagaggtaagaaaaaaaaaagcttttggcttttgtaatcttgtttttttttttttctttcacattagcaaaagactgttgaagtagagagcattttgcccagctcactcggattctttgctggcatgccttcagtttcagttgtcatccagagaagtcaaaggaaatgctgcttggggatgagcatgtaattacgattaactttccctacttcgttgtctctttgtggtaaaagactgtcacaagtgctattcaaactataggtatttttttttagatttctaaaaagtatattttgtctctgagggcctcctgtctttggactagtttgtctttttccagaccccagaaaggctgggccaccttttcttctttgagcaggttggcaacagtggtcacaaatagcagaggagctgagattctagagagctatcctaccactgcttctcagatgccagtgtggaaacagcctcttctttt

SEQ ID NO: 101985 - DNA, 1326 bp, Homo sapiens
taagaatatagaaaaatgcaggcgtaacacaggagtccaaatttagtattaagttaatagaattttagattctggaaggctggagtgtttttaggtttgagaaatgttagaaggtgcatgatggatgttagaggacatgaaggtgccgttcttgtctgatgtagttgttacgtagttattgggtaaaaatggattgctgaccacttagatggtttccaggattaggagaaatgattttcagaacacttctgtagtgcctcatgctaatgaaagcaaaaggcaaggtgttttcatgactgtaggtcatatatattggccatgtttatagttgccagtccttgctcttttttggcctgttgttgcaggtatgtctttgacttccagagggatgagctggcctcttttttgtccctcaagtcgctggaaaagctgtccaagaaattttctctgaatgcttggctcagtggcattgttccacatatgttggaataggtgactaggctgtgtttggaagaagatctagattggggtccccaacctccgggttgcacagcaggaggtgagtggctgtccagtgagcattactgcttgagctccacctcctgtcagatcagcagtagcattagattctcacaggagtgtgaaccctatggtaaactgtgcatgcaagggatataggttgcgcagtccttatgagactctaatgcctgatggtctgaaacagtttcatcctaaaaccattgcacccgcccatgtggggaaaatttgtcttccatgaaacccatccctggtgccaaaaagttggagactgctgatctagatgatctctgttttgtttctgtattaaaaataagaaattactaattcagcagcatgtacctgtgttggaccaggtccaacaggtatgcttgggttatggcagggaacaaatcagacaaagttgtgacatttaaacagagaactaaaaggtgaggcattagctggctgaagagtagaagtccagatagtggccacagtgtatgtggaggccctgaaatcagtaggagcttggggcctgtggagcaggaaggaagagacagtgaggctagagaatagcaagaaaggggggcaatggcttgagataagtctggattaatggatggaaaacccaactacataggacttgaggacgtgttaaggattttgaagtgatatgccatttatttggaagatgacgtagggtttttgttaggaagagaatacattggagggggtcaagaggggctttaggggtataaggcttttgttaatattatcaccactaataacagctaatattatttgttg

SEQ ID NO: 101986 - DNA, 1111 bp, Homo sapiens
atggactttattctttgtctcttttacacacatatgaccaatatggtgacttgaattttgctggtatgcaaaacacaacagtgttaacagaaaagcctttgtcaggtacagacgtccaagaaaaaacatttggtgaaagtcaggatttacctttgaaatccgacttgggcaccagggaagatagtagtgttgcatctagtgataggagtagtgtggagcgagaagtggcagaacacctagcaaaaggcttctggagtgacatttgcagcacggacactccttgccaaatgcagttatcacctgctgtggccaaagatggctcagaacagatctcacagaaacggtctgagtgtccgtggttaggtatcaggattagtgagagcccagaaccaggtcaaaggactttcacaacattaagttctgtcaactgcccttttataagtactctgagtactgaaggctgttcaagcaatttggaaattggaaacgatgattatgtttcagaaccccagcaagaaccttgcccatatgcttgtgtcattagcttgggagacgactctgagacggacaccgaaggagacagtgaatcctgttcagccagagaacaagaatgtgaggtgagcaggaatatgttcttaattcattgttttaataaccattaattgggatttactgtggatcagctccctttgcatcattagggatataatcaggttcagggagtggggaggaaactcatacaaaattaattgtaagactgtgtgatagggctgggcgcagtggcccacaactgttaattccagcactttgagaagccgaggtgtgggtggatcacctgaagtcagaagtttgagatcagcctggccaacatggcgaatctccgtctctacaaaaattagctgggtgtggtggtgggtgcctgtaatcccagctactcgagaggctgaggcaggagaagcgcttgaatgtgggaggcggaggttgcagtgagccaggtttgcaccactgcactccagcctaggagacagagcaagactgtctcaaaaaattttttaaaaacactgtgtgataaataccaaaagagagagatgaagtttgaaggacttctgtt

SEQ ID NO: 101987 - DNA, 2024 bp, Homo sapiens
aaaaatacaaaaattagccaggcatggtggcatgtgccagtagtcccagctacttaggaagctgaggtgagaggatcgcttgagcctaggaggttgaggctgcagtaagccatgattgtgccaccgtactcctgcatgacagagaccctgtctccaaaaaaatatgtgtagatcagtgcagatatccttttgagattgtatagaaattgggatagaggcctatgttttctttaatgtaaaataagttctctgaaaaacttagatgtataccttcatcttcctaggtttgactataattataaaatacagcaataattagtaatatttatttcatattctaggtaaaactgccattcaatgcacaacggataatttcactgtctcgaaatgattttcagtccttgttgaaaatgcacaagcttactccagaacagctggattgtatccatgatattcgaagaagaagtaaaaacagaattgctgcacagcgctgtcgcaagagaaaacttgactgtatacagaatcttgaatcagaaattgagaagctggtaagtgtaaaagtttcttgttactatttaaattccaccactttcttttttgtcaaggaaatagtttttaaatttctaggtcagatataatgctcaattacttattttaatatgtatcaattaccattttatcatttttaccatgatatgctgtgatatgtaagtgctttttaaaaagaaggttttcaaattaagaatgactttactgtctacctaatcattagtggttgtgaatagattcaagaaattataaagcactttaggttctctgttttgtgtctatagaagttaatattccaggtgttcatttaaatgaactgtggacctgaataacttgttttggttgataccaaaaccagaccaaccaggatctttcatctaaggaaaaaaattctgatagatatggtgatatgaattgaaaatattaatatctaatgggatcctaagtgagaacaatgcttgcttttgaatcttttctttttcttttttgagatggagtcttgctttgtcgcccaggctggagtgcagtggtgcgatctcggctcactgcaagctctgcctgctgggttcatgccattctcctgcctcagcctccggagtagctgggactacaggcgcctgccactgcgcctggctaattttttttttaatttattttttgtatttttagtagagatggggtttcactgtgtgagccaggatggtctcgatctcctgacctcgtgatctgcctgtctcggcctcccaaagggatttcaggcatgagccaccgtgcctggcctgaatcttattttctattccagcatcaagacacaaattaactgaaaattgattagtttactcctctttcttttttccgttggtggaaggaagcattgtatgaaagaggacaactctgatagtacaggccagctaaagctaagatatggtaaaagatagcaaggaaacagcctagaagtagtaaaaacattgcttgaatattcaattttgtgtctattaattgttgaaagtttaaaagttgggattgtggcaagttttcaagcgtgaacattctagctatgaatggcaattaaacagcaacaatttagggaaaaaaattgtgcctccaggagaagttgaaaaataaaaaattattatttatatattgtacatatactttgtgtaaaaagataaaaaatcataactatattaaagagatgaagcataactaaataaaaaatagaggaactagatgttttacaaatagaggcatgagagatgttaaaaaaaaaaacaaaaaacccaaacaccgacatgatattgctgaatagttaaaattgttaaaaccaaggaggaaaagttttcaattctatagtacttagtacttttagagtgtgtatcagtaatacctttaataaacactggtgttctttcttattcagttttgaattaaacccttacctgcctttagaaggagtatagcattttgagcttcag

SEQ ID NO: 101988 - DNA, 1257 bp, Homo sapiens
cataaaaagaaatgggtgttgattgcatttaatggttcctactgtgaacaagcagtaggtaccgttcttgccctttcagtatctgcagactcattttatcagaagagtgcaactgataaactttgcataagagaaaatgtactggccaaacattgattttgcttacatacacatacttaacacgcacattcttgacctacatctatttaaaaaaaaaaaaaaaaagaacttgtatataaaaatctgaacagattggagaatactttgccatataaaaatttagtattttgtatttattgtatattttctcaaaatattacaaggctttaaaatattttagaaataacaataattggattcatacataattttatagtaatacttttgtataaaaccataacaatacttttgtataaagcaaaattcgttttacccttttagtgacttttatgtcataaaagactaaaggatggcacttatagattagcactatgaactaacttgtctcaaggttaactggcagcctcaactctccagaacctgtcaatgaacagaaagcaaacagaacaacactgacttgttgagagttgtgataaatttcataagaaaaacgtttgactttctagcaagtgtttatttactcttttcttataaataccttgattatttggtttcctggctcataatagattagaagcaataagatgttagaacaagaaggatgaaatgggatgataatagaaaagacatgctgtcagcagtgataagtgacatggacaggaaggcaggaaccagaaaaacttttgaaaaattctgtggtagactttcttataggggtaatatcttaaaattataataataacaaaaatggtaattagcaagcacaaaattacccccccgaattcttcacactttagtaactcacccaccggctgtctctaggcatcttaaattcagtcccatcccttcagtgggtttgatgttgcttaaatcaagagaggtgttgtgtggattacatagctgagattgcatgttggaaaacatttagcacaatatctgtcagagaatctgctcaacaaatgctggtcattagttgaatcttgcaatgctttgagtctcagtaattaagttatgctaactgtacttttactttttttcttgtatcccatccaaaatgccatccatacctgttatgtacagtctgtaaatccagaaagctccaaaaaccgtatgtttgtcacaaactcttttgaccga

SEQ ID NO: 101989 - DNA, 2632 bp, Homo sapiens
tcagatttctgtcagcagatgactgataaatgtactactgatgagtaaacttgcattcacttccttcaaaccatctaattttctcctgaagttttggcagcgtcttgaaagcctaatatgaccatctgttgctcaacaatactgtttttttcctttagtagtttaccataagggaatttcctttaagtcaaccatgatttctccttgatttctacaagagacaaagaaatgattttgcctcctggatatcagaaaaatccatgtgaaaatgtagtaaacctttaaaactcatgttttaaagaataataactctagtaataactcttcctgctattcagaataagtaggagaatgaaaactgcagcatatcagacagcaatttaacagcttgaaacatctacagatagttcctactaaaagaagtggcctgcagaagtttaataatttgacttttttctaatattttagtttgaaagaaaatttcttcccaagcaatgctaatagagttctattcttagaagcagggtgtcagctactgggaatatttttgtagagctgcattgtgaaaaaaagatggtcttacctgaatcttagggctttgttcttcggctcctaaaatcaggctttaagctacattgggaagatttagtaaataggcaagtggttggcctaagacgggggctgcttctcctcttcagtatggactctagaaagtctggctacatgaatagatttaagtgtcactttccctccctgccccccgcttcagtctctaccatatctggtcccatcatggacttcctatttcctggcatttttgtccctttggaagaagaaataggactcagaatacagtggcatgagtgattacactggcagcattatctcaggctccctagaatctggagagcttaccaacatgtaaagctgttcatttttccaccgtgggtcaccaatgccagaaaaccagacatcacggggaaagaatgttgcttactttttaccaggagtgcagttcatttttttcaccctgtttttgaagtcgtattattcacttgtaaaaatgattgtaacagataaaaaatgtatctgcagcaactctgcaggtttgtgaaataggatgaaactcaatctttttctattgtgggtttgcatttgaaaagcaggttgaatccttgctctcttctccaaatttggtgtggtataaagacacacaaatcattttaacttggacatttaaagatcagtcttagtgtttgttcagtcctgttacaaaatagataactgagcacctatcgcataacattttgcggtggcttttagccatgctggggttagatgtgtttgagagtcaaatgaaagctatggatcttctcagcaattaaaaaaaatgcatatattcacattcacagaaacattggcagaacccagttttaatggtacagaggagtagtttatagtgttgatttcaccaaaatcagagggctgaaagagacacttctatagactgcatcctgagcctagtgcagggcttgtctagctaatgtgggcagccaccacccactgtgtatgaacaagtctgaagcaagttggccttgcccttgagagtatatggggaccagtcttcatgtcttggagtaatttgtcaaatgttaccctttttgatcagggtgtagggggaggatattgctagtatattttcagtggtttgtatgttctctctgtcactgacttatttgtaagagaaaattagttggacttgtttattttctagtagcttttataagtacactcaagaatttgtcagggagaataattctgatagtgcatcccatactgcaaaagaatttgtgtgtgtgtgtgtgtgtgtgtgtgtgtgtgtgtatgtgtatgtatacatatatatctctccatataggtatttctttgatacttgtaattttaaatttcagcttcacgatataaaataatataagaacttctggtttacaaaatgtaaaatcttaagccaatggaacccttgatttcctacctcagtgtacacccaactattggttgtatcagtttgtgtatgtgcaaatgtcaaataatcttttgctttaattgctactgtacttgctttgaaagattacctactattttatgataaaatgtagttgtctccagagcttaaatataatttgtaaagcacttggtttaaatttctctctacctataaacagtttagcattaagggtttctattaatgacacagaattattggccaagtgtaatttcttaaaatttagcattactttaaatagccagcatgtaatacaagtaactacactacctcatatctacatgattttcaagttgtaatgcagatggacagataaaaaagattttacgtttgtcttttggccataagtgggaaagttttctgtatattgcatagcattacacatttatgcctattttaacattaacttctaaagaagttttttctaagaaaatgtttcaaggcaatattttttttgaggctgccgaagacaaatgacaggattatgagtatacagtgtatgccttttccttcatgcagaattttgaaatgttttcagtttgtatattgcatattcacatgatcattgtt

SEQ ID NO: 101990 - DNA, 1043 bp, Homo sapiens
attttttaaaagctgttatgttgaattcagtaaaataacattaccttattttttttcttattcaaattctggaactatagcaaataattcgttaaattgtcatattcaaaacaaatgtggatacagtcttggttctccatctgtaattttttttaacagtttgctatagcttactgcttaactaattttaaataaggaaataagtatgttagatgcagtagacgatacaggttgcatgtggacactcagtcacattaacaacttgggaaaaaaatggcaatgttacggtgaattctcaggtgaacttttttcagttataaaacatctattttgaatctgtaaatattttaaatgttttattaaggcatgtaataaactattctttgaaacttgttgggtagaatgaaaattaaagccataatggtagaagatggcatactgattataaaagaagcagaaaaacattgatttttttatatctttcataatataattttctaacaatgcaataaaaccactaaacttttgtgtccatattttactgagaccatgtttcattaaaagcatagtttcatagtatttaatttacatttctccctaatgttcttacccaaatgtacctgaactaaaaaatgttagatgttggtgataagttgacagttaaataaaattctctaaaattgcttctaattgaatagaattgtacattccattttcattttctcacttcatgtggatttactcagtttagtcttttgatcggtaattagtatatctgaatttgtaggagagaatctttccttagttgatgataatcatgcctcaaaaaaaaaaaaattccagcattcaggtgttttaggaagcacagattttagctttgcttctgattttacttaatgttagtttggatagagaagtatagggactcttaaggggtattatctctatcagtcattaagttttaaaaacttatctgccgagtcagctctttgtatcctattcaatttccaaccaggcccttctgaccaagctttgggcagctg

SEQ ID NO: 101991 - DNA, 1024 bp, Homo sapiens
tgactttgggctgacaatttagcatttaaccactgtctccgcaccagttccacaagagcagggatttagattaattggaaaaacctcattggtttctgatggagggggcattcatagaaacaacctactgacaactaaggagctactgcgatgggatgggcagcctgcagcttcactcggtgggcagcctccacaggtactttaattcctcgctcttctggccaggcatctcttggtaaaggcaggtagaggaagcaaagcaattacctagataattaaggaaaaacaaacctgtatgtggcaggtaacttggggagctgcttctgattttctaggcaactattttcattcttcacttctctggtgtcagcaggaatctgagctagatcccaagagcaactcgaacaattacaatgctctcagttggcaaacccggcttcatagcaacttccctcctcattgatctagagtttgaaatagctttgtcagatctcgggtgtgttcctgctgatttatggcaaaatcccagtaacagctgtgaaaatgtttgtccatttgtgaaacttcagaaagcgggtctagcaaatcattctcacctggtgattctggggcaaggtgagaactgtaccctcacaggccgggtgaataagattctagttgcggtggaggccaaggaagaagatgtactatgagtcaatctctctatgaggcattgctgaaccttcccctcctacaccttcctacaaggcaggtccgatgacttttactttacagatgagaagatggagcctccacaaggcacatagctggtgagtgacaaaaccagaattcaaacccagatccatttgatagtgacatttgtttccactaccctagtggctctgggggaagccaggacacccatatttttgtaaagtcccgtagttgtttctagtgtcatccgggttggaaactgtatattaagtcagtggttctcaaactttagcatgcattagtatcccctgttaggcttgtaaaaacacag

SEQ ID NO: 101992 - DNA, 1080 bp, Homo sapiens
ctgccagtctcaggaccacactttcagatccgctgctattgtgccatctataagttaatatgaattccacagcacacttgtatgtgtgtgcctgtgtgtgtgtgtatgtgtgtgtgtgtgtgtaggcagtgttggtggtggtaggaataggggtatggtttgaccaggtaggacctggacatagaaaaggttgcaggtatagatcattgtgagaaggccacggaggtcctgaaggatcccaggtcccaaaggcataaggatgaagggaagagagaaagaaaaaccgacatgttcctgacagctggatgcttctcccatttagatttctctgaactgaaattctagatggtttaattactccataaggtttgctaaattgccacgtctcagcctcacatacaatgctggtatctacattctatgctctcagactatgtattaaaactgtgcactggtggagtaagctagttaaatatttgtacatttgactgcacacagctactgcttatgttttcttgttcttctgctctatcttaaggaatctgtatgagtcagccagttaaaatgctggctgggaggtaattagctgggaattttaaccccatcatagtcattcacctgcttgaagaatgaagtggatgggtactttagtgagtctagcaactgtttctttctctgccaaatgcaagaagttcttcgtgagttgctggatggctcaaattatattctggagcttatcctggaaacaggcaaatgtcagtccaatggaacatcagcgcacattgatatataaaattgcaggtgatgaaaggctctgaaagaactctatgagtctctggtcttaacgctctcttagattttgatggtacattgtctttttcatttcaactctgttttaaattttttattatgtaaatttttagacatacccagaattagagagaatagcataataaaacttgatggtaccattaattcagtctcaataattgtcaatattttgtcaattgtgttttagtcagtccccactcttggtttccttgtggcctgatctctatctggcagctattaactccaatt

SEQ ID NO: 101993 - DNA, 1049 bp, Homo sapiens
ccattcagcatacatttatggagtgcctactgcgtacttgggatgaaacttgcttttgacaatgctctaggatttctcatgttgagaagtctgtgcctttcaggaaattacctcataacgatgggaatggcaaaccagtgccctgagagagtaaatgcaccttcaggaagtaattttctcacctcacccacaagacatttcaaataatggtaatcatgagcactttcctaacactgaattcataattccatctgtgtcatataatcatggcaaccatggggatccttttcttcttttacagatggaacaaagggaaagcacctcttattccagtaaattcaaaagctgaacttatctaagctatatacatatgtgtgtatatatatccacacatatacatatacacatacatatacacatatacacaatacatagacatatatactatttattaatatatactatatacacacacacataacagtcagtttccaatttacaaatgggttaaactccaaaattgatatggtaagtatttcattaaactctaaaacccacttttttatcaaaaattctaacgtacaaaaattatgttgttaaatcagcatataaagcaaacattcttatttgcacctgcagtcctctccatcaatacatgtgtaaatatttgttatatttatagtatcatgaatacataggcccacagaaagctcatattcagaaattagtttatttaagagttttctgcttaaaatatttcaacaaatatatgcaaatttcatcttggttcttcctctctacagtaatctccatcctctcctttatcaggccctccaactccttagtagtcagcatttctctagggctttcaactgcttttactagactattagaaagccatcattgaccaattgcctgcccaccttaagaataaattttccttctttgccaaggctgagaatccagtaaaagtcttgaggcttgcttttcatacagttcaacatcatgcgtggactatttcaggcccattgaactacctaaactatact

SEQ ID NO: 101994 - DNA, 1018 bp, Homo sapiens
aaatggcttttccacctgagtttgtatttcgattatttgggccggatatgcttggtgagctgggacttctcccactcctgtcctcctttctctgttcacactcagttttttgttttgttttgagatggagtctcgctctgtcgccaggctggagtgcaatggggcgatctcggctcactgcaaccgctgccacccaggttcaagcgattcccctgcctcagcctcccgagtagctgggactacaggcatgtgccaccacgcccggctaatttttttgtagagacagggtttcaccatgttggccaggatggtctcgatctcctgacctcgtgatccacccgcctcaacctcccagagtgctgggattacaggcacactcagttttactgttagtctttagggtattgggtgtttctggtgacaggagttgagcatccatgaactccccttcaaagtttcagagattttaaatattcccttacctcatacatgctgtctgatgtcttgcctccagatttaaatgaaggttgagttttttatgatattgatgaaatcagttttatatgacagacatggccattttgaggaataaggatttattgacttttttttttttaaggtttgaatagactcaatagttggaccagtgatgtcacaggactaggtctcaagtgaccataatcttacaattcactcctaaactccaggagatgggaaagtggtaattgctccaggaatagagttgtttagtttggggaatggacagaaagtcaaggtagggacggagtgtcattcacttgaaacaaatcttgataccttttactaagagcccttgcataaaagatgtgtttttgtggaaaactagggaaacagacaatgactggcaggtctcgtattaacctttcaagtctcagggagtttctcgccaccagctggagtaaggtgcatcagacccaatagagcaatgatccttgaaccaaaatgtgactttccaagggttcaagggtgcagatggttt

SEQ ID NO: 101995 - DNA, 1037 bp, Homo sapiens
ccaaatactaagaagaaaaacaagttatagcactttcaattttttttttttttttaaaaaaaggtttatagctttttcttttcccatgtcacaatgtccacttcctaagaagggtttaaaatactatgaaaactttctttttggggaaaatatctatttggtgtttgacacatcagtaggtactttaaagacctgaattttatagtagctttaggagttatattttataaaaatcagttatgactttatatttccagacaatagagagttcagtacatcatgctcttgtgcctctgcctgcttttcctgcgttcccaccctgtattccccccgcctttcgggtttccagggcttcgagcttgatcttttgaaagttttattctattaaatttttgctatatcttctggttttctgaaaaagctttagaatggtttctataccctttgtatcactgcatttttccatatcatctccggttcgatcgcgtccagatggaaaacggaagcagaggcttctaatcgtcgcatttactggctccagtgcaacacatccatctgaaaacactcggaagtctggtgcttggagagggtgccattgtctcttgtacataaggtcatgacgtgtctatgtcaaaagttcttatatatttcttttataagctgaaagaaggtctatttttatgtttttaggtctatgaatggaacgttgtaaatgcttgtcaaacaataaaaataacgaaaagtgtctgggcggttctatgcctttttggatgggaggatgagtatgaattgttggcgggagagcggccgtgggagaagattcctgggaatgccatttattgaaataactcgtgatcatcaggagaacgctgttgtagcgcttgaagttttaacaacaacaaaaggtgcattacagttgcatggcatcttgacctaacgttgcccctactgggcactgtttcttttccagtctcctgcctatcccgatgggagcaggctgggggggttcctgtgaaaatattggggtgaagtgcaga

SEQ ID NO: 101996 - DNA, 1581 bp, Homo sapiens
gtgtgtgtgcagtgtctgccccaagcaagtctcttgggaggaggaggcggcggctggctcgaaacaggtttaccattgattctgatgccgtctccgcaagcagcccggagaaagagtcccagcagccccccggtggtggggacactgaccgatgggtagaggagcagtttgatcttgctcagtatgaggagcaagatgacatcaaggagacagacatcctcagtgacgatgatgagttctgtgagtccgtgaagggtgcctcagtggacagagacctgcaggagcggcttcaggccacctccatcagtcagcgggaaagaggccggaaaaccctggatagtcacgcgtcccgcatggcacagctcaagaagcaagctgccctgtcggggatcaatggaggcctggagagcgcaagcgaggaagtcatttgggttaggcgtgaagactttgccccctccaggaaactgaacactgagatctgactgcgtcacctgccccgtagagaatgtgtgtagatacttcctgccctaactctgcccaccctcctgtaccgtcgacaagaatgtccccttaggtcgcgctcttgcacacacggttttggcagctgacttggttctgaagccatgtagccacccaactttgtcattttcaacaacatcagaaagaattgatcagaatcccaaataagcttgagtcctatcttctgtatattactaagggcttttatttattctcaataaatcagggcctgaacaattaaaagaaaaaagattctatagcactggaaagcaaatcaccccaggagttaacggatgtacaacagattaatttaagggatagtagcacacacacgatccttctatctgaaatcagtctcctagctggggaaacctctttcacacacaaaatgaaatgtgtacagcttgccgtgttctgactgtacccttccctcttccatgtctgagaatctccgtgtattttaagaatgtgtgaggagagggtggcgattcatgtttcaatgagcctctttttttttttccttcctgttttggtctatggctggtcttactctgtgtccatgttcggaagctctagttttgcatagaattatagagatgccaaactctttgaaaagagatccaaatttatcgcttgagagaaagaaaagaaacactattttttgtattttacctgagatacaggggcacaaatagatgagaattttacagtgttagtgtatgtatccctgagcctaaaaaatgaggatataaccttttacagagagagtgaggcgtggtggttttatatttatatatgaaaggccagcaagctcatgcgaaggatatacttttcttccaaaaagcggattttttttttttaatgtttgaatctatatttgagatgggagtttggttggattaaacatgacaccccggtgggcggtgtgtgtgtctgttgcacatggcagggaggggagcctccttctcatggggttgccatggtgatcattggtttttccatcaaaattgcatcttcatccatagattaccttccccttccctgacagtccataaccaaacc

SEQ ID NO: 101997 - DNA, 1190 bp, Homo sapiens
catccctgaaagactgggaagaacccaataatggtagccgggttcttaagcatactaggaacagatactcatgcttcattttgctttgtcttgaatactcaggtagtttatttctccctctgttctgtttggctaggatagtaaagccaaatactctgcttccatattcagcctaaagtactatacgtttgccaataacccaattaaaaatttttttctttgttctatctattttcttatgaaaatgtttaaacttatagaagagctgaaagaattcatacctaccatctatattctataatgtttttctatattctcattatcactcatctgttagaatccatctgtcatccatcacctcatcttatttttgacatatttcaaagatgtagacattaacacactttactcctagatacttcagcatgcaaatcattaacaaatatttccagtagctttgagttggggtagttctaatgtggtgattggagagagggatgctgtattttgctggtgctgagataaaagtgaacaagaatttttgtctcttctcaatagaagtcagagtttgtttgttttttttcctattttctattccctttttccattttgcctggaaatggcttttattcccatcctcaaccaacagtagtgtccatttgttccacagttttagatggcggaacactcaggaatagtgatggacacgcaggggtctgaagcagaggatggctgccatgagagccaattcagcccctcgttgaccactctaaccctgtgcctgctgggttcgaagtcaaggctgcatttggcagtaattgagacacgaggcatcttctagcagcactgaagcaattggatggttctggggcttaggtttcaggaaagcagctcccagttggcgttgagactcttcccctccactggaaagcccgtgttgcatttcaccttttcgtgtctaatgcaacaaccgcttcactctcgagggagaagcagaagccttccctgtgagcagtctcgtgtatgtgtgtggtgggattgttggcttgatcggatggtgtcttttgtttgcttgtttttaattctggcttcctagagggcagtaggtgaaagaatgaatttttcttaactggtagtcactttatacagcactttgttgatcaaactgcttggatgtcatcggtttttta

SEQ ID NO: 101998 - DNA, 1134 bp, Homo sapiens
atcgtgtctagatggctctgcaaccagcacttgtctgtcggagacagtttagcgtgtgaccgctgggggtgagcgactaaacctcatggtctcttgggattccagcattcacgctgcctgtgccaatagaggaatcttcaaactctttattggcttctctctccctcatctaaagtgaaataaagtcgtctttgaaatggattggaagaagaaataatttgcctacatttcccaaaagtggatattcactggtggaaatgtctgcagttatctgggggtggatctttgtcatggacggccattagcatctccttgggaaactgtctctgaacacaaaacatctccagttttgtagatcagttttgacagactaactgcatgtgaatttcagagccccagtttgtacctatttgccatccttttctgaaattctagtagacaagcatggaataaatggggaaaaaaaagatgagccttttctctcccctgtattccatgtgtttctttgggaatggagaggatttatttttcaattaggagatttcatatgaattaaaggattttttttttcgttaaaatttcattgtattgttcctagctcaaacttggctagaacataatgatactattatttcccattggaaaggttaactggatattgtatcttcagcctgttttgatgggaggtggtgtttattgagacagtcacaaatcgaaaatatttttaaaaaatgtagtctgtcattttggtgcgatttcttttctcaaaaacatgaaattgacaagtaaaaattttatatatttatggtgtacaacatgatgttttgatatgttacattgtggaatggctaaatccagcagtttaacttagcattatctcacatatttaagcaaatgtttttaggagcagtattttcttgaagtaaaattaatatcagcatgctgaattttcaaacatcatgaaaatctgagtattgataacaccacccagtaagctttgtcacgtctctggctttcaggttgcagatctgagcatgggagacctgcttttgcacactaccgtgatctggctgaacccgccggcctcgctgggcaagtggaaaaaggaaccagagttggcagcattcggtgtgt

SEQ ID NO: 101999 - DNA, 1049 bp, Homo sapiens
atagatctgactgcctgtggtctccctgactgccccctcccctacctgtccctcttcctgccacccactctctgctcagtcctgcaaaaaggcaccttggagtcactgaggaagggagggaaattgtgggaagggagtcacgtgggcgttccacccccatgacctgtgtttaaaccctgccagccaagacagacacggctttcaaggcattcttggatgcccagaacccgaagcagcagcactcatccacgctggagtcgtacctcatcaagcccatccagaggatcctcaagtacccacttctgctcagggagctgttcgccctgaccgatgcggagagcgaggagcactaccacctggacggtaggcctcggcctgggacccccggcaggcctgagtctccatgagggtctctaaatagcctctcatttcacaacctgttttcttccagtggccatcaagaccatgaacaaggttgccagtcacatcaatgagatgcagaaaatccatgaagagtttggggctgtgtttgaccagctgattgctgaacagactggtgagaaaaaagaggtgagggtccccatcttctcaggacatctgtcaggaaagccgagtttgagtttgcttttatttatttatttattttttaaaaaggtgttacttgtaagtaaaatagttaggatgctgttgtttttcttagtggaacatctgtgctttatccaaggctgcaatgtgaattttcttcctcagctggactatttcttcctgtaggaaatgttttcctgatgttcagctcctcaccctggggatctctggctttattctgtgttaagtgtgaaagtgaacttccattaccacaatctgggctgtttctagaaatgtcatgaaagtccaaggctctacctccagagattagaatgacaccaggcacatagtgggtgcccaaaaaatagttgtcaaaggaatgaaaatttcaaatgactctgaatcagttaaatctacccaaaaacctacttagaagagcagtggcaggaacagatacacctgag

SEQ ID NO: 102000 - DNA, 1551 bp, Homo sapiens
tctccattccatctgtaaggtgagatggctcatgaacactagtgtgcctgcctgcaggattctctccaggctctctgagttggtttccagatttgctcccaaacctgttgctgctgatttccacaattgctgctctttttaaactcctcattgtatatttgaccaaaaaaaaaagaaaaagaaaaacttgttaaaatcttcaaactgtgttgcatagagcactagtctcaaggtagtatcagaaggaaataattagttctgatgtcaaataagttttgataaaattttcatttggaaatttgcaatgtacgtcagcctgtgagaagcgttctgaagtcctacagaacagaaacattggggaagtggagtctttgtgtataaaccctcatatttgtgtgcacattgttccctgagaatcaatttttaaggcgggaggaataagtgaataccttagtgtttcatctgtggttatggtagggtaaataaacagtaaatattaagttaaataaatgaatggctttaggatggctaaagggaggggttacatttagcacattttcttccacaactttttttgcttaattcttgggtatgactctgtattagttcattttcacattgctatgaagaaatacctgagattgggtaatttgtaaagaaaaagaggtttaatggactcacagtccctcatggctggggaggcctcaggaggagcaaagtcacatcttacatggcggcaggcaagagagcgtgtgcaggggaaccgccctttataaaaaccatcagatctcctgagacttattcgctatcatgagaacagcacaggaaaaacctgcctccattattcagttacctctcacaacatatggggattatgggagctacaattcaaggtgagatttgagtgaggacacagccaaaccatatcaggctccaaggataactccctcacagagtccgatggcagtacccagggtactcctgctgacaccctccaagccagggtggagatttgcggagggcttggaaagtaaaggaggaaaaggagaacacgtaagaagagtagtgaggcatctaattaccaattatgtatggtttaaaataaaccttttttttttttttttttttttttggtcatggacagactcagaatcctctgcattgttcattagataaattgcactttggggaacctagtttgttactcaaattcaaaaccttatttctttgcttgaaccctgccttttaattctaagcctcaataagctaaataaggtccctctctaaacaagactctttcagtgtgaaacagaaggtgtttttctgaggccatatatatatatatatattttaatataatatattaatataatatattaattatatattatatatttttatatattatatattttatatattatataaaatatatattttatagaatatatatttatatatatctatatattatatatttacatataacatatctctatatataatgtgtgggatacaaagtatcttctcaggcatagtaaaatcttaatg

SEQ ID NO: 102001 - DNA, 1047 bp, Homo sapiens
tgttataatgagttttctattacagttatcactggatcatctaaaagacacatgaagattttttgctaaaatggatgtatttgttcctttgtaatttttaagacaaagccctacttgactgtatatttaatgatgattttgagttagtgaaattctagctaactaaataaaattgtttagtttatttctactgaaacaagctttgatgaaaaacacagtttttcttttctaacagccttgttgagatataatttacataccatagagctgagcccattttggtcaatttttccagtcagtcacctaagggaaaattgtttgtggggttactcagtgtcagaaacatgcatttccacagaaaacattgaatagtgccactgacaggtgactgacaccttctggcatataagaccagggttagtgctagcaatgaataagctgtggtaattgtaagagaattagaataataattatgtggatgtgggtcctggctctcctctgtcctgtcatgccactgcagctaatgcatccttcttaggttctgattttccctgtccttgcctcatctttattccagacttccttcccttttggatatgctaatgagggaaaggctcttcagtgttggctgccttcctctgtgtttaaaactcctccatggcatacacttgattttagcttttctgacctacacaaaacagcagccttgacttttagctctgtgcaccaacgattgtttttgggagggtattctcatgttcttgctaggtaggtggatgatagaagaagttattctttatttgcaccggtatttactggaaatgctttgtgcctagagttgaattagacaatagaagcagagagagaagcgtgagaaggacagccactagcttcaagaaaatttccggggccgggcgcggtggctcacgcctgtaatcccagcactttgggaggccaaggcgggtggatcacaaggtcagattgagaccatcctggccaacatgttgaaatcccgtctctcctaaaaatacaaaaaaatagccgggc

SEQ ID NO: 102002 - DNA, 1047 bp, Homo sapiens
gagcgtgttgagaagctcccattgaggcgacctttcttggcacttgtggctacagcgcttggtgtgggaatgactaggatgccatctgtaacactcagtggtggagcggggcaaagccttgaacccaactcctcctatattccacatcatggctaagctgcgtggagaagggcctgatggattttgatgtaaagaagtttggccacagtaaagagggagggggatttaaaagctgagccccacagtatggaaaaatctctagcttagaggtattctaaagaaaacctgcatttcataattccttccaaaaaaaatttgggggggtgttattttaataaaacagaattttcaaacttgatgacatccttttaatttgtttccaagcaaattttaagaggcttgtatataacaccgcttaacaacatgtatgtgcattataacttgtaatgatgcatatggtacctttttattctttattcaaataacgtgcagttgacagtaaagagattacatccatctggactcagttccttgtgctacacctgagggttggtgccttgattcattgagtagggttgccggtggggaaactgctttgccccttgctcaacttgagagaccactcagctaagtctatcctaggcctaggtcgtacctaataaggaagggatacttaaggctgtgaaatgtccaaagaggacccaagggaattttagctgtcccctgagatgctaaaggtgtttcctaatataagccagaacttatctctggctgtctgagggtgaggttgggcctaggagacagctgaatttagaggactgaagccctagcctgcatcctactaacctgagctcaccccacaggcctgcttcaaactaaggatgccaaacctcaggcgtggtaaacttacatagaccaagtcagaaaccctgttcacactcttaaaaatggaattctcaaagtatttatggtagaacagatggaatgaaaacccagaggtagtgaggtgtgaattggaagcacaaaggaatgtgttaggttcctttg

SEQ ID NO: 102003 - DNA, 2302 bp, Homo sapiens
atttatgatgatttgacttaatgattttttgactttatgatgggtttattgggacataaccccatcataggttgaggaacatctgcatgggatggaggctctgtttctgagctctctgttctgttagcctgttgtgcactgctttagattactgtaattttataatatgttttgagatctggtaggtaaagtaccctaatcttgtttttctttttaaaaactgtcctgggtgttattggcctttttttctttcataaaatatttagttccaagaaaaatgttgccagtgtggtctgcatccatacagattctttggtattgcttgaaatttacactgtggcctaatatgtggcctacttgcataaattgctaattcttatggaaaatgtatattcaccaatttcttgggaataggtttgaaatgcattcatggatcaagctgtataattactgatttttacatcttctgtatcctgactaatcgattgtgtctgacatttttgaggctttctttatgtttgcctaatatagttttccagccttttaatcttgtgtgtcttttgtgtttaagtctattacttccatatagcatgcagctggggctttgttttgcactgtttttttctataatctaaacatgaagtttaagtattacgtttagcctgttttacatttgtttagaatatctgtgtatttttatttgtttctattatcttgttttgctgaatttgtcttgcttgtttttcttttcctttcctgtcctcttctaggttgcatttataaattctgctttctcctttcaacctgtataatctatttctgttcttttagtgtttgatcttaaaattttaagatgattattaacagaaaccaaagttaatgtttctagttccctcttgcataaaattatgaaatggctttaaatataatcacttccaccattgttttagttacagtttgtatttttttttttgcccccaagtaccttttttggggagttgagggggttgtcatatatactaagacttacctgtgtgtgtatcagctgtttatcattttcgcttgtataccagatctttttctttctttccccacctgaaagtacatcctttagcgaactttttcagtgagattctgttcatgataaactttctcattctttgtttctcaaaagtcttaaagtctccttcgtggatgatattttagctgaaaatgcaattccatattgatagttttaacatttgaaggtttctttaggagctctagtaagtcagtgtcttcggatagatgttccagtcttctctcatttcgtcaatttacatctcatctattgagtgttcatttcattggttatagtttctatttctaaaaattctattaatttacctggtgttttttgaaattatctctttcttcttctgttttagtattattattattattattatttgagacggagtctcactcagtctgccaggctgaagtgcagtggtgcgatcttggctcactgcaacctctgccttccaggttcaagtgattctcctgcctcagcctcccaagtagctgggattacaggcatgtgccaccacccccagctaatttttgtatttttagtagagatggcatttcaccgtgttggccacactggtcttgaactcctgacctcagatgatccacccgcctcagcctcccaaaagtgctgggattacaggcatgagccaccgtgttcagccccctttcttcttttaaaaaaatattttaagcatacttatttgacattctacatctgatcattgcggtgtcattccttggtggcctgattttgtcagttattgtgtctgttgcctcttgctcatagtgatgtgttgcctcttgtgttttataatatgggattatgggttcttctttgaccaagctctatctctgggtattatatgatatcatcattaagagtgaattctaccagagtagatttgtttttgctcctaccagatgccttggaatacaaacatatgaagtcagtcctatgattagaatgtcagggggcctggcacagtggcttacacctgtaatcctagcacttggggaggccaagacaggtggatcacgaggttaggagatcgagaccatcctggctaacatggtgaaaccctgtctctactaaaaatacaaaaaattagcagggcgtggtggcaggcgcctgtagtaccagctactcaggagactgaggcaggagaatggtgtgaacccgggaggtagagctggcagtgagccgagattgcgccactgcactccagcctgg

SEQ ID NO: 102004 - DNA, 1020 bp, Homo sapiens
gtggtggcaggtgcctgtaatcccagctactcaggaggctgaggcaggagaattgcttgaacccgggaggtggaggttgcagtgagccgggatcgcaccactgcgctctagcctggacaacaagagcgaaactctctctcaaaaaaagaaaaagagaaaaaaggtaacaattttaaaaataataaaagttccagcgttccaagagctgcttcttgttcaaaaaatggttattcctgctgtggtgttggagaaagccaagtgcgtgtggctaacagcaggcctatggcatgttaaaggcaattagggccagcgctggagttgcagagtcagatcctttgataaacctcaggcgtgtctgtctgatgccaagtggaagcttgtgctctgcagtccagaccagtgtccctcctgcaggaagtagattaagcagcgtttgttgaacaggaaaggcctctgtgatagccgtgaaagtcgaaggcaccttgcttcagagagaggaattgccaagtgctgagcacggacagccgcttggtctgcatgggcaggacgtgcctctgtgcagtacccgtgaagtgtgaggttctattttggtctgatgttccatggagatggcctggagctcgattctgaaaaccgaagacagtcaggcggcagggaggggcggcaaaggaagaggaactgcacagatttctcttcccacaaacaaatatggtccagggcttcagattctctgaagtctcacagatacccggcagcacatggtcctctgtttgtttgtcgataacatttggagacacgcgcgcctcgtaaactgtcggcctgctgtgcttcttgtcacacagcacatggcctgcctgcgtgggccctgctatggccgggggcggggtaacttccagtgagatttgactgatgacaccgtcaaatcctgcgtgtgaaaaaacatgtttcggagactgagatgctctattttgatatttttaaagattgttaatgtatatttgactttcacaacaagctaac

SEQ ID NO: 102005 - DNA, 2043 bp, Homo sapiens
aaaaaaaaaaaaaaaaaaaaaaaaaaaaaaaagaagaagaagaagaagaagtgctgggaatcacataagatgctgagactaagtcctacctctgttcctgccttctctatcgtcatcttccaaaccaccactcagccctgctttcctgctgtctgagagaaggacgtgagctgagatgctgagaggcccagagtggaaatgtgtgcagagctctgtttgtcttttggactttttcaacctgaagactgaacccgagcgcttcagtgacccccctgccctgcccttccttcctctccccgctccttctggcaacctgtgctcattctactagaagcagcgtgagtgccacctgcctttcgaagtcttcctgggaccccatagagttagctctctcctctgggcccccacaaccctgcaaatttgacttccatatgggccctcattagatcatgcgattcttacttgcttgtgtctctcttttcgcctaaatgtgtttcctgagactgggtttatattcctcatttttgtcttcccggctctttacatgtggtttgctacatgggtggccctttcttgttcagcaagagagtgagtgagtgatggaacagatgaacagcatagattactatcatttatttctccatgaccgggttctcgggtttgggttgatttagtaagttggggttttgtcattattttctcttttcaaagcttgggatacaaaaggagcgttctgttcaaaatctgaaatggaaggctcttgggtagttggatattcttgccctgctattgttgtttttcaaatcattttctgaagcttggcttgctaaggaagttggacccctcattcttttgtccattggctccttggaagattttgacaagttgaagcttcagaaaattgattgctctcagttacagttgacttccttgactcattatgttattgtggtccccacatcccaatcaaatttttgaaaagtggctccagtgagttgtgtacccttagtaaaggagaatgaagactataaaggctgttatttcatgtgaccacaagatggcaggatcgatcccataaaacggttcacagatagagttgtttctggaatatgactttgaatgagacatattatgttagattagattatttaaaggattttataagcttgcacatatgtgctataagcaacagtgtgtactcaactttctttggatttttttcttctgtctgagcccttcttctgggttacagatataaaaaaaaaaagaggtgggtaaactataatccataggctaaaagcagcccaccacctgtttttgtaaataaagttttattggaacacagtcatgccattcatttacaccttgtctctggctgttttccttctgtaatggcagagttgagtcgttgtgacaaggacttagggtctacaaagccaaaagtgtttactctatggccctttacacatcaaattcgctgtccctgatgtaaagtatgactgagattgctcacaatttgtttttttaaggatagacacggttaatgttttcgtctatttctttcttcttttttaaaaaaagtctaccgggcgcagtggctcacacctgtaatcccagcactttgggaggccaaggcaggcggatcacctgaggtcaggaatttgagaccagcctggccaacatggtgaaacaccacctctgttaaaaatacaaaaattagccatccgtggtggcaggcgcctgtaatcccagctactcgggaggctgaggcaaaagaatcgcttgaacccgggaggcagaggttgcagtgagctgagattgcaccactgcacttcagcctgggcgacagagcaagattccgtctcaaaaaaaaaaaaaaaaaaaaatctgtgtatgtatatgtacgtgtacgtgtgtttgcttaaaaatctattaaaatacatttaatagagtttaaaatgcattgaataaatcttgaaatgcatttaaaagatttttaaaatgcattttatatatatctattttagaaatatctgagtattt

SEQ ID NO: 102006 - DNA, 1099 bp, Homo sapiens
actgtcatctctaagtgtatttggaatgagacattcttacttctgtcctcatagccagagtgaacgccctgcattttggttccttggaaataatcaatagatattagctggctgtgacttaagtgtgcactgaggcatgaacatgtacaaaacacagtgatggcagtcatcagagagcactgccattccccgctcgccccgccccaaaagtgtaggaagataaccggaattaattagcatttgtgagaaatttgcagatgcttggaacacacaaattaatgaaggagtaagtttgtttgcttgatgtatgaaggaccagctaggcatgttgtaacctgcaaatctagaaccttcagaacctgaggcccctgtcctctcctgaggatcactcccgagcaccgcagcctgtctgcagcagcacctggggctgtgagacccacagcaggtgtgccctttatagcagagctcctaagctgttgtgttctgataatgtgtgtgaaattaaaaattttccatcttgcgttggcaggcctgaaagcaggagatgagattcttgagatcaataatcgtgctgctgacgccctgaactcttctatgctcaaagatttcctctcacagccctcgctgggcctcctggtgaggacctaccccgagctggaggaaggagtggagctgctggaaagcccgccccaccgagtggacggccctgccgaccttggcgagagccccctcgcctttctcaccagcaacccaggtatggctgtgcagggtgctgggggcgagtctgaactccgttgtgccacgacccggggagtttatcatgcggcttgtgtgtttcagtgagtgcctctgtctggcaggtggtataaaatgtgtgtgcaagatgggctgatgactggccctgcatttcctgttgaaatttcaaaggcgcagggaactttattttctcatagagctgttttgctacagatccacctgtcacccatgggcagctttataatgcttctgctgtttctcattttggggaaaggtgaatatttagaagactttgctgtggatagagatacagaggcacagaagtgttgggaattgggccacg

SEQ ID NO: 102007 - DNA, 3032 bp, Homo sapiens
gagtttgaagctacaatgagctatgatcacaccactgcattccagcctgggggacagagcaagaccctgtctctttaataacaaacaaacaaaaaaattggtctcagaatgtagtagaatgatggcatttcaaaaaggaaattccaatagttagatgaatcctattcattctttcctatgacgtagcccttgattctatctcgcctaatagatttttttttaatttccactaaaatgcagataaatacacctgtgttaaggctaatgtaacttaaatggttcttgtgtaaaaatattttgatttcagcagggcttcttgacacttaatctgaaagttagaagttgctgaaagaagagaatttaaaataagagaatgaaatgaagactttggaaagtcctcacgggtggccctctgctgttccctatctgagggtgttacggtacttgagagggcgatggcaattagcctttttgcctatgtgaggttatccatttcctggtcctgtaaactaaacaaaaaaccatgtgttcatcatgacatggcctaaaaaggctcaatgactccctggaacccaatcttacaaaattctgttttgctatttgcctgcttgtttttttttcaaccactgctctcccctcagcattacgatgggtatctatattatgggatgatttttttcccagagctgaaattattgcagatatatacaatgacatgtgttccccttgccctttttagaaatatctgcaaaggtatttctttcccttagcaaagtaggtattcactgtggacattcaaagtaattgattaggaaagagttttacatgaggcggtctggaaacaggagtgaccaggacttgtaaccatagagttttgagtacctaggatcctcaagccacgtagaatacctcggcctcactctgctttcctctctgaagtatgtagcagagcccagggttaattagcaagttggctttgagctctgggagcccagagaagtataagataatcttatgatcagatactgctagagtgtgaaatcaggtacagtttctgtaatgtgtaattcacattacagattcgtaatgtgagttgcatcttgctcctgtttgcagaattgtattaaagcagtgtccatatagtcatacatatggatgaacacacaccctccaacagtacagttgttaacatattctaggacatagatttgatgaaaaacgtctggggactttgaggtaagctaatctttctgttttctgctttggaggagagtatggaaaagaaaaaatgatggcgtttaccaggaagcaagattaaacaaaataatttgctttcctttgagttgattggtaggtaatatgaagatagacgtacatagtaatctttatttttacaagtagtgacttccagagtgatctaaaaatacacttttctgctatgtaaaacaagaaaaaacaatcagtccaaactataatgacaaacatgaaacatacctagttcacagcaggcacttcctgttgtttgctaaacattcagaaggtgtgagccctgccattctgtctttttgtgtttcacagggttttcactttcttctgtggaagaagatggtattcgaaggctgtacgtgaatagtgtgaaggaaaccggtttagcttccaagaaaggtaagtcagtgaaggagggctggtctgtctgtcttaaatgccctttggggcttctctagtttttgaaggagaaagatatgcccaaaggattcatttgtggaaagtatttgaacattttctcattgaaaacccttccagggaatatgcattttattccattaacttaagtgtaccagaaaggtcatattcttgaactttttttttctttttttaatttttagagacaaggtcttgctctatcacccaggctggagtccagtggcgcaatcataggtcactgtagcatcgaaatcctgggctcaagccaccctctcacctcagccccccaggtcgctaggggagtacaggtgcatgccaccacacctgactaatttatttacttatttatttttcagagtcaggggtcttgctgtgttgccccggctgttcttgagctcctgggctcaagcgatcctcctgtctcagcctctcaagtcactcatttttggattttaaactgattgagcccattaccctggggctggtgggaaattccattctaatcatgtggtcgtccttctccatcttctaggatggtgtggggatcctgggggggttcttcctggagcagagcatgggggaagacccctctgtactttggtccacactggtcaaagctgacattggctattgcctgagcctgcagagctctttcaaaccagttgttctgttgcttccgttcatagaagaatctgcgaaagttgagaacctagggatttgagatccagcctccctccccttctttagagagcgcttccccgctacatcctgcctgtttcattttagcccttaaatggcctataatgcatttgggctacttggggaaccccaactcttcatcctttttctacccctggaaagtctttgcaacctagatgatttgctcacagtgctaatttcttagagctactgtaataaactgttacacactgggtggcttaaaataacagaaatttatcctctcgccgtttaggaggccagaagtctgaaattaaggtattggcaagattgatttctctgaagcctctgagggaagaatggcttcatgcctccttctggtttctggtgtgaaagcagcacttggcattctgtggcttatggctgtatcactccaatctctgcctgaagtcacatggcttctgccctgtgtgtgtctctgtgtcattaacatggctttcttataagaacaccagtcattggatttaggacctacactaaatcattgtgagttcattgtaactttcgtgtgtaatagtatataattatgtgtaattattatataattataatgatgatattgtaattattataatataattatcatataa

SEQ ID NO: 102008 - DNA, 1023 bp, Homo sapiens
acctcggcctcccaaagtgctgggattacaggcatgagccactgtgcctggcccaggttattaagctttttagcatttgaaaatctttaaaactcttttctgagcactgggatattacattccttctgcaccttcccctgtaggccaccagtcttcatctcggaatactcaatagaggatttgggcctaatgaagagaatccagttttgaaccctggccacttgcgttataactttatgctgtttatttcttgaccttaaaactaaagacataataaagccaggagaatgtttctcatggcaaggaataaatgtttatgagcggcttattatgcagcaaaaagccgacctcagtaattagagctgtaattggtagcagtgaagtgcctggatcctccaaaattagatgctccataatgattattctttttctcttcagtttacttaatttttgttgagtaaggataaactagcaaagatcaagttcagaaggctgaatttcaaagctcttggactctgcttctaagattgagtgattcagggactcagaaattggaactgggcatgaaactgctaccgtttgtatacattttaatactttttgttaaagtcactgaattactcacagaacccatttacttttaccccctgaggagggtatgacagggcaccaggcgtcagtcttgagagtgttacaaacagtgcttcccaactcatccgatgtaaagaagcaggtattttgttttgttttaatttccactcttttgtgaccactgctgcttttgtgaaatacaaaatcccatgcttggaggttgtggcaatgtcaaagctacaagaggttctcaatgcttagtcttgatttctgtcctgacattactgccattagcaaacagttggcacctgttccctgacttcactttgaaaagccctgccacaggctggacacagagggtcacacctgtaatcccagcattttgggaggccgaggtgggcagatcatgaggtcaagagattgagaccatcc

SEQ ID NO: 102009 - DNA, 1002 bp, Homo sapiens
ttctagttccagatatcgtggttgcattgaaaatatattttaaagtacaaacgcttcttgagatatagttttagttttgttcactaaacctggctttagtccaaccagcctaaggatgttgtggccagcgggcctgtcttatgatactgagttgttgtctgagaccagcaaaagacacagtgatattcacactaatttcaaagaaaactaggaagtagtattatgaaaatataggaaagattatgcacaaagctctagtcccactagatcctgtggaaatgattaaaacaaacagttatatactgccacctggaggaagggtttggctcttaaagttttaaaaaataaaagtaaggctcctgataagttgaagtgaacgtagttgataacatttccttgagcattttgtggtgttaggttatacattgtaaaccttattgaatttagtatttagagttttggtggctattttctgaatgaaaaagtagtataactgatttcttctcatttgtaaatgtatcagtatgaaacatttctaaagtataacactgaaaccacattcagtcatgcccttgacacgttgcatttggtggaaattgcattaaattgaggtgtttaaaaggatccaagctgtcctgtccacgttcctatcccccacactccttggcattctattatagcaaacgctttctcaggctcctgagtcacaagtattatgctgacctttcaaatgccccaagcaaataaagagaagaaactggccactcttttctacctgcctgaataaaatcgtttctggacgaatggctgtgtggtcagggatacgggcaagtttagataatcatcaagacttctctttagtgctaacggccacgttttttgttattgaccttggctcaaaattggttttcattttaagatagagtaataattttaaaaatctatatgagcatttgacacatctatttgtttgtgagtttttattataaattttggatttga

SEQ ID NO: 102010 - DNA, 1051 bp, Homo sapiens
tgtttcatcctttgaaatagtcatagtaagatgcgaatttaaaaaattatgccaactaaactaaaaattgttgtaccataatacttagggtataatttgcggctgcattgcctcaaaatgcatcaaatgctaagtaacttaagtacatgtacattggaaaacaaatttataccatttaaattttttcctaactgaattttccttgaatgttttacgagtctcaattttcttttgagttttcacttgaatgttttatgtctaaagcaaggccacacatttagaattactatgtttaaatattcattaacatttgaaattcctttgcacaaagatgtattctgaacatggttagttgtttgacttgctttgatattgactaacaggtatctaaggagcataaaattcttcttgatcgttctgatgatctgatttaattaattcattaggattttatttttatgttagaccagccgtgattaacaagggctcataattcagaaacttttaccaaaatagtaagacacactggtatatattttgatccaatgtcctgttttgagagtaactatttactgaccaaaattagggctcttaagttacaagtaagaccattataattttcatgtttgctgcttgtgctgatttttattttttaaagttatcaagacattattgtaacttaaagaagtttgaaaaatatgatggtttgtggcaataatctttttttccttttacttatttattaattttttttgagacagggtctcactctgtcccccggctgaagtacagtggtgtagtcatagctcactgcagccttgccctcccaggctcaagcaatcctcccgcctcaacttcctgagtagcctacagggactacaggctcaccccaccatgcgtggctaagttttgtatttttgatacagacagggtttcaccatgttacccaggctggtcaaactcctgggcttaagcaactagcccaccttggcctcccaaagtgatgggattacaggcatgagccaccatgcccagccaagaatcattctta

SEQ ID NO: 102011 - DNA, 1117 bp, Homo sapiens
tgagcctgagaaagagctgagactttgccattgtacacatggaggaagtgaagctcagagggccttagctgcttgcctgaactcacatcacagtcagttgcaaaggagagactgaacccacgtctggcttctctacagctgggtgcatcctgcagtgccgagtgtccacaagaactctcagaacctgggttagtcttcaggaaggacaatcagtaaggctcagaagaatctagaatatattcttaggggagtgaattggtcttctttggggctgctaaaaaaaaaaatgaaaaacttttctatcacaattttatcctagaagaagttggatggatgaaatgacgttttaaagatctcatcattcaacacaatgtttgtaaatactgaatgactttcactacctccgcaagtacctcaattttgtagttctactatcagcaatttttgtattttcaaaaaagcaaatcacagacggctttttaaagaaaaaacatggctcttcatatgaatcagagaaatggacagttcagctcaaattagcctcttaaaatgtcttatgtatgtggaggaaaaatagaagaatcacttgttttgggccataactaaagtcagccctgacatggatgctaaaaataaatggtatcacctctctgtgtgctttgaatccttcatgtacgagggttctagcttttggagataatggtatctcagttcacaattttttcatgttaattacttaacaaaattggtctgtagaggatttctgcattcctttatttataattagcacaattctttagagacccattaacattctgcagagctgaagagttattgtcagatctgcagatgaaggtgttaaaagtagaactttctggcttttttgtataagccgaactctggaaggtgtttccagaagaataacatggctttggagcatcctgtgcacattggctttaaactggatcaggaatcgaaggttaagccaaagttttccgattaccattgattggtggaagattgatcagtgagtgaagcaatgaatgattggcccactttacgtatgtttcaagcttttgctttggaagaaactaggggaatgaagaatagtattgtc

SEQ ID NO: 102012 - DNA, 1388 bp, Homo sapiens
aatctaacatcattctttccttgcttatttcgcggggctcctaacattgtatcaatctaaggaaagtaacattatatcaagctaaggaacatcctctgcttcatctgcttagcttgcttaggtttaacccagctgctaaaggaggacttccgacccttctcccacattcacaaacttcattccactccctggtcctcaggcagtgatggagaggatacagtgatggcagcaaaggaggcttgtttttgctacattgtgccatgatgttatccgtcaagttctttgacctccagaaaactgaattgtctctggcgccgggtcgtgctgaaggtccaaggagagcacaaaaatgatgctgtctataaatataaatataaatatgtagtgctaaaacatgatctttttgaaaaaaaaaaatgattggggcttcaccattgctttgaactgtaaagttctcatggcagatgtgcttgttgtaggaattccctgcttgaaacttgaaatgagtttgtggaagaaataagagccataaagctgagctgaatggtgacctttctttctttctttctttctttctttctttctttctttctttctttctttctttctttctttctcccttccttccttctttctctttctttctttctctttctttctctttctttctttctttctttttctttctttctttctttttctttctttctttctttctttctttctttctttctttctttctttctttctcccttccttccttctttctctctttctttctttctttctttctttctttctttctttctttctttctttctttctttcttttccttccttccctatctctctctctttctttcttttcttccaaattttgatgcccactcattcatgccgtgatcacctatggatgctgtgggttgtgaagcctgcctcacagctgaagtttgaaatctctccattgcaccataaatctgctttctcagtagtttctctctctccaagggttcccctgcctcccaccactgcctccgcttctgccctgggctgttttcatgggaatcggtgattcctgtgtgcagtctgggaatctagggttgtcagagctccactgctgctgccctgctaactttatttcttgttatagagggagaaagaagtggtcttacctaacgttcaccagcacaaccctgactgcgacatttgggtccacgagtatttcactccatcctggttctgtctgcccaataatcagcctgccctgacggtcgtccggccaggcgacactgcacgggacaccctggagctgatttgcaaggtatggagctgctttgggttgtttctccaagaagagcagaatggggtgtagcaatcttctaaggcac

SEQ ID NO: 102013 - DNA, 1026 bp, Homo sapiens
agcttttcatttccattctgaatccatgaagggctctcaaagtcccaatatgtctgggtcatggattgaatactttaggcattggggtcagggttggctggcatgatggaggagggttttttgaagggtgggacttacggggacctcaaggcacaagtgggtggtcctgatgcatctcccttgtggctgcttgtccttgccatcctcaggtggcagcacgcactggtgaaactggagtgagaagacgtactcaggccatgtccagatccgcgagcaagcgaaggagcaggttttcttctctgtggggtctggatactacctccaaaaagaagcagggacggccaagcatcaatcaggtaggttccagagcagatgaaaagtgagcccgcacaaatcacttctgtggccacctcaatttggggtgtgtgtgtttcttcagtgaggccgagtgttatttaaaatcaactagttggcacaaagaaactagctgtgctagacacttttaatagataatgcatacccataacattgaactctgctattagtctatcaccaagctgcagtttcccacctgcatcctttccaaaccctcattaattacagacctactcaaagcgcacaattcaccctgagtcttcaggaaaaagcagggctctgcaatgaagccaagtgggtacctgagtgcagtctttttttttttttggagacagagtctcgctctgtcaccaggctggagtgcagtggcacaatcttggctgactgcaacctccacctccctgattcaagtgattcttctgcctcagcctcccgagtagctgggactacaggtgcccaccaccatgcctggctaatttttgtgtttttagtagagatggggtttcaccatattagccaggctggtcttgaactcctgaccctcatgatccacccgcctcagcctccccaagtgctgagattacaggcatgagccactgcacctggccatgcagagactttttaagctgcctctggcactggatgaaaggc

SEQ ID NO: 102014 - DNA, 1033 bp, Homo sapiens
cctatgtcagtaatgtccctcagtcccactcatgtcctataactgaccgatcctatctggaaactgacctttgcttcacagcaaccctcgtgagtagacaccaagttgtgtgttaggagtatcactttcacaagtgagttcagtaagtacattgagtgagcagacatggtggcttcattcaggacagcccttgaaagggaggaggggagagtgggcatctgacctgagactcactttttgttactgatttcctgaagaaagaggaggtcaggttattcttatccatgggtgtctagacctgtcacctcgactcccaggcattgcttctctggaaatgctccggttcatttctcttaagttcctaagaggtgcctttttcttcctgccccttcttcctggtacagaccactagccagacggagcttgaaaactggatcaccgccatccactctgcctgcgccactgcggtcgcgaggcaccaccacaaggaagacacgctccgactcctgaaatcagagatcaaaaaactggaacagaagattgacatggatgaaaagatgaagaaaatgggtgaaatgcagctgtcttcagtcactgactcaaagaaaaagaaaacaatattagatcaggtaatcgttcttccgtgtttaggtccggacaaaattgttaggtctctaaaagggtttttttttttttttgctgttttggaatcgtgaaacatcatcggatatctcctcgacagcctgtcatccaggatgctaagttctttactgtgactgtcagtgttcttcaccctttgttcatagctgattgttaatagctaaacggaacaatattacattgaatgaaagacagaaacccagtagaggagccctggcccccatcaatgatgtgctcttctaggggatctgtgtaattagaaagtttgcaatttcatttcccatgttatcagactgacttggagttctcttatggtggggactcatttctgactcctcagtaaattttgaattcttaatttggaaaaggtaac

SEQ ID NO: 102015 - DNA, 1038 bp, Homo sapiens
ttgtttctgccattccctcagagagtaaatgacacaggaagtcagggtgcaggtgtccaggagcacagcccacaggccctttagggaagggagtctttactttcttggtgacgcagagctgagtgacacagcctgttggaattcaggcccagaacatggagccaccgagttctttgcttcatcctgatgggttcccaggatttgttgacatcctcagggctttgtccttgctgctcaaaagcaagacttgcagctgactttttcttagcaatgcttgaatattgggaaataaaaagcagaacatgttggaactgtgggatagagattttttttccctaaagattctttcccattaggcaaagtaattgatttttttaaaaaaagatttcatttggaattagtctctggagtgtttccatggacaacggaagaacgtacagattatgttccagggaagatgaaggtaaacagactttcaccagggagaacgtggttctcagatttgctgcttcgcgttcatcttaaagttggaacgagttgatcatgagtaaaagctgattttaatcacttttggtggtgctttgttgtggatgattctaaatcaaagttgaaaaattatacaaacagttacctgatgggaccatacaacattcactaggtgcgtgtgttaggattggtgagtgtcccctaattcattatccacaggcttctttctctcttcttaagctatgctaacgtgtgttgctccttttatgttaggaatctacttttcattagtgttgaattagtcgtaaaaactatttagagcagggtttctcaacagtgacactgttgacattttctggataattatttgttgtgagggctgtcttgggcattgtggatgcttaacagcttctttaggctctgtcctctagatgccaatagcaccttcccccaagttgtgacaaccagaaaggtcaccagacattgccaagtttgccccatcataagaacctctgacttagaggaaaacggtttccccctcccatttttgtt

SEQ ID NO: 102016 - DNA, 1032 bp, Homo sapiens
taatttcataggattcaacctgatattaatggattgtatagaccatcatgtttatgaaaaagccagtcactatttaatagtcaaactttgtgtttttgactgtgtatatatagatacagacatgcatgtgtagatcactttattttctgtttatataaccatgcttgtatttgttggtatttgttgtcattttgcacattttcgtgaagtacatgtacgtattgttgcacgtactgcatacatcctggtagcctagaaaatgtaatatatttatgagctctatattttaaaaggaaaaacacttctcaaacacacagacttttcttcccaagctagacttgaaacagggttaatacatggcaggctaggttagataggtcaacaggattgatggaagggcacaagaggaagaagcctgggcttatcagtatcaaactagaccgttcgatactggatttcacagactgtggttggtttgggaacatgcaatcctagagacatggagcagcctagagctctgctcagtgaggtgaacacaaatgcctatgcggtgatgtgcaggtgcaggtcaacccttgcacaagtaggacttgcgttggccccattattcttggtgccagctgttgctcagatgcctgatgacacaggaagggagggtattggtcaggatataggttttgctgcatgtgccagagaccagcaatgccaatcccaatgccataagcaagacagaactttatttccctcccacctatcaaaaatagatgatttaaggcttgtgtgataactcttttctatgaagtcactcagaggccctggctccttctgaagttttgttgcccagctattcctacagcattatctttttcttttttttttttttttttttctgtttgagacagggtctcactctgtcttccaggctggaatgcagtggcacagttacagctcactgcagccacaaattcctgggctcaagtgatcctcctgcttcagcctcccaagtagctgggactacaggcatgtgccacc

SEQ ID NO: 102017 - DNA, 1034 bp, Homo sapiens
tcatcaccctttccagcaatgctggagaatggacttctgggaatttgggacatcccaagtttcatgactgaataagggctggggctgggcaacctgcatccgtttctcaatgggctgggtcacatatcagtgggggcatgtgtaccactgagcctgaataaccacttaaggagacaaggtggagttgtcttggatcacagatgacaagagcattccccgttgatgacacggagctgtttgcttccaaagcatgcaagctcacctggggcccgcaggtcttttacctggagtaatcacttccttgcttggtttagtggttgtcccagagttgaacacacacagtctggtcatggcaaagctacagcatcagttggcatgagcagatgttcaggtcttatacagaggtgagtgtccattgaggccttactcttagtttaaatagagacagatgtgagggccttctgtaaagggatggatggtgttggcaatgtagtgaactcttatgagacacgcccttgagagttggtctttcgggtttctgcctcgcttttccttattctctcttcccatcctccttcccctttcttgcacttgcaggttttagctttttgccaggcaggtcacagtcactcagcttttgctgaaaaaatctggaagagccattgttggtaagaaaagggggaaggcatgggattgatttgtttgtttgttttgttttgagacagggtctctctctctctgttgcccaggctggagtgcagtggtgcagtcttggctcactgcaacctccacttcctggactcaagtgatcctcccacctgcctcaacctcccgagtagctgggactacaggtgtgcaccaccatgtgtggctgatttttttgtagttttaatagagatggggtttcaccttgttgcccaggctggtctcaaactcttgacctcaggtgatccacccgcttcagcctcccaaagtgcagggattataggcatgagccaccatgccctgctgagactgaatatttagacagaatc

SEQ ID NO: 102018 - DNA, 1154 bp, Homo sapiens
ggtggggtggaggtgggagaggagatgctgtggagaggttggcatggtagttggaggaagcacagagaagccttctggttgtagtaaaaggggggacgtgagtattcttgggagtgagaaaggttgggagtatgccctggaatgagttcttcaatttcactagtgggtggggacatcgaagctcaagttttaacgcgggacaccgggggagggtcttgaacagcagtctgaggagtcctccacattgctcctggaacatttacctggcagtggtgtgccggatggattgatggaaggaagatgggttagaagagagagcttattgctcaaccagtgatgtggcactcggaggggaagagaaaaaactgagtctctgatatattatggatagtgaggagggaggggagggatgactgtaaggtataagcacatacatagaaaagcagatgaaaggagaggcaatgattcatttaacttagacataaagcttctccaatcaggagttacctgaaggaacatttcaagcttttgccaacttactttggaatccctttttagtaacagtaggaattttggttccaatgcttgtagctgaaattgtgagtcactcccattggaaatcgttagaagaaaaggaatgggttgttggaaacataaaaagaaaggcatagagattttgccctaagaaaggaaggggagggaaaatagagttgatttcctattctggcaaatcagggatggcaattattagtatttcataatagtgaccagtagttactaatttataatgtagagaacgtcaccattttcctagtttagtgtgctgttttgtgaacgtgagaacaattaacaagcctaattagtattaggctggcaccagccttggtatgcctgtgtttttcccaggtttctcagagacctttcttccatgttggtgcaggaagttagcaactgagttcaggcaatgccttctctccttgggccaagatgtaagtagggctgaaggtagagatgaccgtaattatagttaacatttttgagcaggtactatgtgctgggctcagtttaagacacttttcctgggttaactcaatctcacagtgtcttatacagtgtcttacaaagtagatgtgttgctctccccattatacata

SEQ ID NO: 102019 - DNA, 1061 bp, Homo sapiens
cacttttgtcacctaaaacactgattacggagagagatggccaggataactgtagcagagccatccctcacggctgctttctttgataagcaagtagtcgcgttgatgatttcattaataacaaggtaaagagtgcagcattgtcagaggaggagcttgagttcctagaaaaattgtcttgatgtttaaagttttgttttattttgcaactgagcttcaatgactcagagataagtttgtttcctgggctgaaaatgcacatcaacaaccatatgattcttgacctttggtcacagactcttgagaatcagatgaaaaatgtggacgttttccttagataaagacagggaccacccttctgcatatcatttcaagggatccataggtcccctaaagtccatctagaggcttctttctggttaagaacctcaggtttttataaaacaaattttttcatgtaaaatcgatttttaaaacacccttttttttttctgttctcctctatcttctgtttgatgcttttttttttttcttttctctttatctttctttttctggcacgtaagttaagcaatgagatatttattttgcaaacaaacccatgcattttcaacaagaatatatatcttctttgccaagatctgtttttgggaagttggaaggtgggtaggtagttgagagatagcttatgttagccattcttagacctttttatactcttaaaaagtaattcaggaggccgaggtgggcaggtcatttcaggtcaggagttcgagaccagccttgcctacatggtgaaacccccgtctctactaaaaatacaaaaattagccaggcgtggtggcgggtgcctgtaatcccaactactcgagaggctgaggcaccagaatcatttgaacccaggaggtggaggttgcagtgagccgagattgcaccactgcattccagcctgggcgacagagtgagactccgtctcaaaaaaaaaaaagtatatatgtgtatatatatattttattaatatatatttatataaaaatatttatttatttatttatattaaa

SEQ ID NO: 102020 - DNA, 1794 bp, Homo sapiens
tctaaggaaagaaaaaaaaacacttgtgtcctagaaaccaagttgctaccaaggctgcatctgtggtctgagaacgtaagcctgaagcttgcctccagatgcactccctgaattttaaacccatctcttctgaattgagattgtaatgacacaaatgaccagataacccacctgcagcccctctgtctaccctgcgagggctacttctgcactgtcaattggacagatcatggagatatgtgacctattaaagagtcacctgaaagggattgaagggctgtcttgaaggcattatcagattggcactgcaaggctgattcaaagagatgatctatggggccttcggagcttagagaaggatacagtgacgcagactgttaaaaacagaacatcaccttggactttcatttctacctgaacagtgctcagttagtgcatatgctatgtaagatttgagaagggtgccctgttgtattttggctctctgtggttctgacactagggatggctctcccctatactcgatggctgatggggatttgagcctttgagttacggctacccccagaaaatgggcaaagcaaaggacagttctcccctctaggtctggtaccactgaaagctctcatgtgtcattattatacgaaatttctattctttggcttgtcaccttctaaaattgtgaatatatggaagtgagatcatctaaaggtggtgtctcataaaatcactgcttaggcagcttaatgtaatgggaagtgccattggccaggaatcctaagaagtgcatttgcatcctggcatgtgtgcttacccagtggtgaccttgggccagtcactccatcttctgtgccccaggatctgttgctgtccagtctgagtgacaccagcctcccacagggccattgggagaaccaaataggataccatgcatggaaacctcttgtggagcgtataaaatgcacggaagtattatttttgtattgactttatatgttgagtgaggatctttaatgacttgaaacaaaccccggaattatgcacaacactatccacccgcccacatttcctagtctaagtttggcgtgttcatccaacgctatttcttgagagcccactatgttccaaacagtgtattttaagaggcagtgggtgtggaagcttccttgaaaagaatgcttttttaaaaaaaaatttttttctttttttttggtaaaagtttttgacccaggggacctctccagtgagcttgaatcatagatattaaagtctccttggctgccctgatgatgtagttgaatctgtgatcatcctgtcagcaattttactccccagaaaagagttcctggcagacatttgacccaagagcatgacctctaagcctggaagaaaacacattttatctgaaataatgtgaacaacttcatttgatttgaaaatgatcaaaaatgggtttttggccctttttcctgtttttggattttttcagtagttggatggattattgtaatgtgaagtcacaggagttcacatttaagtcttgaatggtggcacatatgtgctacagggtctgctggcaatttttggtttaattcgtgtattttatgagcatgtttgttgtgcatccacatgtgcgctgtgcagaaaagtttgtcttgggagtcagtatgagtaaagcctcatgctatttgaagcagaatttatttctgttggtttctgtaaaagtacttaataggttactccttagatttagttgatggctagttcgtctttgggcctgaactttatgaattt

SEQ ID NO: 102021 - DNA, 1023 bp, Homo sapiens
atacgctttgtgtcagatgattttgctcagctgtaggctaatgtaagtgttctgagccatttagggtaagctgtgctgagctatgatgtttggtaggttaggtgtattaaatgaatttttgacttaggatattttcaccttacaatgggtttatgaggacatgaccccatcataaatggaggagcatctgcatttaatttggtgggatttaaaggcccttaaggtgattacttattgaaaagtttaacttatcactttaagagagggatcatggtgttggtaagaaaagaaaaatcacactcatcctattgtctttgatccctggccctgagcactcccccaggaactcctgatgctttgaccccataccactttcagatgacactcttgcccatcatgccactaagactcctttgctctcactttctctggatcgtcctaggcctgagcagttctacacttgccctctcaactcttaacctcattcctgaacctctgcactgcagctccaaaaggaagaggaagataggaactggaggcaagaattcagtggaattagacaggtgcaagcccttaattctttccccaggaagaattgggggtggggaggggaacacactggagcacaagctgaacaccctcacccctaagttcatggatcaggatgaccttcaacccagtggtccagagtaagggactgacacagacctgcaggtggaagggacccagagagcagagagctgattgggaagtttcttccaggcatcctgagagaagaggctagcgtatttaagactgatgtgtgctgtgtctcattagcattgtggtcatgttctcacctatgttgcattgtagttgtatgagttttcacatcttagattaaagtgtctttgtcattcattcattccagtatttttttttttcttttgggtttttggtgttttttttaatggaccacctacaacctttcaggctgggttctaggcaatgaggatacagcaggaaacaagacacttccagccc

SEQ ID NO: 102022 - DNA, 1030 bp, Homo sapiens
ccctgccccccgcccccaccacacccagctgatttttgtagtttttagtagagatagggtttcaccatactggccagactagtctcaaactcgtgacctcaagtgatccacctgcctcagcctctcaaagtgctgggattacaggtgtgagccaccgcccccagccacatcttaatattcttggagaaaatttttagctgtctcaaggtctgtatgttgaacgtgcatctcaaatctcagattttaattctggaagatgagaagaattttgcactagagatgtttgaccccagtggtagaatcaccttttggattatttactcccacacggggcaagccctggccagctgacccacagggctgggcattgttcatgtggaagtttcctgttcttcagctagggggtgaggcatcctgtcctgctgtctgctaggagcaccactggaaccgctggtgtaattgagggcattagacatcctaaaccataaaaatattattataacctccttagttctcaaggtgatgaagttgtttccagattcctttgtgtctttttctttcctgttttccctcaacaatctgtggttgtggaaatatttttctatgttctttatgcccaggactttgaacacagggtggctttctattaactggaatattttcttatgcagtacaggtggtttaaaaatgcaaggtacgtgctgtatcttgggtcatatagggttgacctttcttttttatgtgtgttctgtttgtttactcatgtacttttttttttgagaaggagtctcgcactatttcccaggctggagtgcagtggcacgatcttggctcactgcagcctctgcctcctgggttcaagtgattctcctgccccagcctcccaagtagagctgggattacaggtgtgtaccatgcctggctaatttttgtatttttgtagagatgggtttttgccatgttggccaggctggtctcgaactcctgacctcaagtgatccaactacctcggccccccagagtgctggga

SEQ ID NO: 102023 - DNA, 1053 bp, Homo sapiens
agccaaccgggtagcaatgggggaattgtggaaagggaatatattgtggggtaataatggggtattgctgagaactcgtgctcctttccctgcaagcatgagtcactaacttcatggttaaatagcatattttccaagataaggaagaactgtctttgcttattgttccattctggatagacgtatatatttatttactgcctgtatgtggctcctttccacaaaataggcagttttcttcatattcctgctcaaagtgtttgtcatctcaggttcccacctgctgaaaccaccagcagcgggcagccccaggggaatgtctgggaagaaagtaccaaaatgaagccacccaaagagcccttcaggcctttcttttgcttgccttagtatttgtaatttcacctctaccagcaggctttaaaaagatgaaggaaataaaacaaccccattaaccccacgtgttcctggagctcttgtccattgattttccatgttaaattgcagtttggatcttttacctaaattttttcctgtgcatattcttcatgcattttctctgaatttgatgtttgccttcgtaagaaaacgtgtatacaatggaaagttctatgtaagtgatttgggcttctgttttactctctttcagcattttcttcaatgtttgttataaatacagcactactttgagaataactgagggttgctggtttcctttcatttctgtttcttgagactctgaagattgagtgggacatgggaatcattctgtagtaacctgtttctgttgtccaacaccttaatatacacagatagattaaaataataagataacttagtctgtagggctatgtattaccctaaatgtaaataggctggtgtgtatttatttatttatctgatttaagcctgtcattttatgcctgtatccaaatgttgcatcatttgatttgggatgtcatattgttacaggaaagaggtcccgatccagactctaagagagggttcttggatctcgcacaagaaagaattcagggagagtctataaagtgaaag

SEQ ID NO: 102024 - DNA, 1031 bp, Homo sapiens
atcctattaacctgtcaggaccaggttcaaccgagagcctctcctagcagaattagtctatttcttcacatccttcactattaataatgccagactagctgttacagccctgtctgagtgggtagatgcccactgtcttcccagattatatgcatcataaagaaatggtctatttcctcattccaaacatataacaggtgcccagtaaaatgttggttgagttgaactgaatgtgtgatcatcagtaaaattctacatagatactctgtcttacccaaacaattcataagcagtttttagatagccctaagcgtagctatttagaagcctatttttatatactctttttcataagatgctgtcatttgtaaaatgcaccactattttgcataccactaagaagcagagaaaatggcaccactaaaccccaatacaccattgtgattgtaagatatattcaatttcaaagatgttaagagtcaaaaatagtgtttcttaaaatcaatgaaataaagaattatgtttttacatgttagagcttgtagtcttaattgtataactgtgaaacaacttgaaatgatttgcaaataaaaacttaaggtcattttttttttccattttaaaatgaggagtgactaaaggagaatttgggaccaagtgcccagggagtgacttgggactcaaggccttttgaccatggttacgtcactctgtcttgtggtacctctgacaaagtcctcaagtttcaacctcagttcttctctttcaaaagaatcatctgtattttgaaaatctgtgggaagaatttctttaaataaataaatgcacacacacacacaatttgttgagacaggatctctctctgttgcctagggtggagtaccatggcacagccacagctcattgcagccttgatctcctgggcttaagtgatcctcccgggcaagccatcccagtagctgggactacaggtgcatgccaccacacctgactaatttttttttttaattgcttttacagatgatgtctta

SEQ ID NO: 102025 - DNA, 1020 bp, Homo sapiens
atatattgcactgtgatttgtacagctttgatcattgcctgcattcagtgatcttatttaaataataagagtgagttcaagatgtgagtcaacagcatggtgggtttcctgcagcctgagaatattttggagactgaacccaaatctgatttactttttaactttatgatgccaaggctgaggcatcctatttttatttttgcattaaattattgaagctgttaaatccatttattattacaggtattgatttagtccatacaaagtgtggttgagataatgtttgaaacttctggcctctcatggataattagagggtttggttttgtttttgtgtgtgttttaagttccataaatctgcattggaattggccattatttgtgtctccattccaatatcctccctgatctaagttttttgggagttgctatgctctgaatgttggtataaattcatatgttggaacctaatacctgaatgtgatagtatcatgcggtggggcctttaggacgtgattaggtcatgagtgctctgccctcataaatgggattcgtgcccttatgaaagagacttgaaggagcctgtttgccctttctatcaggagaggatgtatcaggaaggtgccatctgtgaggaacaggccctcatcagatgctgaatctgctggcaacctgaacttggacttcccagcccctagaactgtgagcaagaaatttctgttgtttataaattactcagtctaaggtattttgttatagcagcccaaacatactaaggcaggaaggttgttttttttgtttgtttgtttttgttttttaactgtattgctgttctagtgggttccagtcctttgtttttgaggtcctttgtggaatggacaccaaatttccagtaagatcactgtgagtgaattgtggcccctcagggataacatttgaatctggtgcttgattatacctcagagtggaaggtgttattgtcaccttccatttcagttaccaagccaggaacttcagaga

SEQ ID NO: 102026 - DNA, 1786 bp, Homo sapiens
accatacaggggtcagagtcacagcatgagctgacccattcctgccagtcaatcggggcgctggaaaacggcgaaggtttccagtggaggatcatgccttgcccgtgattgtctcgtgtctttagactccttcagtcaggaacagttgcacagtctttcctggacttacaacgttgatactttggaagagtccaggcaagttgttgtgtagaatgcccctcagtttggtttgcccagatgttttctcacgattcactccacattggatcgttgcatcactggcagacacatcacaggccacgatgtagggtgtcctcctcctgtgtgttctctgagtgctcccgaagttggcctgtcctacttctgatgctgtctactcaccttggccacttggttaagacagcattgccagccttcccagttgtgaagttattattttcctctttgtgaaggaaagaaatgttagtaaatgttttgtggggggatactttgaaattatataagtctcttctttctcatcagatttccaattttatttctctctatatggacttgtagtttcctattttattcagtgggttataatctgctagtagtattatttattgatttttttttttagagacagggtcttgctctttcatccaagccagagtgcagtggtgcaatcagaactcaccacagcctcaaactcctgggctcgagcaatcctcctccttcagcctcttaaatagctgggactacaggtgcatgtcaccatgcctggcttatttttaaattttttgtagagatgaggtcttggtgggttgccaggccattctgttatttattttggtactcaaattgtccctgatttggcctgcaggcaccccttcaagtgtgctcctctgtctcgttgtgtgccaccatcctgtgctctgcctggattgtgaggacactggcggttcctcccctgggggacttgccctttggggcttctgacaccaccatggcagtcacccccgtgagcagacaccttctggctccagtcaccacgtttttaaaaaaagtatatcttgtagttagattgggttaaataagccatagacatttttttttcctggaggttttagggagaattgtttttgtgcctaaattgaaaaaatgaggcctgtttagaattcataaactggcacagaagggtagctctgcgcctccaggcaaattctcatacaaattattaaaagactcaggaggggttcagtcatgttaaaaccccagtttgaaaatgtcgtaatcacttttctctcagcaactggccgttgataaaatttccagggagctaggagggcagctttttaaagagaggtgtgggtgagagagaaggaggtgagcccccgtgaggggcagctatcagtggaacctttggagattgttttaaaattctcatccaaggtcctgtaaagaaggaaaaaggctaagaactgttttttttttttttttatttttatttcagagttaatgcccatcgctccttccctaatctatttgctacccccttgctgctgagtcctgagatccagcctttttggccagttgtagaaccaatcgcttattcggtatcatctaattttctatatggtttattctcatttaccacattgaaagtaatcagtgaaaactgttggctccaaatttaatttaaaacattgtttataggtagattttttaaaagtcagcattttagtggagtgagggcctaatgaacacttctagttgcacatctttgttgagcaaaatattttaa

SEQ ID NO: 102027 - DNA, 1158 bp, Homo sapiens
ccgcacccagcttaattttggaagacctttaaacctttcatctgttactagtcgtctttgacagaatatgttaaattactctaaattgatctttagtcagttttttccccctcccacagaattgatcggtatatcgtgcagagatttggtgaggtggaggtcattgagcttgtaaggcccagaatggtgaagttttcaagctaattgcatttgcttcctatagttgcttcatttttcatccctgtttcctcctctgcatcagcactaacccccccaactcccagcctttagtttgctgtaggctgtcaaaccagataaccaaacttgttaaattgagaatcaataggctgtacatagggactacaacagaatgacgctcattattgacagaatcaagttcaaactccttgtcctggcgtctgttggcctctggcagctggctcatctggcattagctggttgcacgagttgctgcaaccctcccacctccatcacacacacattgcatccccttcccgaatcacaccaaattataatggatattatcaatatcatcataacaaattacaacacgcgtttattgcgtgcatacaatgtgccaggtccttttatagagtatactatagtaaacattcctggcgactgaagcatttagaatatagtaaatgtagattaaattatgaaatgtttaaaataattatatgtaattaatatataatataaaccatatattagtgatttaataattacaggttaaatattaaatatataaaatatataggcatatagaatatatgaaaacatttaaccctcctcccaaggatgagttagataatgccattatcttccttatacaaacgaggaaatgagacggaggttacctaccttgcctaaggtcatgcagacgaaccattgtgcagcttttagttttttgttttgagatgacatttcactccatctcccaggctggagtgcagtggcgcgatcttagctcactgcaacttccacctcctaggctcaatcagtcctcctactttagcctcccgaatagctgggtctacaggtgcacaccaccacgcccaactaatttttgtagtttttgtagagatgaggttttgccatgttacccaggctggtcttgaaccctgacagggattc

SEQ ID NO: 102028 - DNA, 1027 bp, Homo sapiens
ggacaagggtgatgataaatcaccttccattctgtttgggccataatccctggaacccatggtgggcatatttgaaatgatttgacttaaatgtttaaagctttagtctttcattgggtaatgtcttagagaagacaatttcttagtaatatgaattgttcccaaactgaagtccatcccctttttaggaaactggcagcccaatccaggccctcctgctcccctttggagggtctttgttcctccttgagttagcaattttgacaatattcctccaaatttgacaaaaaaaaaaacaaaacaaacaaacaaaaaaaccatttcctgatggcagagacatcagggagaggaatcaaatttcttctcctttgttctggaacgagcttattggcagttcattatttacatatcgtgagagagtcctgccaagccaatgcaggtgttgctgacttgctaagacaagtttgcactctattttctcttaagaaaaattggaatgcggccctttgtcagaggattgcattgcacgagtcactgagctaaatgtaaatatccgaaaatgcaaagtatgctttgctgtagaaataaacattttgacatcctgccttacatgattttcctcaatgacggttgttagtgccatccttcttctctcatcctgcattgtgtaacctttcctttagggtttttggctacgctaacaagagcacttttctaacttgtctgctttgtcattttggggtcaccaaattggtagtagaaggaaatgcagtaggtagcgttttccatcagggagtggttaccttctgcgtctgaaaggcagcgagtgacctggatttttaggaatcaggtgtgtcccggttgtaagtctgtgaaattagtttaacctccatgggggtaaatttcccagactttattggagtggttttggtagctttgtgactacctagaagattctcacagaagttcgttaacccaaggccatttttcacccagggtggctgactcttgtaacgcacaacccgga

SEQ ID NO: 102029 - DNA, 1046 bp, Homo sapiens
cccagatctcttttttttttttgagacagagtcactctgtcacccaggctggagtgcaatggtgtgatctcagctcactgcagcctccacctcccaggttcaagcaattttgcagcctcagcctctcaagtagctgggattacaggtgtgtgccaccacgctggctaattattgtgtttttagtggagatgggtttcaccatgttggccaggctggtctcaaacttgtggcatcaagtgatccgcctgcttcggcctcccaaagtgctgggattacaggcgtgagccgccgcgcccagcccaactctcctttttttcaattccacatttagcgaggctctgagaggtagagggagtcacctaccattgctcactggtcagtgtgcagctggggttgacctaagcttctgataccacataccctgaatgccattttctggctcattcctgccttggagacctcagactcaaccatcattgaccaaagccattattttttgtaatgttgtggattttttttgactaatgatattcagaagtgtaaagtgaattttttgcatttgataaaatatctataataaaatttaccactgtagccatttttaagtgaacaattgcacaaccattaccatgatctaattctagaactttttcatcatcccaaacagaatatgtacccagcaagcaatagctcccatttctcatcctccacctccctgccccggtaacctccattctactttctgtttatgaatttgcctattccaggtacctcgtctaagtggaatcatacatcatacttagcatcgtgtttttaaggttcattcatgttgtagtatgtgtcagaatttcattcctgttttgggttgatgatatatatatgtatcttttatatatatgtttatatacatgtaagcataggtgtatatatacatatgttttgtttattcctctgtaaatgagcatttgggttgtttcagttttttggctattgtgaataatgctgctataaacagtgatgaaacaactcagcaacaacaacaaaac

SEQ ID NO: 102030 - DNA, 2009 bp, Homo sapiens
tcggggggtgggggtcaaggggagggagagcattaggacaaatacctaatgcatgcgggccttaaaacctagatgacgggttgatcggtgcagcaaaccaccatggcacatgtatacctgtgtaaccaacctgcacgttctgcacatgtatcccagaacttagagcaaaataaaaaaaaaaaataataataagccagtcgtggtgccgtgtgcctgtgttcccagctactcaggaggctgaggtgggaggatcatgtgagcctaggaagctgaggctgcagtgagccgtgattgtgctgctgctttccagcctgggcgacagagtgacaccttgtctcaaaaaataaaataaaatatgtacgtgttaagtacaggcacaatcatttcttgatttattttgaatatttttgatctacggttggttgagtccacagatatggaagccatggatactgaacccgtggatagggaatggcgactgtagttacaacatgtaccatgtgggaaggtgattgttacagtggaggcccttgaagcaaggaagtgttgggtgtttgagcttttgaacataggggagttaggaaggccccactgcatgggtgacattggagccaagatggcaaggggttgaggaagcgagccctgtgctgacagagggagcatcgaggcagagggcagagggctgggctgggcatgttggaagtttgggtggaaagagcaaagtgggagagccaaggagatgaagacagaggagggtcgtcagggcagggtctgcgggactgctggtgagatgggaagcctttgagggttgtggataggactagggagacacgatctggtttaggtccataggttctccctgacagctgcgttgggaggagactacgcaccatttcatgtggaccatggttctcagtaagcctgtgtttgggcatcgattagactttcttattgctcacacagtctggatcctactggtgcagggtgatggtggggtggtctttatttttgcaatttctctaggcacaaatcttttttcttcttttctgttttcttttctttcctttttttttttttttttttgagatggcggcgtttcactctgttgcccaggctggagtgcagtggcacatctcagctcactgcaacctctgcctctcctgggttcaagcgattctcatgcctcagcctcccaagtagctgggatcacaggtgtgcatcaccacaccaggctaattttttctatttttagtagagatgggttttgctatgttggccagattggtctcgaactcctgacctcaaatgatctgcccacctcagcctcccaaagtgttgagattacaggcatgagccactgcgcccagcccacagatctctttctttatagaagatgaagaaagggactttttatcctataagggtacttagctgatgaattctagaatgagttcaagcgtggctaaaaaatgcttgaagataatttcgggttctctgcagcccagtgtttcatttaccttccaaacagaaagctcctcctccctgcacatgctctgtgttgcccccttgccttgcctgtgagcagattcgaccgtcttttccattgatcacttccctttttggctcaggctgctcctctggggttttagttctgaaataagtgaaccatttgtcatatctgcttccttctcactggagccgcatgttaaatcgcggccggaacacatctgtcagatctctgagcttttcaaaaatgcaaacctgaacgttttggcatatgaccctgttagcctgttttaagtggcgtgtggtaaacttgcccacagatgttagtatacccgtctactttgaacaaaataataataactttcacatctggtcctcttttcatctagggatcttaaaaccccaagtgcacattagttaaacctcacatcactggaaggtagggaagggatggagggcaatcgctttaatcaccactgcaagaaacttagggggattgcccc

SEQ ID NO: 102031 - DNA, 1068 bp, Homo sapiens
ttattgattgcaacaaacagaccattctgttgaaagatcttggtagtcgggaggctgtgcgtgtggggcaggaggtatatgggaaatctctgtgctttctgcgtaattttgctgtgaaccttaaactgctctataaaatggtattatgaaacagcaacaacattcaaaccaaattgaggagacacagcactgcattctactcatgacatctagtaaagtgtcttttgacctatagtacttcttgaagttctttgcagcctgtcggcttgggcagcagtcactgggcagcaggggagaatccctcatcaagcaggaggctctgatactctaagaatgggattttccctggcggcttcatagctgtgaaagcactgacttcatgttcctgttttcttccttctggccatgtgctgcgctgtggacactaaggatgcattttctggtgagctgattcatatggtagatgccgtgttagccacactttcctgcatcaagggtggttacggacagcagggatttggtcgtatttgaatgtactgtgacctggggaccagaaatgctcaaatcctgcctcagtcttatcacccttcccacaaggagtcgtcaggactgtgtgcacaggcaccttagcacgaaagtgagcagttacgaggatttttctgggagccgacctcagcgtttcttcttgcgggttgtctttgacttttgaagtcagcatctgtgtgttcactgcgttcacgtgctcagttgcaggtagtaaggagacaatagggcagaaggctgggaagcatccttaccctcagggaactgacattctggatacagacaatatcaagagatgttgtccctgcgtatttgtggggggttcgttccaggacatcccctccctgccctgaggacaccaaaatccatagatgcttaatctcttttggaaaatggcatagcatttgcatataatttaggcacatccttccacacatttgaaatcatctccggatacctaaaacaaaataaatgctaggtaatagttgttatactgtattgtttagggaatgatgacaagaaaaa

SEQ ID NO: 102032 - DNA, 1196 bp, Homo sapiens
gaatgtcagccctcagtaggaaagtagtgctgtccaatggaaggcctggtcaaatgccttttggttggatgtttcaagctggtgtggcatagccggagattcccagtcctcaggagtgtggtagggtaggctctgtcctaccaggaatgcatttggattttagagatagttgagaagtagtttcttttggaataacatttaagacacgtttgggttctgggacatcctccttcctcatttttcccctgggagtcattgtggctggttgggcctatgggcctgcaggctgtgtttgatgtggtgagctccccttttccaaaggatgaacctatctgccttgagatgcctacagttttgcaacttcagtttaataattatatatggattttgagacataattggtgggatggatgcttactttcataattcatttctactcctgtgtccagaaatttgtaggcatctttgttttacagtttgtcatcatcttcgttgactacttggttgaatctttgaaatgcattcaacccagcatttttgttttttttagcactggctctgtatgtcacaacagtggatccctcagagaacacgtgggctggtagtaccagttgggaaaacatagcctaagtataatggaatctacagcgaagttccacggacatgtttatttaatagggacaaaagaaaatgttcaaatcacattttacctttccgagtttataaatccatctgaagtgcttgaaaaaaaatcatagtattagaaatggatgcatgtgtatataaaactaacactagaattctttgccaaatttaacttctcaaaagtgttcttagaaagagggactttcttggagagtatgaagtctattttgtctctaactcactaaggtcattctttgcatttctctttcggtgtgtctccccacaccaaactgctattaaaaacatacagagaaccttgggaggctgaggcaggtagatcacttgaggtcaggagttcgagaccagcctggccaacatggtgaaaccccaactccacaaaaatacaaaaattagccaggcgtggtggcgcatgcctgtaatcccagctacttgggaggctaaggcatgagaatcacttgagcctgggatggggaggttgcagtgagctgagattgcaccactgtactccagcctgggctacagagggaaac

SEQ ID NO: 102033 - DNA, 2097 bp, Homo sapiens
ccctgtgcctcatgtgccacagtgttaagggattctttttgggattaaaacccggtcagagctgtccaaagaaatgtcaacgttgcttccaggttctgtgagcaaaggaaagtaatgaggttaaagagcaaaactaaaaaaaaaaaaaaaaaaaaagcaaggggcaattctaaaaattgttagcccatttctgtgtgagcctgtgtgtgtattttcacactgcagctgctcaagttgagtcatagaatggatgtgtcatctcttggcttcaggcacagtggctagcccatcttccccccggagggagtttaagcacatttatgtgatgaataatgtggattctcccccagtacttcagatgtagttcaacagatttcatgcaaatggtaggtgaaacatgtcaagcatcttttgtccccattcgaaagataacagaaatatgtcccagcagagtcagtgcgctgagtcttagctgatggccggccgaacgctccccagtggcgtctgtcttcacttattctgtcttggacatcttctgcctcctgggtgcgcccccgacattgtaaggctatggaaggagggctagggctggaaaggaagatgcaaacattgagcacctactgtgtgcctggcatacttctgctttgtgatctctaacagaatacatgattgcacctcacagcccctctgagcctgtgcgtattctcatctccaagtctacttggtggaacctaggtagcttgactaaaatcactctattgtggcagtgaccctggagttgaactgtgtgttatctgatttctaaactcgtgactgttcccacacatcttgacctccggttgtgaatataaacagagacatttagatgagcatgtctaatggtcatattaactctagaatttggagactcttgagtttctttcttttttctttttttttggagacagagtctcgctctgtcacccaggctggagtgcagtggtgtgatctcggctcactgcaacctccgcctcccaggttcaagcaattctcccacctcagcctcccaagtagctgggattacaggtgtgcaccaccatgcccagctaatttttgtatttttaatagagacagggtttcaccgtgttggccaggatggtcttgaactcctgacctcaggtgatccacctgccttggcctcccgggattacaagcatgagccaccgcacctggcttgagtttatttctgatctaaatcttttctacattagccaattcctcctagcatttcactgttcatgagcttgttgaagtcattattgtctgaaataccatgtttaggtttcactttgtggagggtggggagggtgaggtaatattttaaaaactgcaaaattagggatctcattttatttttagatgttggtccacaggtgaaacgtatcaggctggttctttgaacaccctcaggaaagttaaagagatggatgcttctctttaggaaccgggaacctctctggttagacagaggactcttctttcactgtttttgttttgtggcacaaacggcctgggatgtggatgccttgggtctgatgcaagataccctggaggcttccctggcctgtccttctcctgcccatgtcgcgtaaacattggcatggcagggacagatggccactccgggaactccttggatgtcacatttggttgcctgggttgggggtcgggtggttgcagccagtctccactgtggggaggagaggctgactgggaaatactcccatggcagtgggtaaacacaagctcacctccggaaaggctgggcgccctggtacatgtgcaggctggggcggtaatggagtcagatgcacataagtgtgtttagcttgggaaggagccagtctgctcaaagcacacagccttttctctctgctccgaactgatgctcagcagagttcggtttgcttatggggatgggaatgaaccatgtgggggctgtgaagggagggatgggctgcagataactactttcagagctagaaaaaaattctttccagaggcctgggttagctttactggaggcgcaggtgagggtatctgaaatccccggagagt

SEQ ID NO: 102034 - DNA, 1217 bp, Homo sapiens
gactgagacccacctttctagacctgaagcccaggaggaggaagaggaggctggttggtaccatgggcataatgctctgaatcctagtctctcacctagtatgtgagcagtccctgcagatggcccatttggagatcttgacaaagcctcttctgtttccaatggggtaagtgtggcgtttgcaaaaggctggggaatgaggattgaagcttttaaagtctttattatcttgatcctgcccaaatccaccttttttgggacaatagaaagttcattgtttgtgacgattgttttggtggttaaagggttgctgagtctccccacttgcaatctgaggctttgaaatgggtttcctgggaacctttcccattcttcctgggtggttcccatggttattttattttggagttggctgcgggtaatcctctgtctttctgacttctcttttgtctgcccccatgatactaggaaaggggaagaaggaattgatttggatgcagctggggaaacttggtatcaacgtgctggtttgggggctcttgggtgtgggttcacatcactttcaatgcgacagggtaagcattgatgtaaactgctaagtggttttgttcaagtggaatatttcatgcggcctccctgctgcggtgaaactggacgtctttattgcatgacaggcttggggctttcacagaatggatcaagaggtcgccgtgcaacgttcgcagttaactccaagagaagaaatatgctgcaaagacaccctccctacttcctgtatgtggcacagaccccttctagggaattccagcagaaagggctgtgggtacttcagtttcccttctaagtgggaacggtcacgttagcccatgcagtccccgtttacttcctaggaggagaatgacgtagaccaaaaggggctttctagctatgtgaagttgctcttgttcttttcaactttgccttcctctcgtggacaaacgcacctcgaccttgttagcaggtgacatcgggatgcattatttaacctttaccaggttgggctcctatgttggttggtccagaaattgaacacaataggagactgtggacttgagagagggcaagaatcacaggtgcttcctgaggaatgcatgattcctgtaacttttagagtttcccaccctgcattccgggtcctgctttgcagatcttgccgtgacttgttcctccagtcttac

SEQ ID NO: 102035 - DNA, 1063 bp, Homo sapiens
tacccactgctctgctctgttgtttttttctttcctttttttttgcctgcctttagtgtaaaaatgaaatgagtacaaagcccgaaacttggcagcgactgagatgtaagttagtgggttgcttctatgaaggcaaagtgtgttaaatttagttactcaagaatttaacttggaagctggtcatggcggtgtgtgcctgtagtcccggctactcaggaggctgagacgggagggttgcttgagcccaggagtttgaggctgtcctgggcaacatagtgagaccccctctctaaaaattaaattaaaacaggaaaagaattaaacgtgaagatagacgatgctggtgactgccatagcagtttcgtgccacagaccttggagtactttttcagaccttggagtttctaagcacttttgggggaagtgttgattgtttgatattatggttgatgctgtaaccaaaaagggacaataagagcataggacagaggagcttggctggttaatattccccgacaagggaatgtagcgttattgagtttgcccaaccctgagccattggttcttcttagggtctctcagttgacaaggtcctagggtataaggaccttgtcctatgtaatggcataattacttagcatttatttatgcatctagtattgcaagggactggactggggatggaaagggattgtgagctgggaaaaggcttcatttgctttatggtgctatgctaaagttctgctttgctcaaggagtgagtcttggtttacattttgggtagtgaatcagcttcaagtgtggagttattttcaatgaagacagattgactagctgcacctggtctggcctgcccactatgacccagtggtgctattttgttctagccaatgctttcatgagaatggagaacaaggaggcgtcgttttcatgagtattttgcaacacccacttctccagtttattttgatgccgttgcttgaaaacaagtgttagcatggctttcattggtaacacttttagggaagagatcatcacttttggaaagttttgtttcttgaat

SEQ ID NO: 102036 - DNA, 1900 bp, Homo sapiens
agcgaggaagaggttgacagatagtttccactatgtgagtaattttaatttttttatgctacatggtgggcacgtgggtgttcattatattcttttcaaatatatgttgtatattggaaatactttctagtacatatgaaagaaaaggcagccaactgaaagtttggtttctgtttttctgcccttcactccttttcaatagatgtttgggagttaggtctccactgaatgaactacccacgtttctgtccttgaagggctggtggggggcgcttatgtaacattgctggccttttatatcttttaagaggcgctgcttttttgccacgtgctgtagaaaattatttgacaagcactcacgctttgtgcagggtgaccaggttcatccgtaaaatggttaagaccttttcgaaatacattgcccccaaggatgtggtggggagggtgctgggattctgagtgacagccggcgaatgccagagggaagaattaaattggagagggaggcggagaggagggaggtgatggtgggaggaggaagggaggagcgaccaaccctctccaacacacccaagtgaccagattcatcatagcacgaaacttcacaagttacacccactgcctccgccagcagccggggaaggctgctgcttcctcatttctgttactggaagtttgggacatgtgaagccagacggggagaaacgtgcgcgccttgttgagcagcggtgagcttgaattttgaaatcgattctttccaccggcgaatctctttgtgtcgggtggtcaggggaggcagccgaatgtggctctgaacgaggataggtgagagccccgagctgagctgtgcagctggggccggggaaccgtgcgtcccgtgccccttcccagaacgagcaagcgcgtctccaagctgcgccccgaggctcggcgcgcgttgccggctgagctgcaggggacggcggcgacgctggttctggctccagggtaaagagattcgggctttgaaagcgtcatctttcccccttgacttctgtaagcgaggatcattgtatgggatatggggtcggggaggagactgcgggatcacgtcacccacccaggatgcgtcctgcccggggctgtcccgctgctcgttgggtaattgcaggtcagtgccattgaaaaagaaccccatgacaggcttgggaatcaagtgagaaaaaagttccgaaggaatattcagaagctgtggctcccgaccgcacctggatgggagttctggagtgggacgtcggaagtctcggggttctcattaattttacatctgattaaattagttcgactctaggttcctggctgtggaggtgtgatttgtttatctggatcatttttttaaatgtctgtctttctgtgaaagctagcttacctttggatcgattgcctaagtcaattttgtgagaggaagtttgggtggaaggtggtgctgggggctgggatcattgcaagtggcagtatgtcccagcaaaggataaacttagctcaaatgaggcttctcacagacaggatttaggttttatttcaagtctggagctggtcactgggcttccatttggcctgtgtagcttttgctcagtgtgtaggggtcagagggaggctattgggttaactgttacctgttgcacttgtttcatacctgatcaacaacttaatagtacaccagcagctggagctggtttttgtttttttgtaagcgaatccttcatgagaatgtttacagaatcatcttactttgaggggaagaaatgaaggtgaaaaatgtgtggctcctgttgtatttatagcaagccaaatgttctttcccaggtctggggtgggtacaatcaggaaaatgtcagtagctgattttatcatttttctt

SEQ ID NO: 102037 - DNA, 1060 bp, Homo sapiens
ccttggattttagggaatttgccacacagtccctgcaatgcattctggaggtggtgtttaaaagctattagagtttcctggcctctttttggctggccctgtattttttaagaatatctctatgtatttgttaggtattctgttttcagatagagaaaactatgtaaagagtctctaagtttggttggcataaggtttactttgaagttgtaaaacattcttgtatcaaatcaaatttaatgaagactgtgttttaaaactttgcctagaaaggtgaaccttgtttgtctctcagagaatagaaagaccccatccagggctgaaacaagtgtttgcagtgttttcaaacatgtccgtattcccaagcagaccctcagattacctagcatgggagtgtgtgggatggatccatatttagacctttcatcagtttcaaatataaaaaattgattttggcaatccgttggtagtcaaccacaaaatgtagttatgaaaaaccttctgcatttccatagcagtccaaatatggattccattaacaggatgcatatttggaactgcagttatgctgggaaatcgtgtttggattcaggtaatttgacggtgttgacacccctgttgcgtatcacctaacacgaggaggaggaggagactcttccctggccttgctgctgataacattgttgctaggtgacataggtgaggacgcgttggtgccagcacttcttaccttgtttttgttctatgaaggcttgaaaaggtggaggtaagctccattgtggctgatggcttcaaattcgcagatcttgaagacaccttgattcctgaccaagttggttctggagacccctgaagagcaatccagaaaatgcttgcttttggaagtcatctctgtcactgagaatgcaatttgaaaggaattttaaagcccagctattgtagatctaatatatagagagagagagtgagcaagctaaacacttgagttaaaatttttggagagaatatgcttaaataaactctccatacgttttcatttctgagtgtaaatccacttgac

SEQ ID NO: 102038 - DNA, 1983 bp, Homo sapiens
gtatgtgccttttgtactaggttggagcccccaaattatatgtgcatacactgcattgaatgttcattttatggacatattttttaaaggaggtaataattgagtggaacatacagcaagtttatttctgttgacctgggtactgggctgaagctgtcatggttttattatgtgagcttgaacaagtcacttactccttctgacttcagatgaatgagtgatttataagacctcctttcttctcttacatatagaggtctatgaccctaaatgtgtcacccctatgttagaccctttaatattttgagatacaggtttgtcgtattctctgattgaaagtaacttgtacatgtttggttttcatttacattagggaagatggcagcaagtattcctagagtgaaatcaaatgcctatgttagtggaagggaacacaagacaagtggattctcatcaacacgtttccctagccattattcattacaagtcacctaattttaattgattttgtgcctgtggttagtacaaaactctgtaaggtgtcatgtgttacaagcaggtctataggtggggtccttttcacttcaccatcctacccctgtgctagatgtctcatcgtgtattgggccattcttgcattgctataaagaaatacctgacactgggtaatttataaagaaaagaggtttaattggctcatggttctgcaggctgtacaggaagcatgatgctggcatctgcttggcttctggggagacctcagaaaacttacagttatggcagaaagagaagcaggagcagacatgtcacgtgccagagcaggagcaaaagagagatgcggggagatgccacaaacttttatacaaccagatcttgcgagaactgactcactatcacgagaacagcaccaaggggatggtgctcaactctacatgagaaatccacccccatgatctaatcacctcccaccaggccccatctgcaacaccaaaaattacaattcagcatgagatttgggtgggtacagatatccaaactatatcaccttcttagccagcgtcattctccactccctgccccagtatgttttggccccccaaaattttaaagtgacagttactgtatcttagtataaaataaaaatcaaaatgattcccacccatgaataccattaaataccattaaattggttggacctggttagtgtcgggcctttgtggctcactgcgtccaccctcacaagggtggcctgctacttccccacagtagggactctctggggaaggcttagggctcaagagggtgagccctctgtgaccccattgggaaggacctccattctgttatctgacacgtaactagtgccagaactgtactttttgccaaaatagcaccgtcaatgtgaaaacattgagaacattataaatgctaagatcgtttaagaaacagggttggcttatttcctgattgaaaattgtcttgacatgtttagtgcccattcgcccatttagagacagtgttgggcatgtgcccagtccaaagcctgttaacccatgcattccattgccaataggcatctattattttaagttcccactttaccgaagggtaggcagagggacttgctctgagttactcttctggttgtcgctggaccctggacttgaaccggctcttctcattttgtatccttgcttctctcatgacccaatgaggcctccccgatgggatactccctgacccagctttttcaagaggctatactggggattataaagctatcctggcattctttgaagaaatggcaggactgaaattagaacttgactttttgtcttcttagttattctatattatcttacttctagtgccaataacaattattattgtttattgctgccgagcagggaggtatctgaaaggtcccaaactaggaaaaacttcgatgcttttaccccccgtgaacacatgcaccatttgtgc

SEQ ID NO: 102039 - DNA, 1079 bp, Homo sapiens
gaggttggagagagctggggtcccagcctcacagagactaggttagaattttagacctgcctcttacttgttgagtggctttgggcagttcatttaacctctccgtgcctcagttttctttatctgttaaatgggtctagtaataagtagtaccttgctgagctgtcatgaggaccaggtagaaaattgaatgagcagcccctagcctagtggctttcacagagaaagtgctcaggaaatgtcagcaactcattgtcatcaaagttgtcttcacatagttttatgagggaaatgctcttattcccattttacagatgagggactgaggctttatgaagattaagggataggcctgtgactggaagaggaattcctggctgacccgcaattctcacttagactgcctggcacccctgcttacgtcttaactgctgaaattactgcgagttgagggtacacctgaatgtggtcagttaacatgtgtaacatttaatatttacaattaagaatttgggtttgattcatttgccccactgttagggttttggactcatatctgaccctttttggtttcttgatatgcgttgaaatttggggttgggatgggttggtggaagcagctgttccctactgctgtgcctccagcatactgtgcaagggtgtgccttgttttatcttcataattgtgaaagatttaccttgataggtgaggcaatgtcattttatctcttacaatcagagaaaatcacttatctgggcgtgtgaagatcatggtgatatgacaggaagagttggcttattggaaggcttggttaatgtgtgtaaagttttgattacttttgtttttagcagcaacttttttttttttttttgagacagagtcttaatcttttgcccaggctacagtgcagtggcatgattacagctcactgcaaccttcgcctcccaggttcaagctattcttgtgcctcagccacccaaatagctgagattacaggtgtgcgttaccatccctggctaatatttatttatttatttatttatctatttatttttaagtagagatgaggtttcattgt

SEQ ID NO: 102040 - DNA, 2222 bp, Homo sapiens
tgcaaaggagagggagaaagcagcaaattttcatagttataatttgatgatgtggaggagagagaggaaaattgctaaaacattgcccttgagtgagcaaggggtggagattggacctcatcacaagtggaggggttggctttagagaggagtatggatagttgtctacatcaacaggcagaaaggtagagtgtatatacctgcatgcagatagatcaccagagaatatatatagtcttagaagtttgtggtagtcctctctgattgcttcatttttctcagagaagtagaacaaaaggtcatcagatgggaagaaattgttgggaatctggaaggaaagcagaagacataaacttcgtgagtgtgggtgagggaatagacagagaattttggtgtgattgccagtggcatttaaggggacacttgacattaggggtcaggaatttaaagtgagaccagccaacatgtttgcatgctttcttctgttttctctagccacagtcagctgtctgggtacaggtgtgaactgggcagtctgatggatttaaccagatgtttttgccaaaaggatatgaccaagtaaaagatgggccagggagttgagggagggaaattaatgacagatgatggaatctacacttctcttttaaaaattttaaaaatgtttattcattcatttattttttaaagatgggctcttgctgtgttgcccagcctggtctcgaacccatgggctcaagccccatcctcctgtctcagtgtcccaaagtgctaagattacaggcctgagccactgcgcccagatggaatctacatttcttaaggaggagcatgaaatatcgaagctatgaagggattcttggagtgtgtcttattccattggtgctgctataacagaataccacagactggataatttataaacaacagaaatgtatttcacagtctggaggctgagaagtctaagatctaggcaacagcagattgagtgtttagtgaggggctgcttcctctggacagcgccttgtggctatgtccttacacagtgaaagagatgaatgaactccgagacctctttttaaaagagcactaatcccaatcctgggggctccgatctcatgatctaatcctctcccaaaggcccccaccttagaataccatcactttgggggttaggatttcaacatatgaattttgaggggacacaaacattcagaccctaacagagtatgagattgagtggtctgaaaagatgggaggtgtgagctgtgggggggatgcatgacaatgatggcatacgggcaattggtatctttaccctttattattaataatctgtgtatttcagagatttggcatgcagtgtcttgaacatccttagtgaatgtataagttgaaaactccaagtgtttgtgtattattgacataaatgtctatttctcctattgttccttatttctttctttgctgttaaggattcagaaggaattggttaaaaggactttttttctatggttaaagaagagacctcagacctgggtggttttgatcatgcttcttgtcttgaattatcatctcggggtaatgaatgaccgttattcaaatcatgcaatatttgttgagagtctaccacgtatgaagccctcttctaggcacttgcaatagaactgtgagcaaaatggataaaagtgcctgctcttgtggggcttatgttctagtggaggagagaaacaagaaaaagagtaaaataagaaaatattcagcatgtgtacaaaggagagaaaaatagccgggcgcgcagtgctcacgcctgaatcccagcactttgggaagccgaggcgggcagatcacttgagtccagcagtttgagaccagcctggccaacatgacaaaaccctgtctctactaaaaatacaaaaattagcccagtgtggtggcacgcgcctgtagtcccagctactcaggaggcggaggcaagagcattgcttgaacctgggatgtggaggttgcagtgagccgagatcacatcactgcactccagcctgagcaacagggcgagactctttctcaataaataaataaataaataaataaataaataaataaataataaaggagagaaaaataaatcagggaagtaagaaaggaaatgtgccagggatgaggggtggaggtggtggggtggggccactggccaggaggacaccttcattgagaaggtg

SEQ ID NO: 102041 - DNA, 1029 bp, Homo sapiens
tgggtgggcagttctgggaggtaagcggggtagattagggtatagtgatgagatggtaccatttgaatgaagactaaaagaatataaagaaattagcagcctacctggaatgttccagaaagagggagtgtgtctggaaagttcagggaacatcgaggaggccaagtgtggcttcagtggcatgaacaaggggagaagcagcaggagatgaggacagagaagtaataacgaggccagaggggtgatatgctttgtgggtccctctagggagtttggcttttaccccttgagcggaggaatgctgtgatctaatttatactttaaaaggatccccatggtcctggatgaggatggattgtagaaggacaagagtggaaacagggagacttgttcagaggttttgtcgtaatctagtagagaatggtggctcggattatagtggcagcagcaggaaggggtgagaagagatttggattggcacatatttggagagtggatgcaacagaattttccgactgattcgatgtgggatgtgaaaggaaagggaaggcaagtatggcaccaagtattttggtctgaatagttgggagggttcaattgcccttagctcagctgggaaaggcacctggaagatacccagagggtgtacgtgcacagtgcggtattcgattgtggagtctaggggaaaaagcactggctagagacatgcattgggagttgttagcatgtggaaagtattcgcagtcatgagaccggaggggatctccaagagttgtaggttgatttctccagaaacaggcaagaagacggcatttagatgaactgcaaaagaaagaggaagcaagcaggaccgcgtggagaagtcaaacagtggtgtagaacaacctggctggaagctctggaattaatactgcccatcatccttgtcctgcagaggctgatatgaccagtcctttatccctgcctcattcagtcaccagatatggcctaccctgggatgccgccctctgccctgagacaggtcctgca

SEQ ID NO: 102042 - DNA, 1060 bp, Homo sapiens
aaaaacctcaggattacccatagctaccttggattgcaaagtctaatataaattagtactttgaagccttcctagataatacaaggacattagccttcctagataatacaaggacattagagtatattaactccttttattctctactggattataatatatagtaaatttttttctttcatactattctaaacatctaagacattattgttaattattattattattattatacttctgtccgtcttaaattatctttatttctgctgcatatagaattctcagttggcggtgattttcttcaaacacttagaagataccagttcattatcttctggcatctgttcttgctgagaagtcggctctctgcctaattgttgcttcttagtacaatagctcatcagtctccttcttgttgcttttatggtttttctctctgcctttggctttccagttccactatgacatgtctaggtgtaaatatatttttatttattctgttcagggtttgtaggacttcttgaatctatgggttggtatcttttttgcattttgggaaatttccaacctgtatctcttcagtccagttctcttttttcttcatattacatcctttcattgtctttcctccctccctcccttccttccttccttccttccttccttccttccttccttccttccttccttccttcctttttctttctttttctcttttgacagagttgtggactgtctcccaggtggtgtgcaatggtgtgatctcgacttgttgcaacctctgcctcccgggttcaagcaattctcctgcctcagcctcctgaatagctaggattacaggcacccgccaccatgccctgctaaatttttgtatttttagtagagacaggatttcactatgttggctggtctcaaactcttgactttgtgatcctcctgcctcggcctcccaaagtgctgggattacaagcgtgagccaccatgcccggccctttcactgtattttctatgtctcctaccttctctttctttctttgttttatttttgtccctttatgct

SEQ ID NO: 102043 - DNA, 2029 bp, Homo sapiens
aaaaaatacccatcagagaactcgatgtcctgttctgtagggcatcctaatcagaaaatacaatgataaacccccttacagtgtaagtaagaatgagagtgagcgctccctgccctaaggggtgatggactagcattgctttaaaaataattgttggctgagcacagtggctcatgcctgtaatacaagcactttgggaggctgaggtaggtggatcacttgaggtcaagagttcgtgaccagcctggccaacatggtgaaaccccatctctactaaaaatacaaaaattagccgggtgtggtagtgggcgcctgtagtcacagctgctcgggaggctgaggcaggagaatcgcttgaacccgggagctagatgttgcagtgagccaagattgcaccactgccctccagcctgggtgacaaagcgagaccttttctcaaatataataataataataataataataataataataattgtcactgcattaatgggtaatggatctatgactcgtcatgaagagaaaggcgaaccttgggtggctggtttgaatctctgggctcagtgtgggataagtcagctcttcccttctcacttactttctagtgcccttgggctggaattgtcatgtccataactcatccagtccagtgacaccagagagagagtgaaggaagagggtggatgcactgaactcactcttatgctgccttcattttcaaataaagtcacagtaaagagtatatctttttttttttaaaagggatagggtgacagctccgtcacccaagctgtagtacagtggcacaatcatacctcactgtaaccttggattcctgggctcaagcaatctctctgtctagcctccctggtagctgggactataagcatgagccactgtgcccagccaaggaacatgtttttatgtcagtcatatatgtatacttgcatgcacatatatgtgtatgtgtatatacacttacatgcatgtatatgtatatatgtgtatatgtatacataccaaatgtatacacatgtctgtctatctatctatctatctatctatctatctatctatctatctaatctttcttcctcaaaggaatctatgataatatcatctgctattagtttaatagttggaagaggagaatgtcttaatgaactaagtatcacctttagttgtcttatctgtcattaaatgtgttactcattgggcttttgagtggtttaatgaagcagtgatatttatacaagattttatatctatagccaaaatctaaaaggctttcttatttgggaaggggttactattcagtgggaaatattcgtctacaggatagtttatgtggattttataactcttcttaaattgtgaaacatgccacacattcagaacagtgcacaacacgtgactgtacagcctactgggtaatgtggccatcaccagctcgagaaatgcaacattggcagcccccaagaaagcctcccctcccatcctcaatcacaattttctccctgcctcctaaagataacaaccaggcttgatttttatggaatcatatttttgcttcttgtctcacatttagtgcttgagtgtagattcttaagcactgtagtttaattttgcttgtttttgaactgtatatcagtggaatcatactttattaagtattctgggtctggctttatttcctcaacttttctcttgggtgtagctctagtttgtacactttaattattatacaatttcatggtataaataggctataacttcataatccattctactgctggtgatcatttggattagttccaatgtttgactattgtgaatagtgctacaatggactttttttggagataccttccccagcactcatgtccatgtgtttcttggggtgtatttctagaattgaaattgctgatttttcatctttactaaagtgcctgacccaattacactctccctagtaggataagggagttcctcttgcattatgccctcagaaaaccttggtgttattagt

SEQ ID NO: 102044 - DNA, 1050 bp, Homo sapiens
tacagaactcttattaacaattcctataggtagagctgctctttcctctccatctgtggctgatgtctcagtgctttctcaattctaccatcacatgctcaaatataaccttctccactcccccacacccacttcagttgctgggggctcattcattggctccctctgcggaggcttgagtgtaagtgaggtattcagcagaggtctttggagggtttctcatttgatcacaatcttagtttgagaaatggtgcctcattcattaagctgtaagagagctctctacaagcaattttatttttaagtagccctttggttaacaagtttactccacctgggatgctttttatttttggtggcccacagaaatctgaaacagtgcagtgctggggcctctaatctgtctttaggaacgggggatactatgaagctcaccatgcagttacttaagaaagctatcggctagtgctattgtgaatgtgtttttaccttcctgtaaaatgctgaaatcacagactttattactaggataatgaagaaatgtataagttcaatgcaagtgacaccagcaggcctgtgtgttgggtagagatgtcctggggctgttttgctctgcacttttcctcatgggtgtttctttcttgaaattgaacaccactgatctctcttaaagcaaaatacttcagcaaatacacaggaagaaccccctccccctttttttcctgtggtttcattgcatgttgtgtggtttcagagatacttccttgggttgccccccaaccaaccagagtttcctcagaaacagagagctttcttctggaagaactctaagattgtaatctggatgctagcaaagcgtctgcagctgctccatttttaattcttaatttgggagtgatcagcagtttcacagaagagagaaaaatctaagacattcatcgtgtgatcattcagcatttggaaaagggaaaaggaggattgaatgaggtaataaacaagggtgttaatcaaggagaagacatgtaaggtgcagttttaaaagacatcatt

SEQ ID NO: 102045 - DNA, 1107 bp, Homo sapiens
gcgtgagccacttaacatttattgtttgagacaaagtctcactatttcgctcaggctagagtgcggtggcgtgctccaactgcaacctccacctctcaggttcaagcgattctcatgcccagcctcccgagtagctgagattacaggtgtgcaccaccatgcctggccaattttttgtatttttagtagagacagggtttcaccatgttggtcatgctgatcttgaactcctgagtcaaatgatccgcctgccttagcctcccaaaagtgctgggattacaggcatgaaccaacataccctgccagttccataattttagtacatttataaagttttgccaccatcctcaaaattgttcttaggacagaagaaactctgtacccattaccagccatccgtatttccctccagctcttctcacccaatccccaaccccaaccatttaatttgtctccatagatttcctgttctggacattttatatgaaaggaattatgcagtatggagtcttttttgactggcttctttcacttggcatgtttttgaggttgatctttgttgtattgtgtctcagtacttcatttctttttattgctgtgtaatactctattgtatggctgtaccatattttatttatccactcattaattgatggacatttgggttatttttctttttggccataacagctaatgctgctacgaaacttgtgtacaagcttttgtgtggacatacgttttcacatttttttttttttcttaaggactgggtcttctattatccatttggagtctagagttacttataacttgcctagagtccaaccttgggtgattctttggctagggcatagtgcagtgtttttggaagcagaaattattcattgatgttatttcattaatgtcactgtatagtcatcccttggtattcgtggggaattggatccagacctctgctcccccacagatactaaaatccatggctgctcaagttccttatataaaatagtgtaggccaggcgaggtggctcatgcctgtaatatcagcactttgggaggctgaggtgggcagatcacctgaggtcaggagttcaagaccagcctagc

SEQ ID NO: 102046 - DNA, 2375 bp, Homo sapiens
aatcccagctgcttgtgaggctgaggcagaagaatcgcttgaacctgggaggcggaggttgcagtgaacctggatcgcgccattgcactccagcctgaacaataagagcgaaaccatgtttcacacacacaaaaaaagacagcatgaagccatgtggcatctcctatgacccaaacacctcccactagcccccacctccaacagtggggattccatttcaacaaaggatttagaggggacagcattcaaatcatatcagtgtgtgtgtgtgcttgtgtgggtgtgaggttactttacctagtcctgatgtcatgggcttaatgtgctactaatacattttttaatacacattgaaaaatagttataactgtaaagatgaaacatggttttccatgtaccactaaaaatggtttcctgttccattagtggtatgtgtagcccttctgtgcaaccctcttgggtctccactgacagctcttgacctatttgtgggacttaaggtaagatattttgtagattctggtttttaaatttaaagcaaactcaagctgtatgatcctgaagtacaagagacgatacagaataattcaaggaggttgggaaagctttctttcttttgttttttagagacagggtcttgctttgtcacccgggctggagtgcagtggtgtgatcatagctcactgcagcctcaagctgctgtgctcaaacaatcctcccacctcagcctactgagtagctgggactactaatgcgtgccaccatgccagctaattaaattttttttttttttttttttgtagagatggggtcttgccatgttgctcaggctggtcttgaactcttggctgcaagcagttcttctgctttggcctcccagggaaaacatttttaatttgggtatcttcccccttgatctttgacattttttttttcatttgatgatgtgtttgcttgattacttctatttccatcctcttcagatgttatatatttccttgagtatcttaattgccttatttgttcattaaacttacgaggtgcccagtcccctgcttgagactggaagtgcatctatgaacaccacaggatatgtggccccagagtgcgttacaagaatatggtcgtcagccagcaaatgtcttcacctgctctacttagattttagcaatttgcattgctcctgaggtgctcgattgcatatgataatttggaaacagcaggtcccagcagatagaggagcagctgtcagatctagaaacctgtccattggcccagattgttctgatgatttgcagcataaccttggaaacatcgtttcattttccgttccaggttttcactctggaaagtggaaaatcacagcaaatgaagctggtcttaaagaaatcgagtgccccacatactgtaatgagctcgcttttcatttctcatgcctaccttgtttacatggacacgtcctgttggtgtgtaaccttatgtagtagatagatacaaggtatggagatacatatatacgatgtgatacctgtagtcccatgtagatacaggaggttttctttcccaaggcatgtcaggaattgtccgtggaaatgacagcctgaaagagataggtgtacagtgttggtggacaagccagtatcagtttggcgaatctctgaaagcccattttgagcctgtttgtaaggttgagtgaaagaactgttgaagtgtgaagaggtgcctgggaaaggactcatcctaccaacttttgagttcctggggagtgggatatagcctagggtcgggtacataataggtattcaatgaacatcattttgcacaatccttgtaatgcttagtggcccctggcactcagagaatcactgtatgtttagatcatgacagggctgggattaaaagctttactcttttaagtattctgaatttatggaactattatgttttacacttttttttttgagagggagtcttgctctgttgcccagggtagactgcaatggcacgatctctgctcactgcaacctctgcctgttgggttcaagtgattctcctgcctcagtctcccgagtagctgggattacaggtgcccaccaccacgccaggctaattttcatagttttagtagagacggggtttcaccatgttggccaggttggtcttgaactcctgacctcaggtgatcttcccgccttggcctcccaaagtgctggggttacaggtgtgagccaccacgcctggcctatgttttacacttctaaaagatattgataatattgagacatctagtttaaacctaagtgcataatggtaattcgccaaggtgaaattgattacttttccatattgaaggcataaaagcatacttcttgaac

SEQ ID NO: 102047 - DNA, 1069 bp, Homo sapiens
tccattagtgagattctcaaattgctttagagaatatagaaaaacaagaaagttggagtcctgaggttctgttctcctggtgattggagagaatctaaataataccttgtttttacatcattaattatttaatcaaaactgaaaacattatgtccataatactgcatccacaaagtgggtactgaggaatgagtaagtataaattctccaaaaatctctcacgttccctcattcttgcttaagaaagtctttgtgctttctaaaaaattcctcttaatagattttttaaaaatatatctttaaaatgaggaagccatactgaaaagtgatatgttccaaggctttttcccaccactggaaatattcctgattactgaatgtaatgaaataaatttgtcatgttggacataatgtgtggtggagtgcagaatgaagagcccaaaactcagagtggaggcttgacatttatagttataaatatgtgctttaggaattgatttatatagaaaaataccagggctaagatagataaattgaagcttgttctcactaagtaggttagacagttcatcaaatattggttaaaatctttctctctctagaggttgaaaataagagattaaatggtagtatccaacgcatgggactttgattgtctagccgaccagtctgttcaaatgaatataaatgtagttgggcagcctgtgtatgcctagtgtgttgtagcatgtggctcagcaacctagccggccactgccttgttttgttgcttaggctaagaatagactttatggttttaaatggttgggaagcctgggggcggtggctctcgcctgtaatcctagcactttgggaggccgaggcaggcagatcacctggggtcaggagttccagaccagcctggccaacatggcgaaaccctgtctctactaaaaatactaaaattagctgggtgtggtggaaggcacctgtaatcacagctactcgggaggctgagaattgcttggacccgggaggcggaggttgcagtaagctgagatcgtgccactgcactccagcctgggtgaca

SEQ ID NO: 102048 - DNA, 1049 bp, Homo sapiens
cttttgtgctctgcctgttcatccctcctttcccccatctcctggcagccactgctcttgttactgtctctatagcttcaccttttccaggatgtcgtgtagttggagtcatacagtgtgtagctttttcagatgggcttctttcacttagtaatatgtcttcaaggttcttccatatttttctgtggcttgctagctcatttcttctcagtgccggataatattcctttgtgtgatataccattgattatttatcccttcacctgctgaaggacattgtggctgcttcctagttttagcaattatgaataaaattgctataagcattcacatgcgggtttttgtatgcacagaatataaatataaatgtatattcacataatatataaatgaaatttatttgtttctgattatgaaaaaacgtgctttattgtataacatttggaaaatattaaaaaaagaaaatctttaagaatcagtataagcctatttattaatttaatgtaataagatacatgaaattggaactctcctggaaatgcaggccatatggttattatatagtataacagtcagtggtaaagacaggaaagatttagggcattctgagtgctggttctgtttccattaaaaccactccttaagtgactttttatgatactccacattcaaacagacactctcagctttagaaaatggctatttagcagtcctcacaaacaactgaagtccaaggaggtactgaaattcttctcttaaaaaattcagatatactttagccatggttctcagtggtggtggagaggattcccgacattcatgtggaatccagcagtttggacacacacaggttttataaggctcgatgtgactgcattcagctctgggagcctccatgtctcttgggcgtgttctgggtgcagaggcagaggatgctgctggggaggacagggtggtgttgagctcatggaatagtaatgcctcaaaagcagcctcagaagtggacgtcagtggacagcctgttgcattcgtttttcatttttaataat

SEQ ID NO: 102049 - DNA, 1001 bp, Homo sapiens
gtctcagcctcctgagtagctcggattacaggcatctgctaccaggcccggctaatttttgtatttttagtaaaggtggggtttcaccatgtgaagccaggctggtcttgagctcctgacctcaagtgatccgcccaccttggcctcccaaagtgctggcattacaggcatgagccaccgcgcctggcccaatattttgttttatattaatattattaaatataatattgttataattgataatataattgatattatataatatttcatattattatattaattttaaacattttacatttattattattattttttatatttattgaggaccaactcagagccagacagtgtttcgggagctacagtggggcaggtaggagaataaacatggagggggtgataggtatctattttagacagggtggtcagtggatacttctcccaggaggtgtgatcctgaggtctgcgtggagggagagaccccgtggaaatctagagaaagagcattccaggcagagggacccgcgaatgtattgaagattggcaggaggcatgcgtgggaaaggcaggaatggggcaggcgccgaggtcacagcccaagtcacctgcaggagcgaggttcttgtttggattttgggcagtaggaatcggcataagttgaaccacaaacaagcccctctactcctcttaagagactttgttagatgtgttttgcagagaagatggaaaataatagtgtatctgttactttgattacaattcccatcatataataattaactgctagctgtaattataagacttcctctaatttagtttagcactctggggacctctgttagcctatatcccaatcaatttcacagccattacggaggaaaaaagccatgttcctgttgaattttaaatctagaggaagaatgatgccctcatttgctagacagccttattttgttttcgctccttgttttctttctgttcaggccctccctactggc

SEQ ID NO: 102050 - DNA, 1031 bp, Homo sapiens
tttgtttttttgtttgttttttttggtagataggatcatatacagctgacagtcaggcttctctgacttatatgtgtgagtgagtgtatgtgtgtgcccatacgctatcaggagcccttagaaatcaatgaaagtgtcaacattctctgaaaaaggtctgttttccaaggcaaccatgaagttagctttatttgagttaggggaataaagaaaacttgtgagagacatttatgagctggtatattggctttgatgatccagggaaaggcatgtctatttgtgcagggggccactcatttcgcttgtatcaactcaaagtcaaaaatcttaatgggttttaataatgctaaatgtcatattgaatttaagcttggaaaatttcagataacacctctttgtaacagctatggtttactcatctcttgggctataacatatatctcaagacacaaaatcctccattttagaaatgttcacattttgcaacctttgctgtgagcaatagaaacttttggggcaagctcttttagatgaagaaggtatttccccccacagtggatgcatacaattcattctgtcagcctgaagaagcaatttcctttctttgccttgggatttaaagcaataatgtattgtatataattatttaatttagttgacctaaacgttaatttattatttttaaaactttaatagattgtaatatatcttaaatcaaaatcggtttgaaatggcacgaagtatttaaggatattctcatataaattttaaagagagaacttatccaagccaatattaaaaaaaaataatttccttgctttatagacaaattttagtatatctcagggggcattgatgttatatctaaaatgtcaaagtaagatttataataatagaaatttattactctttattatacatagtataaatgagtaaagcaaccaattccgccttgtggaattaattttggctttgctgtttctttttagtttctggcaaaggctatttttattttattttatttatctatt

SEQ ID NO: 102051 - DNA, 1667 bp, Homo sapiens
caatcctcttgcctcagccccctgagtagctagggttccaggcgtgcataccaccatgaccagctaatttttatattttttgtagagatggggtctcgctggtctcgaactcctgggctcaagcgatcctttagcctcagcctttcaaagtgctgggattacaggcatgagcccaatcttaattccaaatttttaagtgagagtctgtttggccaatactgagtcatgtattcacttagcttctgctgggatgcaagggtgtatgtatgatgggtggtctcagacttgcccaggcaggctctccaaaaggtgggattgttgggaagcaatgattgacatggctgccatatcccaatagaggaacagtttaccattgtttatattcggctctaggctacaataggagggcagggcccattttttcttgcctagtgttagcttccagcttttcccagttaaaatttcaggtctagacagtagaatgaggaagaggtacagaagtgctggagtctatctgtagctgatgaagagctggttactaacactgactaggggcagaggtcattggatacatgacatcaccaatgaatatttagtttaaaaaatactttcattcatgcttttgaattaacttagtgcatatgaattcatcttttcatatgcacttgtttactttttgagttcctaacttcgacttaaaaaatgcagactcaccctgcagtgattccactttatttatttatttattcatttatttatttattttgagatgaagtttgctcttgttgcccaggctggagtagcccaggcaagagtagttttgctcttgttgcccagcctcctgagtagctgggattacaggagcctgccaccatgcccagctaatttttgtatttttagtagagccggggtttctccatgttggtcaggctggtctcgaactgccgacctcaggtgatccacccacctcggcctcccaaagtgctgggattacaggcatgagccactgtgcccggccgggattccactttaatagtcaaggacttctgatgtgtgttgaagtcactggatgacaggaatacagtaaccaaatggtaaagacagagaagaggactgggcaagacctaaaggcttctatgccccactaaccagctgtgtcactttggtaacgaagttctttgaatttcagttccttatctgtaaaatggggtaggaatagtacctgtctcatcatgtcgttgagaggattccatgagctaaaatccattcaaaggcactttactaggcagttgggatataggagtgcagaaaatccacaaagatcttgctctcctggagtgtatatttcagcatgtgctgccactgctctaatttataaatcagaaagtgtggtgtctggccgggtgcggtggctcatgcctgcaatcccagcactttgagaggctgaggtgggcagatcacctgaggtcaggagtttgagaccagcttggctaacatggtgaaatcctgtctctactaaaaatacaaaaataatttgccgggtgtggtggtgggtgcctgtagtcccagctactcgggagctgaggtaggagaattgcttgaacccagggggtggaggttgcagtgagccaagatcacgccactgcactctagcctgggtggcagag

SEQ ID NO: 102052 - DNA, 1004 bp, Homo sapiens
agtcatgctgccttttgggattcggcatttcagggatgttggcagtggtctgtgattatgagccctgcacattagccgtggtgctgtgagcccctgtcttcttggagacgtacaggaagatacattgtttagtcactttttctttttgagacggagtctcactctgtcgcccaggctggagtgcagtggcatgatcttggcttactgcaagctctgcctcccaggttcacgccattctcctgcctcagccttccgagtagctgggactacaggtgcctgctaccacgcccggctaatttttttgtgtgtttttagtagagacggggtttcaccatggtagccaggatggtctcgctctcctgacctcatgatacccccgcctcggcctctcaaaagtgctgctgggattacaggcgtgagccaccacgcccggcctttagtcagtttttctaacggggagaaactgaggggggaaatactatgttcttgggatcttttggttatgatgaaatgtgaagaagctctctcaagtgaactcatgcaaaaatggtgttactgaagggatatgggaaatgtcgtggacggccagggttgtgcgggccttgtaaagcaggaaaatcaggaagagacgttggtcctgcatctctcagaggcccccatagtgtcaatttttgcttttctctgcaaggttttgccattttcttgttcctacttgcagactgactttcttggttggtctctgacgacatctcagatttactgcttaccaaatggctttgatttggtgcaatgttgctctagtccaatactacctgacctttcctctaggtaactgtcttagtctcacagtgtctcaattccaattttttgttgttgttgttttttttgagacagagtctcactctgtcgccaggctgcagtgcagtggctcaatctcggctcactgcaatctccgcctcctgggttcaagcgattctcctgcctcagcctcccaagtagctgga

SEQ ID NO: 102053 - DNA, 2081 bp, Homo sapiens
tacagcaaaatttcaaggagccttttcaattgcaagcatgcaaatttccaaagagctcttacttccttctgtgggcacattggacaggtcagccattcactgattccttaaatatccttaaaaggattgatttaggctgggcccggtggctgacgcctgttatcctagcattttgggaggctgaggctggccgatcacctgaggtcaggagttcaaaaccagcctggccaacatggtgaaaccccgtctctactgaaaatacaaaaaaattacccaggcgtggtggcgggcgcctgtaatatcagctactctggaggctgaggcaggagaactgcgtaaaccagggaggtggaggttgcagcaagccaagattgcaccactgcactccagcctgggtgacagagcgagactctgtccaaaaaaaaaaaaaaaaaaaaaaaaattaagagcaaatgactcatttgaaaaggacagtattgaaatccttaaccttagaactggagcctgctcccgatgggtcgagccacggactttcttttggttttaaccagggtatccagtggctcacctcagcaccagtggtagcagtagtgcttgggagaggaggttgagacttctgggtcttttagagctatgtttatttacaagttgttgggatctttgccgaggtgcttgagccgcttcttcgtgtttcggtcccaccatctgtgaactccactgatggtgtgtaaattaataaaatgctccatgagcccaggatgagagactttggaggtgccaagaggaatcgtaataaacaatattaaacaactccagggattttagcagcgtttacaattttggcttcacacacttagaggtttggaatcgttttataaaactgacttgaaaaccatgcattaggctttctttgtgtgattggcaacacttcagaaaccacaaggatccctgcttttgagatgtttcgagagaacctcatcaatatggcacggagctctgcctcctagtgagagctgtcactttcccgggaatccttcccttgctcatgggaatgttggggatgtcattggtgtatgaccttaaaagtgtcctgggaaagaaggacaagaagggaggagaatggttttggccagtagttgcagtgttattggtatgtctggtgttttaatagagtgatctgcagaacttaaaaaactcatctaatggcacaaactttgtgtgaaacagggcagtgtatttgggagtttgttgattttttttaaggtgaaaattgaatgaggaggggtagagtgacacataccactgacatttcatgtctgctttgttggagttttatttgtgactcgtaagttctacctacagggctgagagctctgatgggctggtggcaccagcatggtctgacttttctctgtctgaatatttagtaacatgcagattcttccagaatcatggctgtgccttcttttatcttgcattcgtagagtttgggacccaggtgcttgatgaaagtttattgcattagtaataataatagacaacacatgctgctgtagggcaggccctgttctaaagcttttttgtattaattatttaatcttcccgagaattataatgaagcaggattctaactaatcctatcatcctctccattttatagagaaagtttaagtaacttgcttaagattattcaggtcttaaagggtgggttctatatgcatccagctaaagggatttgacctctttagcatcaaattccttctcttaatcattgctctataggcctagtattaaagttctcaaaagtttaataaattataatgatgtctggattttatcttgggaacctgctcaagagtgacaatgttaggagtgatttttttttttttttaagataacatttaagccatgggactcaatttgtgttgagtggggtgggggtgggtgttgagccatattaatcactgctaagccagtgatcaccagcagggcttgcacgtttgtgtatctttgagaagaatttaggatgacggcaatctctttgagtatgtcttgtgttttgaattccataggagcccagt

SEQ ID NO: 102054 - DNA, 1020 bp, Homo sapiens
acacctgcttcattggcagctatgaatattattgttgttgttaataagataaccaataacattataaatttaggttaaatttactgaggattcctgaccttgtgctaagcactttgtagagacatcttatatgggatagtgggattttctcttacgctttggggccgttgggtaagaagacattctatagctgaggctctcccatttgttttacgtggactgctgattttgccctagctttagttttataggtgtaaggagacactcagtgttggaagagtcacagaacattccccatccctcaggggtacaccctttctgtgacttcctgcctcctagggccatctaaccacctgaccacacaaactttcccaggggccatttgtgagaatgttccttggagtgcgtgatgatttcaaatcagtggtggctttctcctattgtgggcggtgtgtgtccgcccatgccttttgggactctcttcgtttggttgacatatttgtttggacgtgacctttttccagttcctcttccctgggtttttgcccgctgaggaaatgattctcagatctcatccatctgcaccagtggcaacagaagagagaatttcttttttctatggttcgggtccaactgcccagacacctgtccttcagaggctcatattgttctggttgatgtcacttcctgacgtagacactctttaatattttagttctggaagtcatcaagttggacaagagacaggaggaaatggtggagggtcctcagctgacctgggatgcttttttgattgttcactggacacatagaaaggggccgttgctcccacctccatctgccactggcccctggaattagccctgttagtaagcttttcccagtggtggctgattcattctgagagcttttcatatcctttgggattcttcactgttagattcgagaagaaaaaggacagcttcgcttttgagtctgatgaaaaccacctgcagaagacatgtgtacataagctgtata

SEQ ID NO: 102055 - DNA, 1135 bp, Homo sapiens
gtatctccgaaggatcaagatcttggggaggatggcatttaactgaaggtgagtcttctgttccttgaatagatgttttagatgacacatcgctctacaaggtgcgtcactgtcctgtttttatcactctattgtttaatgatgatgcatctattgcttatggtaccagtgaatgtttccattattttactttacttaacatgaatttctcacgcattcatgtgcagctgaagagaattagcaataatgatcccaataataactcccctttgctgagtaccatccttgtgctgagtgctcttcatacgtgaatctcactgaataccgatttttggaggagaagcgaggaggttggaggagtttagttaccagggtctcaggctgagttgattccagagctgaagctccttcaggagggtcactggccagccctggtgtgcccggcagatctcgtggagaccatgggaggtgcagagaagagtaatttgcacacatcttcaacctaggattactgggctagaccgctcggtgggggctgggcttcaaagccacctgagtgtgtgaccttgactcctttttctttccttcaactgcagtaaaagaaacggtagttctaagaggcctcgccaccctgcttgcagcaaaaggcctctctctgaagctgattctgtgcaaagtccagtgtcgctggtattttcagggcgactttcttctctggcggtgtgttttcctctgtttccaggggagctcccaagagaaggttgtctctcagtctccttttcatttgaggtgacccctctaactcctgtgtttaaagctgggctgcacttactgctaacctttctaatagcttctgtggagttggcctgaaaaactacagagagctctcctttcatccctcgccaggatgctgcaggtctttgtatctgcagccaccggggtaggggagagtggacacccttggccattttcttaaatccaagttggtagctggtgttttcagtccctgcctgaaaacagcagctgtttaatttgcatttggatgctgctttttctcttgccttcccaccaccctgtgtctaaacagtagccagagggcaactttttttttttttttttttttttttttgagaca

SEQ ID NO: 102056 - DNA, 1056 bp, Homo sapiens
ccggctaatttttgtatttttagtagagacggggcttcaccatgttggccaggctggtctcgaactcctgacctcaggtggtccacccaccttggcctcccaaagtgctgggattacagacgtgagtcaccgcacctggccgacttcatcttaattacacctgcaaagaccctatttccaagcaacgtcacattctgaagttctgagtggatgtgaattttttggggagaccctatttgacccactattttgagggagaccctatttgaccccctagatagaagtttgagttctgaaagcaattctactctgctggacaaagtttggaaaatacacacttggttaaaaccacatccaacactaacagtgatgtagaccacagtaaaacaagtcaggtggtcaattcaatgaattctaaatggttgcatcattttggacaatctgatatgctttgcttcgaggctttattgcatgtactcacctttagactctttagggtctgggatactggaaaagtttttcacaaatttcccttaagtaagcctccctggaaaggtcaactggttctttctattagttcctggaatttctgtggagcttgtgttcactgatgtccagaggagatgcaacagaagaggagaaggctctggtgcatgggtattttttacagacatggaggctgatgtggctgtcctgggctatgagctgttttgtccctttcaaggcttgttttctataccatgacatatcattattattatgtggcaaagtcaggaaattgcatctcatccaaccttgcccatttgctaggttctcaggtagctcaggttctcctgacagatatttttcctaaagtcgctttttcaaaaattgcagagaagtttcttataaggatgttatatagtttatttattttttatttttagtttttgagacggagttttgcttttgttgcccaggctggagtgcaatagcacgatcttggctcgctgcagcctccacctctcgggttcaagcgattctcctgcctcagcctcccaagtagctgggaccaca

SEQ ID NO: 102057 - DNA, 1050 bp, Homo sapiens
ccagtgtgctgcaggagcaatggatgattctcccttaagcatgctagggaatctttacggagcaatgatgcttaattgggattttggaaggtgaacaaactttctttagaaagccaatatgtccatggcagggagaggaacccctgagtagagatcatgagcaaaggtacaaagatactcaatgtgttcatgagaggtgctcattggtgcaaaggtggagtgcaggtggaggcacaggacattgctggtggcagtcgtggatggtgtgagcgcaggcatcaaggggtcatctggttttgggttgctggatagggagtttgatgaacatccccagaggatgtttttgttatatgtatgttcagctcccaacagacttctcgtaaatgtgatcaggaggccagtgtcactggaatctagggttccttgttaaaaataccatctgttgcatcaggatcttgggtgggggcttgggagtctgcactctaatgctcttgccacgtaacgcttatgcacaccaatgcttcggaaccactgctcagaggaacaagaaaactgcttataaaatcttaattttagctttcagcatttcttcaggagtatcttccatccttgatacgtatcctgagacggagctgtaaagtaacatgtgttcttaatattctctcctctcaataatccctcttttgtgtgattttcttgtctttactttgagacttttgtatgtaggttgtattagttttctagggctgccatcacatattgccaccaacttggtggcttacgaaaacaggaatatattctctcgcagttctctggaagccagaagcctgaagtcaaggtgttggcaaggcatgctacctttttttgttgttgttttttgttttttttagagacagggtcattctgtcacctatctaggcctatggaactcttgtttacctgcagcaactcgactggagtgcagtggtgtgattataactcactgcagtctcgacctcctgggctcaagagatcctcctgcttcagcctcgcgagtagctaggagtactg

SEQ ID NO: 102058 - DNA, 1043 bp, Homo sapiens
gggattataggcgtgagccactgcgccagcccatcttagcacttttgatgtgtacagttcagtacagttaatttacattcctgtgcagtctccagaactcttttcatcttgcgaaacggaaactctgtgtttaataaataatcactccacattctccctctgctcccccagcccctggcaaccaccattttccttccttctctatgaatttggtactctaggtacctcatataagtggaagcacacaggatttctctttttgcaactggtttatttcagttagcataatgtcttcaaggttcatccatattgtagcatgtgtcagaatatttttccttttaaggctgaataatattccatggaacgtctacaccgcatttcgtttatccacacacctgttggtgggtacttggatggcatccacaaatccaccctttttcttctgtgaatagctgtgattgagtttgaatcttaagcttcctcacactggctgtgagatcgtagacaaatcactgaacttctgagtctcagtttttatttctttagaaatgagcagctcagaccagatgttcacaagcatttaagctctagttacaggatactaaataaaaccgaatctgcatctattaaaaatgaaaaagaaagaagaccatgcgtcttctaaaagatttccatggtttctcccaattagaccattttccttttctgagcaaacttaattttcaagtatctgtaacagcagaacttctataactttaacagctttattgagatataattcacacaccgtgcaattcatgcacgtaaagtgtataattcagtggttttttagtatattctcagtgttgtgcaatcatcactacaatcaacttcagaacactctcatcatgccccaaatcattccctatttctccccaactcccttgaccccccccccgccccccccgataatcattaatttactttctttctctgtggccttgcctattccggacgtttcatataaatgggatcataaaatgtgtggtcttttgtgactggct

SEQ ID NO: 102059 - DNA, 1084 bp, Homo sapiens
cccaagcccctcaaaaacatagcatgttattaaatattctaatttccctcaagtgcttgtctttatagcatctgtcttgttggttgatgaggctctgggccttacaaattgctttttcttgctgttctgatgacttttctttcaagttaattttcactaagaactggcatgaaaccccagacttcatgaaaaccaaagttgaaaaaaaccgtgctatgactctctgcaaagtggaatgtttgggctctctttcagttgtagctcctgacattgtggcttaccaagggacctgagtgagtttctgaatcagttattagaccacattccactgacttctgagttttaagtcctattttatatttcctttagaaacagaccacagttggtttctttccttcccctgcaatcaagcaaccaatccactggcctgattttaacataatgaagatttcattttcacaaaccgtggaagtgaaatatgtatgttttctaactcaacctaaagtgagctgaaatgtgttggcttgtcatcgtgtgcttagatctactgaaaatagaatgatcccatggagccccaagtctgagaaggtggcttctcatttggggtaaggaatgtgatgtagtttcattgctacgccagctactcaaagtgttaaaaagcgggcccttatgcaaagacataagagtgatacaatggactttggggactcaggaggaagggtgggaggtgggtgagggataaaagaccacatactgggtacagtgtacactgcttgggtgatgggtgcaccaaaatctcagaaatcaccactaaaggacttatccatgtaaccaaaaaccgcctgatccccaaaaactattaaaatggtctgggcgcggtggtttacgcctgtaatcccagcactttgggaagcccaggcaggtggatcacctgaggtcaggagtttgagaccagcctggccaacatgacgagacctcatctctactaaaaatacaaaaattagcaaaaccctatctctattaaaagtacaaaaaattaggtgggtgtggtggcatgtgcttgtaatcccagctactcgggaag

SEQ ID NO: 102060 - DNA, 2133 bp, Homo sapiens
tgcataaagtaaaccctttttatcttcttgccttaaacttgaagacgaagagcattttaaagactaacttgaatgaagcaggatgttagttttaaagacatgaaggctgagactgctggtgtgcaatgtgggttccagtgttcttttacaaacaggttcagttcaggcaaaggggtggtgtggccagtggccccgaagttcttggcaagaatgttggggatcactcttagggaaggaagccaagaatctgctcagtaccaaagacatctccgtagtctgttcagactgatctaaatatgaacagcatatgaatttagcaaagaggatacatgctgcctgagacttttaaccataatacttcattcgtttactaagtaattaattagttcagtggttattcattgcatgcctactgagtgccaggccagaggtcacttgttggcaaaagtctccgtgggacattacagagaactgggacggccaagctgttaacacagagctcaccacagtccttgtagtagtgcttcactctggagggtcactgtgtgtctcacctagagcctgtccacacactctgagctatcgcgtttgggactcaaaagatggaaggtgcaattaactataactgcaattaaaacacggttgtggttagttgcagtgatggcctgttaggaagtgaggaagtaaaaattcattataagagcatgtctgaatttttaaaagtttaacagtattgagaagagatctttccagctcttaaccatggtcttcacaatattcgagcataacatagtatacaagtgaccatttgccatcaagaagcaaacgctttagcatgcccatttcaaatggtggcatggttatctatttcagcttcaacttctcaactccagggcaccacagattctgctcgagttccctctccctgtgctaaggcctagcagccgggacactggggcagatcgtaatgctcatctgtttggtatttagtctgttagagatcagtgtcctgtgctacctgttgttcagtgtctgaaaaccattgtttcatagattttgtccaatttttaaattgtttcaggtgggagtataaatctggtccttgttactgcatcttagctggatgtagaagttctgcaatatattttacaatgcctttttttttctttaaaaatagggatttaaacacatttaaacaaatatttggacatttaggccaggcacggttgctataatcctagcactttgggaggccgaggtgggtggatcgcttgagctcaggagtttgagaccagcctgggcaacgtggcaaaaccctgtctctaacaaaaatacaaaaattagccgggtgtggtggtacatgcctgtggtcccagctactcaggaggctgaggtgcgaggatcgctggagcctgggaggtgaaggttgcagtgagccgagatcaaaccactgcactccagcctgggagacagagcgagacttcgtctcaaaaaaaaaaaaggacatttagaaatattaaggttcagttatgtggtaaattcacatgtgtggaataacgtattccctgacaatctgatcattaagttgtgtctgtgtatgagcgctgagttaagatgtttcagagtataagtcaattaccaccctcatcttaaaggataattaaaatctctcagcctccaagggatcaatcctttttttaatttgcttccttttcttcttatattctgagaaattgttctaaaaggaatgatttgagtttccagagtttggtatgcattgccctagcttccaactaaaagaatggaccataaagcattattgcagttgaagtataaatctaattattccatttactttcagaggttgtatctgcaaatggcataactgatgtattcgttttcattctccttctacccagtttgctcaacctaatcacctgaatgatgttaatttgggtttaaggcacatttcagaagattttggctgtaaagagcaaggcaaacttagctcttctgcatagctctaaatgataccaataactataaatggcatcattcatactggtgaagtctttcttactttttaaaggctaggatcaaatctaggaaggcttgggtgactcccctgctctg

SEQ ID NO: 102061 - DNA, 2948 bp, Homo sapiens
tgataatctgatcaagttcctcattttccacctttgatgtgtaagtccttggcctgtctttagcaagaattctgttaggccagttttgcaagattgcaagaatctcccggctgggcgtggtagctcatgcctgtaatcccagtgccttgggaggcggaggcaggcagataacttgaagtcagacgttccataccagcctggccaacatggtgaaaccctgtctccactaacaatccaaaaattacccaggcatggtggcgtgcacctgtagcctcagctactcaggaggctgaggtgggagaatcacttgagcccaggaggtggaggttgcagcgagccaagatcgtgccactgcactccagcctaggcaacagagggagactctgtttcaaaaaaaaaaaaaaaaaactccctactcctgacgttacgtcttagtaattgtccattgactgaccctctcagcttcactccttggctgtaagttctcacttgtccttgctgtgtttggagttgagcttgatctcttttccctgttacaatacccttattgttctatatatatatatatatttatttatttgttctgagatagggtctcatttcattgctcaggctggagtgcaatggcactgtctcagctcactataattcccacctcttgagctcaaatgatcctcccacctcagcctcctgagtagctgagactccaggcatgtgccaccctgcctggctaatttttgtatttttttttttttgtaaacatggggtttcaccatgctgcccaggctagtctcgaactcctgggctcaagtgatccacccaccttggcctcccaaagtgctgggattacaggcatgagccaccatgctcagcaatagttttgaattaagtcttcattactcttttaacaagtgtcaatttttttcttcagtgacctccagatcttacttgctatgtctaagataggaagcctgtatgttaggtagggaaggctcaatcctggaacaaagtctgaaattacagtggcttaacccaacaaaaggttatttcttgtccacataaaagttctttaccaaatggtgattccaggacccaggctccttccatattgtggctctgctatcgccaacttgtgccttccaacattgccatattcctgggactcaagtcctagaaggggaaagtgcttgcaggtttgtgagaggggcagacacatctttcccactcacattccttattggctagagtcaagccatgcagccacatttaagaaggaatgagtttgttgaataccaacacatgaatctgcattttaaacaagtgtcacatgtgattcttatgcagggggatgcttgggccacaccttggtaaatgctgtttataatatttgctaagttccttccaaccctaatgggccatgattctgttgtgctgtgagctttcacatggaaaaaggcaagcatttccctctaagatgaagagagaaattgaaccagcaaaatcacaaaggattcttcccatatcctgagttcataaaagcatggtgacctgttaagaccagctgattaaataggcaccataatcatcttgctgtgactcttctgctctgggaacccactgagatattaccttatgtgtttccttccacgatggggtgctgggaactagaatggggaacacagaaaatgtaaatgcatgttttcctttgcaactaattaaagtggacagtttaccacttcatttgtctttttttctttttttttgaaacagtctcactctgttgccaggctggagtgcaatggcatgatctctgctcactgcaacctctgcctccctggttcaagtgattctcccacctcagcctccccagtagctgggattacaggcacacgccaccacacccagctaatttttgtatttttagtagagacggggtttcaccatgttggccaggatggtctcgatgctctgacctcatgatccgcctgcctcggcctcccaaagtgctgggattacaggcatgagccaccatgcccagccatttgtctttcaatccattggaaatctaaaggttttcttaacctattctgctaagaatcactgatctgggaccaggacaaccctgatagcatctgtattaacttggtcatttgtgttgtgacttttttttaaaggccaagaatttaggtttattttgtgtcaggaattaggctataatcagatatttggggactgggggagtcagcagtgtggtgatcagattttcttaattccactaaggactaggtaagaagaaatatttggacctgcatgagatgtagtttgagcacactgaaattataagggaaagctagattgtgaatacagcctttgagtgagactttttctgagtttctcatttcttaacaccttcagttgctacgctgctggcaaatatgacacaagctgttggatgctttctcgattgaatatagttctgacatcacacaatattagctaacgtttgtagaatacttactgcatatggcttttgttattctcttatttcttcatcttaacaacactaggaggtatgagtactattttttccctgttttaccaaacgagggaaactgagacacagagaggttaggtaactgcaaggttacattgccggtgatcaagaccctattgacaatcggaagcatcagccatccatggttttgttccatctcagtctggtttgttctacactagctgttatattcttagacaaccagtggttcttcgagagacccctccctcttttttaaacatagattacatggttcagcagaaagtggttctatttcttttcacgataattatggtttctgggttagcactcagtgctgccaactttttgaggatgcgggtaaagtaagttctatttcttaccagcctttgatggcgtacagcgtgcttggata

SEQ ID NO: 102062 - DNA, 1566 bp, Homo sapiens
ctgaggcaggtggatcacctgaggtcaggagttcaagaccagcctggccaacatggtgaaaccctgcctctaccccaagtacaaaaattagccaggtgtggtggcgggtgcctgtaatgccagctacttgggaggctgaggcaggagaatagtttgaacctgggaggccgagattgcagtgagctgagatcgtgccactgcactccagcctgggcaacaatagcaaaattctgtctcaaaaataaaaaaataaaaaataaaaataaaaacaaacatagtcctcaaaaaaccaaaagtaaaaccatgaaaccaaccttcccaaaactcaaacgttaaaatacaaccaacaaaaccccaatctctcctttagcgtctctcctcccctcctccccctggctgtactcatgtccctgagtcagagagggctgttaaaatgtaatgggtatagtccgatccaggaaacaatggttgatagtcttgaataaactcttgaattttacaaggattggggatctcctgggtctcctgatgaagagaacaggtctttggatactgcctgcagtttgagtgcctgagatttctgcagggtaggcagtgagaggtgagcatttggggtgatagaattccatgtagtcaccaatgagctgtgtccctattaattggaattaatagacgacatccagaatggcaagtgggaatataacatctcctggatttaccagattattttccacaaagtttggaacttacataaaggagtcttttggagtagccattgcccctctttcagcaaaaccagaggaaatgtcatacagaagaactgtggttaaagaacattctggaagacacacgtattaaacagagtgaggctggtcttagcattacagaaggttgaagccagcaggggcacagtaatacaatgagcctagattctttatttaatagatttaaaaacaaaacctgaggccttggagtttccgtgtgttgctcaaagtcaagattcactcatcatcatagactgtttctcacattagcctgcgacatttgatgttgtatctcatatgctaggagacatttcccacagaaacatctacttgttactggtcataaaattgcctgtatcaaaagcagtagttgtctttgcattctgttctttcttttctcttctcttctgttctttgttttccttttttttttagatgtaatttcgctcttgttgcccaggctgaagtgcaatggcgtgatctcagctcactgcaacctccgcctcccaggttcaagcagttctcctgcctcagcttcccaagtacttgggattacaggcatgtgcgaccatgcattgctaattttgtatttttagtatagatggggtttcaccatgttggtcaggctggtctcaagctcccgacctcaggtgttccgcccaccttggcctcccaaagtgctggcattacaggcgtgagccaccgcgcctggcctgcgttctcttcttagaaaagtttgctgactttttaaaagaattgtcaaatatttcatggcagactgcagttctttggatattggatc

SEQ ID NO: 102063 - DNA, 2076 bp, Homo sapiens
ggtggctcacacctgtgatcccagcactttgggaaacaacagtgtgacgatcacttgagcccaggagttcaagaccagcctgggcaacatggtgaaaccccatctttacaaaaaatacaaaaattagctggatgtggtggtgtgtgcctgtagtcccagctactcgggaggctgaggtgggaggatcacctggcctgggaagttgaggctgcagtgagccatgatggtaccatggcactccagcctgggtgacagagtgaccctgtctcagaaaaaaaaaccaaaacaagccaatcctagcaggtgggcactgttatatttgctgttgcaaatggggaaactgaggttgggagaggtcaagtacctaggccacagggactttcagaagtagatgccagggatctccacttggcagagctggactttctgacccgaaacccatgcctataatttgaggatttgccatcctgtcttgtagaggttctgagagctgccacagttctgattgtggagtcttgagtgacagggaagttgcagcctgaggtctgtggtggagctggaaaggaatatttgcaagacacctccatgctcagcaccttccttgggcttctccaatttgcacttcttgtttttttttttttttttaattgagatggagtctctctctgtcacccaggctggagtgcagtggcacaatcttggctcactgcaatctctactgcctaggctcgagcaattctcgtccctcagcctcctgagtagctgggactacaggcacgcattaccacgcctagctaattcttttgtattttaatagagatggggttttgccatgttggccagactggtctcgaactcctggcctcaggtgatccgcccgcctcctcctctcaaaatactgggattacaggcatgagccaccgcgcctggcctccaagttgcacttctaatttagattctgtcctctaatcttggtcaatgtagatgttttaggagtaaccagtgttcctcatgtgtttttcttggggcctattacacaatgactgctgtgatggttaattttgtgtgtcagcttgactgggccacaaggtgcccagatacgtggtcagatattctggttgtttctatgagggtgtttttggatgagatgaaccttgaaatcagtagactgagtgaaagatattggcctcgtctctcctcctctcctttcagttgaaggcctgaatggaacaaaactcgggccctacccctgagtgagggggaatttctcctgcctgactttctttggagctaggacatcattttttccctcctgctttcagccttggactggaactccaccattgctctcctagttctccagtttgccaactgcagatcttcagatatgttaacctccataatcacacgagccaattccttataataaatctcttcatgcagatatatacatgtgtgttgtgcatatatgtgcatatgtatagattctgtttatcatgagaaccctgactagtacaagcactcatccctggtcactgtccacctcctcatttctcaggccagcaggcatctgaccaacattcctgcagatgcttcagggaaacacgtgagccacagtctcttcacttccatttgcttttgctcctcttatctccgaactcacagttcagtttttaacacattcagatcactctcatatttttcctcctttattctaatttattgatcttcagagaatttctttcctatttctctgctttctccatttttctttccttttttccttctccttgcttttcttccttttttaaatcttcttgagatagagtcttgctctgttgcccaggctggagtgcagtggcatgaacacagctcactgcaggcttgacctcctatgctcaagcagtcttcccacctcagcctcctgagagctgggactacaggtgcacaccactacaccctgctaattaaaaaaaaatttttttcccagttgctaccagctatagtaaaataaagaaagaaaaattttgtagagttggggtttccctttgttggtcaggctggtctggaactcct

SEQ ID NO: 102064 - DNA, 1021 bp, Homo sapiens
ccgcttggctctcattctctctcttgcctgacaccaatgtaaggcacgcgtttcgccttctgccacgattgtgaggcctccccagccatgtggaactgtgagtccattacactttgttcttataaattactcagtctcgggtatgtctttatcagcagcatgaaaacagactaacacaactctcaaggagggaagagagtccccctgtccccctggtgcctctgtgggtcaatgctgcccttcactgaggtcctttgggtatgtgctctgcattttcccaggcccaggaaagcaatgtgcagagagaaagcacctgttctgccttgaagaatctcggatctgggtgggaggcagggtgcccaggggcaagagtgacacttcctaacaatagagctacaggaggagctggcaccgttaataagcacgacctgcttcttgcagaaagtcaaggaaacattccaagaaaacatctcggacgtgcttctccttggagtaggagagaggcactgttgtttctgtagggaagttggatggggcctctctgaaaagaggtaatttgcaggattccagttatgataggatacagagttgtcttgtatattctgggaagaagggaaattgcatcctgcctttgtccgataacaggcagtggggaaaagggtagcaatgctttcggggcccaggaggcctgtttgctgcagctgcacgattcacgagcagctccttccattatcccttatattctgtggggagggaagaggcaaggccagttacgtggttgctgcctgattatcggcctggctgcccaaaggaagtcccccaggcccctctggccttcctctcaaccaacctgccaggcatttgcttttctgcctaattcagttatgcctcagtgtgaacattttctgcctaggcttggtcaatctgcagggacctctcttggtacttgacatagtcagttgcctgactacaaaccaggcctaccctggatagaaagaaaagggagttgtgacagttgcca

SEQ ID NO: 102065 - DNA, 1050 bp, Homo sapiens
cctgaaacccaaacttactgttttccctcttccaacttcttcatctctattagcatcacctccagtgttccagccaccagatttttagtctgggtgttagcactgacccttctttttctttgtcattttcagtatccttgcacttacgaagtactctcaaactttcctggacatgtcctttgtaaaccatcttcctaaacactagtttttgtatctctcactctctctttatctctctctctctctctctctctgtgtctcacacacacacacacacacacacacacacacacacacacacacgcacacacatgctttcactcagcctggtgcctggtgttggcttaattgtccatccttttctctatgaacaaattgcttcacttccacatttctgctgtgttggtttggagcttgtctgtccttcctgggatgtccttggccacatttcccattacccctcccaagccaccgcatttgctctttctctgaactacagactctggtccacttaggcccagtgactttctttatgttagaatcatcaaggtcattgaaattggattactcagtcatgtgtagacttggctaacttccctgtatgcagtgtgtatatatacatctataaaagtaatgcggggtgaattatctgaatttaaaaattcatgagaaaaatatgataatattaatcaaacatgctgctgtttggcagccagtcaccaagccctcctgtccccgtggccgactctgctgatggctgggcagccacagtgtgatggatggtgctgtggcatgcctgtggccaggtgggctggccgcacctgtggctctgggcctgatttatgctggcctcggagccgcatattgctccacgggatgacgcagatgccggggcctatcctagcatgtgggacctcagccatatccatccagagcgaaccttttttttttttttcctctgagaatctcagtttagcttcttagcttaattgaccactagatggattaggagctgcttaatgatgtctgaagcccacaaggactgttttg

SEQ ID NO: 102066 - DNA, 1034 bp, Homo sapiens
ctggaaggaatcttgagggacctttggacaaatattaaatgtcctgttaatgtcgttgtcattgctgtcattatcatgatctttttcaatgcctttaatttaaagatgaggaagctaaggggacagtggtgcacccaaatcttggctaatggtagagcaatgaccgtctgggtgtttctgtggaatttacttgcacttttgttttctgtgaagttcgtgctgggattagcagagctctctacctcctcctctgagctccctgccggagcctgaacataaagtgcccgtattctgggctcatggaagatttgttaataagaaattttctaaaaaaatgatcagggaggagacatggggagtcagtaaaaagggggagagaggagcatcttaaactgcaaagatgttgaactggaaaaggaaaactgtgaaaaacattgcaaaaggaaaagaaatagaaggaatctgtggaagaatcaaatcaaccaagtgcaatgttgggtcttgtatggatcctgatttgaacacaacaactgtgagagaaggagagagaggcagacagaatcagggacatttaaacagggaatggttaattggtggtggtaaggatttttgggtggtgggtgggatgatgtttaagtaaaaggtccttctcttttagaaataagtgttgaggtattaatggatgatagaataggatgcttattttcttcaaaataaataagccagtgttgggggagtatagcaaactaggattgaatagttgaagctatatcgtgagtacatggggattatgtacctaccataaaacatttccaagtaaaaagttttaaaaacatgaaagttgatcaactgtagcacatcacaaacctctttgcagcctaaaataataatgaaagaagcagtgtgagaaatttgccaactttttcatcttatcttaaaaaatcttccaaatgcagcagacgtttcccagtttccctggcaaaggccctttgccctgagtgacaggcggatatgggaacaggagctcgaggaag

SEQ ID NO: 102067 - DNA, 1702 bp, Homo sapiens
gtgatctcagtttactccaacctccgcctcccgggttcaaacaattcttttgcctcagcctcctgagtagctgggattacagacatgcacatcacgcccagctaattttttgcatttttagtagagacggggttacaccatgttgaccaggctgatttcgaactcctgacctccagtgatctgcccgcctcggcctcgcaaagtgctgggattacaggtatgagccactgcacctggcctcaaattcagcattttgagacccgattcgctgtgccctcttcttttacagagtaaagctttctctttcataggagtatgctaccatgtggtttgttttatctgtgtttggtcgggagttccccatattttaattgactatttcatgctaagggctttcaaaatacgtagacttgtattttttccccctaaatggaattcatcttgttttatctaagttattcatttttcctttggctatattgtgtgctacattataatggatggctattgaattctttatgtaaaaaaaatgaaatagattgaaaatttaaaggacttttcttttttaattgcatcttaatataaaaacaggagtttaattattaaaaatggtggaagaaaagaattaaaacagtaaaatagcttaccaaagattctgttttataatgcattcagatataattggtgtcataatgtgtaattaacagtctttgaagtgtgaagcttaagtttgggtggatgaaggacctcttaggatgcggggatgtctatacttgttcttcaacagtagcacttcctttttcatttttgtttttgagacagagtctcgctctgttgcccaggcaggaatgcagtggcaccgtcttggctcactgcaacctctgcctctcagttcaagtgattctgtggcctcagcctctcgagtagctgggattacaggtgcccaccaccacacctggctaatttttgtatttttagtagagatggggtttcactatgttggccaggctgatctcgaactcctgacctcaagtgatccacccgcctcagcttcgcaaagtgctgggattacaggtgtgagccaccacgcccaaccttgaacagtggcacttccggagtggtgcacagattgtggggttttgctacctgcctttatgtgtgtgtggtcgaaggagatggtagaagaaaggcagggacaggggatcatcctctgatgcttgaccacccacccactactgcctggggtttgtcagggaggagaggacaaactccttaaaatgggcagtggcttcagcttcaggtctcaggctaacttcctggggagttggagtctaccacgtgctagactgacctggggcttgtttaaaacctgcagaggagcttccttggtgcattttctagatccacactgtaatctgggtgtgggtcccccatggaccttgttgccatgctggctgggaataataagtatgaggaaaagcaccctgaggaaaaagaggggaagataatggaacctcaggctgagagtctcagcctccgtttttcccatgcaccatccggctccagttggctctttgaagactgggagaccagaacactcaagaacacaaataaaatatgagagagagtataccacgcagatctgagcttatattcactcttactctggtccaaaagttccttgtgcattgctccctctggc

SEQ ID NO: 102068 - DNA, 1037 bp, Homo sapiens
ttagtagagatgaggtctcgtcatgttggccaggctggtctcgaactccttacctcaggtgatccgtctgcctcggcctcccaaagtgctgggattacaggcatgagccactgcacccggcctcttacttcttttttaacatgacaatattctgttggaagtgaggcaagagcaaagtcagggagaccaattaggaggtgacagtgatgagggtgctggcgatgtagctggtactggcaatgggctgctggcgatggagatgcagcagattctggaaccctttgagggttgaattgacagggtttgctccgggcggagtgtgaagtgtgagaggaagatgtgtccacgagaaggaagaacccatgtatttggggtttgtgaagtgacagtggttgatcacggctgctctgggctcagtgggctcttctcggcccttcggcaggtaagagttcaaagctggagtcgaaaggcttatgtcttgagctctcatcgagttgttgattagttcctgggtaaggtcactccctggtagagcagttacctcttttgaattggtgaccacagcctgcgtccccagccctggtgtgctgctagacataagaagaggcaggctggctgggcgcggtggctcatgcccctgtaatcccagcactttgggaggccgaggtgggtggatcacctgacgtcaggagttggagaccagcctggccaacatggtgaaaccctatctctactccaaatacaaaaattagttgggcatggtggcaggtgcctgtaatcccagctacttgggaggctgaggcaggagaatggcttgaacctgggaggcggaggttgcagtgagcgaagattgcatcactgccctccagcctggtcaatagagtgagacttggtctcaaaaaaaaaaacaaaaaaaaaaaacaaaaaagtggggttaggtaggcagttcggagaggtcactatagaatctccagtggatatgcagttcaggggacaaaccccatgatggaatgttgctgcttctgtgagggagaggc

SEQ ID NO: 102069 - DNA, 1156 bp, Homo sapiens
tcctgcctcagcctccgcctctggagtagttgggattacaggcacgcaccaccacgcccggctaatttttgtatttttagtagagacggggtttcaccatgttggccaggctggtctggatctccagacctcgcgatccgcccaccttggcctcccaaagtgctgggattacaggcgtgagccaccacgctcggccaatccttgggcttatttctacacaatagcaggggtggcagctggagttgcagcactgccagtaattgcaacaacacttgaatgaagaggcaggcatttctaccagttggcctcttttcatctgcaaagaatccttcctggaactccccagtctacttcctgtcttgttccattggtggcagctgagtcacatggccagccctaacccaatcacaggcaaggagtaatgggaggctctcattggtttatatctggcttatttcaggctggggctgggcagcggcggttccctgagtctgtcctggcctgagaatgaacttggatgatcagtgttctgttgacagggagggaggcatccaaggggtgctcttgggaaggcaactaggcatttattattattattatgtaaaggctaggtccagtcctgctggcagtctaaaaaaaatcattttatttcgtgttttaatcaatggtgacatttgggtattttgaatctctgcatttttgggtgtggtatcttaaactttagagattcttctttaaacttgaggatatctgtaagaatttttttataaagccacttaattattttacataaagtagaattagagagggcctcacagtgaccccaagtcatgatcacagggcaggaatagaagaatttgcctctctgagttaacaagaataataacaaaaaagatttattagataatgggcacctctgcatacagtaggtttttatggtggaaggagactccaaacagaattaacagtaacacatgtacaagtttttttgggaaaaaaattggaaaggcacacttttcagtgaacgctagaattcttttccttttttttcctagaacaaactttcatatgaagggctggataaaaaagtcttctttttcctcttactcctgccagttaataaaactgctgaaagacaattgtaatgatccggaaa

SEQ ID NO: 102070 - DNA, 1050 bp, Homo sapiens
gcctcagccttccaaagtgctggcagtacaggcgtgagccaccgtgtctggccaggaccctgttttctcatcccatgtcttgacttctcactagtcccacaccctttttcaaatacaaatatcaatcacatttcaggctacagttcatgtggtacaaacatgcacaggtgtgcccaatcaaatccttccccaaagcactagagactgggtcatggagccgggatcttggctgggagagcaactgtgggtttccttaagggagagtgggggtgctgcggggtcccttgcctggtgttctgacaattggaaagccagatgagctcaccatcttctcagtctggcttctgcagacagtagtaccttcttacctctctatggttgtctgagagcttgctcaagtcccatgaagtttaacgtggtgagtctaggctggtgagaaagttcatttgtccattcagaattgcttgctgctggaataatctgtgatcatcttggaaagctcttgcgtagatccaagaatctctttccttcagtgacacaccaccaaatggcttgttggctgttatctccaagggagggaggctgccactgaagagggttggatgctgtttacattcgggtttgtccttccaaggaatgggatatcctcctgagggctttagcaggttgtgacagtcacatggaggacagatgtgcagtgtgtcacatgattcagtcacagaaccagcaatatcagcttgggggaacagggctatggggaattgtggcttgtaagtcaatcacataatttattttatgtgaaagttctgtccaatttaggctgaaacttgatagaacatgtttttccaagcccccagctttacttgtctggaatgcgccctttctaaacaggcaactctccaagcacagtggctcatgaggtgacatctgggcagcaccctgccaggtggcttttagctgatttcttatgtgtctctggcctaagccactccaaactgtctgctcgcgctattattttattattttccttgaacatattttcaaagtaat

SEQ ID NO: 102071 - DNA, 1039 bp, Homo sapiens
caaagtgctgggattacaggcgtgaaccaccgcacccagccttcttcaccattttcctaagggagacacaatagcggattatggacaattttgaccttggtacatttagccatgtcactgcaacatacatcagagcccagggtgtggctctcacagcaggcgtgagccactgcgcccatccttttttttcctctatttttgatttggcccctgccaagtcaatttcatcatcctaactcaagtaagagcttggaatgtgagggtgccttgcttgactgattggctttctttaaacttcctttgctctccctttgatgagatgctcctaagcagagaaatggctggcaaccaaaattggagagtacagccacctggattagcaatccttgaatcattaggatctgattgtaaagggaaactacgaaatgctttaaagggtgcaatccggagtgaaccaggaaactcaagacggatgatctaggcataatacatcttaaggcagcgtcctgaatggagcagaaactcctctcacctgactcattatctaggcttcgtgatctcctttttttcctagctgaaatcctgtccttagttccattttcctcatgcttggtgctgacccagatttgggggagggtggtaggaagtggtaggtgatggtggtggttgtggtagtaatggacatggaagtcagccctctcttaaaattgcttccaggctgggtgcggtggcttacacctgtaatcccagccacttgggaggctgaggccgggataattgcgtgagcccaggagttcgaggctgccgtgagcctagattacctcactgcactcctgcctgggcgacagagcgagaccctgtctcaaaagataaataaaaaacaaataataaaattgcttccttcctgacagtgtttgtgggcccctaaaatgtcctctctggtatttctccttttacctttttttttctttaagatatgttacttggcggactggtttggtaaccttattagaactgaagctattgagtcattaattct

SEQ ID NO: 102072 - DNA, 1011 bp, Homo sapiens
aaaagaggaagcaacccaagtgtctgttgattgagtgggtcaacaaaatgtgtatacgtacagtggaatatgatttagccttaagaagggagttttttgtttgtttgtttgagacagggtctccctctgtcgcccaggctggagtatagtggcacgatctcggctcactgcaacctctgcctcccggttaaagtgattctcctgcctcaaccacccaggtagctaggattacaggcttgcgccaccatgcctggctaagttctgtatttttaatagagatggggtttcaccatgttgcccaggctggtcttgaactcctgaccttgagtgattcaactgcctcagcctcccaaagtgctgggattacaggcatgagccactgtgcctggccaaaaaggaaggaaattctgacacatgctacaacatggatgaatcttgaagacattacgttaagtaaaattagccagacacagaaagagaaatactatgtgattccacttgtatgagggacctagagtagtgaaattcaagggagtttgtgttggacgggtatagactttcagtttagcaagatggaaagagttcggaagatggatgttggtgatagttgcacaataatgtgaatgtacttaataacactgaactgtacacttaagaagggttaagatgatagatgttatggtatatgtatttcttataccttaaaaaaagatatggaagggaggaaaaagatgcagatgcatatgtgtgtgtgtgtgtgtgtgtacgtgtgtgagagtgcgtgagtttagagagagtgctattagggatgggaagagagatggaaatggggagggagcctgtgtaggtggctgatttcctgctgtgaagaggagtcgtgctgggcagaaaactatgagggcagccatcagtgcctgggttgtaatcagagctttgtctccagcaagctgtgggaccttgagcaagttggtcgtttcctgttgtgcgcatcagcctttttttttttttttt

SEQ ID NO: 102073 - DNA, 1027 bp, Homo sapiens
gagaaaccccatctctactgaaaatacaaaattagctgggtgtggtggtggcttatgcctgtaatcccagctacttaggaggctgaggcaggagaatcgcttgaacccgggaggcggaggttgcagtgagccgagattgtgccattgcactccatcctgggcaacaagagccaaattctgtctcaaaaaaaaaaaaaaaaaagaaatttcaatatgaaaacctagttctttatttctctatctctctcctccccactccaaggaaaggtagaaaagaatccaacctaggactacgttccaccctgtagggtttcctagggctgtgctaacagagtaccatggaggggaagcgtcaagcaatgcaaatgtagtctcccacagttcaggaggctcgaagtccacgactgaggtgtgagcagggccacgttcactctgaaggctctaaggaagaacctgtccttccctcttccagcttctggtggcttcctcagtgtgcagctgcgtccttcctgtccctgtctgtgtcttccatgtcctccttccccatgtctgtctgtgtccaagtctccctctttttattaggacattggtcattagaatagggcccaccttaagccagtatgacttcatcttaacttgattatgtctacgaagaccctatttccagttgggtcacagtcacaggttctgggaggtaggacaggtaggacttcagcatatcttttaaggcactcaattcaacccacagcacacacccacccctgggctaccaccctaaaacaccttcccataatatgattgatggcagagttactgctgcctgcgtcagtttcactgttgtctgtctgctccagatagctgcctgtgatctgattcctgtctgtccctcctgctagactgtgagtcccaagaggacggggaccatgactttaggtcatgattgatcgtatcccaggtacatagcccaaggcctaccatataattggtgctgaataaacattagttgaataaaaaagaaaacatattt

SEQ ID NO: 102074 - DNA, 1042 bp, Homo sapiens
ggttagaaaagactgtctttggctgggtgccgtgtgtcgtgcctgtaatcacagcactttgggaggctgaggtaggaggatcacttgagctcaggagtctgagaccagtctgggcaacatggtgaaatcccgtctctaccaaaaatacaaaacaaacaaacaaacaaacaaaaaaacacctaactaggcatggtggcttgcaacggttgtcccagctacttgggagtctgaggcgggaggattgcttgagcctgggaggtggaggttgcggtgagccaagatcacgccactgcactttagtctgggtgacagagtgagaccctgtctcaaaaaaaaaaaaaaaaaagaaaagaaaaaagaaaaagacaggactgtctttgactctggaaaagaaaagaaggtcccgggagttttcctcagaatttagtccctggagttaaatattctgaaaaaatgaagtaggaaggattttgcagagggctgtgtccgtagttttcaaactgggtcacaggccattcattgatttatatagtgctgttgtgacaacagtaaaaataaaattgtggccagatgagatggctcatacctgtaattccagcactttgggaggccgaggcgggtggatgacttgagcccaggagtttgagaccagcctgggcaacacaggggaggccccacctctacaaaaagtgaaaaaaaattagctgggcatggtgatatgtgcctgtagtcccagctacttgggaggctgaggtgggaggatcgcttcaacctaggaggtcaaggctgcagtgagccaagattgtaccactgtactccagcctgggcaacagagtgagaccctatctcaaaaaataaaataaacaaataaaataaattgcagtaggataaggaaattcagtgcatcccaggcagcttaggtaaatgtcttgtcaacgtttttgtgtgtgacatacccaggagtttgccacgggctgtggtttgccacttgaccctaacctgccactctccttcgtgcccatggctgagatggtgtctctct

SEQ ID NO: 102075 - DNA, 1049 bp, Homo sapiens
tgacctcgggtgatctgcccgccttggcctcccaaagtgctgggatcacaggggtgagccatcttgccccactgagtacgtactattatctccactttattgatgagcaaactgaggttcagagatgaagagatttgcccacagtcacacaattagtaaacagctaggttgagcctggaggcttcaggctgtatccctgatgtctgggagcttttgctatttcatgctgctgccctgaactattagtcttccttcctcactttcaaaatccagacatctttctgcattttgaagagtcttaaatgagtggtgcatatgacttgttctcatttgggaagaagatttctgctgcttatataaaatcattgtgttgttttagatttttcttaattgcactgcttaggactttttctgcaaaagcattgaactattcagttcattaggctatatttagtgaaaattgcacccagtaaaatttcagggcatcctttttatgtctcgatgctgtagctctgtactttgataccgtttgtaatgggaaaataaacataacttacatgttttgtttgatttacctctctttgcaggtatcttttgtaaggtgtgataagttgcaaagagaaatattgctttgcagaggagttactgctgcttaaaaacatggcattgggtgctgttgaaatccgtgaatgatgacagtttattgagaatgattgagaatgtgctaaaaatttattttatagctggtcggtgaattattgtgattgctcctaaatttaaacgacagaatttgtggttgtagcttaaaaacctatgacattgaaatacggggtagtgttagatatgagaataagtgttagatatgagaaaaaaatgttgttttaattggtcaaatcaaaagaaacttcctggtcatcactatttccaattcttgatatgttatagccagtgatcccatttggatagaactttataaaggactgcttcggttggacagatgggccttacaagtgttgtggaacattcgtgttagaagcctcctttgagag

SEQ ID NO: 102076 - DNA, 1010 bp, Homo sapiens
taatttttgtgtttttattagagacaggtgtcaccatgttggccaggctggtcttgaactcttgacctcaggtgatcggcctcccaaagtgctgagattacaggtatgagccaccgcgcccagcctcagatctgattattaaagagtctggcccctctctcttttcctcctccttgccacgtgacatgctcgctcccccttttccttccaccatgagtggaagcttcctgaggcctccccagaagcagatgttgctgccatttttcttgtacagtctgcagaaccatgagccaaatagaccccttttctttgtaattacacagtctcaggcattcctttgtagcagcacaaatgtactaagacaaggatgtgtctgcctccctgagatgttgggaagagcagatgaatcacatgatagaagtttggaatggtacaaggcacacactaaatgctatgtaagtttttgctgtaattatctagctaaaggagcattgcatgataaaatggatataaaactcttgggcatagtgttcaatacacttcagctcttttgcttataagcttggcagagagagagtaaactctgattattcctcctgatttcccattagattttccatttttctatttcaaagctctcaggatcaaacccttcaccagcaaatgctttttgccatctagcaagagaatatacttttgagtccaggttctgggattcactagctaatatagttggatgtcccctccaaatctcttgttaagattaactcccggtgttggaggaggggcctggtgggaggtgtttgtgttgtgggggcggatccctcttggcttggtgcagttcttgccatagtgagccagttctcgcaagatctggctgttgtaaagtgtgacacctccctctactctctcttgctcctcctctgccatgtgagactcctacccccacttcaccttgcaccatgagtaaaagctccctgaggctttcccagaagccgtgcttcttgtac

SEQ ID NO: 102077 - DNA, 1091 bp, Homo sapiens
gctggagtatggaggcgcgatcctagctcactgcagcctccatctcttgtgctcagggagcttcctgcctccgcctcctgagtagctaggactgagtagctagatgcaccactatgcccagctaattttcaaattttttgtagagacagggtcttggtatgttgctcaggctggtcttggactcctggcctcaagcaatcttcctgccttggcctcccaaagtgctgggagtatagggatgagccactgtgcctggctttgggaagtattttaaatagaggtcacatacttagtgcattgatagtgctgcctcttccctggaagaaatattttcattgatcggcatcccccctccctgctcccttaatctccctagttatctctttctctctgtcagtgaatgttgtttaaacactgaagtctcatcaatcttgtacgctggaaagcctagaatcactagtttagggcttcccatctcagctatattaacactgtaacacttgtatcaacaacagtctagcatcctgttggaattaacacacatggtgctcccactctgttcctgtttgtgtagggagaagcaagacatttccttgggagcaaatctgtttctgaagggtagtgatgggcttgatcaggggactcaatgtgatcaacattgagagactgttgaccacaagtggcccaggtgagtggagactgggacacactgaggagattctaagcattgggttgggactggtggcctttaagatcatatctgtattttaggattttgtgataagtgacagggtggaatggggtggggcaggtggctgatagatgggtgattttagctccatcccttccctctgggaatgtcttaacacccaatcagaagaaaatggttaaaactggagagtcagctgtgaatttagtaatccatcagggcagatggagagctggcaaaaatgtgtgctaggtccccatgctcttcgaatgtctcactcatctttgtcttgatcttttagatactcaacgtgtttgctatttaaataatagattgtagtttaaaatcacttccacttgaaatcaggccctctatttttaga

SEQ ID NO: 102078 - DNA, 1049 bp, Homo sapiens
acaccttgctatatttttttcctttgcttgctcctcttcagtcccaagacccttgacctatgttcagccctatgcgggtgagttgaatactatccctccaaacactcatgtcactggaacttcagaatgtggccgcctttggacatagggtctttgcagttgtcatcagataagaaggggtcctactggattatagtggaccccagatccaatggttcagatacagaggtgtgggcacacagagaatgccacacgaagacagaggcagaattgcagcaatgcagccacaagccaagaagccgcccggagctaccagaagttggaagaggcaaggaaggatccttccccagagtctcttgagggagtgcagtcctgccaacactttggattttggacttctagtgtccagaactgtgacaatcaacgtctctgtcatggcaggcctaggaagctaatgccctcttcttgccctctctcctgaacatggcctcctggtccctgccatcttgtcctaacctttcaatgtgacttccatgggaggtcagctgtctccctagtatgtgtctgagtgttggggtttagaattcatcatcttccccgtggcttgagatgaggtctgaggccatagggctcgtgcccatgccctgttccacccgtttctcctcactccttgctcaccccagccctgcccactcagctctgctgggggacacacgtcagcagatacctgtggggtgactataggtttttaggttggtgcaaaagtaattgtgatgtttgccattacttttaaccaacctaatatgtttggattgaagagtatcgggtgagagtttgaatctctagtgggtcccggctgtcctgaagactcccttccttcagcttcctgcatttaggtgacctttggggtatccggggtggtccagattgcaccatttgcttgcagttcacaagcacagcatgcgcttgcatgggcaggtgccatggtgtgcagtgggtaagggcagtcatctcacagaccataggggaaacccccaatctgagccaga

SEQ ID NO: 102079 - DNA, 1118 bp, Homo sapiens
gtgtgtgctcttggaggcaaatggatgtttaagagtgtgtgaggtgaaggatagcagactccggaagtctggggaccacttaggtctgtaaccctccctttcgcaccagctgtccagctctgagaggcctcctgggtttcccatttatggggcccctttactgttacggcacctgtttaaatgtggtgtttccattacgggaggcatggtaggtggctggaatgagcggccgtgcagggacgatgcgtgcaggctgcccctcctcccaccacttcttggggaaagtccatttttggtcttttgtttcagcgagaaatgcataaaaacgttttcagggacccctccccgcttgctttgcagctaaaatttcaggctttgacaataaggggccaaatctctttcgaaaccaaggcagcattaatgaaaacattgtcatgtccatatttcttttggaaaaatcttttagagcatgtgacatggacgtgcatgacattgggcttgaatgatgacagcattctgtgttcttccttggaattctgggcgtcctcaggcaggagagctttgctgtaaacggggtgatatcatccccattttacagataggaagctatgcactaacattatgtatatatttacttattttaaaaatactttttaatttatatagagatacggtcttctcccatctcagcctcctgagtagctgagactacaggcgcatgccatgacacccggctatttaaaaaattttttatagagacagggtctcactgtgttgcccaggctggtctcaaacttctggcctcatgcattccttctgtctcaacctcccaaagtactgggattataggcgtgagtaaccgcacctggccacatatgtatttaattaaaaaattattgaaattaaatataacatacatacagaaaagtgtacgttattgtatttgtacagcttgatgaattcttacaaatgggataaaaccatgtaaccagcacatagatctagaaacagaacatgctgagaccccagaaactttcctgttgcgcccccttcagggcaaccccaatcctgatttctaaccccatagatgtatttttgtacttgatagtaaggaatcg

SEQ ID NO: 102080 - DNA, 2361 bp, Homo sapiens
aaatattttcagaaaacgttccaagtgtggtgcatggtctaccatgacattttagaaaagatgtgtgaatgttcaaataattatctcatcttgaaatctctgtgattagaagttacaatttcagtgccacaattatatcaattgaactttaacatttcattgtaattataaaaattaaaaccttgtaactgtggttcttagttaactaaacaatttagcaatcgaattccttaaaagtagattgaaaatcctcaccctgtagtttttttccttttttccccctgctgacggacagctaattgctttaattttgagggttggatctgcctgcaaccttggccctgtgaaacctcaccaattgtatcaaacaattcaaattatcttaaaagtttgtgggagtctgttgccacaatttcagtggacttcaagtaagaatacacaaatgacagtctctttcttggaagatgggctcaaaaccagatatactttgtttctaaaagttgccggttagcatgaggaacctgcagtcttcatgacaaagactttagagatcccagttaactgcccattctttaaaacaggaccagttaatgtagcttattagagtgggaagggctaaaattgttccttttggacagactgaattttaattgtagtgatccatgtcttctcagcctgtgatacagcagttctgaatctcatccaagtcaggaaaagtgaatttatgagcctcctagcaactagcaactagtaagctggaatgcctggaccttatctttattacaacataggagccagcccccccccactattttggggcacagccctgcagctgagacagctgagacagtagtaacagggctttggggaaagttgtttcaagggtataagatatggtcttggttgctgcattatggttgctagagaactttaatttgggaaaaacttgaaaactcaaggtttttcaagcttcaacaagttacttcgtggaattctggagcagaggagagtcaggtttaatagtttttactcccactgtagatgctgtgacatgcatatccttgaattttttcctttgccatgaataaaatatttctgacctctagcagtgttaaaatggttaatagcctttgattacatgggcccacccttctccatttttctcaggcatgctctggtttctttctttctttctttctttctttcttttttttttgagatggagtcttgctctgtcacccaggctggagtgcaatggtgcgatctcatctcactgcaacctccacctcctggtttcaagcgattctccttcctcagcctcctgagtagctgggattacaggcatgcgccaccatgcctggctcatttttgtatttttagtagacatggggtttcgccatgttggccaggctggtctcgaactcctgacctcgtgatctgcctgcctggacctcccaaagtgctgagattacaggtgtgagccactgagcctggcctctggtttctttttaacatttttttttccttctacctgggtaattcttctggaagattccatcacagtttttttttttttttaaattacaaatacctcttttcattacataaagtgtgccagaatacccattataaatattctttagtgttgagattaagggtggttgttattttcttttattaaaaattttttttaaaataaattaaaacaatttttttctcttcctgtataaaagcaacttattttcttctgtatgattttctctaactttgaaagattttgtgatgagtagtagttacttgtataatcagaaaaatcacattaatgaatatacaccttcatctttgaatgggtgtgactagtggacacttaagccccccaaagtcatattttctcgttttgtaatccactttacacatggagattaatcacaaagtgttcctcttaacaacaaggaccttgggaagaataaagaatatgtgggctctgtcagagtgaacaaagatgagaaagccagtgggggccacagaggagcccagtgattaaatctcaatggaaggattagcgctattaatggatcctttcaggctgggattgaaccaagaccctcagtcatcagaacattgttgaccttggagggttgagtgcctccccttttttcccctttctccttagacactagtcttatatccacagtcccaatcatggttgtgtctcatgacttcagcttttctctaggattgcctcctggttcatgaatgatcccatcttctctgaatgtcccaaagcattgatgatttccaagacatttaattcatgtctttgttagtttcctcccggtaacaaggtacctcaatctggtg

SEQ ID NO: 102081 - DNA, 3345 bp, Homo sapiens
caggggcacggctgccccgcatcgtgcccggccccgtcgcggagatcccggacgaccgtcgcgggtgagtaccgcgggcctggggtgcgcgggcgtccggccggagccgccccgggagacggcggcgaggatgcccggagcctcggtgcccgtgccgggcacgttctgacccccgtctcccgcacactggggctcccggcgggtcctagctccccccgatcgggctttccacgtattgttttcgtgttcacacacttgggaggtggggagatgcggggaggagaggcaggaggaggcatccctcgcgcgaaggagggagacgagaccgtgcagcccaggtgccttcgctggatggaaatgacagcgtccggacgtcggcattcggtcctctcggcagcaggaggtcagcgctgacctgcggcggccgcggcactttgtattttatcggctgatttttgtcaacttcggggagggcgtgcttgtgcatccttgtgtctatgtttgcgtctcggtccctgacttaggcacctccgggcctggcttttcggcgacgcgtcctgggcgctcaccttggcgatccgtgccgccctcggggccgggctcaccgggcggaaagcccgggggccggcgcacggagctggggacccgcgacgaacccccggaggggggcattaaaagcggaatcctgcgggtgcgcagacaatgcctcatccgggcggtcgggtcccggggactgtgccctgggtccccgcgccctatcccgtccccgcctcgccctctcaccagctctgccgctgcgatgctgctgcgccgcgcccctcgccacccggctggggacccgcgtggggcccgcttttgtttacagacctcgccattgggcgagagcagcgcgccgtgcgccccccagccccggcggctgccgcttgccccctcgaaacctggagaagttgttgcgcgctgtcaggtgacgccccctccccccggccgcggggcgggatgctgcaggggaaagatgccgtctcggcgccttcgcgcccagcccccgccgcgcacggcgcctctaggtcccctgcacccgggggcgcccgtgtcccagcctggggtccaggctggcggccctcggggcgccgactcggccacactcacccggttccagtcgtcgcgtctcctggtcttgcccccgggtcagccctggttgactcggagcctgccttttcccgcgcgctggcaggtcttgaaggacgtgcgcgagcccttggggacactgtgcagtctgtgcccgcctcggtgacacccgcgcggccccgcagggcagctgtgccgcatcccgagtcagagccgtccggatcgggttacccatgcacgctgacttggcgcatactttgagttggagcagaggtttagagcctgtgcgctgaggtcaaacaaacccgggttccagtacctgctcggtgtcactcacaagctgggtgatcccggccgagctattctatcttcctgtgtctcagtttgcgcatctgtaaagtggggataaggaataacctctaggggggcggggcttaaacgaccatatagattaacctcaaagcacagtgacagccacgtatgaaatattagagtcctgttgattctgtgttagaggaaatctgtaatagaggatggccccttgtcgctttccttttctgcgttcttcactcccccagccccaatttctttttattataaaaggcatgaaggactgctgttctcagcttcaaacaggacttgttttacttggccttaggtttaattagatttatctaatcgcttgcagcccttttaaaaatgtgtttgaatttccattaggttttagttgtttcttctttcttcttcaagattctgctgggacccagacctgggtttggagaaggaaaaacccttccaggtggaaagcagttgccagtgaaccaaggactgctgtggaaagtgattaagtccaggaaggagggaggtttgaacaaagagatgtctggaggttaggagggaacactttctaggagagatgaaatttaagctatgccttgtagctgaagaagtttggtaaattgttggtttccagcatatgcttttttgtatctcaaggtaaaaagctgggctagggagggtggatgcctttgcgtggtaaacaccgacgttgctaagtaattatctttgaatagaggagaaataaaacttaaggaagaggctgttgactaagcagggaaggtagaagagaatcaatttcattgaatatcttcaaaatgttgtgaatgtgttttgagttgtttttcctccactagctctgcactgctacttttctttaggcaaaaagagaaatcagtttcatatagaaataaacaacacaaaataataacagtccataatcagatcagatgatctcaggcttaacgacaaagattttattgaaaaaaaaaaacttcctgttttaacacccttttgcctgttggaataaattattgggtccaacaacacattctttgaatgtaggccccaggggcctttgccagccaaaacaggcaaacaaacaaacataaactcgacttgtaggctgtccagtggttggagaagccctcaggattgcgctctgtctcttccgttcccctgggcctgcctcagttaccccgagtggaatctgactcccgtgaacccctattcggctgttgatgtggaacgcggccagtagcattgttgctagatgtcaattaataaatatgataacctatttaaagttgaactctcagaaatgattctcatccttcttgtacttgttctgggaattctcgcgcccttagggatgctgaaggcctctttcccccctgctgttgtgtggggatcaaatcagttgggggcctagacttaaaagggagcacgtggttaggaaatctcattagctgacaatttaactccactctaatgctcgtccaaagagcccggacaaagacttcctctcctttccctttgcagttctttctccttgctcctctcttctcccctccccctctaaaccagaaaggaaaagcagcgttgggcctgtctccttccccccagattcctgcagttctagtgtgccgactgaaaccctggagccctgagcaggaattccttgggagagtttgctgagggcctactaggtgcatgtattaacacttctgcgatttctgcaaggatcatactgtctaaaggagaaacacgttttgtgagacaacactttcatagatgtgcagtagaagcctctggtttttccaaatgaggaaggcaggtgagagcatgggaaccacatcaaagccttgcctagaaatctgtgcc

SEQ ID NO: 102082 - DNA, 1062 bp, Homo sapiens
tacaaaagcatccatcttggggcgtcccaattgctgagtaacaaatgagacgctgtggccaaactcagtcataactaatgacatttctagacaaagtgacttcagattttcaaagcgtaccctgtttacatcattttgccaatttcgcgtactgcaaccggcgggccacgcccccgtgaaaagaaggttgttttctccacatttcggggttctggacgtttcccggctgcggggcggggggagtctccggcgcacgcggccccttggccccgcccccagtcattcccggccactcgcgacccgaggctgccgcagggggcgggctgagcgcgtgcgaggcgattggtttggggccagagtgggcgaggcgcggaggtctggcctataaagtagtcgcggagacggggtgctggtttgcgtcgtagtctcctgcagcgtctggggtttccgttgcagtcctcggaaccaggacctcggcgtggcctagcgagttatggcgacgaaggccgtgtgcgtgctgaagggcgacggcccagtgcagggcatcatcaatttcgagcagaaggcaagggctgggacggaggcttgtttgcgaggccgctcccacccgctcgtccccccgcgcacctttgctaggagcgggtcgcccgccaggcctcggggccgccctggtccagcgcccggtcccggcccgtgccgcccggtcggtgccttcgcccccagcggtgcggtgcccaagtgctgagtcaccgggcgggcccgggcgcggggcgtgggaccgaggccgccgcggggctgggcctgcgcgtggcgggagcgcggggagggattgccgcgggccggggaggggcgggggcgggcgtgctgccctctgtggtccttgggccgccgccgcgggtctgtcgtggtgcctggagcggctgtgctcgtcccttgcttggccgtgttctcgttcctgagggtcccgcggacaccgagtggcgcagtgccaggcccagcccggggatggcgactgcgcctgggcccgcctggtgtcttcgcatccctctccgctttccggct

SEQ ID NO: 102083 - DNA, 1042 bp, Homo sapiens
gagtttcgtatttggaaattagaagacctggagtttccattacaccgaattggcacttaataactgttgtcggagcatttcttaagccacattttcgtaaagtggctttaaaattgctctgccagtaggcaggttgctaagatggtcagagacaaacttctgaacgactcttgtaaaatatacagaaatattttcagaacttttatcagtaaaattacaaaacgtgttgcaaggaaggtgcttgtgataacactgtccccagaaccttagtgaagttaccaactggtggaaaattttctcttgcactcggcttaaaaatcatgagggaatatttactatacgaatgagattcagtctttaaaggggtttacagaaacgtgagaggacaggaacagttagtctgtgtaaatgtctgaaatatatgtgagggagataatgagtttagcctttttctttaataggtctccagattttctggaaaaggttctttggcatttgactccattttgctgtttcatttgtcagacttctttttgtccctctttacttctccccacataattcaccagtactagtgttttgtttttcagaccaagtctcgctctgtcgcccaggctggagtgcagtggcgcgatctcagctcactgcaacctccgcctcccaggttcaagcaattctcctgcctcagcctcccgggtagctgggactacaggcgcgcgccgccacgcctggctaattttttatattttagtagagacggcgtttcaccatgttggccaggatggtctcgatctgttgacgtcgtgatccacccgcctcggcctcccaaagtgctgggattacaggcgtgagccaccccgcccggccaccagtgctattcttaagacgcctctgaggaatcccttctccctggccattgagaatccatgcatgaacccaggttttccaccttccctgagcagcttgcatagttccttcttttaagcgcctgacttcgttttgtttggtgcccgttgtacctgagaatgagccttggatagtg

SEQ ID NO: 102084 - DNA, 1040 bp, Homo sapiens
gacatttccagggcgactttttctttttttttttttaaagtcaagtgagtatgccatatggaaaagggtgtgcgtggagaaaaagcaaggggctccagagtgtaggatgagacatacaccttttgggttaaaaaggctgaggcaggagaatggcgtgaacccgggaggcggagcttgcagtgagctgagatcatgccactgcactccagcctgggcgacagagcgagactcttgtctcaaaataaaaaacgtttacatgtacatgtatattcaacatgtacaaatataacctattcaaaagtatttactacataaataggtacttacattacctatttactgtaatagtcaaagcctatgaagtatctaacactgatgtgtaggtactcactttgcttgccactctattaggtgctttttatgttatttaatcatgaagcctggccacagggtgcttgtgcattgagtgtgggaacaagattaccatctcccttttgaggacacaggcctagagcagttaagcagcttgctggaggttcactggctagaaagtggtcagcctgggatttggacacagatttttccactcccaagtctggctgctttttacttcactgtgaggggtaaaggtaaatcagctgttttctttgttcagaaactctctccaactttgcacttttcttaaaggaaagtaatggaccagtgaaggtgtggggaagcattaaaggactgactgaaggcctgcatggattccatgttcatgagtttggagataatacagcaggtgggtgttgtgctgtgctggtgacccatacttgttcaccctagttagataaacagtagagtagcccctaaacgttaaaacccctcaacttgtttttgtttttgagaaagggtcttgctctgtcgctcaggctggagtgcagtggcgctgtgcgatcatggctgaccttagccttgacctcccaggctccattgatcctcatgccttggcccgtagctgggactacaggtacacaccaccacgcctggctaatttt

SEQ ID NO: 102085 - DNA, 1043 bp, Homo sapiens
aaagggaaagagttgatgttttgtcttacagcatcattgtagaagagggtgtttttttgtttgtttgttttttgagacggagtcttactctgtggcccaggctggagtgcagtggcgcgatctcggctcactgcaagctccgcctcccgggttcatgccattctcctgcctcagccccctgagtagctgggactacaggtgcccgccaccccgcctggctaattttttgtatttttagtagagacggggtttcactgtgttagccaagatggtctctctcctgacctcgtgatccgcctgtctcagcctcccaaagtgctgggattacaggcatgagccaccgcacccagccagaagagggtgttttttaaagaaggcaaataggaaataaaaacttgggctcttaacttttgtaatgatcccaggtgtttgagctgggggttgagggtgggtgcctcgagcaaaggggctgcatttatttgcataatgccatgtaagagtagctctacaccccaaacacaggcttcttagtgggaccaaagtatgatacaaactgaagatggaatgcagaggattattggtactttggaatatgcttaaaaaaaatttttttaaagtatttttaaaaaatcaggcaacccctgaaccagagtaggttcagagaaactgccaaattttattttcttaatttgggattggaagcaagttaacagaagtttatgagttaagttgcatttagtgatcttttgccatatttgagtaataatctgatttttttgtttatagatttcttcttaaattaactttattcatcttgctaatttagtttcaaatagtgatttgtaatgatcagatttgatccatttctgtaattgctgaaattcccccgagttgctttttggctttaccgcctctggtctgggaggtgattgctctgctgcttcctgtaacttgcctgcctttctccctgtgtgggactcctgcgggtgagagcgtggctgaagacagccgtgttatgaaagggcctcctgtgctgtcgaggt

SEQ ID NO: 102086 - DNA, 1204 bp, Homo sapiens
taagataattccgtgtttcccccacctttgcttttgaacttgctgactcatctaaacccctgctcccaaatgctggaatgcttttacttcctgggcttaaaggaattgacaaatggggacacttaaaacgatttggttttgtagcatttattgaatatagaactaatacaagtgccaaaggggaactaatacaggaaatgtcatgaacagtactgtcaaccactagcaaaatcaatcatcattgtgaaacataggaagcttctgtagataaaaaaaaaaattgatactgaaaactagtcgagactccatttatatgtgtatgttttctgaaagcctttcagaaaaatattaaatttaaggacaagatttttatatcagaggccttgggacatagctttgttagctatgccagtaattaacaggcataactcagtaactgagagtttaccctttggtacttctgaaatcaggtgcagccccatctttcttcccagagcattagtgtgtagacgtgaagccttgtttgaagagctgtatttagaatgcctagctacttgtttgcaaatttgtgtctactcagtcaagttttaatttagctcatgaactaccttgatgtttagtggcatcagccctaatccatctgatgctttttcattattaggcatgttggagacttgggcaatgtgactgctgacaaagatggtgtggccgatgtgtctattgaagattctgtgatctcactctcaggagaccattgcatcattggccgcacactggtggtaagttttcataaaaggatatgcataaaacttcttctaacatacagtcatgtatcttttcactttgattgttagtcgcggtttctaaagatccagataaactgtacttgcagttcaaattaggaaaagcaattttattggacaattacggtgaaaatgaattattttatctaggtcagttaagaacactgttctgctaagatgcagtaaaaagcaggttacatttgaccatattagatctgagtttggaaaacagaagtagtctttagttttaaaatggccagattttcttgccaggattgggtttctcacttgttaaacagaacattttgttaagtttaaaacctgggatggacttaagtattcatgttcattcatgttcattcaggactgcaggttatcatgacttgtttaacttgtgggaa

SEQ ID NO: 102087 - DNA, 1100 bp, Homo sapiens
cttagttccgcagtcactcttactttggcagtttttttaattgctttggaaaaaaaggaaagtgaaagtgaataaaactcaaaatttcatgccaaatgaatgacgggcctataagtaaggtataatcctaaaaaatcttaatactttaagcaacagtattttgaattttgttcaacaaacctttataaatgatttttctgctttacaactatggctcaagaaaaaccataaaaataaagggttaactgaatggaagtgactactgaatgttaatgccctcaaggggaggtaaaagagagcctgtctacttggtgttttgcaagaaccagatgcagttccccaggataacttgggacaacagcttcccacaagttaaacaagtcatgataacctgcagtcctgaatgaacatgaatgaacatgaatacttaagtccatcccaggttttaaacttaacaaaatgttctgtttaacaagtgagaaacccaatcctggcaagaaaatctggccattttaaaactaaagactacttctgttttccaaactcagatctaatatggtcaaatgtaacctgctttttactgcatcttagcagaacagtgttcttaactgacctagataaaataattcattttcaccgtaattgtccaataaaattgcttttcctaatttgaactgcaagtacagtttatctggatctttagaaaccgcgactaacaatcaaagtgaaaagatacatgactgtatgttagaagaagttttatgcatatccttttatgaaaacttaccaccagtgtgcggccaatgatgcaatggtctcctgagagtgagatcacagaatcttcaatagacacatcggccacaccatctttgtcagcagtcacattgcccaagtctccaacatgcctaataatgaaaaagcatcagatggattagggctgatgccactaaacatcaaggtagttcatgagctaaattaaaacttgactgagtagacacaaatttgcaaacaagtagctaggcattctaaatacagctcttcaaacaaggcttcacgtctacacactaatgctctgggaagaaagatggggctgcacctga

SEQ ID NO: 102088 - DNA, 1147 bp, Homo sapiens
actgttgcttaaagtattaagattttttaggattataccttacttataggcccgtcattcatttggcatgaaattttgagttttattcactttcactttcctttttttccaaagcaattaaaaaaactgccaaagtaagagtgactgcggaactaaggttactgtaacttaccatggaggattaagggtagcgtgtggtggtctacaacatagttatttgggttttagtatttcatttagacagcaacacttacctaatgtttaaaggtaatgtctttgcaacaccaagaaaaagctttgagtagtagtttctacttttaaactactaaatattagtatatctctctactaggattaatgttatttttctaatattatgaggttcttaaacatcttttgggtattgttgggaggaggtagtgattacttgacagcccaaagttatcttcttaaaattttttacaggtccatgaaaaagcagatgacttgggcaaaggtggaaatgaagaaagtacaaagacaggaaacgctggaagtcgtttggcttgtggtgtaattgggatcgcccaataaacattcccttggatgtagtctgaggccccttaactcatctgttatcctgctagctgtagaaatgtatcctgataaacattaaacactgtaatcttaaaagtgtaattgtgtgactttttcagagttgctttaaagtacctgtagtgagaaactgatttatgatcacttggaagatttgtatagttttataaaactcagttaaaatgtctgtttcaatgacctgtattttgccagacttaaatcacagatgggtattaaacttgtcagaatttctttgtcattcaagcctgtgaataaaaaccctgtatggcacttattatgaggctattaaaagaatccaaattcaaactaaattagctctgatacttatttatataaacagcttcagtggaacagatttagtaatactaacagtgatagcattttattttgaaagtgttttgagaccatcaaaatgcatactttaaaacagcaggtcttttagctaaaactaacacaactctgcttagacaaataggctgtcctttgaaagctttagggaaatgttcctgcttagtcattttagcattttgat

SEQ ID NO: 102089 - DNA, 1153 bp, Homo sapiens
ttttccaaccatcccattgaatttttcaaaagggtaaaagaatcaaggttaacatttgcaacctaagagctttttgttgtgtttgaggacttcagtgcagcctactactgtttccttatataagccttgcctgttgcctttcttcaccagcgttttaattcccctgcggggcagaggtaaacgaacttttcccccacatatacgttctttcttttgcttaaagttggtgggttaaataggaaaaatcgttgtaggttatccaagaattatcacatgaaaacatctaaagccaagtcaagccttcatctgaaattgcaggaaatccagtgccaagacctgatgtcacactatccaagtatttatggccttgaagttgttttgaattactttttcaaactcctggtttcagtatgctgagcagttaactttgtctttgccttcatcctcaggcgaagctgctttattactctggtttttaaataatactcagcagcaagacctttggtttgatggggagaatatatctagggcaatgtccttatattcctgcctttagaaaatgagagaaaattgttttatatttatctgtaaatttaaattataaaacttgtccttaattttacactggcccactgagaagttttaaagtcctaacaaatggcttctggaagaaaacgtgattacccaacatccagacttgaaggacttacagcctgtatttccaatttaaagtattgggaccatcctatatgcacatgtaaaaactggtagtgtaattatatttgaagtttcaaaaggcataagtgagtctctaattgagttattccacataggcaacaaactacattagggaaatgtgttaaatactgctttttaaaaattctctactgagatttaaagaatggttgttttaaccacttactgtgaacatactgttgtttaccataattttaaaactttggaaacactacagatttgtcttccaatttagcttttcctctcctaaatgatctctcctacatttgataaagtacatatttatgaacaaacagcatttcacttatttctggtttatcagaaataatattctacaatttccaattgaataatttagtcaaacctgagttaggttaacattgaaaagcattctctc

SEQ ID NO: 102090 - DNA, 1186 bp, Homo sapiens
acagagacggaaggcaacagccgccgcagcagccacagcagcagccacagccgcaggcgccccagcaaccacagcagcagcagcagcagcagccaccaccatcacaacagcctccaccaacacagcagcagccacagcagtttagaaatgataacaggcagcagttcaattcaggtagagaccaagaaaggtttggaagaagatcttttggaaatagggtggaaaatgaccgggaacggtatgggaaccgtaatgatgatagagataatagtaaccgtgacaggagagagtggggaaggaggagccctgaccgggacaggcacagagacttggaagagagaaatagacgctctagtgggcatcgagacagagagagagattctagagatagagagtctcgtagagagaaggaagaagcccgaggaaaggaaaagcctgaggtgacagacagggcaggtggtaacaaaaccgttgaacctcccattagccaagtgggaaatgtagacactgcttcagaacttgagaagggggtgtctgaggctgcagtcctaaagccttctgaagagttacctgctgaggctacctcatccgttgaacccgaaaaggattctggctcagcagcagaggctcctcgttagagactggaatttgtgaaaatgtgacagtgacacttcctggagtgtagagcttgaggtgtacagatgctgtattatatccgctcccgctgtactgcagccccgcgccagctggtggggaactgtaagcaatttgattgcttcccttctatttaaaaatagccacaaaataacaaaaaatactgaaaatatgaataaatattaccctttttgctgtaactttttaaaagttttgactttaaaaagtttacaaatcgtaattagaagtgctctctatttttttttttttttttaatttaagacaaggtaacggtgaaagctcctcaaaacaatagggatgtttttaataaactctattttcgtaacaaactttaatgtgtgctattcttcctacactgcattaaggtggaaaaggattgttcaccgtcaaagtttgagctgttaatactgtattggagtctaaattagacttatttgatgaaaatagacattttatgtagttattctcactttcatatgtaatacttttgatttttagtgctcagtcataa

SEQ ID NO: 102091 - DNA, 1052 bp, Homo sapiens
tatatgcttagggatcttcaggtattgatgaaagagatgagtggttgatacatctttttcttcatgtgggaaaagttcatgtttagttcatgcaaagtgccacagtgacactcattctgtagagatcaaatcaaaacggtggaactgcaacaaagaacagaaaaggaggttgaaagaaaacatcctttctcaaagttcaagtcctcctaggtttatgctgggaagattcttaccaccctgggaaaagacctggagcttgtagcctctattcttaattccctgagaggtatcttctccttgatgagtttggtcatcacctctgcaaacaccattcactcatatgttcaataaatatctaatcaataaccattgtgtgccaggcacccttctaggtatactagaaataccagaatgaacaaaacaaaacctgtctttctggagtttatattttcgcagacctgggctaataatttaacatggagagtaaaacaggacagttaggcagtataagggtgtaacacggatatgtacaattttaaatacgattgctagggaaggcatctgaaccagtaatgaagagaatatccccatgtaaatacagaggaaaggaatgtagagtgaggaccaaaggaaagggggcctgaattgagatggggcatggattgttgaaggaccacagcaggaagggagagcaaagggaagaaagtggcaggagatgagcttagagaaggttgttgagcactaggctttgagtgcagtgggaaatggtgtagagtcttttatccatgccatgatctgatgtgcagtttttaaagtattactgtggctgttagagaaacagactctagaagttggtaagagtggaaaggagaccggttctgatgctgttgcagcagatgagatgggagctagcccacgttgggctggtgcaatggaggtgataagtggttagagtctgaagatattttgaagatagagccttcagaattgccatattacttaaatacggaatgcgaaaaagagtcaagaatgactcgttttttatgtgagca

SEQ ID NO: 102092 - DNA, 1368 bp, Homo sapiens
gcacacctactagatatctgtagtttttccagtgagcgagacttaactgagttcttggatcttaatttgtgaaatgtggcaatatttttaaagtactaggcaccaaacagttgttcagtgggtctccaaaaattctgtagtgaagcctgattatactggaaagaggcagtgggtgccttaaggatggtttggttgtatcatcagacttaagtgcgggtgttagtttgggagtaattagttgagttgtactactgaatttggagggaataaaaccaacttttagagattttgattcttttagtaatactgataatctgaaaatataaaattacttgatgcgcaataattattacttgattttaaagaaatctcacacacccaaatagctacagtggtggtagtttcataaaagctaaaggtaacattctacagttgttggtcacttaggagagaaggaatattacaaatgatagcaattcagttcattctctttactgtataagtgtttgtgttttacttttcaaaaacttttgtataacatgtatctctaatatgtacaacctatttttattaaaaagttcattgtaaatgtaaagtttgggttactttggtgttccaaacaataaaaaagaatacacaaaaaaatgtttgtttgtgttacctatctgtactgtgttaccagtatatccaaaatatcttttcaagcaaaaactgttctaggtcgaactcattccttttatggaaaattaaagcctcttgacaagtatgtttattcattaattatcaatatgaagagattaccaccagtttttgtcacactactgtagctgatggtaaaatttataaataagagttgagtatttgtaagatcacttcctacttgtaatttttgttaccaaaggttttaaagcaagagtaacaagttggtggcctgtggctaaattactaggcagtggtgtgctgcgctgcagtcctggcatggcttcagtagacatttgagttgatgattccagatttggacacctcaggaaattgtggggacagaattggtttgtgaattatatttaaacaagcgcaaatgtttttatgctatcgttatgatccctgaaactgcctaaaagatgaataactttgccagcaatatcaataggaatttgattttgatgatttcacttaagtttggatttctttgcccagtttctgtctagaattttagattttttagtagctcatttttagcaacacttactagaatattaaagcaccagtctactagtaatgcactagttagccactgacattaaaaggaagcctgaagaaaattctagaaagtagagttttcaaagtactaacataatacgtaatttt

SEQ ID NO: 102093 - DNA, 2534 bp, Homo sapiens
cccattccaacagtggtgtctggggctagaggaaacgccgagtctggtgacagcgtgaaaatgtatggctctgccgtgccacctgctgcacccacgaatctgcccacccctcctgtaacccagcctgtttcacttcttggtaagttatttttttttatcattagttttccttgccccaccccccccccacccccccacccatccccaagttagatttttttaaaaaaacaatgttaattttggtaaaattatttccaagactggcttttttggttgttttgtttgtttgtttgtttttgaggaagatcttcctcttaaagtcaaatatgtgtacttgatctttaccaagagagaatctcaaagacaaaatcatgtttgtctgtcttgaataaaagtttggatcttcacatccttatttggtatagaaaaatgattaaaagtaatctctgtgcaaaggaattggtacagagttcgtaattcacttaaccttagtctcttcccagcttttaggagatacttctttaacggcataggtttttctctgtctggaccaattattatctatctgaaacccctggacttgggtagcgttctttgtgggctagcaaagaaatcatctttgatacattccaataaaatggctttgttttctaagtaacagttgcgcagcctgaggtaccactttcccactcactctcagtttacttggctggagtttatctgttgtactttttacccacaacttcaatactgtgatcaagggcgatgtgacttagatcttttacatctttaagcaggcttactcttgcctgcttaagttatgaataaatacatcacatgcttgttacagtagaccatcttttaaattaacaaattgttgtatttgaagtggtattgccaaatataattaacacttgaatcccctaactggaagttaatatcttgagagtattacagtgttctagtcctgtgagcccatagtatttttcaaaggtatatgcatatgcctgtttgctttcataatctgagttgttttaggaaagaacctattgattacctctgagatgtaggactgtgagacattggtttgtaatggaggacttttacttttcacctatgctattcagtactgttggaattttttattttttgcatgtactatatttataataaaaaaacaatttgtttttaaatggtatactgtattctgccctcccctagactaagcttaggctgataatagccttgagtttatttcccttagtacacagattgggtaatggtaaaagaggatttgggattaaaatttatcacaagtgatacaggagtgtagttaccataatgatggaaaatgatttgtttaatgaggaagttgcttaagaggtctaccttccaatggaagtcatatcatagaaggaacattggactaggaaccagggaacatctttgcatcttttttgttatgcttttttttttttcatattaacatgattgcacaagaatcacagaatctggatagcaaccccttcttcacatcccacatacacacccttgattatgaatcctaatctaaggtccatggatgttagactacctgaaactatttgtaaaattgctgcatttgtgttttttactgggtttaataaatttattgaatgagtgaaaagatctcatgaactccaggagtttaataaccactgctttcaagcaactgtgaagcgtagtaagtagcctgcctgtgatttaacatttaggtcttgaagaccctgcctgttatttcttatcactactgaacatacaatttaacctctgcatccaacatgtgcaaccaaacacagatgagaagtcggtgagcttggaaaaacatagtaagctaggcatggctagaaaagtaattaaattctgaatcagtcgtagcgtttatcatcacctgacatactgtttgcatgtccatcttcctcccactagatggacccatgagaggggaacatttgttacatgagcgggtggttttcaatgcaggactgttcatattttacttctgatgattatcttcgttctaaaacagaattttaaaattgaaggctattctaaatccagaagggtttagaatttgacataagaaaagtgaaaacaattttgttaaaataagcactttgaactaaaatgcaatatgttagttcagtcatgagaaagaaagccttccatgtgccttcagtcagcagtcttgaaaagaatatcacaggaattttgaccttatagaggaatgagttttaaatgtgtatgcaagttaagaagggttcatctaagactaaccagttttatcattttgataaaggaatgtggtgaccacactgcagtattgcagtactaaaggatcagtaattaggttgggataacaagtgatggaatcccagaactaagatgctttggtatttcctcttggtgctctaatgttttcttttaagataataaaaggaattgttatgctcaccagaaaactataagtctagaagttgatgctaaacttcagt

SEQ ID NO: 102094 - DNA, 4695 bp, Homo sapiens
ttactcatacactttctttaaaaatgaaaggttccacttcctcctaatggacaaatgccaggatttggacttcttcctacacctccatttcctcccatggctcagcctgtgattcctccaactccaccagtgcagcagcctttccaagcttcttttcaggcacaaaatgaaccacttacacagaagccgcatcagcaggtaaaactttattctcagatagttttatctttttttgttgccttgacttatatgcagatttctccttatttgcttgctgtcttcatttttgaatatgaagaaagacctgggtacatattaaaccctctcagtgctccaggtttttcatctggaaagtggacatgctaatactgccaacttccataggattctgtgaggtttgatatagagtgttgaaggcttaactagtgcctacttcactgcattagataatggtttattaaaatggtatgtaatttaagcaaagtaactttaccagaagtagagaaatatttcttttaatcttttaaacaatataaaagtggtttttgtttttgtttttttttcccagtgatggccagttgttactagtaatttggtcccaggcaaccaaaagagaattgcttcagggaaggagatttttaatatagcttttgttagattttgtcctcttgcttttatactttttaaatttctcattttatcatggtttttgttttttaaggaaatggaagtagaacaaccttgtattcaagaggttaagcgacatatgtctgataacagaaagtcaagatctaggtcagcatccaggtaatttatagaaaatgttttttccaaccctgtatatcttaggggacatagaaattaaaattagattgggttattttcagatattcagaatgttagtaaaataacagttggtatgtttgtatttgtatatgtgtgtagaagggggcaggtgaagtattgatgtaaaaaaaaaaactacatcattcatcttactttttttccctatatttaagttgctcagatgtaacggaattttgaagatataattctatacataggtaatcagtatgtgatattagaagaactatattttcaaagttccattacagctttatcagccagcaaaagtggaaagatcacagtaatgctgtaatcagagaatgtttttaattgctgcagaaaagactttactaagaagataggtaacagtagtagcagtgtatctcaactgtgaaaattagctacttaaattacaaggatgtaattttatatagtaccagacggcactgaagatgacagatacttatataagctgtcaacattgtgtattttatttaaataatgtgcatgatttctaatttgggacatactaaatctgtaaaatgaattctcaggtattgcattcttacatacccaaacattaaattacctagtttttgttctgttttaattagtatgtgcttatattttctggtttttgtctatatgctatgcattctcccttctcttgaaaacattaggtcaccaaaaaggaggcgatctagatctggttctagatctcgaaggtctcggcatcgacgttctcgatctcggtccagggatagacgccgacattctccccgatctcgatctcaagaaagacgggatcgagaaaaagagagagaacgtcgacaaaaaggcctccctcaagtgaaaccggaaactgcaagtggtaactcaacctttatattcaaacctcatgtactattttttcatgtcttgggtttaaagtgttttataactgttagcaaaactataaaagaaatgttaccactgtgttgatttttatttgaaatattgctttcttgtgccttgtttattcattgatgtatacccttagatttgctttcgtaccttaaaccagctataaagcagcagtaaggagtgaaccaaaaatttacagaatgtattcacttgcattattttctgaatctcatcagatgtcttcagaatacatttagtaaggtgtgctagacatatatttgatataaatcagtaactattaagatgactaagattttaatttataatatgactagggcatatgtaagatttctgattccataaggcttatcacctaggacacaacataaaagaaaaaccatcaacacttaagagtggagaaaggacagttacatgcaagtgaacaaagcactgagctggttggtaatcaagagacttgagctccaatcctagttctgctgttcattggcagggtgaggtgggcaagttattgcttccctggcttcagtttttatagatgtaatctttagatccatctacaaaaaaaccagttttttccaacttttatgtatatctttcactatcccagttctctttctggaagtactaatgcagttttctagaatttttaaaatgtatgtgagatttactatttaaacttgtggtgttgtaatatagttcatgaatattttgtgtaatgattttttaatgtaagctacagtgctgctcattatcaaatgtgaatctctttatgattgtaattttattttaagtttgcagtactaccctctgggtggggcagctggacaaaagaactactcagcaggatgttgccagtctcttggaagagtttggtccaattgaatcaattaatgtgagtgtttattcagttttttaagtacgatggacaggtgtgattaatgtcattttatgaaatggaggacctgagaccaaagttacaatttgcccaggtttatagatgtgactagaatttaggtgttcagagtccacgtttagaattatctgtatttaacatttcttagaattctttgtatttaacatttcttggataaccaagtttaatttcaaacatttctaggtaagtctttatataacaaagcttggaggactcagttgagaccaaacttgaattgccaacttagaaatgaatttaaccttacattatatagcatggggtgagggatgggattgttggaactgcttacttggtgttgtatcttgttgcttttcaattttgttatcttttataatattaaaatgttttggagcagatgattcctcccaggggttgtgcctatattgttatggttcataggcaagatgcctatcgtgccctgcagaaactgagccgaggaaactataaagtgaaccagaaatccataaaggtacagtcttacatgttataattaattttttttttaaataggcagaaggggaaaaatatgtggcatataaaaactaatttgggtcttcgaaatgactttcaacactgaggcatttcatgtgcatctttttttttttttttttttaaagaatatttcctaaaagaactccagtgtttcagcataaaattgtaaatgttacgtgcatggtagaatttgttttgttttgtttttcctaaatgtagatgggttcatcatggtaaattagtgctttaaatataatgtcttttagcaatatgttttgtcctgttcaaaaaatttggatactgtatttttaaagtttgccatcttagaattaactgaaaaatattcaccaaaggtggagaaaaacatataggtatatgggtatttttcccctaaggagctaaagtcagtgtttcttcagtgtcttaacaccccattctaccgctggattgcactgcaaaaagattttgtctgatgttaagtaattacaaggcacccctagacttggaaaagtagtccccagtatactactaggctattcagggaacttcagcctttccctgttaaactttttccttttctctaagttttatgttggctgggttgggtgagagttggtaaggagaagatgccagtgaaatttccatcctaggacaaagtgagaattaaagggtaaccagttctgtagtgagaataaggctttgaatgagatccaagcctagctggtccagattgctcccttggtgcccgagtcggaatggatagaatgatagagaataataccctcaagacttacgaccttgctttgttttctttttatattttcactaatggtgaaatagattgcctgggccttaaacaaaggaataaaggcagattataagcagtattgggatgtagaacttggtgttacttatattccatgggacaaagtcaagcctgaggaactggagagtttttgtgaaggaggaatgttggacagtgacacacttaacccaggtaaagcagtatttaatttctcttacagttcacttatttgcttggtagtacatatgacaaatcgaatgtcctgttccttgcattaggacgtgatttttgagattttttaggatccctcctgtgtcagtatctccattataaactgagggttaaatagtgaatgagacaaaagagatgcaaacacaagtgaaatacttaactgattatgggatctatgaattacagaattaagtagaacttttcctgtgaaacttaataaatcatataggtcttaactgagcatctttggtattatgtttttttttatttattttttgaggtggagtctctgtagcccaggctggagtgtagtgatgcaatcttgggtcactgcaacctctgcctcccaggttcaagccactctcctccttcagtctcccgagtagctgggactacaggcgcgtgccaccttgcccggctaatttttgcattttcaatagac

SEQ ID NO: 102095 - DNA, 1538 bp, Homo sapiens
tcctaaaaagcaactaaaatttctttttgggtagaccccattttaattttttaattgctttaagtattttaaagcagtattcttcaaactttaaagaacatattaatatgtaataaactgtgaagatcataggttttgttttttataggcgactttgaccagattttaattttggctccaattacttacagactgtcctgttgttgaattaatgtttactgttcagtagtgtaaaataaagatggtagtaaaaatattttattgttgccatgagggttaaataaaaatatgtaaaacagcaaggtacctgggctgtgatggttcctgttcagaaaatactaacttgctcatttgtaagaactttactcacttggcctagaactacaaagaaacataagttagctctatcccaaaacacactttacacttagtttagtcctatatactgtgttgtctaaggacagaacttttcatttgatttagaaatgtgttgttcaataaagcaaaaccagaatctctaggcagaactattatagaatgacaaggttcaggaatttaaggttgaagtctataagcagaatgagcacggcttgaaaggaaagattgcttattgaaagccagagactgagggctttgaagtcaaaaggactagtgtccgcatcctgattctaccattcactgactgtgcaatcttaatcatgtttcttaatcacctgagcctttgtttccttgtctgtaaaaaagaagaaactatctacattgcagtgttcttgtgatgaagtctatatgatctgatacacattagtaggtatttaagcattatcttttttctgaataaatcttacttaaaattgttcttctagatatgtgatctcattaagtctcttgaatttttttttacatgaaagtttctggtaagctgtgaagttatgagaaagaagcaagcgaacctcttaggaactgctagtgacttttttgtgtccttgccattttttttctttttttatattagtatattcttgaggaagcagtatatggacacttttctatatgcattatggtgattgaataagacagtctttttgtacattttatgctgactgaaaatgtatacccattttcatgtgcacaaagttccagacatttttaggctagggaaatgagtattttagaaaaacatgtatgctgctaaattacttgtgaaatacaccaatagaaaatagaaagcactgtacttacaattgaggaaggaaaacagaatgaaaacactgtgtgttttccaaactggcatctgtgtaaaaattgtttatatctacaaaccaaggtcctgaggggcataagggaaaataagattgtgcttgacaatgtgggtttctagatggtggtaaacatcccttgttttcataaagttttttgtgcagtgaatcagtctaaattttaaaatgaaatattgacataattattccagaagttgcttgatagatttgactatgatgatgagccagaagctgtggaagaatcaaagaaagaggatacca

SEQ ID NO: 102096 - DNA, 2271 bp, Homo sapiens
gtgtttctcatgcgtaacagagtaaaatagttcgtgtgctgaacctttggcaaaaaaatggagtgttcaaaattgaaattattcaacctcttttggacatggcagcgggaaccagtaatgcagccccagtagcagaaaatgttaccaataatgaaggtatggtcagatgtatctgtgagctcacacaatggtatgattttttgcacatgaaacagtcagagtttatgtgtattgaaggaatttttctataagaaggaaacttgagtttacatcttggaaggtatgattttctttccataattcctatttataataaaggtctgctcttctggtagttgttacagtataaactctagtgccacaatctctatattttatactttgttaaattggataaaatgttattttagcaaagaagcttaattaggaaaacttgtaggttaactttttttttaggccttaatgcccttttcttttttaggctcacctccacctccagtaaaagtttcttctgaacctcccacacaagccactccaaactccgtcccagctgtaccacagttgcccagctctgatgcttttgctgctgtggctcagctgtttcagacaactcaaggccaacaggtaaactgtctactcaaaagtgaaattgtttgcaggactaggtactgttgtcacttcttgttttctattcttcattaataagcacattgaaaggagaaaatacatctgcttttcaactagaaaagccttcacaagagaagtaatgtaggaggaacagggaaaatgtagaagtgataaacaagggaacaacacacttagaaatgacagtacctctttgaagaggactttagaactactaagtggctcatgttgctcacaattctagcatttctgatggatttcaaaattatttttaacggagagaatttttccatttttctagaaaacttatgcttactttgttcacaattcagtgtattttctctttttttgaccatcatatcattgacattgtcagcatacatttttaaccttaagaaatgcacattatatctctgtatattcattcacaacaaatttaaccattcataaaaggattttttccccaatttgttctgtgcctatgctactttgaatcacctttaagacatttttttattaaattaacttttgatagtatgattatactttgttctgtgatttattggttttcccattctttaagcttcagcagatccttcagacttttcaacagcctccaaaaccacagtctcctgcccttgacaatgctgtgatggctcaggttcaggctatcacagctcagttaaagacaactcctacacaaccatctgaacaaaaagctgctttccccccacctgaacagaaaactgcatttgacaaggtatatttctctcacataacccaccccaccatttatatcactcaacttgagttatggaaattatcacttctgtatcccttctgtggattgttcattatgtcgttttgtaatttgagagattttccccctcaacaagaaaacatcgattattttccctggttttaaatgtgatatgtgctcagtgcaaaaatttccagggtttgaagctgaatttactagtgtaaaattaaaaaagtgaaaaaaaaaaaaaaaagaaaaagttagggagtaaaggaaacagaaaattcttcattaaccccaatacttggggattactgtgtaacattttgccttacatcttttcagaattaatttcctacagatacatgcttttctttaattgagtataatacatacccacttgttttggtgttaatactcttgtatcttttttgttgttgttaaggttaatagtggatttagatctacatttttactgaatgcatgtaatacatagtattccactacatgggcacattacagttcagccattccactactaatagacattcaaattgctttcagttttttgctgttaaaaaaacctgacagccaagtgtggtggctcacacctgtagtcccaacactttgggaggtcgagaacggaggatcccatgagcccaggagtttgagaccagcctgggcaacatagtgagactccgtctgtgtttatttatttttaatatatatgtgtgtgtattaataatatataggtattatttttaatatataaaaatatataaaattatatattatttgtgtgtgtgtgtgtgagtgtgtgtgtattttaaccttagttaccatatatataatatgagggtttggga

SEQ ID NO: 102097 - DNA, 1325 bp, Homo sapiens
ttattttttatgtacatgtacatttataaaagtaaaaatggacataatactggttgttaggctgcttttcccactgagtttatcgtaaacagttgcaaaatactcctctgcggttgttacagtgatgcacacagccattttctgagttgttagacctaattttttttttttttgcataaattcctagatgtagaattggtggattaaataagactttgcttttattgctaaattgtcttctataaagggttatacctgtttccactaccaccagaaatatatataggtgtctgtttctctgcttttctctgctgttgtcagttcggttagccaaaaactacttcttgtttttaatttttatttggtactgtaatagaattaaaattgatatgttaaaaaatgttttgttaattttgaaagataaaaattacctttttgagcagggtgaattgtagagactatcataataagtgaatttatatggaactggcttaaggattggtaaagtaatgtcgattttgggacattgggtgtagggaagtagagaaatcaaagaagagtaaaatcttgggggtcagtagtatcaagagaatggtagttccattatagacatgggaaatttgacaagttagccatttagagagctgaaacattcaagtagtttttaaacaaaagcaatcattggatggatatataaaagtttcataaatgtgaaaataatgggtgtcagattgtgactttgctttttctgtactgatcttacatctttatccttgcagtgtaaaccagaatacaaggttccgggattatatgtaattgactcaattgtgcgacagtctcgtcatcagtttggaactgataaagatgtttttgggccaagattctctaaaaacataactgccacattccaatatttatatctttgtccatctgaagataaggtataattaatttttaaactaaaacttgtattctttaaaaaatattattttaaatgtatgttagatatttggagcctactatattaccagataagattttcatgtagcgatgtctgtgagcttgaaacaaaacagtttttttcttcagtggtcatttcgtgtttattttcttatgagttcttcaggattatcagtcatactgttgaaatatgacaggaacaaaatttatagaatcaaagagtttaatagtggttgccagggactaggggtaagggaaacattaggagctgctaatcaataggtatgacatttcagttaagcaagatgaataggttgtagagatctgctgaacaaccttgtacctatagttaacaattctgtatt

SEQ ID NO: 102098 - DNA, 1028 bp, Homo sapiens
actgtgtgtatgtaccattgattaactcatacacagtattctgctttcaggtaaagtgacatagtggtacttgtttaacatgtgattggctttctttcctcgccccattatattacctgatattaaaaaagtattaacccagacacacatttagtaaattatatattgaaggcataagatgaaataccaggttaagaaaaggactgtacatgatcccttacctagttgttctagcagtagtgttttatggagttgtcttcaggtttaaattagatggataaagcatctttacaggaaagatgattttaaaacttgtttaaaattatcttttgttaagaaatttagcgtgtgctttgttatacagtgtctatgtgttgctaataaacataaaagttgtgttggatttaactatttggtttaagacagtgtctttgatatattaagttgagtatgaaagaggaggaaagactgtagaactaaatgctttgatatttgcatctaacaggaaggagatttgaatactagcctgtcattgtgagtatatatgtatttcttttaggaaacatttctattttttctttaaattcaacttcacatagtaataggagcttaagggaaaattgctttgtcatcttggaggtcatactaccaaaggaaggaatactggaaataatcagtgtaatccgttacaaagtaaatttaggaaaatacattttttaaagtttaggtttcgaaaagaaagggataaatatcccattgagaaagattcagaaagaaatattgcttgagagatttaagttttaaaaagatggcttagattagtatatagtcttctaattcttattgcctcggcaactttatttcaaaaagtaggaaaaagcatactttagaaattgtagactctgggccagtttacttttgtctgccagtttttattaattttagaaattgctagtcactaagagccagaacagattcactaacaatttataacagactaccatttgtaaagtatgttatgtctagtg

SEQ ID NO: 102099 - DNA, 1050 bp, Homo sapiens
gaagaaaagtcaacaagattgtggaggagaatatggtatagtaaagaaatttaggaagaagtaagtatgaaaattttgaatttgaatattatgtgcggttttgttgcttatgaaagtacctggtttggaatctcttgaaatctgaagagtaaattttgtacagaagtagatggaactgttttgtaatgtttacattcaaacaagactctgctcagtcggagcaggaaaatggtagagcatctttcccctatttgttttaaaaagcttttcggggtgggatgaggtggctcacgcctgtaatcccagtactttgggaggctgagactggcaaatcccttgagaccaggagttcgaaaccatcctggctaacatggcaaaatcccatctgtaccaaaaagaaaaagctttgtaaattttctctaccttaggagtatttcatattgacaatgccagatttatcttgttttcataccttcctctaagcaagtggaaaagtggttaaatgtttaggtttcaaaaggtttgagtctgtgacaagcaagtggaatttatatggaagtaagctgtatatcaataattaaagggacactttctttaatgaagagatgttgaaaaaaatataggcctggcacagtgcctcacgcctgtaatcccagcactttgggaggccaaggtgggcagagcaactgaggtcaggagttcaagaccagcctgactaacatggagaaaccccatctctactaaaaatacaaaaaaattagccaggtgtggtggcacatgcctgtaatcccagctacttgggaggctgaggcaggagaatcacttgaacctgggaggcggaggttgtggtgagccgagatcgcgccattgcactccagcctgggcaatgagagtgaaactccatctcaaaaaaatatatatgtgtgtgtgtgtgtgtgtgtgtgtgtgtgtgtgtgtgtgtgtatatatgtgtatatatgtgtatatatgtgtatatgtgtgtgtgtgtgtgtgtgtgtgtgtgtatatatatatatatatggcagcagt

SEQ ID NO: 102100 - DNA, 1048 bp, Homo sapiens
gtgataactatcaaaataatgtgtacttttggaaggacttgtcacagtttaagaataacaaggtttggttaagtttttgagccatccacagtaatgcagtaaatgtaatcagcatttaaaactaaagatgtctattctttttaccagtttatactccattaaaaattttaactcattaaggattttataaatgctagcattaatattgttttctaattaaatgattttatgtcctggaatcaatttttatttcttgtattgatgtctaggaagaagtgtttaattcacaaaaatgttttaatagccaactgtgaggggagggagaccagaagttcattagtgaggcacagtaaatgtgatgctgaggtatggcacctgtactgctaaaggagagcactggcatggataaaacatttggcatttcctaaaatcacctcctggcctgtctttcaagcaagtgaaaaggaagaagttgtggattgatttgggaagtacatttggaaaatgacctaatgtgataagctggaaccaatagggttaaaaaccctggtgaggtatacagccttgattctaaaagtggaaagtttgagtgaaggctagacccttggaaattgtaggggaggtagtgtaaaatgaagaatacatggccaggcgcggtggctcacgcctgtaatcccagcactttgggaggccaaggcaggcagatcacctgaggtcaggagttcgagaccagcctgaccaacatggagaaaccctgtctctactaaaaatacaaaattagccgggcatggtggcacatgcctgtaatcccagctactcgggaggctgaggcaggagactcgcttagacccaggaggcggaggttgtggtgcgctgagatcacaccattgcattccagcctgggcaacaagcgtgaagctccatctcaaaaaaacaaaaaaaaagaagaataataatacattaggacatgctttatagagtaagttttcagaaattaactattaatacttagaaaattagttctgcccggagtaaatggtaatagaat

SEQ ID NO: 102101 - DNA, 2069 bp, Homo sapiens
ggccagaaagaaaacttgaactgtatgtgcgcgcgcgcgcgcgcgcacacacacacacacacacatcatataaatcataccagacttttaaattgcattaatatatgttttttgaaatagtggaaaaacttatctgcatactgatatgtcacaataatgaatacaaatgttacaggattttttgttttgttttttgttttgtttgttttgttttgttttttttgagacggagtgttgctctgtcacccaggctggagtgcagtggcatgatcttggcacatagcaacctccgtttcctgggttcaagcaattctcctgcctcagccctgcctagtagctgagattacaggtgcacgccaccgggcccggccaatttttgtattttaagtagggacggcgtttcaccatgttggccaggctggccactatctttaaaagtcttaggcaggtttgtcaatgactattaaaattgatcttcacatatttgtgttcggtagacagttacaaccagatttattcatctgttttcacctacagttaagagcacttttaattaattttaattacaaaatgttgtacatacagcaacacatacacaaataggaagttttaaacatcatactgtgtttggcagcgatttataagcatacttcacaataaattctagaaatcacaatactatccatgtatttttttcagcattgagtgtaatgactttttttttagatggagtcttgctctgtcacccaggctggagtacagtggcgcaatcgcagctcactgcaacctccgcctcctgggttcaagcggtttccttgcctcagcctcctgactagctgggattacaggcacgtgccaccacacccggctaatttttgtatttttagtagagacggggtttctcaatgttggccaggctggtcctgaacttggacctcgtgatccacctgcctcagcctcccaaagtgctgggattacaggcgtgagccaccacacccgaccttgagtgtaatgactttgaaatgcctcagtcaaaattttactgaaatggttatcacctaaaaattcaatgtaaatgtctattatatttgataaccacttttgatattcacgtacaaggaagtacagcttccttgtactttgttgcttagtgatggcatctctataatttttgttcacaggtcttcacttttaaagttttatttatctctatatttgtttgaggccgattctggttgtttgtaaatatttatgccagaaaaaatttatctcagaaaaattggacacagctataattttgaatatactatttaaacagaggaatgtatataggtacaataggattggagtcatgctgagcctgaggagagctgaagctatcctgaacctttttgtacttactctccaaatgaacaggtatatcaaatctgcatgtgttgggaactgactgtataactgggggatttcctaataaacttccaattaagatggattgcttattaaagggtatgtaataaaaatgtgcagatttgacatttttatgttgttaaaactcagcagtaaccacagcaaccccttaaaacttaaagagtattgccaaaatattttgggggcgatatattttatccctgggttttttagaattgcctgtgctcaggccaggcgtggtggctcacgcctgtaatcccagcactttgggaggtcaaagtgggtggatcatctgaggtcagaagtttgagaccagcctggccaacattgagaaaccctgtctgtactaaaaagacaaaattagctgggtgtggtggctcatgcctgtaatcccagctactcaggaggcaggagaatcacttgaacctgggaggtggaggttgcgaggagccgagattgtgcctgtgcactccagcccgggcaacagagcgagattccatctcaaaaaaaaaaaaaaaaaaagaattgctcttgcttgatgttaataaaagaacaaaatcaaagtcttgctgttttatttagtcttgatagttcacccacttactgcctgcacctgggtggactgctcctcttgcctcact

SEQ ID NO: 102102 - DNA, 1013 bp, Homo sapiens
ttgatatttaccatattagaaatttaaactgagaaatgcaagtgtttattaatttactaaaaataacaataaacttattacaatatgttaatataaataacatttttaatgaaaagtaacgtttctaaaacaaaaaaattaataaagagtgacatcattttgcatttttgcacgtcatttaaactttggtttaataaaacctggatcctcattccactttttcattcagtctgttgcagtaacacacatcaggtagcctctggaatatactgctacatacttctgagaaaacgaacaaaaaggcaagaactatcttagtattcatatgaaaacagttctgacctcaaaccacggaaagggactcaaagacctctcagaggtccttggattactctttgagaactgcagtgctgaggtggtatgcatataatgctactttgcagtacagaaaaaaaatgcgagtacttgtatattcatggttatctttaaaattggacataaattaggctttatgaatacttaatgtacgaattgacattggtacacttatccagttgggctgtcaatcatgttattctgaaggaagagttgagttttacatcttagtgggagcttggtactcccttctcttactgtaaattgttctgtatgactattgttgattactagggatgattgtcttctagaatttagttcatctgatggggatgccttattaagtattttttttttaacctgtagtgttaatgtttggggtttgatcatttctgagacgtttatctaaagacatgtagacagagggttcaaagttctttactgtatggaaaagatgtagaggaccaggtcgattattggcagtaaaattggagatttcccttgcaaaagttgaccatgttgtgctgttatcccaggagtttttgaatgttgaaagttggttatacagtgttttctttctctactttcttgacccagggaattcttagtttctgacaagggtattggtctggctttat

SEQ ID NO: 102103 - DNA, 1583 bp, Homo sapiens
ccccgcttctctaccaatcaaaacaggtgcctcgcaaataattgttgaatgagaatttaaacaaatggcacaacaatagttaaaatatttcaagtacatttttctcccaacaatgaatgtgtattttaaaaatttatttcagaatcggaagaatgaatgtttttgatgaaagaagaggatttttagtttattcttaagatcagaagtattctgattcaggcattatggaagttgacatcaagcacattgttaagcaaagtattttctattaatcctgaaaaggcacaatcagtaatttttactttgaaaaaccaaagttaggaatggtattgattccttgaaaaagggaagtgatatttgaccttttaaatgtgcaaaatgagcattttcttatcattgttcattttccagttcatttcagttctattcctagtctttatgaactgcaaagaatgccagctctcttctgctaaattaaaactcctctagagaaattaatctgagtttaaaattcatcttactgtgcctacttgatttgtagtgcttctcaactatttctccccattcatgaaatgttcttgattcgttccccatataatcttgaatctctgagatctgatcttcacttaaacttttgagtgcctgctcacctgcacagccatgtcctgaatactgtagagctaccaaggatttcagtcacctaaaagtctaatccaatagaggacataagacttagacaaataattttaataggaggtagaacagcttcctttgggatccttccattgcagtgtggcatagccattggagataagtgaaggcttgggaagaggagcaggtatcagttttaggatttcagaagatgtaggaagcagtgatcgaagggcagtagtgctgaaaagtgagtattttgattctgaaggctactggaaagtaaggatggtaaagtagtttgggcctgacaagtttcatgtttgcctaatgtgtttgaatttcagttttaggctgtgggtaaacattgaaggttttaagcagtgggataatgtaatcaaaactgtttcgttcgtagtgttatgtgttgtaggaggcagagacttggtaggaaagataagtaaaacctgaacttggcaagtgtatagtgggaatggagaataggaaaaggatgtgggccaaaggaatccatggaccttggcatctgataggtttataagcaccttttgtccccacatcctaagggctgagagagtggtgatacccttatcacaagtcatcaaaagcctacttagtagagaagaaaatgtgtttgatttttgaacaggttaattgtggaacaatcatgtggaaatttttggcaagtagttgggcttataggacttaaacttggaagcaactaagagatagagggagacatccaggagttcagatgggaaagatgggggaaaattgaaagggggagaaaaaggaattaatataagaccaatggcatgtcaggcattagatatgtacacatatctaatttaatatgtattcccacaaccctgcatagacgtccaattacagatgaggaaactgattttccaaga

SEQ ID NO: 102104 - DNA, 1108 bp, Homo sapiens
ggcggatccgtggcgaggcgggaaccagggctagaggaggtgggctcttatgtcggggggcggggggggcaggaaagctaacagccagcctctggggggagcttagagtctgatccccgtcctgggctctcggaggaggtgggagaaggctgagatcctgcattccttcccacctgtgggctccggcagctagggaatgttttttggcagctagggaatttttcgtgctcagaggagggtttttgcctccgccctccacttgtccatccctcaacctgtgctcctctctatccactcaaccctcccacccctgccccctcatcacccaccattctcatccccgccattctcatccccttctctccgttcccccagctcctctgtgccctccagcctcagggtgggagctgcagtgaagaccctgctactggcaggaacagaactacagatacctccccccagagactgggagatgccttcttatctttctagaagaggggaaaggaaaggggacctccgcgagaccaaaaggggcacctctccagccttgttggaagttagatggttgtgaacccttgccaggcgaggggcaggtaagatggaaggtgtaacttagagctgtgagaagaaacccaagagcttggtgactcgcttttgaggccgggtcaccccaggctggagctgcccgagctcagagccaatccaggctggagctgtcccaagctcctgtcatctcgggctcaagactgcccccaggctgggggtggctcaaacctggagggggaccagctcctttgtgtggtccgtgggtcagggaggcgtcagccgcaaggagggaaggcggagttcacttcccaaccgagcaggtggcctgggagccgagccctctgccttccgacctgggggcctctgcccagcctggggctgccctgtgaaacccctggtcacagggccaacctgcccttcctgcctgtctctagcctcaccccacctgtagttccctccccaccccatttcccctctttgtcttggagccttttgcctgtgaatgcaggtctccgtcacccttgtcattttccctgtgttccctacagccgttttgagtgag

SEQ ID NO: 102105 - DNA, 1054 bp, Homo sapiens
tgggtattgcctaactaaggccaaaacaaagatgaccacagcctcaggctatttacaacctgaagttcttttaaaaggtgagctactaagatgattttggcctggggaaagtttcctccagtgagcagagctgaggaaaaggaggtcattaagcctccagtgtcccccactgtgggtgacccagggaggcctctctccctcattaattcctcttttcttggggtgtgtacattttggatttagaatttcacttttctcctgtcctatctatttattttttaaattttttataaagacaggggtctcactgtgttgctcaggctggtctccaactcctggcctcaagtgatcctcccaccttggcctcccaaagtgctacaattacagatgtgagccactgcacctggcccatccttttataaaggatccattccacattaggaggggaatgaagtcattaatactgtagtgagaagtactcccagcccacgtggagcgaaaggattcagggcagcttgtcttgggaaatcagtccatgaaaaagctgaaagagggcatagggaaacagaagttgagagggcaccccaagtttggcctgcttcatagctgcattctcaaactgtgagaattagttttgggtgatttgtgctaaaatctagggcattgctagttgaaggcatttggtatgggggtgtgtgtgtgtgtgtagcgtgttgtgtttcgacttggttacacttccaaaaagctttgggtgaaatccttcatggtttgctgggaatcactgtctgagtccagatgacaaagggagccagtttttcccaactttccttttaggtttcaatttgatctcatcaagaggctgcttttgccaccactgcctgtaggacaatcttttgcctgcttttcctctgaagttgtttgtttagaagccatttgaatctagatggctcttttactgcttgtaaaggaaagatggcttgcggctgagacctaattgtgtcctcctttgagttaatgcaatctctgttaatctggctttaaaaataaatagttc

SEQ ID NO: 102106 - DNA, 1109 bp, Homo sapiens
ctcatgcctgtaatcccagcactttgggaggccgaagtgggtggatcatttgaggtcaggagtttgagaccagcctggccaacatggagaaaccccatctctactaaaaacacaaaaattagctgggtgtggtggtgcacacctgtagtcccagctacttgggtggctgacacatgagaattgcttgaaccctggtgatggttcgtgatacctacaagaggcatggtctctggcacatgacaggttattgtgttttgtaaaaaattgataaaagttgaaaaaatatagttggaaaagctgaatcgagaaaagagtaggtgtatctcaggtattgagccagtgttgtaggcaggcaaactacagaacaagaacagacagtccatgccactgttaccttttttgtgattgagtctcactgagatacaaagttgagtacataaaatgattggttaagatgttgaaatatcttgttctaacccttggttaaagaataataagccggcttgtcacttccatcagaactatttttaggctaagagtaagggttgcctgcttactaagttgccagtaatcatgcttagagcatgacagtgccagatacctggagtgaaggagttactaaaaatacgatttactatgttttgcagagcaagaaatatgactaattttagaggtggccttttggcagatctgtttttagcaagtatttctgaaacaaacaggtgctaaatcctgtatttttgaagtgctagaagtttaggggtaatcgctctgaggaacaagaaatgcttagagaactggaaattcctattaatccttggcagggacttcttggcaagaaggaggcatttgcaaagcacctgcttggtgagccctgtgtgacaaggcagtgcctgtaatttcgaggattgcattctgcagttgcaggcggattcttttgaacttcctgccctgcctcatctttttgaagtacttgtgaatgatggaaattggcacgtagggcctggttcctagtgttcattgatacaggtcccacggacttcaaagggtgctttgagtcagcgcaacagtgcagaaacggtgcccacggagaggagtacaaccctaca

SEQ ID NO: 102107 - DNA, 1096 bp, Homo sapiens
ctttgtgtctcctgagtcatcattcaacctgcttcaggggcccagggctctcagacttcctgtgtgttaagagctgaagcagctgttgaactagggtctcagagactccagtctgcaaattcgaagagaaaaattctccccagtgttgattacttatcagcccggttcctttcttggatggggaaatggtgtgacaatttaataacgggcctgtgacaattacatgcaagtggagagaatgaaaaaccagccttggaacagagatttttcttttctgggaatggtacgtggtggttttggctttctctatgtgtaatgggagaggcccatccatctctgtgtgacagaggaaaatttcagcattaggagagtaacttctgatttatcacaaacagctgggtgggccatgcctcactggtgcccaggcttaagcagcctttgaaatagagttgctcagtgtggcttctgcatctgaaagggccagtgagctgctgtgtgtttcacagtggttgctgagctcttgtcatcctgatcacccctggtagagggtcagtgtgaaggagggcattaccttgaacctgacaagtcttgtatctgtcaaggtgtttgctatgggctgaattatgacccccaaccacaaattcatatgttgaagtcctaacccccagtatctcagaaggtgactgcatttggagataggatcataaagaggtaactaaggcgaaatgaggttatctggataggccttaatccaatgtagctggtatgcctagaagaagaggaaatttggacacagatgtgcgcacacacagagagagactgcacgaaggccacagtgagaaggtggccattcacacgccaaggagaagggcctcaggaggaagcaaccctgctgacactttgatctcagactttgggcctccagaactgtgagaaaatacagttctgttgttggagctgcccagtctataatcctttgttttggcagcccgggccaactaatacactcttcatacacctccatttgctgagtgtcccagaagctaaggtcggcttcaggaatcatgccgggaaacttcacctgattcacgagacc

SEQ ID NO: 102108 - DNA, 1444 bp, Homo sapiens
taacgttctctattagtttcctgggctgccataacaaagtaccataaactgggtagtgtcaaacaacagaaatttattatctcacagttctggaggccagaagtatgaaatcaaggcgttggcagagccatgctctccctgaatgctgtaggggaggagaatcttcttttcttcctagctctggtggttgcctgcagtctttggcctgctttggcttgtagatgcctcactccagtctctgcctgcaaattcgcgtgacctttgctgtgtgtgtgtgtctgtgtttcctcttgttgtaaagacatcagctctatgggattagggacccatcctactccactatgatcttatcttgactaattacatctgcaatgaccccatcttcaaataaggtcacattctgaggtactggtggttaggacttcaatgtatctttatgggaaacccaatttaacctataatgtgttctaaaccaaactcgttgcctttgccactgaccaatctgcctcttcttcattccctgctactcctgctcagcaccatcttggttcctccatcttctcagtcccttttgggttattcagctcctgtaagttacacctctggctgctgtgtgttttttttttttagacagagtttcactcttgtcacccaggctggagttcagtggtgcgttcttggctcactacaacctctgcctcccaggttcaagcaattctcctgcctcagcctcccacgtagctgggattacaggtgcctatcaccatgcctagctaatttctttttaaatggagacggagtttcaccatgttggccaggttggtcttgaactcctgacctcaagtgatccaccctccttgggctcccaaagtgctgggattacaggcatgagccactgctcccagcctctggctgctttttgatttttatctcctactgagtccctttgacacagtctagtttaatcctcgttcattctccccatcccctgttcctcgcagcataatccatcctaattgcctagaaatgaactctaatgagtccacaaactctccaggcccaccctcctagctccttccagccccactgaaatgccacgttagttcttcctggagcctgccctcctctgcccagctggaggtagtttctccccgctctttgttctgtctccatgtcacctctcttactccatgcaacatcttgagcacaagcaagcgtgtggtagctgcctcccaggttgcaggattatttaggctagaaccaggtcttagttactgaaacacacacacacacacacacacacacacacacaaactctactgtgctcgtcatgatttttcacgaatagtgggtactttgacagactcggtagaatgcaggtctccatgtggaagctctggctacaattctgaggttttgtcatggtccaaaggtctcctcttcg

SEQ ID NO: 102109 - DNA, 1049 bp, Homo sapiens
acttgataagcaagaccctgcaaaacactgtacatgcttcatgtaactcccacaagccctacgaggaagaatatgccattatttcccctttttacagaggggaaacttttggttcacacagattaagaaagttggccacggccgggcgcggtggctcacacctgtaatcccagcactttgggaggccaaggcaggtggatcacctgaggttgggagttcgagagcagcctgaccaacatggagaaaccccatctctactaaacatacaaaattagccaggcgtggtggcgcatgcctggaatcccagctactcaggaggctgaggcaggagaatcacttgaacctgggagacggaggttgcggtgagccaagatcgtgccattgcactccagcctgggcaacaaaagcaaaactctatctccaaaaaaaaaaatcttcttcctcgtagggcttgtgggagttacatgaagcatgtatagtgtttcgtagggtcttgctggtcaagtgcttattcaatgaaactagtcccagttggaggtttatatggcttcatgctgtggtccacacataggcctttttgttttcacaccatgaaatttacagagaaatggcgattgtccaaagagctcatcaattgcatgcttattgacagctaaactagttaatttaggccactaaatggatctcccagccattggaatatttactaagcttaagttaatcagacagttgcctacatttatttattgattttctagaccatggagatccgccctgtgtgctgcttaattataagctctcacactattaatcttttctttatgtaatgataaaatgtgtttaatataatgagattaacactactgatccacttttgaaaatgtgatcatgatcaaagtgtctaattttactttttttttctcggtgcgggagagaggtggaatttgcaaccaataaatcttgattcgatgaaagccacattaaactctttctaacatgattttaacataacaaagctccattaatgttgatgaaagcaatggataact

SEQ ID NO: 102110 - DNA, 1388 bp, Homo sapiens
ataacctctttaaagtctctctctttaaatacagtcacgttgggggttagggcttcaacatacgcaattcagtctattgcagatggcaatcttgaaccatgacaaagaatctgaattatcctcccctccccgacaaatggtcctaaagatccaggactcttttatagtacaggttaattatctcttatctgcttgggaccagaagtgttttagatttgggatttttttttttttttttatatttgcttagtatccagtggagcacccttcattccaaatactccagtgaccattttctacaggtgtcgtgttgatgcttaacaagtttcagattttggaacatgttggattttgggttttcaggttagagattagagatgttcaacctgcatacacttatacctagaaccctggcaggtatattttaggtgtttaataaatgtttgttgaagaaggaaagattcatttgagtttagtatacagtattcattaagaaaccaaagtgttctgggaagaaagcttttttggggataatttccatatgaaaagaaaactcagttgatcagggcttcccattccctgtgcattttgattatttaaaacatggtgtaaaagtgctttgattaaggaaaggctatgaactttctaaaatacagcacattgtataatgtgtaaaacacatatgtatatttctgcgatattaaagaggagtctctttgatcagtatattttttttcttcctctcagttgtacagaagatccattttacatctgacttctcattttggagattggatacatcaatacttgatgtgtttcagagtaatgaattttaaaggcagtgaagggtgatacaggaggaagggatgaatttaaaatcctgttaactctgatcctatgtagacagtctcagctaagtcaatatttaaagaagatgagagactcgcctgataggaagtcactgccttgggatttaaaagctactctattccagagagttgaaaaccctgagatagagttcagccttcttttttaatatgctgaagccaccggtcaaggaaatgcatattgttttccttagctgaactgagcttgaatgcttattcaccctctctacgggttgattcattgaaagtaaattggtaatgataataacagcatcaatttaaggagcacttcgtatgtgccagacattgtactaagtgctttctttttttttttttttttttttttttgagacggagtctcgctctgtcgcccaggctggagtgcagcggcgcgatctcagctcactgcaagctccgcctcccgggttcatgccattctcctgcctcagcctcccgagtagctgggactacaggcacccaccaccatacccggctaatttt

SEQ ID NO: 102111 - DNA, 1029 bp, Homo sapiens
ttcagggtgtacctgtgcaggtttgttacatgggtatattgcgtgatgctgaggtttggggtacagattccatcacccaggtactgtgcatagtacccaacgggtagtttttcaaccctcgtcctcctctttcccacccttctctggtagttctcagtatctgttgttcctgtctttgtgtccatatgtacccaatgttcagctcccacttacaaggaagaacatgcaatatttgattttttttttctttgttaatttgctcaggataatgacttcgagcggcatccatgttgctgcagagggcatgatttcattcttttttatggctgcatggtattccatggtacatatgtaccccgttttctttacccagtccacctttgataggcacctagtttggttacgtgtctttgcggttgtgaatagcgctgtagtgtcttttgggtagaatgattgattttcacccttttttattccagttgtctctcaatttttctgcctctttggatcatttgtgtcctctttgatcactgttgagtagctgagcagagggtctgggttgctcactgttctgaatggactcagggacataacttcagggggctaaggatgtcccacagtgaactgcctgagtgaggcacttggttgtagttgtaccattcttagtgtggattgcttaggaaagggaaatgtatccaaaagctgcttttacaaaaatctatagacaatgttttttagagcagtttcagatttacagaagacttgcatagaaactatgagagttcccgcataccttccccctactcacattttccctgttacgaatatcttgtgttcccctggcacatttgttacaatggatgaaccagcatggatacagtcgtattaactaaggtctgagtttaccttagggttcactctgtgatgtccagttctgtggattttgataaatgcacagtatcatgtaacaccactacagtaccataaagaataattttaacaccctaaaacccctctatactccaccta

SEQ ID NO: 102112 - DNA, 1051 bp, Homo sapiens
ttcggaattactgtttatgcctgaatagaagtcaggctgatattacatcttcagtatcttcagaaaagaagaagtgccttacagagtccttgcaagtctctcatatgataaggacacaatttcaatcatagtattttattttcaataacaaagtactagttagagaagacacataaacctttatttggctcactgatgactttgggtgctctagaaatcactcgaggaacccagtaggaaggaaggtaaaagcatttatggggctttaataataacttctagagatacggcctcttgattgtgagagtttgagagaccagtctcaaaacagttcactgagtggttaatttatggagattttaaatgggtgtgtatgatttgggataagatttccagcaagtgcctcatatgcaaattttaaaaatactttatctcaaatatccagtcacctgaaagatcatgttacattgaaccactgcacaaggactcaaaaagtcatcctggttctgcctgtgactagtttgaataaaattgtttcatgaaatgtgacagtgtggaaacagtatttcttaaattaactatgttaaccttttaatgtatggtcttaaataggaggatgcagcttcaaagataagtagtatcaacagtcatttaataattctattgcattcctaaaaattatacatttgtgttttccaaaaaccttttactgagggacaaagtcttcctgttggaaaagcgaggatatcactgtatatttggagtcaccctatatttggacacgtgatatctttaaaaggcagacacagttttgaagtattctgtgtattgtttcatttggagtgaagggaaagtatgtaattcttcttcccattggtgggcacattggattggggaatgtctgtttatatccccagtttgaacatggatcttccttctcagccagtgcccagccttaaggctattggcaactctgaatctgttggacaccttttagagttcacctttttttctgcatttgactccttaattcttaccatcttgtagtcct

SEQ ID NO: 102113 - DNA, 1049 bp, Homo sapiens
ggttgggacacagccaaaccatatcacccagtttcccccaatagtaatatattgtataactgtggtataatatcaccactgggaaattaacattgataaaacccattgaccttgttcagatttcacaagttttatgtacaatcttgtgtgttgctgtatattagttctatagagttttttcacatgagtaatttgtgtgacagccaccacagtcaagatgcaagacagttccctcacaaggatccctcgtgctgctcctctgtagccacagctaccttccttcctcctgctctccctaagccctgtcagccactaccctgtatcatctataattttgtcatttcaaaaatgctatatgtaaatcactttttttcccactcagcataattcccttgagataatctgagctgttttttttttattggtgagtagtatctcctggtgtggatataccgcagtttgtttcaccatttacccactgaaggaccgttgagttgtttccagtttggggctatcatgaataaagatgctgtaaacattcatgtttaagtttttctgagaatatggtttcatttctctgggacaaatgcctaagagtgaaattgctgggttgggtagtaagcacgtatttagttttgtaagaaactgccaagcctctttttcagagtggctggaccattttgcattcccactagcaatatgtgcatgatctctgcatccttgccagcatttgatgctattattattttttattttagttgttctgataggggtctaataatatctcattgcagtacaaataagatgtgatgtttccaaatagatgcagtctttcaaagcagtctctgtaggggttatatagtcataaatattgccatctctcagagtgattccaaagtttctttgagggttcagagcctgttttattcaagtgacccataacaaaggacaaaaggaggatgaatgtacccccacagtggggaaaggcagacagtgctctctttgaacccgatgacagcctgaggagctggagaactgctgatctgctg

SEQ ID NO: 102114 - DNA, 1050 bp, Homo sapiens
ccaatacattttaaggaaagaatgtgtgatcataaggaaatctgggggacagttgggagatttgagtataatctgggtattagatgctattaagtgattattaaaattttattgggtatgttgatggtattgcggttctgtgggggacatctttggtttttgaaggtgcacactcaagggttaaggggtaaaatgtcatgatgtttgtaatttaaaatacttcagcaaaaaaaaaatgcaaggatggcaaagtgatcactggtatatctagatgatggtatacataaagtgattgtactattccctccgcttttctgaatacgagaacattttcaaaataaaaactcaagtcagtgaatgaatgagtgaatgaatgaagctgattgtgcccagggggtctgtgtggggctctccgtgaagtgcaggggtgactggtcctctctctctgcacctcgcaggatttctctggaagatctgagcccgagcgtcgtgctgcacatgaccgagaagctgggttacaagaacagcgacgtgatcaacactgtgctctccaaccgcgcctgccacatcctggccatctacttcctcttaaacaagaaactggagcgctatttgtcaggggtaagtgcgaccctagaggcgatcgtctctgctgtctgtggaaaaaagagctcctacacccaaagtgcttctcagttgctgacacttgatccaagctgctaatttaatctaatgtgaggctgagttttctgaatgtgggataaagtcgtagctaaacctgcttctcagggagtgccttttatctgcaatgtttttcaaatactctcccaccgagttaagccctgggcagaattgggaggggttcaagcctctttttccttcaacagcatctctgttgtcttttttttttttgttctgctgcctcttaggtctttgggttccccatgttggaggcattggagggttctctggtcctaaaactcgggtagcagtgcctcccgggcatttgtctctgaactatggtattatatatgagaaagccactattta

SEQ ID NO: 102115 - DNA, 1046 bp, Homo sapiens
aaggtcgtgctactgcactctaacctgtgtgacagagcgagactcggtctcaaaaaaaaaaaaaaaaaaaagcctggttactttgggggacagaatgcctggcagaggacatggggatggcagggaggaccttccagatgctggctgtgttctgttttttgatccaagtgccatttctgtgggtgtctttgctgtttgagaaaacattgagctgctgacttatcattagagcactcctccatacggcatcttagattttaataaaaagtttacctagaaaatctattcagcacacgagttaggacatctgctgtctacttccatggcaatttcaggatttgctttctgtctatgaaaaccgaaacgaataattctcaaccagagctgcagggccgtaggggaagcatttagggaataaatagcaggtgcagattctcgaattgttgaaggatgttccttttcacaggcctctctggacacctggacacgagatcttgaattccatgccgtgcaggtaagaacttgggggattattatgttagtcagggttctccagagaaacagaaccaatagagtatggagagagagagagattgagactgagatttattttaaggagttggctcacacagttttgtgggggttggctggaagtctgaaatctgcagggcagaccagcaggttggttgaattgatgttgcagcttcaagtctgaaggccatctagaggcagaatttcttttgccagaagacctcattctttttttttttttaaagccgttgactgattggatgagacccacccacattatggaggataatctacttgaagtctactaatttaaatgttaatcactttatttatttatttatttatttatttatttatttatttattgagtctcgctctgtcgcccaggctggagtgcaatgttgtgatcttggctcactgcaacctccacctgccaggttcaagcaattctccggcctcagcctcccgagtagctgggattacaggtgcccgccatcacgcctggctagcttttg

SEQ ID NO: 102116 - DNA, 1052 bp, Homo sapiens
ccaccaaactcatgttttcacaggagggttcagtgtggagagcaaaaaagctgactgtggtgatttgctgagtgctgtggcccacaggcagggcaagtctcggtggccctgtgttcatcctgttgtttaaggcatagccctgatccttctggaaggcatagaacacggttacagctggttctgtagaaagagggaaaagatgattgtgacaattcagagcataactcagatggcgagaaggcagcattatctctgtgcgatgctgatttcaagctgcccacagaactggtgcggctcagagctcggcgagtttgctgggagctgggagcaggcttgcctggcagagaacctgttcagatacaggccagtttcttcttcgaggaaagccaagctcctcaaacagggttcagtccacgttgtgttttcacacctttctccaaggatcgaaccaaagatgtgtctccagtattgtgtctgtgcccctgtgtgtgttttgtggacagccgtgttgtctgactgtatccagctggcacttgacagggtgcagtcattggtgagaagaatcagaaaaagaagacccatcagcacaggttggataggggttagtgtaggagaccagttacagaatggcctggagtcttcaacttttgaccggtgcaggtgtgaccagagaccacctctgtggccacctcagatagtcatctcagtccaaggatcccaaaacacaaatctagaattgcaaagccagcctttatttccctggcaggcagccttgccagaaggcagagaggcagttctgaatcattctctcattcaccagtggtgacatccttcagtccctcacatctctgacagagcgggacagaatggatatttggctgaccttggtgagacctggagctgcctgtttcttccctaggggatcaccacggctctagggcattctaggatgaggtcagaccccttggccattggtgttattttttgtatagcttcagactgggttccagaacttaccattgaaaacagagcttttaggccaggtgtggtgg

SEQ ID NO: 102117 - DNA, 1049 bp, Homo sapiens
tcgcttgagctcaggagttcgagagcagcctgggcaacatggtgaaagcccgtctctaccgaaaaatacaaaaaaaaatagctgggtgtggtggtacgtgcctgtagtcccagctacttcggggactgaggtgggaggatcacttgaacctaggaggtcgaggctgcagtgagccaagatcatgctactgcactccagcttaggtggcaaagtgagaccctgtctccaaaaaaagaaaatagagctttataagcagagagaagaaaataatcatctaagaccatctctccattcgacatgaagtgtaccttttctaaagacggtttccagctgcaacggctccactttgcaggcttgcagggtgtatacctgcgcattgggaacttgctggaacccctgatgcattttccttgagagcaggggtacttccgccttgccgttagcttgtggagaacgtgcttcttattcctggcaggcttcaagaacagctgcacatgtgccgctaactgaccgcgttgccattggcgacctggactctgaactcaggtttattctaaacccagtgagaggtgagggggagtgatgaaaggggatcagctgtatttgtgtgtgtgtgtgtgtgtgagcacctgacaaatctatgaaaccgagtgaaaggagaaatgttagattctttattattttattatatttatatggaaagctcgactctccctttggtaagtccgaagcatgttgtctgttcgaccgtgactgtcttcctcagtctgtgcctgtgattccagtcaccctgtagttactgacagaaattgactggactgtcattgtgtgaagtctaggaggaaatgtccattttaattgtatgatttggtcataagtaaggactatatttatgtcaccattattagatatatgtacttttgtaatgactgtgaaatacacttttccctcactacgactgcttctttatttgctgataaatcttaaaacaactaagtacgttgcaaataatagtacaggtaccatcttttatgtgaagttctttttct

SEQ ID NO: 102118 - DNA, 1017 bp, Homo sapiens
ccagaaaggccccagcagactcctcctatttctcattggccagcaaggtgtcacatgctcacttcaagaccaatcactaatcaaaaggaaggtgattgcaagataggcttggccaatcatgactcattctctagggtgcagtgtttttgtatgctcacccacttacctgcaaagtccattttttagttttttatttttttgcaggaaattaaatggaataactgctgatgattcagctaatggtgtctgccacaccatgtcccaagcttaggtcttcctgaccctctttcatccatttcataacacccataaaatatactcttctctttgcagtcacagaaactgccttttttgggggtggggagttctttctatgagaaagccaagttgaggctgcttttgataatgtcatagtaaagtacattgtgtcaagaacagactgataaagggacgagtggtttctgcctcagcatgtgaacagttcattatggttgccgagtcgattcatgctttgaccaaaagtgtttgccaaagcccagaggccaacatcagcattattaataaattggctgttattaataacagccaggccacacaaagaaaccgctggttatgcttcaagtgcttgtgatcaaccactgtgggcgcttgcattgatatagagctgttgagtgacggtgccttgtctggtcagttgtgtgttaggttgttctgcccgtggctgatgtctgtgcaggctgatatcatggcagccaccatttattgtgtatatactatttgtccccttacgtgcattacttcatttaacactcacaatagtcctgggaagcaggtattgccatcaccgacagacacacaaggaagttgactcagatagagacagtaggttcctaatgtcacccagctagtactgggcaagaccaacaaccaggttaccccatgcttgtctgtgcagtgtggcaggccccccaccaggttacttcagggtgtatgtccactgcctgaactctgaaggcc

SEQ ID NO: 102119 - DNA, 1154 bp, Homo sapiens
cccggccaagtaatgcctttttaattgtatcctctatctattggcataggacagttctgtgtcatacctgtgtgattgtaaaatgtcttgtacctgcttattgatatgtagtagtgaccatgctttatcagagctatttttaaggatgttattctagaatgttttctttccagatgatgattcagaagctaattttaaaaaatggtgccagtaccataacagtaacagaactttgcaattttctggggatttgttttttacctttccccaaccccctgactttttttaaatggagtgtgctggatgtctctataattttgttcagatgaccgcagaacctagaaaagctgttgctgttattgatgtataacatactgctattattggtctttttatataaaaatatatatacaaatatatatatataatttgaatttttggaaacttcagctgtgctgtgacctttggaaaaagtatcccagtttactgtgttaagttggcgttgtacagaaattaacagccatattggtctagaaacattaaacttaatatttttccatttgtacaggggtaacacactatattaaatatgtaaggtcttatctacatgagtttggttacagaaactaataaagtatcctctaaataatgaaaaaagaaagtgtgcttcttgaaaggtttgagaattcctgagtactctcacgccggtaattgaatatagctacggggtggactgactgtgctaatactggctctgcaactctctttatcccccatcttctagcttcccagcacctgattaaaatctgtgcaggatgctttatactccttatcttgttgaccactgctatggtttggatatggtttgctcggcctcaccaagtcttatgttaaaatctgaccctaatgttggaggtgggggctagtgggaggtgtttggatcatgggggtggatccctcaagaatggcttggtgcagtcctcacatggtaatgaatgagttcttactcttagttctcacaagtactgcttgttgaaaagagcctggcacctcctctctctcgcctcttctctcatcatgtgatgactgttcctgttcaccttccaccatgagtggaagcttcctgaggcctcaccagaaacaaatgctgaccc

SEQ ID NO: 102120 - DNA, 1050 bp, Homo sapiens
ttcagcatgcaaagcctcttttatagcttgttattagcataatccacgtggtggagccgatgtcacctcgtttttagagatagaagttggagaagttaaatgatttgcctcttgacacagggtgcttctgatgatgagagaagcagtcttttaaaagaactatttaaagaaatacagaaatgtgcagagaataatagtagcccccacatttaatacatgctgacagttttctgtgtttgtcctgtttctttctcatccctctgtaaccaaaggtcaacactcttctgaggttctgctttgtctcgtcagtatcttattttgtattttcatacactgagtgttagtatgttgttaaacagtattatttagcgtgtttaacattttacactaatgtatcattcttttttttttaatgtatcattctttatacatccttttgttcactgagatgtttctaatttacccgtactgatacttgtagatctaagtcattcatttttactgctgtagaatattcggtcttttgactatattccagattacttagccagtcctctactgacaaatgtctaggctgttctccctattctcccctttacatcacatctctctctccctccctctctgtttttctctttctctgtctcattctctcattctctcccattatagtcttacagtctctatcatgtctcttggggtggattggggacttactagcttttagtgtgggtgcatcttcagttctagatgctcaaactgctctccaaagttgttgagcaaattttttgtttttgtttttgagacagagttttgctcatgttgcccagactggagtacaatggtgtgatctcggcttactgcagcatctgtctcccaggttcaagtgattctcctgcctcggcctcccaagtagctgagtccacaggcacgcaccaccatgctcggctaattttttgtatttttagtagagacgtggtttcaccatgttgggcaggctggtctcgaactcctgacctcaggtaatccacctgcctcggcctcccaaag

SEQ ID NO: 102121 - DNA, 1039 bp, Homo sapiens
gctgggcttggctgcgatgccttgggcaccccgaggggggcatggaaatgtaggcttgaggatggaatggattaggaaaggggccttctgctctctgtctcgctaacaacagtgaatacttgcgtggcagctgccgcccctgtcttagccctgtgctctatgtgacgtctgtgcctcgtcactgcctttcagacgctggaggaggtgcttgtggccatcctcaggcaccccaccctggagggctggttcctggccctggagcagcaggccctcccgccgcacacgctcagccctgtcctcgtgaagctcctggccacccactttagtgcaggggtccttcagctgctggcagcaagtgccccgatcctccagaacattgggcagctgggccttctggccaggtactcagaggccatcacccagagtgtgctgaaggaacttcagaacaggagggcgggcccggccacatcaccaccaaagaccccgccgcagctggaggccctgcaggagctgcatccatacatggagggtgcccagctccgtgaggtcaccctggccttgctgagcctgcctgagacacacctggtgacccagcaacccacgaaatcccccgggaaggaaagacacctgaatgctcttggaaagaccctggtgcagctgctgacctgcagcccccaggatcagctgcagagtggtgagctcctgtggtcctccgagtatgtgagaggcctgggggctctgctgcccacgctagcagtggacgagctggacacagtgctcctccacactctgcagagagaccctgtgctggcccccgcagtcggggctgatctgcttgactactgcctggcccggcgcacacaggcggccctcagcatcgctgccctgctcctccaggagagctgcacccacttgctgtggttcgagcagtggtgcctgcaggctggcccagggctcggcctccagggggacctggacgacttccttcccctcatccatgtgtacctccagtgcaggacacggagccacttcacacgcc

SEQ ID NO: 102122 - DNA, 1039 bp, Homo sapiens
tgacctcaggtgatatacccgccacagcctcccgaagtgctgggattacaggcgtgagccactgagcctggcccagccctccctcttaagtgtattaatttagtaactggctgatgaatttctgttcctgatgtggttcaagggatttttaagttttgaggtgggcctgtccctttcagtttagtcaaaacaacctttgtgtttcaccaaggcttaggaagacacatctcttatttgagaaatggcattgcattgatgggtgtctcacacactctgtgaggagttgccatctcagcctgcctcccgagtctcctgctctgaaaacacgggccctggaagtcactgcctggtagctgtgaacccgtctcttccctgctgaggctcgtgctcttgtcctcacagctgggcagaagtgtgggcccgcccctcctgcagctcttcctggatctcctcaggcgcctggttgtccactgtgagcagctggatgcccagaaccagcagagatgcgaggccgcccgggccgaagccgacctcttcctggacatggagtccgtggcctcgctggagttggccaatgatcaggtaccgccacaggttgcctggtagcctattctcagagtcatgggcagtggctttctcttcacttctgattaaaaacaaacataggtccattgtgggaaaattgggaaatgcagaaactacagcagagatcataaaaacttcctggcacccgcccagcatgcggtttaatttgggcttctctttcctgttgcttttctgtgtacagtcaccctccctgcagacagctttctctcacgctgtgtgaggtgagcctgctgagaaacagtgtgaatagctgcagcttgtgttgagtgaaaggtgggcagcaggtgctgcttttcacaggaaatacacacaggaaatagactgctctgagaagcagcagcctttctgtcctgttgggagtcttgggaagcaggctgtttaattggggccaagatgactatttcacagtttgccatgtaacctgttttaccgg

SEQ ID NO: 102123 - DNA, 1195 bp, Homo sapiens
ctcctgctccaggcatatgataagcttgagcctccatgcctggtgccttgctgccagcagctctcacggtttaacagatactacagcctctggatcccggagcaagcccgagaggcctgggtgagctgcagccacagctgtggtcactgctgctgtgcagggttcttcccagggtcccagctggctgggccacagctgtgcagttgggtagccagacagcctgcagggtgaaatttcttaccctaaagtcccctgcataagagaggaagctaagtagtatccctggtgctcagctaacataactgaacacacaggactcagtgatgcagccaaattaaattccccattggctccctgataatgataataggttaattcctcttccagcctggggcaggagcgttgcctcttcctttttttccttaccttgttatctgtgcgtgcttgtctcctggctctcctctgcagaccttagcatggccctagacaaactgtgctcagctgtcacacatggcccctcaaggcctccagcagggtctcttctgttaaagttggggaaggaaaggaaaaagtatattttcttttgctggggactacattctcttaatgggattctggctccaatgtgcagggtatttacaatgctgtgtggggcacgaaatttgtggtatgcatttttgtgcattcatttcattttagctgcattcgaaaaagcagtcagtttagaccctccttatcttgtgatattggtagcaatagccaacagcgattgcatgttttctgtgtgttttttggaggcataccgggtcctgtactaagtgtactatgtgtatttttggccgtttaatccttactgtaactctgagaagtaggccgggactctcaccatcctttatgcatatggggaaaccgaggcccagagcggttccaacaccagtcagtggcggagtcaggatttggcccaggcagtctggctccagagccctgacccataatgttgccaccttcccccacacgtaggccacagtgatagccagacagcaacttatgtggcagtattagaggttctgtcctgcccctcgtggttgcttggagtgggtgtccaccttctgtggaataagacttagcagtggttctcaccctccagggtgtgtcggaattccccagagggccttttcaaactggactgccgggt

SEQ ID NO: 102124 - DNA, 1051 bp, Homo sapiens
cgcctggccccatggtatgtttctaatatataactatatattaaaattatatatgtaattatatatactaaaaatacgtaatattgtttaaactctaggaaggcccagatgcagaaattattggaggtgaacgatcagtattttacttactaatgaaaatgtttgtgaccagtagccatttacaactgaagtcattgaccaaacttctgatcatgaaggtgagcattttctaccagtttctaactctgaaaagcattttgtatagatcttccttatggtaagtgtttagttaacagttattgaattcaggaggtattggaattgtttttagttttaaaatagaaggttttatggcagtttaatttattgtgtcttacacttagctacattcctgggaggcagcctggtgcattggaaaaatgttttttttttttttttttaggtaggtcatttctagcttgttgtaggctcaatactaaattttggcttcttggtgtttattaggcagtgcctctttcctccttctcaggctctggcgttatccagggctttcagcctttttgccagaatccatcacccacagcacatgggtcatcaaagccagtggaagagaataggaatttatttccttatcttgttttgtccttgatactcatgtttccagagctatgtcaggtcttatgatagcagtaggacatctagtcctcatttctgctctgcaacaaacagcttgggggatgcactatgtttagggtacagaggtttgacctttcacttttatttgaaatgctgataaccttgctacacttacagccttctctcttgagctgcttaaagaatgtggcagtctaagtcttgacctccataggttgccatttccttccaggtagtgcagttgtgaacctgaccccagccagatttcgtgatcactgactgcaaataggtgaaattggcacagtcaggctttcctttggtgcatgctgttgcagggctctgtgccgtgaggcctcttagactctgagtttctgctttcagaccatttagggaaatc

SEQ ID NO: 102125 - DNA, 1082 bp, Homo sapiens
ggcaggcaccaccatgcctggctaatttttttgtgtttttaatagagatagggtttcactatgttgaccaagccaacatagttcaaggccaaggtcttgaactcctgacctcaggtgatcctcccaccttggcctcccaaagtgctgggattacagttgtgagtaccacagccagccctacatagtgctttttttgtgtgtggctggaggaggaacgtcagtaaaatctcaaaatgaaatttggggcatggattcctccctgctggttttgtcctttcttttcagtagccttgacttctaggcagactggtaggtggctgaggtagagcgagagagaatggttttcttccttttctttagaaagcaaattgaactcaagggagggaagtaggaaagaagaaagatcgcaggacagagactttttcagccactcagaagtagaggatgagagggaagccctctgtggagagctggaacccccaggccacggaacccccactttacgtcctgggggaaattccctacgttgttattgctgtgttcactgagggcaattctgcagagctgcacgtcaccatgagctctcagggtgctttgaccattttctgctgacctctccccatgtgtctttctctaacagaggcggaaacctgacactcttgcacttcttgctgggtttgaaaactgcagctgatgatgatctggtggctgaccttgtggtaaacatcctcaaagtgtgcccggacttactgaacaaatacttcaaggaagtaacgttttcctttatcccacgagcgaagtctacttggttaaataatatcaaactactaaacaaggtaaaaaaacatgatatttaaaagtctgttagctaagctgggcgtggtggctcatgcctgtaatcccagcacttcgggaggccgaggcaggcggattacctgaggtcaggagtttgagaccagcctggccaacgtgacgaaacctgtctcttactaaaaatacaaaaattaactgggtgtggtggtgtgcgcctgtaatcccaggtacttgggagcctgagacaggagaattacttgaacctggga

SEQ ID NO: 102126 - DNA, 1055 bp, Homo sapiens
ccctctcggccatgggggtccccaagaggaaggcctcgggcggccaggacggcgcggcttcctccgcgggtgcagccaagcgcgcccgcaaagaagagctcacgggcgtgcggttcaaggctcagctgaaggacccgcagggccccgggccaggtgagtccggggcggcaggcgcagggtcgggagcacaggctggcgaggcggcctccgtgtgccgggcacagcctctcctttctgcagctttcgggtcacataggctcagtggcaagcctctggtttgcagaaaactgaggttcaggactgctgtgtacttccttgctctggactgtcggcgacagcgagagggccccgacttgcttgattgggaccgtttcatgttacaacacatttatttcccttgcccaggcagcatccctcagcgagctctaaaacctctttattgcagttgtcagggaagtaaatgaagtgtccttctctattgagtccttactgagtcggctcaggacggttcatgagacagtttgctactccttgggccgtcagcaccgttttcaatagcttccatcccccaacactcatactgacttgatgacttgtaacaagctactagaagccaccacagctacttgtcagttgaccaggaatgggccagtgactgagatgtagccgactctataatttaattacactttttgtaaagtgtgaccacccttcgcgactacttgtaatcgtttggaaagtaacatggtttgggaaaaacgcaattgaacgtgttgccatgtggaagcattgctctaaaataaaacagtggcagtttttctcccaggttaaataaacgattaaattaatggccaaaatatcttcaacttccaatttttgtcctcatttttttttttaaacgacagggtcttgctctgttgcccaggctgaagtgcagtggcactatcatagctcactgcagccttgaacttctgggcttaagctgtcctcccacctcagcctcccaagtagctgagattgtaggtgcacaacaccatgcccagctatgttttttt

SEQ ID NO: 102127 - DNA, 1031 bp, Homo sapiens
aggcaatcgtaaaacatttgttgtaacttcaggattgtcactctaagaacaccttaatccacaatttgctctgctctcctctttgcagaggggacagggagctccagcccgagagcctattattagcagtgaggagcagaagcagctgatgctgtactatcacagaagacaagaggagctcaaggtagcaggggacagatgggctttctgcagtgctggcgcccacacatagcctgtgtgccttacctggggctgctggggagcagtgagctctgcagaatgccggggaggggtctttctagagcttctgtctgcaggtctgtcggggtcctgccaggtgtcccctggtgttagacatggcagtatcctgctcctagagggcagggagagggggaggtcagtcatggactctttcttcagtctctttatgtgcaaaacactttcctgaaatgcctgcctgaataaaacatacttatttccagagattggaagaaaatgatgatgatgcctatttaaactcaccatgggcggataacactgctttgaaaagacattttcatggagtgaaagacataaagtggagaccaagatgaagttcaccagctgatgacacttccaaagagattagctcacctttctcctaggcaattataatttaaaaaaaaaaaaaaggccacttactgccctctgtaaaagatgttaacatttctagttttcttttagtgtgaatttttaaaatagcagttattcaaggttttagaacttaataaatacctagtcagaagaaaatgtgtaaatcgtttttgtttcaggactatttagtatgtcatggttttctttgataaaatactaaacttttggccgggcgcggtggctcacgcctgtaatcccagcactttgggaggccgaggcaggcagatcacgaggtcaggagatcaagaccatccaggctaacacggtgaaaccccgtctctactaaaaatacaaaaaattagccgggcatggtggcaggcgcctgtagtcccagctac

SEQ ID NO: 102128 - DNA, 1049 bp, Homo sapiens
acctccacctcctgggttcaagcaattctcctgcctcagcctcccgagtagctgggattacaggcatgcaccaccatgccgagctaattttgtatttttagtagagacggggtttctccatgttggtcaggctggtctcgaactcctgacctcaggtgatccgcctgtcttggcctcccaaagtgctgggattacaggcatgagccaccgcgcccggcctaaaacttgtcttttgagataaaactccaactctggcttccagagttgcctctcagccagccttctctttcagccttccggaggcaaaggaaacaagcgtatttggggtaggctgtagcttttcctttcataatcctgacggttgcccagaggcctctccgttcctccaggcagacacaaatttttgttggcttatgtaaatataggttcacgtataatacaaatatgtataatacaaatgttgatttcatttcttttacctttttgaagaacttaacaaagttaagtaggggagatttgaatattgtggccatcgagtagctctccagacacttgattgacttaatatgtatttgatataaatggttttttgtaattgtcttcagcattttatacaaaggctagtttatagagggaggagcgtaaatttataccattgatatacagataatgtgtatctggaggaagagaatttaaggctattgaaagaagtggtatctgtatctgttgcttgtatttgtgtgttggtgatattagttgctaccgctctcaactgcaagtctcttgactgatcaccactttttcttctgcttctcctggtttgctcagcagaactgttatttttaaaccaatatttctcaaacttaccaagcttttgactaatctttgaagagcctcagcaaaggctgccctgaagctctgtgcctgttaatataggaaaggctttatgaagctctacaggagaggccctggttgagcccgtcgtttgcgtggtgatggcatctaggcatgtgagcacgtctcaggccatggcaagaaaacagtggtct

SEQ ID NO: 102129 - DNA, 1044 bp, Homo sapiens
ctcacacgggtaatcctgacactttgagaggctgaggcgggcggatcacttgagcctaggagttctagactagcctgggcaacatggtgaaacccagtctctactaaaaatacaaaacgtggtgacacatgcctgttgtcccagctactcgggaggctgaggcgtgagaatcgcttgaacccgggaggcaatgctgcagtgagctgagatcgctgcagtgagctgagatcgcgccactgcactcctgcctgggtgacagagggagaccctgtctcaaagaaaaaaaagacaaggatgaataagaccagtaccatgcccccgtgtcaaaggcccaggccaggtctggcacatagcaagtggcatataaatgtttgttccataaaatagtgagccagatgggcaagacccctgactctttggagcttacattccaatggggtatgaggtgttatgattgtgatactgtctttcacttatttttaagaaatggaagaattagccgaacatggcatatttctccctcctaatatgcaaggactgaccgatgatcagattgaagaattgaaattgaaggatgaatggggtgaaaaatgcgtacccagcggaggtgcagtgtttaaaaaggatgatattggacgaaggaatgggcaaggtaagtgaggatttctcttctatgtgcatgcttgatacaggcataagtatgaaaacagttcctttttttttttttgagacggattcttgctctagcccaggctggagtgcagtggcacaatctcagctcactgccacctctgtcttccaggttcaagcgattctcctgcctccgcctcttgagtagctgggactacaggcatgtgccaccacacctgactaatttttgtatttttagtagagacggggttttgccatgttggccaggctggtctcgaactcgtgacctcagatgatctgccggtctcggcctcccaaagtgctgggattacaggtgtgagaaagcagttctttacgtttaaaaattgacctcgtcatttctctacagactta

SEQ ID NO: 102130 - DNA, 2638 bp, Homo sapiens
ctcttggtcataacaaaagcagggcttcatcttcacttgatggctttaaggacagttttgatctacagggccagtctacattaaaaattagcaacccgaaaggatgggtaaccttcgaggaagaagaggattttggtgtgaaagggaagtcaaagtcagcttgttcagacttactgggtaatcagccaagttcattttctggctccaacctgacattgaatgatgactggaataaaggtacaaatgtctccttctgtgtgttgccgtcaagaagacctcctccacctcctgtccctctgctcccgcccggcaccagccctccagtagatcctttcacgaccttggcctctaaggcttcacccacactggactttacagaaagataacgccatgcaatagaaaacagtgggtacttgcttttggcaggatagagctaagagaattgggcattagtatttcattatgtgcaataagtcattgtaagtgcactgatatcttcacaaaacaccactatttgatgtgtacagagttggactatgtgtatattggaaataaggaaaaacccttctcattgttaactggagttttgatgtatttctctttggatgaataggagacagtagtagccataaaaagtacttatactttagaaaacagtccttattcagaaacttttcggtcagtcttctgaagaatctcaaaaagcccacccaactttcagctgacatttccaccagccctctcatacttgttaacaattggtatctttgagtatttaccaaagagctgccaaggttacagtgaacagagttttgaaaggcattgctttaaaggaaaaaagtataggtatgtgtacatatataatacatacaaacacatgtacttctgtatacatttacatatttttacaattcatactttaatttctaggctataactcagaccaaattatacctaaaagttccaacaaagtccctttttcaatatcacattaccaaaaagatggctgcaaatgtaatttggacctttcattaattttgttttcaaaactagaataatctcaccacagaatcagaattttctaccgttccacacccaaccccttcaaatacacacaaccttgttacttttcactccagcaccttcatacgcttttctccaggaggaggttcttgcagctggaaacagcctattttgtggtcactgtcaagtggatggatattctagcgctcccaaaaaagcactatggccttatatgcagggaaggcacataccaccaagttcaatgagaaatattagagctaaccgtactctcttctctgcgtacgttcgagtatacgttgcccatatccctcccatattttctttttgctgcttttgctctggaactttgcttttagcagggaaagcagctgtcccctgagtgctttgaattgggaatatacccagtgtgtgttctcccccctcttacgaggctacataacacatctatgatgctgctttaagtttttagaggctatacctcaaagtagctgcggattttgtctcctgcactgccaatatgcaactgatcccgcttttattaattttttgaagaagtacacagaatttttacagaatgtagtattttgatatcattaagtaaaccaatcagaaaactccttgagcaatagttgtttctttgtcagtttcagttacaatcatctttacccattaagacttacattaacattccttttatataaagagttgtatatgtccacctaaattcctatgtccacacttaacctttaaagatgtacattgagggaatatcaaaaaatagcgttcatggctacgaatatgtagaatgttaaaagcacagcaaactgcactgcacttataaagcaaatctattagaaaaaaagcatttttctaaatgctcaaatgttatcaaaatactatatttatagaagtaatcttctctgttaacagccaagatttgctgttagaaataactcttgtgagttttatattgtgctttttggaggttctaatcatttcagcagtagcgtcttaaacagcagtattactataagcagttgcttcaaaatgtgaattaacttgttgaaactgtggctttaacatccatgtgactagtgtatatggtatttgctctccattagcaaaataattcattgttaggtaaacttcactagtgcaaattgcagatctgtgagcaatgtttcctattgaatataaactactgtctaaaatatacatatcagcagcccagcctttatcaggaaaattatacttggcaagttgctgaaaatgcacaaagttatgaaagttaaaggtatgctgcaaataactagccattattctatgtattattaaatatttactagttctgttaaaagcagagcagaagttagacactaaggatctctttgtgaactctgtgttctctatattagattgctgtttatatgtaagaattttattgcttatgtggcatacaatatttataactataaactttatagaagtacagtattaaagtcagtggtacacagacattctgtacatatcctgtgaaacgtgctgtcatatgaaataaatatatctgtctttaccatgctgacttctttgttag

SEQ ID NO: 102131 - DNA, 1149 bp, Homo sapiens
tcaaatcctgaagtatctttttgcctcagtcattgatatcaaactccttaatattagatacacagacacacttttctttcttggagggtggggtcttgtttacatgcagagtgtcattgtgagggatcacaaagtggttacagtttcctccagggaatgcccaatgctgggggccaggaggcaggtgaggaggagtctttctatctttttgtaccttttgaattttgaaccgtaaaataatgcctattttaaaaataataaaaaaaattttaaattattggaagtagctgttaagttgaacaatttacaagattttcaaacctgatggtgagatttttaaatatgacaagtttgatattttgtaatgacatgaaatagttttagaattgaacatttgtaatttttacaagtctttacttatcctattccaaatctacaaggtatttaaaacataatgtatatgacccagttttactttttattatttatcctttgactttataattttgtatagaagagattcatttaattcgagtgattatataacatgttatacgtcctttacaaagtataaaaaatcctcacttatctatctgacttctagcatcttagtcatctttatcagctgagagccagaaataaggaaatgcaactggaagtaaaggaaccgaactcactgctatactgttactgtgagacctggtagaaaaatcacagcattctagacccatttaatggaggatacagcaaccttgtacctctcagtataaacctattcctgatctcctgtccactgccagagctgatacataaaactctgagtgttaaataagagtctcatgtttactaggcaggaaattctaaagtacttaatatatttctgggtgatgtctctgaattgtcaaaattagttttgctatttagtaataggtttagatattggagaagatttacctcaaaacttgcttgaggatactagattttaaaaaataatggtatattatagagggattatgatttcatttttaaacaaaggtaaattccaaatttcttgtaaggtacaagtttcttgtaccttccaactaatacattatgaagtaaattaatgatattaagagtatcatccttcagaaaatttgagtaagataa

SEQ ID NO: 102132 - DNA, 1035 bp, Homo sapiens
aaaaaaccaaaaaaaaaacaaatctcagggtgttttttccccaaagtctcctagttgctcaggtatgtatctctctatctccttgtatattttaaaatcatcccagttttccccataaagacagcattgcacatggttaagaaccctagccctgcagccagtcagacctgagtttggatcctggctctgctttctgtgtggctttgggcaagttgtatatatttcttcatcttaatttaaaatagagatgataaaataatacctacttctgagggatattttgaagatgaaatggaaatgcctgtacagtacttaattaacataatgtctggcacatagtaaatagtcagaagtaaacaggaagattttaaaattcatcattataatggcttcaagtagagagcacttaaaatgacaaattagggactaataccatagaagaaagtaaatgagatgcaaaagcaaatgttttcacagaattttacctgtggaaggtaagtaaatgtctcaagtgttatgtttcctatctgtagacgattcctcctcgtgctggagttatcagtgccccacagagccacgcgcgggcatctgctggaagactgactcctgaaagccaaagcaaaacatcagaaacgtcgaaaggtaggtcctctttgggaggctgaggcaggaggatcacttgagcccagaaatttgagaccagcttgggcaacatagtgagacccgcctgtaaaaaaattaaaaactcttaaaattagccaggggtgatggcacatgcctgtggtcccagctactcgggcggctaaggtgggaggatcacttgagcctgggaggttgagactgtggtaagccgtgatcacaccactgcactccagcctgggcaaaagaacaagaccctgtctcaaaaatcaaaaatttttaaaaattgagagaaaagaaaggtagatactatattagaaatactgtactggttttgttgtatatttttctctttttccttctgtcatctcccaccttctacaacatatattcaga

SEQ ID NO: 102133 - DNA, 1673 bp, Homo sapiens
ctctgatcaagcctgcttttccttaggtgatgttgatgactatagtgctgaagtggaggaacttcttcctcagcatctccagccatcttcaagttccggccttggtacttcccccagctcttcaccccgaactagtccctgccagtcacctacaatatcagagggtcctgtaccttcccttcccatcagaccaagccgagcaccgtcaagaactcctgggcctcccagtgcacagagtatgcattttatttgaaagttttgtatggcttcctgtggccaatgtgcttgatgttggagagtcatcgtttaagtttcatacctaggtgataaagtgcaccctgttttctccggtacagaataggaaaacttgtagatgataagctctcaatggaaaggaaacttgctataactgtcactagatgacaattgttcttaatcttttttctatgtggttaggtttgtctatgtcttataactgatgattttctatggtatgaacccgttaactatttgagctttttcttctctctactggccagactacaaaatggcttaactcaaacaatactttgtgcatatcaatagggccacttagtaaattagctttcagcacctgaggcctaggtaagaagtcagcacagaggtagcattattgctgccatggtaccaaagggcagtttaatagtagactgcttttgttattcatactgaaaatacatgccctttctttacaccattgtgcacattttatagaacattacacatatatatgaaggactgttcccttctgtcaacagctacttagaagctgatcttcttacctcctgtgcgctttttaggttctcctattgacgcgcagccagcaacgccgctgccgcagaaagaccccgcccagcccttggagcccaagcggccgccgccgccccgcccggtcgcccctcccacacgcccggctcccccacagagacctcctccgccttcaggtgacaaccttttatttccatttctgctagatgtaaaattcttcactctattttaaaatgttttgcatgttttccaatctctagcttctggattttacagttttttctatcattattgctatttcttagcttttctctaaagaacatggtaggcgcaacagacaaggtagagtgtttgcagagtagattcctctaaggtgttttcacagctgcctttagctgccttctcaccagccagccagagaggtttattttgtttttgctaatttgatctagttaggcatgtaaactgttcttaggtaaaattaggtttaatttttttcaaaatcctcatttctggatgatttataagcataaaataattaaaatgtactaatttctgtaaaagtataataaaactggagagcatacgtattaatgtacaattgtatgtatttgtttaatgttcttttaaattaaatatagtgctgttacttcaattataagcatatgcattgaataatagtttttgtagtacgtagataatatgtaattcctgcatgatacttgatgtcatggatactatagcaatctttgacatttcacttctgtatttaatgtcatttcctttctgctgcctattttcttatgaactataaggggctaggagtcctgcacccactagaaaggaatttggaggtaaccatttac

SEQ ID NO: 102134 - DNA, 1017 bp, Homo sapiens
ttctgactgcagctgaagatctagatcttctaaatgctagttttcaagatgaaagcaaaattctgtacacgtggactccaggcactttgctgcactatggaagagctgagctgaagacttctgaccacaggtttaagcagtctcagtttttctaatagtgtttgaaatttgtttgaaatacacccttttaaaaacatttctaatacatctatcttcctttatgccttaaggcctgtcgttgccctgattgatatagatatatttgaagttgaagctgaagagaggcaaaacatttataaagaagtaattgcagttcagggtccaccagatggtacagtattggtctcaatcaaaagttctttaccagaaaataatttttttgatgatgccttgattgatgagcttctgcagcagtttgcaagttttggtgaagttatacttataaggtaagatgtttattatgcaaaagtagcttgtgattcataaacaatcatttctatatagaaatcaccttatttggggaaggagagaattttaaaaaagaaagataccaccttatttagtgtttagtatatgagtatttttatttccaaactaaagcaagatcatactgtggatattattctgtaggtttttataactgaattctcaacttagaaagtttaaatgaatagtgaaactttttttttaagacagggtctcacccagtcacccaggctggaatgcagtcatgtgttcatgtctcactgcagccccaaccacccaggctcaagcaattctcccacctcagcctcccaaatagctgggtctgcaagtgcacaccaccacacctggctaagttttgttttgttttgttttgtttttgtagaggcagggtttcaccatgttgcccaggctggtctcaaacccctggccttaagcgatctgcccagctcagccccacaaagtgctgggattacaggcgtgagccaccatacccagctaaacagtgaaactttatgtgaacaattgaaaaca

SEQ ID NO: 102135 - DNA, 1032 bp, Homo sapiens
tgctgccaagctgtccctttgaagtcaagctgcttctctctgacatccagctgcctctcctctctctgccagctgagcctggggtttttatgggcacaggattgggggcaaggcaggccatgggtggttttggaaaaagcaacattcgagcgagaaaacagggatataagttctcatttggggctgtggtaacagactttttggcttgagggtgggacccagcaaagggacccacccacttctgcccagaatttccctgtctcctgtccctatgggtatgaaaaatgctatgtctcaggttatttttctaagctttgttccattcagctagaagtgttcatcagacgcatacagatttcttctgagagcatccagcatgtaatagacatttaatggatgactgtctgaatgaaaacagaacttgttgctgtttgggaataacttactttgtatatgtttattttaggtttttagaggatttttagaaggaaaggtaacctttgctccgacatataagtatgacttgttttctgacgactatgacaccagtgaaaagtgccgcacccctgcctggacagaccgtgtcctttggagaaggaggaaatggccttttgatagatcaggttgggaaatgggcttctttatttaaatgaactaatgtaaacttatgaggaagcagggaatgacataatatcaaatgaggagaatattgtttttcaagaaacattaactggaatagaataaataaaatttaaatatgtcagatttttagaaatatcagatctgtttataataacttatttaatttttcagcctattttcatataatttcatgtaaagagaagcaaggaaatatttttgtgaaatttttaattgaagctaatttaggtttttaagctaactttagtggtttgcatatgttttgaactgccacttgtctcttgaattgtttatgaaacaccatttagtcccagtcctttaagtaatcttggaaataaagccagatcttaatttttactaaataaagcataa

SEQ ID NO: 102136 - DNA, 1094 bp, Homo sapiens
cgaagtctccctgggctgctttctcaggcagctctgttctccgttagtccttgtagtttccagagtgccagcagctagacagagtgatgtgtcttactttctggatctctcctagttttcctggatttctttcacccagaaaatagcaaaaagatcaagattatgtttttcaaatatgaatgtgaaaaattcctcccaactgttaccagcaatttgaggtagtttctcagtcactttattctttgtgccttttctgaataatttctctctccagttttatgtgagattttgatttgagaaatgatttgtttctgtgctgtccctggtaaaaactttagcaagagttttttcaaagtgaattctgaaagggcttaagaatcttcaaggataaccgtcttaaagaagcaaacttaggacaccctaatagaaagtaaattttaataatttcattccactcaagagtgtttgcctttaatatgaatttggttaaactcaaaacacagaaatcagtctttatgagacctggtgttatgttgtgttggatggggttgctatttgcctgaggctatatttaaaagtatttcttggatgcttaattttagataaaagaagtaagccaactgatatatttgcaattggttttgaagaaatggtagaattgaatgctggaaacattgtgagtgcaaggtaagctagccacattaatccactgaaaaatttgccagttgagggaaactatggaggacagataattaagtaattgttacaaggatagtttgaaataataaatggaagggtgctcgtaaaactgtaaaagagcatttctcatacttttgggtctgaggatctctctgcacacttaaaaatattgagaatgttaaataacttttgctaatgttgtttatatctttgttatattaggaattaaaaatgaaaatttaaaaacatttaattcacttaaaaacaataataaacctattacatgctaacttaaaataaattttttgaaaaataactttttcaaaacaaaaaatttactgagaagggtggcactgtcttgtagttttccaaatctctttaatgtctagtttaag

SEQ ID NO: 102137 - DNA, 1080 bp, Homo sapiens
aatactaagacatcactcgcctttttcactctcatttcctcataagactgctatatcttggtatcataagagaatatcataataaaataagatcatgtggtaaaaggtgaaagtagttttgatgtccttttcctgttaccggttagctaccaatgaagtacagatttttaggttgaggtgcttttaaggttctatgctgagaatttaaccaggatagaatgtggtttagaaagggaaaagatgggttgtagaccaaaaaaaaaaaaaaacgggagagattgaggattcaaaatgtattgaacattcattcatttaacaattatttattgagcacttactgcgtaccaggtagtcttttagttactaggagtattcccataaagaaaacagactaacatgtctgccctcatggattttccattctcatgaggggagacagttacaggataaataaataaaatacatagtttataaatgtgataaatgctatagagaaaaataaagcagggaggggataatggaaagttaagggcagagtgcagtttaaataaagtggtcagagaaggcctcattggaaagtaaagacttgaaggatgtgcgggaagagtgttgcaggctgtgggcacagccagtgcaaaggccctgtggtggaagcaggcctcatatgtttttgaaacagcaggaaggccagtgtctgagcagtgagtgcaccagggagagtggaagatgagggtggaaaaacaagacaaattgttgagggccttgtggaccattgtttaagcactttggcttccactctgagtgagatgggaagcatttagtagtgatttcattttcagaaatatcagcttgtatttttctcaaggagccattattcatcaagctgcctgtcagtagctacaatcttaaatgtaaatgttcttaaatgtttttgtttggagaaaaataaaatttatatttttaccagactcttaatgaaaattgtagaaagttaattgctatattcctaaaaatgtatagttcattggatttgtacattaatgtaccatttcattgaaacagaactatttgttctgcatg

SEQ ID NO: 102138 - DNA, 1976 bp, Homo sapiens
gtgaattttggtggagtggaaattatgctggatcttgacagattggtgatgaagagacacaaataacgatttgtgttccaggtatacgctaaaacagccaggactctggtttgggaaggaatgggagacaggcctctgaagtagtttgaaaacagattgctttcttttctttctcaatattaatgaaactcattgatctcaatgaattttgttttgcttttttaaaatgggtcccctgtctctgggctagtcatttaaacatatgtaagttttgttctatatggataaatgtaaacttttttttttttaacatgctgtagcttgcatatctgtttcctttctttgaaaatgtgtgcttggaaaaattgattgcagaagctctaaaatagccatgaaatcagtagcaaattttctcttagatatactaattaatgagatgctgctatatttttttcttttagggaaaacataaaacagatagtaaaactccttgcaagtgttcgagctttggatcatgctatgtctgttgcaagtgaccacaatgtgaaagaatttaagtctttgatcgaaggaaaatagatctatgagactgaaaaacctatttgcttgattaccattcccaatgtgtaaattttgtatatatgtaaagtttcttaaactgtaaaatagcaattcttgttttaatacaaaaaacattatattcaatactgtgtccttaaatgatatttcttcagaatgaaaggaattcagattatttctaggagtctatgaatgttttctttactgcctgtcatactttgtttactgaagtattttgtatggtcatttaaattaaccctctcagttaattgtcccctgtaaacgatgtgtgcagtgtaaattgtgtaattatgcatatatatatttataccaccatggacttactttcacactggaaatttgtggtgtttttccacagaggaagccttttaacagcagaaaattatccggtagcaaattgtcttagggaaattactacactgttgtaacaaaagggctggcaagtgactaaatgttcattaccttttggttagcgttgctatcactgtagctgtgctgccttaacattgagagttgagttgtggacttagtcattgagtgaatgttgaactttcttccttgaatcagcgttagagtcaaatgtgggtttaatgtgaatgctaaatgaatatgcaacatagtttcaaatggaacatagaaatttcacttttgaaaataataaacccacaacctaattgcatggttttgggctgaccgtcctgtctcattcatgattttactccctgcccagcttgcagatacatgcatttgaattttagtagtctgtcatatttaaaatcccacatatgtgagttaaatatgcaataaagaatacgccttgctgattagccacacccaggcaatttaatatccatggtcttctataatgtttataccacattgtaaatattcagagaacttgttttaaagtttatgctttctgattctgtgattttcaaaagaggaatttttttggaaattaaggactatcgtttgataattatatatgtaattaagatttagccaagcattaaattaatttttaaatatatcctttgttgtattttcctgacgactaaatttgcagcatttcaaatgactctaataaagtgggactgtgagcaggcccatgtgtacccttgatcaggacataatatgcagaacagtgtcatgcactgtatttgctctgttaattttatcttatccctacatatttgtattagttcattctcacgctgttatagggacatacttgagactaggtaatttataaagaggtttaattgactcacagttccgcatgggtgggaaggcctcaggaaacttacaatcttgacgaaaggcacgtcttcacagggtggctgcagagagaaatgagtgctgagggaagggggaag

SEQ ID NO: 102139 - DNA, 1033 bp, Homo sapiens
tgggggtgctgtaatttcatttttataccactcatttttacatcaaaagctgctggaaaaggaaattcagtatatttaggccatcctagaagactggaaaatgaagcagttggttgtcagttttatgttactaatttactcaaatattggacagattatcttttgctttgagtgcctaacccattggttggggtaaaaatttaggtatattggtttagttaatgtaggaagtcagatttaaaagaatatttcttcagagtaattgctgtagctcagaagcacgtcttctggtgaaatacatttatacccattaactagactttgcttttaatactttaatttattctgtcttaactattttattttacgtctttcttctccacaggtaatcaattgtttccccaaacaatggttcatgaatctgaaaggagaaaggactatttctcagttagaaaacttttgccgataccttgtacacttagcggatacaatttatagaaatagtatcgggtgttctgatgtggaaaaaagaaatgcaaggtaattttgtaattaatgaaatggtaatctagagttgtttagttgccagatttagtattaaaatgttttaagtagagatgtttatattttagtttaaattgtatgttcacttagtattataaacctaccaaaaatgcacataatttttcattttagcagtttttactttttttcagtatgttatttatgaagatactaaggaaagacttctggtaaggaccaaccctcaggggagtgagtaaacggttgttttctctgtctccctctttgaagaattagagaggtctcagactctcttgtttggagtttcattatgcagatttaaattcaagtttatctcccaatttggggagattttttgttttaatcaatattatgaactagaggttatcactcatggctttttggggcaacttatttctaatttttatcaagggttgtaagaaaagagtgagtgaaccattagcctttctgtggacattaatttatgggt

SEQ ID NO: 102140 - DNA, 1937 bp, Homo sapiens
ttctgtgaacaccaaaaattcctttgtcctatgaacaccaaaaatttgagacaggtctcagttaatttagaaagtttattttgccaagattgaggacacacctgtgacacagccttaggaagttctgatgacatgtgcccaaggtggtcggggcacagcttggttttatacattttagggagacacgagacatcaatcaatatgtaagaaatacattagttccatccagaaaggtggagacagctcaaagcaaggcccccccattggggacttccaggtcacatgtaggtgagagagggatggttgcattctttggagtttctgataagtttttccagaagaggcaatcagaatatgcatctatctctgtgagctgagagatgactttgaatagaatgggaggcagatttgccctcagcggggtccccagcttgaagaggcccaagatatttccctttcacagtccattgaattgcttttgtgcctttgttgaaaaccagttaactatatgtgtcatggaagggtttaaggtaagtaaacaaattgcctttttttttttttttttttttttttttttaaagagacgaggtcttgtgttgcctaggctggtctcaaactcctgagctcaagtggtcctccttccttggcctcccaaagtactgggattacaggtataagccactgtgcccagccataaattgcctggctcagccttccgagtagctgggactacaggcgcccaccaccacgcccggctacttttttgtatttttagtagagacggggtttcatcatgttagccaggatggtctcgatctcctgacctcgtgatctgcccgcctcagcctcccaaagtgctgggattacaggtgtgagccaccgcgcccggccgtaaccacaggtctataaattaccatttttaagattactctgtctgctatgtggagataatagattgaagtaggtatggatagtgatagtgaaaatgggaactggtatttattgtgtattttatgggaactagtacttactgtgtgtttactatgtaccaagcactgtcccgcaccttttacatagattatcttgttgaatcctcagaatggctcaatgaggtacacgctgttttttcactttactgatggggtagtgaggcacacaataacctgcacaaggtcattccattggtaattagagatgggaatcaaactcagccagtctgactcttgagctgctcttctcaactgggcttctgtgggagacttaatacctaatgccctaaggcctccattgtctataatgaattcttctttttcccctgcatctgtaacagtactagctatgtatcattcttgggagaactgagtaaagagccacacaaatcattttctgtaggtttagaactcttgcagagccctgcttcagaaaggctactcagtgctcttgctcataatcactggagtaactgcagggttctgaagagattaaggtgggtcagattcggaggatggcagcaggaactgagggaaatggacagactggatggtcgtggagacacacaacttgagagagaggtcaggaatgacctccagacctctgccgcaagcagctggttgaatagtgttaccatttactaagttgagaaacaactgggaaactataagtttttatggtgggatgggatggggctttcattttatgatgatagctttcattttctatatattgattgagcttgggtagcttgagatgcataagtgatataacttggttgtagttcatgatacatggtagccatgcagggttgtagtcagactctcccatcttttgtgggcagcgcggggcggggtgggggtgtgcatagaaccagctagagtgtaattttgaatggaggacacttacctaagactcagcactccctgatagtactgtctgcaatg

SEQ ID NO: 102141 - DNA, 1050 bp, Homo sapiens
acatttaagtctttaatccatcttgacttaacttttgtatatggtgtaaggaaggagcccagtttcaattttctgtatatggctagccaattctcccaacaccatttattaaacagggaatcttttccccattgcttgttcgtgtcaggtttgtcggagatcagatggttgtaggtgtgcggtcttattgctgagttctctattctgttccattggtctatgtgtctgtttttgtatcagtaccatgctgttttggttactgtggccttatagtttgaagtctggtagcatgatatctccagccgtccagtttttagttgtttgcaaccaaaggttaaatccagttcttgtttctcttatcatagctggaagcagaaatagccactattttagtatttgggtaaccttttaaatgtcttttaggcaaaatgtcgtgactttgagaatatgctgtggtttgaatctttgctgttttatggttgtgaagaacgagagcaagaaaaagatgatgtagatgttgccctactacctaccattgtggaaaaggtgattcttcctaaactaacaggtaaatctcctgttctctgaattgagcattcagacacactggctttctcaaatctatttttatgagtttataattcagagcatgtttccttatagaaattacatgagaaataatagttaccacctggcccagagatggctagagggcagaggggttcttatcctgggacttgaagaccactttagggtgggcctgtagttgagtgcagtaattgcttcataggtgaggtttagaaattcaaagactgactgaagcaaaattatacagagtttgagggaggaggatatgcatttatgtggggagcaattaaaatgctttcataagttcctcaaaaaagattaggaatcattgatacaggaatctattttaaatactagaaatgttagtttgaaattcttgatgccaagacaacatttctacagaaatcctcttttttcctaatctttattttccctgagtaccagaaataagaataatctatc

SEQ ID NO: 102142 - DNA, 2066 bp, Homo sapiens
ccagtcgtttgggttgtttgcctccccttactgtcatatcttcatagtgtggaactaaaacgtagaaatgagggaagtatagtggacagatgtttcccccaccccttcttttacctaggcaagagattaggggagtcttttttgattaaagagagtaggtccaaaataaagaccctgaaacactaaaatctggggatccccaacaaaagaactggctcagtacctagtgatccgacggagacacctctgttagacagctcctgcccacacacacagcttccagtcttgctcttctatatgaacaggcagttaacgatgatcataaggaccaacctgagcagcagaaccaaagggactgaggaaacagacagtgctggtacaagtatgcaagttttctgtaaacagattactttcaaacagttgggagccccagggagataatagaaggtatcctactcaacaggagtatatagaatgctgtagaagaggaatattgtaagaacaagaactatctcttgaaaactaaaaatatgataactgaaatataaatttaaataggattggaagctaaagctaggaaattaccctagaatgttttttgagaaatggaaaatacgaagaccaaaaaaataaaataaaactatgctgtgaaagagaaagattagcatttgagaaggcggaagttggtcctgctcagatgcggttttcagatgccttattctaaaaatagtgatagaaaacaaatttctacaaagcaaaattacaataaatttattaaactcttgcaacaaagctgttttcttatgtcttcctatgttttcctgctgtcattcaatgtgatgctgaagttcttcctccttaaaaatgtaatatttttccctttgcacaggtaatttagagttttaatttatttggtcatcatgatagctattcctgatagctgtcctgttacttagacataaaaatagtgagtaagcccaattacatatttgtagggttgttgaactcttaaaaagaaatcacttctttaatttttctactttttaaaatgggaacgcagaataataatgaaatttgttctaaaccaaaaacctacctggtttaccagttattgcagaatcttgccgttgagattagcaagcagtctgtcgtaatggcttattctgtgcaaactctttcctcaagattgttgaaagatggcttttaattttaactgttgttgttttgcagacaaagctctgatggcaccaaatcttgactcctttggacgcgatcgggcactgtatcaagagcatgcaaaacgtcgcattgcagagcgggaggccaggaggtaattctcaaaacccttgctctggcttgtttgggaagggaggagtctctgttatctagtttgggaacttgatgtttattatttaggactcgtcgtagacaagccagagaacaaaccggtaagatggcagatcaccttgaaggcctttccagtgatgatgaagaaacttctacagatattactaatttcaatctggaaaaaggttagacatttatttggaaataagactcatcatcagtttagtttctacttgggtatggtttttaccatgaaatgatttgaatcttcatggtctctgcattagaaccagacacttcttttttaattgcagaaatttgcatgcctttttattagtgaatatcatgatgaattctcaaaaataggggtaacatcttctcatagggtgtacttagtatttgcataataaatgttgttactgttccaaatggtagaattttaagtgactggaaatgtgtcaggtccttgagggcagctctcattgcagcctgtctggtctggaaaggtaaagcttggcagtagagcactcagccctgaaggaaactcttgatttggggagtcataagtaatctcaccttagaggaatggttagtactattatgtgccaggcattttcagaaggatcccaaataaaagtcttcatttcccaccattggctataattgtttggaattatatcaattgcacaccatttggaacttagttggagaagcttctt

SEQ ID NO: 102143 - DNA, 1577 bp, Homo sapiens
cacagtgaaagagtttgagtttagggactgggacatgttgtgggtagggggagggaagctataacttaacaaatgacacaactccaagataggagagttttgagcttcatcctttggataaagcaaactttttgtaatttctttttaaatgtttctctagtttgctttatgtactgtgttttttagtaagtcagttggtgcttacaattcttgaaattttgtatacaaatggatagaaattgaatttgtacttccatcattatgacatgtgttatggaaaaccagaattagaaacctcttgttaaatagttcagcggaggtcctttaactggatgttttaaaccgtttagttcctttttttccgttaccctccatattcttgagtgcgctaataggaattttcctagtgtgaattccttgtggtttcttttgtcatttctttgttccctttgtcagcatttctcaaatggaagtgtgcatcacaattacctgatactcgtttaacatacagattttctggttctatccccagtgattcttactaggtcttcagcatccagaaatttgcatgttaaacaatctctccaggtgatcaaatgcaaatagctctaatgttattctttcagaaagcaatgctttgctatacatggtctctaagtcagagagacataggatccctgaaaaagcatcctcctatatgtcagatgggttttggagaggcataaacagatggtaatacggccctcatagctgaggtagtctcagctatgagccctataaatggctatgaccttctgtttttgccactgaattttaaattggattattgacattagccacctacatgactcatgcatccctcccagatcacttttgatccagacagaaccagatttctggggcagattacaggtaaccattatactacaaagggaggtaattttcttttaagttagatggtttgtgtgagctgtacatttcatcaaataccttttcccatctgtaatttgttcttgagaatatggagctatttacttagaggggatttgaaagaagagttgaattatttatattagtttgattgaaagttggaaagaaattaaaagatactgggaaagtgaaaaatacagtcctagagggagtatacattaattgccaaagatttgaggaaaatgacatgggatgctggagaatcaattcattttctgatctgttttttaaagaagtaaagaatagtctgaaattcttctgtttagatttataagcacttatctgcaattactgtgtataattcttacagaaatggaggaggctatcacttgagtcatgttagactcacctgtctcctccagtgcacattttacaaaacctatacatgcagtgatgttttaagtataatgttttttttttttttttttttttgagacggagtctcgctttgttgcccaggctggagtgcaatggcgcaatctcggctcaccgccacctccgcctcccgggttcaagcaattctcctgcctcagctacgcctggctgatttttgtattttttttagtagagacggggtttcaccatgt

SEQ ID NO: 102144 - DNA, 4994 bp, Homo sapiens
ttattattttcaaagttttaactaccagatttcatctatatcccatttcttttctaggttcaagccagtcaacccgcagaagtgaatatgtactaccagaacacttaccagacaatgccttacggctcatcctatggcattccttatagttatacggcctatggatcatcagatgccaaatctcaaaaaacagataatacagtccctttcaaaactcccagtaatgagatgactcccgttactattgatttggtaaagaaacagcttaaagacaggtagggcagatcaacttcttaaagacctgtccgctagctttctgttccctcaggcaacatgtagtctggggtagcagatgcagaatatcagcaaagaagattcactggcccagcttcaaaagctaaacagaagatgacttcatactttgttctgctaccttcttggattacttctgtggaagcctcgaaaaattataaaaaatgccactccatgatcttgttgaagacatttctgagtttgtacctcttggactctgaaaaagtgtagtcacgctatggggggaaaagcaaaacagtgagattttggttagcccacaaaactgtgaaatctgtaaactgccattttttgttttttgagaaaaaaagcagtacagaggaaaagatgccattccaaatatttttatgttctaatagtggagctaaatgcatattttaatattgcaagagtcctgacaccatagacctttggatgtaaatgtgttatatttatccttttgtgttcctaaggttggactccatgaaagaattgcacaaaacaaatcgacagcagcatgagaaacatctgcaaagccgagtggactctaccagggctattgaaagattagaagggtcttctgggggtattggtgaacggtataaatttttgcaagaaatgcgagggtatgtccaagacttgcttgagtgtttcagtgaaaaggtaagaatgcaaaaatactaatctctttgaataaggcaaaattagggaggtctagatggccttgtgtagaacattctataattctcagaaagtacccactgaactcaacattagaagtgatgaaaagtcatgcttcatttttcttcacttcattagtggcattatctcttaagggcaatataatacctttgttgaaaacagaaataaagataatatcttaaagcacatttaaataagactttggaaagtcttatttcaatatggtggtagattattattggcctgtgctgaattcttagaatataagggactcatctgataaaattttcttttctggttcaggtttaaacttatttttaaacgtttctacaagcaattctaaatatgcatataaagttgcaaatttttattagttttttttttttttttttttttaccctggatgatgattaccattgttgctaatagtttttatctaagtaagcctatgcttgatttctttcagaaaccatttcattggatatcattttttctaaggtttcatttctcccaagtttgtttttttcaataggatagtcagttgacaaaatgtttggcattcttatactatttattgtttacatttaaaattaggtgcaaacagctagtttctcaaatgacctcctaattgattttttttctttaagataaaagtattggttgaggcactggtttataagcatttgtggactttgcagccttatctttaaaaaaaaaaaaattaaaactgtggtccttaaatatcctgtctgaactttggattggaaggcacatttccctttgttattggctatgtagattagcttagaatctgtaagcatatagtgtggttaaatatgtatttcaacttttgttatctttgttgattacttgaataccctaaaaccaatggctgggaaaagatcattgccagactatgtcttcctgatggatctttcttcctgatgggtcttaatggttccagtcagtctgtggccagattcaggatgagataacattcaccatgtcctctctgtagggtttctcatgttttgtctttatcacctggtttctggagaagcagctgcagtctgagttatgataccacttgtggtgtatcagttgcttagggtggggaagaagtataggcttgtctgtattcctctgtgccgggagctggagtcaagattggaagtggaacctaagtgtcaagagttgacagtcatgtccttcctactggcaaaactcttctgagcccagtgggcatggtgggagctggtctcataacctttgtgactagagaaaggatctttttcttaaactatgctttatgagtttgtccctggagagctgcttcttgaagtgtcttggcgcttgcttcggaactttcttgagtaaattaagacattcataattgcaaacacaactctaaaaaatttgacagtaatatgatcagctagatcataccaaaagtaggacaacctagtttatagtttttaattgttgaattattagtgtatttcatctcgattaccttgttcctagagaagtttacttcagattatgctaatgtggttatacagagtcacttagattttttggaacaaatcttaaaccttatacagtgactacgttttaattaaaagagaggtagacatagcttcatttaaagatgagtattatatttcattctaacattttcatgtgtatttcattttaagagtactgctcagcttagatctttagaagataatcttaaaaataaagaaaaaacaaaaaagtactgctgagttgataatataaattgttatattggagatacttagaaataattggatactttgaataattatactataataatatttcagagttaaccgtaaaaagataaagatccctttttttttcctctttgcttatgaaagtttaggtggtttttaaagaagttttaaatatttgtaaatcattttaacttgccattgtttttgtttccctgtaattatctttcttgggttctttgccttaactttggccctaaaatagtaataattggtgagagttttgagtttggagaggataaagaaattgtcacggtgcagactcttgagataaatcaatattgttaagaaacttgaatgagagctcacagtctgtttagggcttttattctcagtagagtttttctctggacctccggtaaaaggcattccagttaacctaaagagaaaaactacattgtcagaatcttaactatatgttgcaaaattatattctgtatgatgccagcttaggtgggtagttcctacagtacaggaagcttaacaatctctaggattaaaagataaaagaatgcctcaggctcatttatctttagtacttcatggtttaaaaaaaaaaatgagggcatggggaagtgtaaatggcaatgttgtggcagtaattgctaaaaaaaaatcagattataataaattttaatgatagagtctctggactcagctatcaaggataatcattacagatttggggacattgttgcccatggtgtggcatattaaagaacaaaataactccattagtttgacctttctgtgaacatttgctacttttgcaatggaatcatgcaagtatataaaattgcttttattacagacatctctgtattccacctgcctttttttattttccatttgcagtctgttcagttcaggaagctgctataacacttggtgccagtgttcccaaactctaaataatgtgttttccatttgcactaaccatcaggaaactagaatttctggtttcctcaggtatgtgtagtggtcattagtgttacgtgaaagtctcatagcatttgattataacataaggtatttagaaaaagaaagttttctgttttaagttagctctcatgttcttttgtattctatatgaatcaagtaaatgctttagggatattaacctggaaaaattattgactttgtaagttcacaattcatgtaaagaaatttttataaaatatgggagaatttaaacatttgacaggaagagaacaactttttaaatttgagatatattgagttcagagaggttagtgatagctggaaattttattcgccctagtaattattttgtttacattaaaaaatctgtaataaagctacaaaatagtaaacagattactgtaacgtacttggtacatatgagtggcagagcaactgaaatgtccaaaattggagaattagcagactcttgttcttacctacttatagagccattgcacttttttggtaccacacagtgataatgttttactttgaactacaaaaatcgcaatgcagataatgctgctggaaaattaaaaatagatattaaaaagacttctaagtacttaaatattctctaagggaaaagctctaaaattgttgacatttctttacttgttctatgaatactgaagtgttacatttcttaactaatgtttgctccaataactaggcactggacattatagctctatgcatggattaaaagaagaagtgtcgtttcccaaacataaaacagaatttgctacttgtgtgctgttggggattcatgattattctgtccatagagagggtactttttcagaaatccggaaatagtatggaaccctcaaataaataagcagctgaggagtttggtgttacggagtgtgttgtatttttacaggtgccactgattaatgaacttgaatcagcaatacatcagctgtacaaacagcgagcttcccgccttgtccaaagacgacaagatgatattaaagatgaatcttcggagttttcaagccattcaagtcagtccatcttgaaggtttttattattcattaaacaaccttgtttacttagtgcagcctaattgaaaattagagatcttggagcttttttttttttttttaaagaaacaatttccttgctgttgtgtcaggtagatctaaaaatggtaacagcatgtacttgaattgtgt

SEQ ID NO: 102145 - DNA, 2056 bp, Homo sapiens
gttaaaaatgaaaaaaaaaattatagctaaaataaaactgctttggtgggtttttcctttttaccccgtcccactctttcccatatatattaccattatatgttctttttagtttcctcagtgacttttatattccatttaaactcaattaacaatcttttggattgcagacatagtatgggaaggaggtgccagcagctgaaacatcactgtgatgaggctatcttggattattttacccttcatattttcaagaaaatagaaactttgcatctctcatactgccatattcttaccatttgtttctaggagaaattccagatgcagcttttatacatgctgcaaggaaaaagcgccaaatggcccgagaattgggagatttcactcctcatgataatgagcctggtaaaggccgccttgttagagaagatgagaatgatgccagtgatgatgaagatgacgatgagaaacgccggatagttttttctgtgaaagaaaagtcacaaagacaaaaaattgctgaggaaataggtaacttgatttaattgaatagtaagcctattgcattgcctttttttgtttgttttaaggcagggtgtcattccatcacttaggccagagtgcagtggtacaatcatagctcactgcagtgtcttgactcgtggactcaaacagtcacccttgtctcagcctctcgagtagctgggactacaggtgtgcgtcaccacacctggctaatttttttatttttaatttttttgtagttatggggtctcactgtgtctggtgtcttaactcttggcttcaagagatcctcctgccttggcctcccgaagtgctgggattacaggcatgagccaccatgcctcagcctcccaaagtgctgggattacaggcatgggccaccatgcctcagcctcccaaagtgctgagattacaggcatgagccaccatgcatggcctctaatgctattaaatgtgatttgatattatagtcaagtaaaaagtatttagacttactaaattttatgttagaggactattcttgggtacaagtgttttattggaatttttaaaaactaatatcattgtgataactcatgttcattgaacatttattgtgcagctggtattgtgcttagcagtttacatgcgtaaattcatatagttctatattcctaggaggcattagattttgttccctttgttgatgtcaagtttacagagattaagaaacacatccaagattttaactattacattaatactgcctttagcttcaaggaatactgtgtttaaaacaggcaaagtcaggactaccaaatgagagaggagatcatattagacattttagtaagattgagttaatagttttgctcagttcttgtgaaatgtcaggacagcatcttttacctctttgctctttgggtgttacttacttttctttgttgctcatggctgtaggaattgaggggagtgatgatgatgctttagtaactggagaacaggatgaagagctcagccgatgggaacaggagcagataaggaaaggaattaatatccctcaggtacgacaaaagaattaaactaaaaattaaaagtagattaaaaagccttttttattttgttaaagtaaaaaattccgtattgaatctttgtcattcatttcaagtaacaaaatcccatgaggagacacacacacacacacacacacacacacacacgcacgcacgcacacagagacacgtaggcttttagaagaaactgcagtgtgttcggctttttgcagtcagaatgatggaggaatttccaatttcttagatgagtttttctcaaagtggtccttcagttagcattagcattacccggtagctcattagaaacgcaaattaccaaattatcagcccccagagacctacagagtcagaagcttggggtggtggggccagcaatctttgttgaacaagccctccaggtgattctgatgcacactaaagtttgagaaccattgctttaaatggaatgtttttgtgcgtgtagcttatttttttggact

SEQ ID NO: 102146 - DNA, 1021 bp, Homo sapiens
aaagtgatttgcccttaccttagctttaaaaccactatgtcagcttgtggtggatgtagttactcagaattgacagcacctttttattttagatattttgtttcggattcgttaataacttggtgatgtggtttttcagaaacattttgaatgattttttcccctctcaaatagatgatttaaggacgacaataataggaaaattttgtgaagttacatgtgctattcctttaaaaagtctcaaaaatctcattacttcacagtaatttaggaagttgacctctgtttttgagtctgtgacagacttgaaataattatacaatgattttggcatatgagtatatatatttgggataatttggacagcacgtaagatcatgtgaaagaagggaaaatattttcagaaaatagttgctacagacttcatttaatttcctttttaagaaaatgaagaagttttcaaagtgaagaaatcaagttatagcaaaaagatagtaaaattgctcaagaaggaatataaagaagatcttgaaaaatcgaagattaagacagaactcaactcatcagctgaaagtaagtaccaaactaattgaattcttttgaaatgacaaaatgaaagctctttctcacagtgatttgctgtatatcttctgaactcattcagtggaccctgtggttgtcaagggcccttattgagtagcagtacagttctgttatttaattgtaacacagatgctttgtaaatgtattttataagaagacagaattgttgccactggaacatttctgctgcaatgactagattctctcacagttttcctacttgtgtgcagactgctgttgaacagagaaagaaggtttctcattttagcctaagacacaggtttatttctgtttgaaggagtgttgtgcaaattcttgtattttgtagagacagatttgcgatttctttggtggtatttccacagtggattttattcttagagaacttttaggaatgccctaaatttaatattagtat

SEQ ID NO: 102147 - DNA, 1120 bp, Homo sapiens
gctctgctcatctgaggtgtaaaactcccagtgatgttggctgacagtgagaccaacatgccaacaacacagccagagcgatgccagagcggatgccagagaggagacctaccgcatcctatctatgggcagggatttggagttgaaagagcacattctccaaacatccaattactagcatgaagcgcccaaaaacccctgaacatgacatgctttcctccccctcaatatctgacttcctggaattcgggagacaaacacttctttgttggattcagctatccaagcgctacctattacacaacatagcatgaataccaatgaagcatttagttaatggcaagctttaatttctaagtagataaacatgcctcccatccccaccatattaatctgtttgtgagtccattcatcctgttcagggcctcttacaaatgtacctaggtaactgtggtaatagacaacaaaaagactaatcacccaccgattaatcacaattattttgacttagctactcttatgccagaagaaatttatgaactgatcttgtcaatgtattgcagggctccaaaacaaaaccatatataagaacttctaaaaaatctaaataaggtagggatgcatgggtaatttaaagagcagcaccaatgtccagttttgggtaaaagccctacagtgtctggcatatgacagatgcaggatcctcctttgtggtgtgattggaatgagatgagatgagcattatggcagagtgtaccacatttcagtttggcgaaagtaataacattcccccaatgactgaggagagaaaccaaacaatacaattcagtcttctccatttgctaagctccatgggtgtggtgggatacttggcatgcgacctctgagtgggagggcccagagctactggcagggccactacactaagggccagggagccacagatggaagggtcagtctgaagagctcaacatgtgtccaaagagtacagtgacagcaggaaagaggctaggcagacaagcagcaattagggtgtaagatgaggccacaaggcaattagaaatccaaaggaatcaaggctaaaaatgccagggatcgggtagacaggcaggaggcacaa

SEQ ID NO: 102148 - DNA, 1044 bp, Homo sapiens
agagtagcttaacttttttcacccttcacctcgctcccatgcccaactcctgacctcatctaaaatccttgcacttctttaaaaagatgcctggtgccttcccaggcaggaagcctttgcgcacgtgcattgttaagaggaaaatgagactgaatggagcttggcaacccaatggagctctcagagcatggatgtgatttgaagtttggggaggatattccctcccacccaacctccacttctagggcatcttaaggatttggtttctgtatttacgacactgacataaatagttgagctgattttatttatttatttatttatagagacaggatctccctctgtcacccaggctggagtgccgtggcatgatcatagctcactgcagcctccaattcctggcttcaagccatcctcccacttcagcctcctcagtagagtagctgggactaagatgcactccccacccctgactaaattgggccaattttatttacaaacagacttcataacaggtcaattctggcattaatttatttcaaatggtaagttgtgaaattaaattcaaaacttgtaaatgagacacaatattatcccttttatttccaaagctattaattgtaactgacacttcaccattctccacgcttactactttttatgctgccttctttgatgaatgtatttatggtgctatagatggtgaggtgaagggtggatggatgcaaattaaaatgggctgtgttttttaagaggatgtattatcacacaaacaggcaaccaaaagagtggactttttgttaagttttagagttattcagcattctagcttcaaagatagccttaaaaaatcaatgaaactatacttaagaaaggtcagggtgggtgcaaatggagatttagagactatgaagattcttaactttgccaaagttttaatcaaatgtatgagaaagtcgtatgtctcccgacctccatccccacccccaccagtagcaacagggtttgtctaaggaaaatcactacttccctgacttgtgattg

SEQ ID NO: 102149 - DNA, 1097 bp, Homo sapiens
gcgcccctgacaggcaggcagggggcgattatctgggccgatgagagccattgacaaaatggagtgtgccatcttcacagcacaaacgtcgccctggccataataccctcttaaggagacctcaagtggcccagtcttgtcaccggctctcccaggcacaccaccaatcgtttgtcaccgctgctggtatttgcagggaggagagggcaagagaaaggcaggacccgagagcatcacaagagatctccgccctgtggcctattgtacttcatctcggagacaaagaaggctccaggcctttctccagcaagtcgcttcagcttcatcaataaatcagaggccagagaaagccattcagatatggctgaggcctcctgaaggctctctccatagagccgctttctggaatatgcaggatatgagagattttttagtcgagcgcattttgttttaattccccccgccccgcgttctttgtcacttttctcctttctgtcccctcggtgtggaacagaagatgcgtttgtaggcctgaatcggggggattgttccaatcatcagaccattcacgcccgcccctcccctgttgtaaaacacaagcccgggccggggaacagcggccccattgtgcggcgcccatgccacccagatttcacctcagccttcgccgagcccctgttttgtttccagtcaaaagaaagcatttgctcaggggaggggaggggtgttcctattgcttccactaacagagaggttaaaggaaagattgatgggagaaagttcacctagaaaaccaggatacatttctggccggccaaggccagttgtttcattgtcctggggccatgttttttgttaattatctctcactctctccttttatcaaggagaaaagtagcaaagcaggcagaaagaaacaggatataggggtcaggggtccccctgggccacctaggtattccatttgaaatgctggggcgggcagggccgagggtgagtcttgcctggcttggggtggagaagagaggcggccaccaaaataataattaatttgatcccgttacttatggggaaacttcccacccttcaccccattc

SEQ ID NO: 102150 - DNA, 1053 bp, Homo sapiens
gcgcactgccagggcgcgcccggccgcaagctctccaagatagccacgctgctgctcgcccgcaactacatcctactgctgggcagctcgctgcaggagctgcgccgcgcgctgggcgagggcgccgggcccgccgcgccgcgcctgctgctggccgggctgcccctgctcgccgccgcgcccggctccgtgctgctggcgcccggcgccgtaggaccccccgacgcgctgcgccccgccaagtacctgtcgctggcgctggacgagccgccgtgcggccagttcgctctccccggcggcggcgcaggcggccccggcctctgcacctgcgccgtgtgcaagttcccgcacctggtcccggccagcctgggcctggccgccgtgcaggcgcaattctccaagtgagggcgggcctgggcctggggcgcgacctcggcccggcctcccttcgctcagcttctccgcgcccctgctccctgcgtctgggagagcgaggccgagcaaggaaagcatttcgaaccttccagtccagaggaagggactgtcgggcacccccttccccgcccccacccctgggacgttaaagtgaccagagcggatgttcgatggcgcctcggggcagtttggggttctgggtcggttccagcggctttaggcagaaagtgctcgctctcacccagcacatctctctccttgtccctggagttgcgcgcttcgcggggccgatgtagaacttagggcgccttgccgtggttggcgcgccccgggtgcagcgagaggccatccccgagcgctacctccccggagcggagcacgccggctcccagtactaggggctgcgctcgagcagtggcgggggcggaggggtggttcttttccttctcctccgccagaggccacgggcgcccttgttcccgccggccaggtcctatcaaaggaggctgccggaactcaagaggcagaaaaagaccagttaggcggtgcagacggtctgggacgtggcagacggacggaccctcggcggacaggtggtcggcgtcggggtgcggtggg

SEQ ID NO: 102151 - DNA, 1028 bp, Homo sapiens
acagtcccaaattcttcccctatggagctttctcggcgaaggcgggattggttaggagctgacaatcggcagcagacgattgtaaatgaccggaccttttttctattctcctgcccagcccccggcccggcctccgcctccggccctgctccagccccgccagcggcccaggacccgcccctggctccggccccgcccctggctccgcccccgcccccgcgccggcggcggcgcggcgcccgcgcttccgtatcgctcctcgtaggccggggctcggcgcgcgcacccgcactaaagacgcttcttcccggcgggtaggaatcccgccggcgagccgaacagttccccgagcgcagcccgcggaccaccacccggccgcacgggccgcttttgtcccccgcccgccgcttctgtccgagaggccgcccgcgaggcgcatcctgaccgcgagcgtcgggtcccagagccgggcgcggctggggcccgaggctagcatctctcgggagccgcaaggcgagagctgcaaaggtaacgcagcgtggcggggtcgcgggagcggagcgcgtggccagctgactggagggaaaacgccgcctccctgcagcggttcccggaatcccctccggttccctctcgctctccccgactcctcctcctcctcctgccctccctctgcgtcttgagtatgcggctagtgcgcccttcctctctcccggggccgcacctgcgaccccaggacccctcccgggccctgtcctgcgccctccacgcgtcgcccctgctgggagtccgctttcgttgcacccctccgcgtcccaccccaccccaccaaggatgcccaggataccgggcatttgccactgcaagatgtgagtcgttgctaagtttgagggtcacattcctccaggtccaccccgccttgcaaaaccggctcaccagctgggtgctcaggttcgggatctccagcccgcccccttgaggtcccctgggattagcccccctcgacctgcgtcagggtcacagactgc

SEQ ID NO: 102152 - DNA, 1022 bp, Homo sapiens
tataaataatggtgtgtctatagagtagaactgtatccagctatttaaaaaacaaggatagaaagatcttccaaacatatttttaagtggaaaaagcagggtggaacagggactatacatgctatctcttgtctaaaagatggggaaattaggaatatgtatttgtttttgcttatgcatgaagatactctgaaggattcacaaaagaaaaaaaagttttctaaagggagcaagacttttcacaattttttttttgaatgcttaaaattgttgaacccaacgactgttgcctgttcaaaagttaaatttaaaattcctcccagactaggtaggggattgggcccagaagctgagaccaggctcacttgaataaatggggtaaatgactaggaattttactattccttacaggtctctcattatcttgtctttgctcccatttttatatttgcagtttaattagacacttcagaattttgatcacctaatgttgatttcagatgtaaaagtcaagagaagactctaaaaatagcaaagatgcttttgagccagaatgccttcatcttcagatcacttaatttggttctcatgggtaagtgctgctttttatcttagctcttatagaagcaagctgtgatgccatcctcactgagagcactggcaggaagtcgcaaactcatttccctgactagaggacccagtaccaccctgcctagtgtcaggagttaagtggaaagcaaataggaaacctacactagtagtttagattcaatgtagattcctgtcctgttgttaattttaggaaaacaaatgagtgacttaaggcaataataatcaggactatcctcgccataatttgaagagtaatttctcctaacacgctttcttcctccccaatctttgataaatgtcttttacctctaaagttgattaattagcaacatgcttattcatattctgtgaatatttctaggatggacaattgcctctgaggacattccctcagccagcccaagtactta

SEQ ID NO: 102153 - DNA, 1054 bp, Homo sapiens
aatcatgaggttggtttgatatttcattttctcttggtaaacatattattgttctgttatatggggagaggtgatcttttctctctctctgtctctccctctcccttttcctatctacctctccttctctctgcgtttcttattcagagccttaaaaagccaaagacaaaacaccatcacacatccatttttaattcagttgaatactttaataatccaaatctattttgacaaagcttgtatgtgtcatcaaagccaatttctacaggtcagaacctcacatacaaaataattcttgtgtatgggttaggcaatgatttctctaattcagtcagtctgaatgtttaaaagtcctgttatctgaggacaggaatccaaaggtctattgaccatattgatggtttatgttcacttttctttactctggtgggacaccagaaagctgcctggcctagtctgggacaggcctgggtccatagtctggtttggtcactaaccagcttgacacttggcacggacctcagcccctaagctaatgcctctgctgaggggttgctgcaaggattcgtgacataatggatggagtcctgcttgtcttttgtcttcccacacctaccaatcgcccttagaagtcattgctttgatccagcagccccttggagtgtccttttgatggttatttatttggcctagagctgctgctgctactgcttattgactgagccagtgggagacctcttgtgagtttctcttcggtgcctgctaaaaagtttttctctgcattgagtggtcacatgtatcatccaactaactgaagcttggtagatgagatatctgcattgtccctgaaatagcccaggtctgacttaggactggatcatctagtcttagccagagagggagggggtctcagggaaggcattcataattgtcccatagaggaagggagatctgaggcttccaccatgagggcccaagtttcattcattcatttactcatccggcaattttttttttttttttgagacggagtctcactgtgtcaccaaggctg

SEQ ID NO: 102154 - DNA, 1054 bp, Homo sapiens
atgacttataaatcctttttcttaccaagcctgtgataaatctaaccctgtttgagatttgaagacaaatcccaaaagagattaaggcctacctctaaatgaaattctcagtcttactgattttttgcttatgtttacagcataaacccgaaataaaaggaaacatgagtggaaatttcacctatatcattgacaagttaattccaaacacgaactactgtgtatctgtttatttagagcacagtgatgagcaagcagtaataaagtctcccttaaaatgcaccctccttccacctggccaggaatcaggtatgttcatttttttaaattcatgttttgagtattcatgcttttactctgagggcaagcctatttaaagaaaagaatctgaaaagaattcatggagcactaaaggtctttcttccagtaaacacctcacagagatgttttctgttggttcgtgtgtatgatctggtagagtcacttttatattgtcataccaaaaaacaatcagatactactcgatgagatcagaaatcttgaaatggaaacgcttttgtttcagggagtcaggattaaattcagcactgtgtgccctttgtgtggccattgctgaagccaaatgccagaagaggtggagttgcttgagacagtggtatacagtggcattaaggggtgaaaaggtggaagcagcgaggttgggtgcagttcatggatgtgatctggcatcagctctcgctcatagatgaaaggaacccttgccagggtgtacgagaaaatcactgatgaaggctgaacacctttctgttacacagacatcagaacaataaacagtgtgatcccaaaccttcttcccctttggagtgagaacaatcaagcctcggaactccctgctgattgttttctcaggaagtagccaagtttccacctgttttaccaaaagtgagaagctatgcaagtctccctcaaagaagcccttctaaatgtcccaaccgcagtgttaggggaaagaggtcccaatccataccccaagagagggttcttggatcttgcg

SEQ ID NO: 102155 - DNA, 1033 bp, Homo sapiens
ataaagagcaaacagtacagctgatacggactctctctctctttttttttttttttaagaattttcataactttttagcctggccatttcctaacctgccaccgttggaagccatggatatggtggaggtcatttacatcaacagaaagaagaaagtgtgggattataattatgatgatgaaagtgatagcgatactgaggcagcgcccaggacaagtggcggtggctataccatgcatggactgactgtcaggcctctgggtcaggcctctgccacctctacagaatcccagttgatagacccggagtccgaggaggagcctgacctgcctgaggttgatgtggagctccccacgatgccaaaggacagccctcagcagttggaactcttgagtgggccctgtgagaggagaaagagtccactccaggacccttttcccgaagaggactacagctccacggaggggtctgggggcagaattaccttcaatgtggacttaaactctgtgtttttgagagttcttgatgacgaggacagtgacgacttagaagcccctctgatgctatcgtctcatctggaagagatggttgacccagaggatcctgataatgtgcaatcaaaccatttgctggccagcggggaagggacacagccaacctttcccagcccctcttcagagggcctgtggtccgaagatgctccatctgatcaaagtgacacttctgagtcagatgttgaccttggggatggttatataatgagatgactccaaaactattgaatgaacttggacagacaagcacctacagggttctttgtctctgcatcctaacttgctgccttatcgtctgcaagtgttctccaagggaaggaggaggaaactgtggtgttcctttcttccaggtgacatcacctatgcacattcccagtatggggaccatagtatcattcagtgcattgtttacatattcaaagtggtgcactttgaaggaagcacatgtgcacctttcctttacactaatgcacttagga

SEQ ID NO: 102156 - DNA, 1037 bp, Homo sapiens
cttagggcatcaacgttgtatatgtggtctgtcatctaccgaaatgtcattatgcagcacatgactttattgaaaatcattgtaatatctttattttggtaaatttttgtaaatcaatgtctcataaatcacatgcccctgttttcaaaaatacgtaatcaaggaagcaagctttcttggtcaagtatgctgaatactcaaccccttggagaggcacgtagtcattaagatgttcaagtctctgagaagttctgttttgaagacacgtatttctatgtttaacacagtttccactcccgcgccgcccccccctccaaattaagtaccagtcagcctcagggagactgaagccagaactctcctgattgacctatctttttgattgtgtagttataggatattccaagataaatgcatgaatactaccttgacggaatgtgatttctcaagtctttccaagtatggtgaccacaccttgagagtcagggctgaatttgcagatgagcattcagactgggtaaacatcaccttctgtcctgtggatgacagtaagccattttgttttccctttttttgtaatgtcatcatcttgccttgtttttttccacattggttggtccatcaacaagaattctttgagggcccacaaatggatggccttgcacaaggagcttaaggaatataataaagagagttgtatccctaaagaattcatgggagagacagaaaaagataggcatatcatcaatgcaacaattaaatataaatctaacaccttcagtgcctcaaggatgtgactatgttggggcccgtgctgttgaggagaagttctggaaggattcttgtggtgaattttctgggagaaagtcagtatggaattatgacttaaacaaagaaacataacgtgataggcaaaagaatgaaggcagatgtagagatggaaaatatgatgcggacagccggcttgcccagagcgaaggacagagggagggatagggctgatggcaggtgggttgggtcagactggttggtcagca

SEQ ID NO: 102157 - DNA, 1037 bp, Homo sapiens
ggcgtgaggcaccgcgctcagccattttttttgtatttttagtagagacggagtttctccatgtttgccaggctgttcgcaaactcctggccccaagtgatctgcccacctcagcctcccaaagtgctgggattagaggcatgagccaccatgcctggcctagatcctcttttaaggggttcatctgattaggtcaggcccacccagaatagtctctcatttgattcaactgatttgggaccttaattacatctgtgaaataccttctcttctgccacttaatgtaacctaattatgagaggagggcctccatcgtatttacaggtcctgcccatgctcaagaggaggggattatacaggatgtgtacaccagggggcaggaatcttgggggccatctcagaattttgccttctccagtggggaggatgtccttctagagtagcagaacatttggacaccaggtggcaatgggaagaaagctgaataagtagaatgggacaagattagggtcaacctcaggctgtcctgtaggcttttggggattttgtgttggggtgatagttaacctgagctctggatttgaggaaggtgcatgcggcgacatggtatgtgggagagtggactaaggagacactaaagagagataaggaaaccagtcaggaggctattagagttctgggcttgaactgagatgcttttagctgttggtttctgggcaagttacttaacctctttagtctcgtacttatacttgctcttataaccccgcagtgtgtctctattttagcacttaatcagtgtccattggtatgctggcgcatgtttagcagctggctttccagaaagaaaaagtcctattttgtagtgtttgctgatttttatgatataaatattcccaccatggccactttcaagccaccagcctgatgtccctgaatatggagttgggaacatatgcacagtagcacaccactatcatatagctacaatagataaagatagccccaagagcttagaaaataaaatgtagtaaaat

SEQ ID NO: 102158 - DNA, 1046 bp, Homo sapiens
ggtgtatctaaaacaaatttatatttctcacacatatactctgtaatcccagcactttgggaggccaaggtgggtggatcacttgaggccaggagttcaagaccagcctgaacaacatggtgaaaccccatctctaccaaaaagaaaaaaaaattaggcgtggtggcatctgcatctgtaatcccaactactcaggagggtgaggcaggagaatcgcttgaacccaggaggcagagattgcagtgagcccagattgcaccactgcactctagcctgggtgacagagcgagactgtctcacaaaaaaaacaaaacaaaacaaaacaaaacaaaaaatacataccaactacgtgggagaggccaatgttagactgaacataaaaaattgagaaagcacatattccctgatttcttgaggtgactaaattttatcagtgatttaattatattttctagagaaaaattatcgagaaaaaaactgatgttacagttcctaatttgaaaccactgactgtatattgtgtgaaagccagagcacacaccatggatgaaaagctgaataaaagcagtgtttttagtgacgctgtatgtgagaaaacaaaaccaggtcagaatcttttattgtcttttttaaaaatgtagctagacataataaaagtaattctatactgtacattgaaaattgtaaaacattttctctttactgcaaaaaatatatagaaagaatgttttcttcatgaactacatgaatcaaaagtagactttttagaaaatatttgtaacgcttaactctcaagtcggtgttgttggatgctttatatttcatccagtatccctataattaatttccttaatgtatttctctttaacatttaataaaactattttaaatttttagaatataatccttaacataattatcatgtagaaatcacttagttcaattgtgagttttttaatgtgggaattggtttagtctcattttctattttacagtttctagtgttgaccggtagaggcttagtcacagaatatctattaaatttt

SEQ ID NO: 102159 - DNA, 1017 bp, Homo sapiens
tagccaataatttctcaattgtgcttcttctggatatatatgtgttggatacaaacatttttattatttcaaaaaaaaaaagtcatgatcccagagtccgcccgctcctgtcctttcccgtgttcttccccgcctaccccgatggcacagtgtacctttcttaggtactcttcaaagactcaccacagaaggtactaagatatgagtgacctcactaatgatgcttttaaacattataaggcaattagtatgttcttaggcgactttttaatatgcatgccagaagataggttttctcagtaatggatgtaagaaactaaagctattacaactagaaaaggaatttttattattttaaataattgatttctactctttccctttttttaaattagtatttctctgaacagccattgaagaatcttctgctttcaacttctgaggaacaaatcgaaaaatgtttcataattgaaaatataagcacaattgctacagtagaagaaactaatcaaactgatgaagatcataaaaaatacagttcccaaactagccaagattcaggaaattattctaatgaagatgaaagcgaaagtaaaacaagtgaagaactacagcaggactttgtatgaccagaaatgaactgtgtcaagtataaggtttttcagcaggagttacactgggagcctgaggtcctcaccttcctctcagtaactacagagaggacgtttccctgtttagggaaagaaaaaacatcttcagatcataggtcctaaaaatacgggcaagctcttaactatttaaaaatgaaattacaggcccgggcacggtggctcacacctgtaatcccagcactttgggaggctgaggcaggcagatcatgaggtcaagagatcgagaccagcctggccaacgtggtgaaaccccatctctactaaaaatacaaaaattagccgggtgtggtggcgcgcgcctgttgtcttagctactcaggaggctgaggcaggagaatcgcttgaa

SEQ ID NO: 102160 - DNA, 1050 bp, Homo sapiens
ggctgtagtttgctatgattgtgcctgtcagtagctgctgcactccagtctgggcaatatagtgaggccccatttctttaaaaacaaacacaaaaaacctcttgaattcatgaaagaaaataaattaacagactgtttaaaagtcaagaatttattttgtatgtttttacgattttgcatttcagtgttggccataggaggcaaaggagcaagttactgcttcctcagcagttttgatgtagctagaaccagcaattactttgactaaaagaaaactttgtaagttcattgacttttatccagagtaagagcagtcctttgctttgggggaattaaattggcattttcttctttcagtttcattatagatgtcttacagttaatgaataatagcagtatgttgtaatatacaaaatgtatcattatgaatggcactgatactttattactgccgtttgcctatataaccgtctaatctgttttactttgtgtatgtagatactgatgtttatccgggactagctgtgttttttcaaaatgcacttatattttttaggtaagttgccttattttttaaccacgcctgtaacatttacagaaatgtcaacttaattaaggcagcatatatatggaacacatataaatcccatggattggttacaatgatagaacttcttttaaaaggtgagaattccactgttacataagagcagagaggccttttaactagaggtcttgctgtgtatcaagactttagctggatcctttatatattttaccctttgaattcacatttaggccaagtgctgtggctcatgcctgtaatcccagcactttgggaggctgaagtgggtggattgcttaagtctaggagtttaagaccagcctgggcaacatggcaaaaccctgtctctataaaaaaatataaaaattatctggttgtggtggtgtacagtgccagctactcaagaggctgaggtgggaggattgcttgagccgaggaggttgaggctgcagtgaggcaaggctgcaccactgtactccagcctg

SEQ ID NO: 102161 - DNA, 1357 bp, Homo sapiens
ctgtgccaagagaaagggaatttagaagcctcacatatcaccagtcttttccaagacatttattcagaaaatttgactgtcccctattcaaaatggcacatctctttttttaaaaagtgtgaggttgggcgcggtggctcatgcctgtaatcccaaatttgggaggccgaggtgggcggatcacctgatgtcaggagttccagacgagcctggccaacgtggtgaaaccccatctctactaaaaatacaaaaattagccaggtgtggtggtgggctcctgtaatcccagctactcaggaggctgaggcaggataattgcttgaacccgggaggtggaggttgcagtgaacccagatcgtggcactgcactcctagcctgggcgacagagtgagactccctctcaaaaaaaaaaaaagaagtagtagtatgagctcactgctgtttttctcccttctcaggatcgaacctgcaagcacttatagacagtactcgggaaccaaatagctctgcacaaattgatattgttatctccaacaaagccgcagtagctgggttagataaagcggaaagagctggtattcccactagagtaagttacttgggaaaatatctttgctgtgggccatatttaagctcgtaatctgccctcacaggaccctggtctatgggcacttgttcttgggacttcgccattttgggtgggtgctgggcttgccttcttcatcctgtccctttcttaataatctctctatcaggtatatctttacaaggaagtgaagtatggtctgtgtaaaggttgagtttttaattatttttggtaattcattgaaaagggttgtgcttatctttttctattacaggtaattaatcataaactgtataaaaatcgtgtagaatttgacagtgcaattgacctagtccttgaagagttctccatagacatagtctgtcttgcaggattcatgagaattctttctggcccctttgtccaaaagtggaatggtaagcaaaaattatttgacatcacattgggaaatcaattgaaaatggtctccagaacagataacttgccaaacaatcccagtagtgaacacccatcccagaaatccaactcctgtttgactgtgatattttattaatactttaacacaggtcacagtttaatttcctttgttttacactaaagaatgacccaatgatgatttattaacctgctctctatccatttactttggcttgctgtaattaatcactttttctaatgtagcttagttttgtttcacattactgcaaagataatatttcatcttttgaataaatattcagaagaccttcctttatttgtttggaagcaaa

SEQ ID NO: 102162 - DNA, 2267 bp, Homo sapiens
aaagttctcagaggccaatttatagttttaccctacataaaatagcagagcctgattataatttccacatctttgaatatgtgcatacttttgtactttgtgtgagaaggtaggaaaatcaaacaattcgtgtctatttttttcagatgcccagacctggaggatccccagggtcttctcatggttgcagcaggaaggacacctctctgaggaagagatggccagaacatttaactgtggggttggcgctgtccttgtggtatcaaaggagcagacagagcagattctgagggatatccagcagcacaaggaagaagcctgggtgattggcagtgtggttgcacgagctgaaggtacttgctccttactcatttttagatatataattttagctgtataattttagctatacctcagccttgcctcacaagctttctgcccaccttttagtgcagccatcgctatggcaactatctttacacagatgtaacatgacagcacccaccccagcgataccacgtatctcttcatttctgcctcagaactaagcattcatgcatgcacagccacaccccacaggatcgcttcccaaagtaatctccctacacacaagacctcatggctctgctgtcactcagctcgattcaaggaatagcgagcaagcaccctgacaagtactgtatcagtcaggactctgcgagaagtgctagaacttggcagaggggcagaaaatccactcagattcactaacaaagacgtcacatgcttgctttggcaggacacatactaaaattggaacgatacagagaagattcacaaaaataaaaaatagaaaaaaaaaatgtcagaccttgttgactttacctgtatctgcctttctttcctctattgtgtaggattcattttcaagcgggttctccaaatgccggaaagataacatccttcagctcacattacaataagaaagagagacccagccgggcgtggtggctcacgcctgtaatcccagcactttgggaggccgaagcgggtggatcacgaggtcaggagatcaagaccatcctggctaactcagtgaaaccccgtctctactaataaatacaaaacattagccgggcgtggtggcgggcgcctgtagtcccagctactcgggaggctgaggcaggagaatggcgtgaacctaggaggcggaacttgcagtgagccgagatcgcgccactgcactccagcctgggcaacagagcgagactccatctcaaaaagaaaaaaaagagagaccctctttttcttaacatcgcatatcaagcctttaaatggctttgctaggtcacatgcttatccccgagaccaggagatcatggcactactgtgggtggtctcgctaggaagatttggggagtaggggcagaatactggcaggcagtcatatatatccaccgtgcacttcaagatagtgatgtgatctgcagcttttagttgaagtaattacatatgttcaccttttggaagtttttatgaaagagtagtgttaagtgatacaaatgtgttgttcattttagtccttgcattatcttattttcaggataaaacataccctaaagttttcataaaatatttttctttccattattcttgttaattcacaattgttctttacttatttatggatatgtttgaaatgaaggttccccacgtgtgaaagtcaagaatctgattgaaagcatgcaaataaatgggtcagtgttgaagaatggctccctgacaaatcatttctcttttgaaaaaaaaaaggccagagtggctgtcttaatatctggaacaggtgagatgtggcttccccttcactgtagagctgttgactgcccttcctttcctccccgcactcttgtgagattgtaaggttactctcggcagagtctagggactggggggaatcatgagggttgtctttgtcttttcagcattcttagtctttccacttttcttaggaatttgagacagctcccaaagaaaaaagtaaaggatgtcagaaagctggttaaagagaaaccagaaaagatagaagctacagctcattttgtatcatagctttgttgttgaaaagtctgaaaacagttgaggaatttttattgttatcttattaattagaagaagtttatgtttaacctttatggatagaggggtaaagtaataagagtattgtattctctcagatggatgtagcctgatttttttccctctattgtaagtaacactgctatgaacat

SEQ ID NO: 102163 - DNA, 1003 bp, Homo sapiens
tgggttcaagtgattctccgacctcagcctcctaagtagctgggaccacaggtaacacgccaccacacttagctattttttgtatttttagtagagacggggtttcaccacattgcccaggctgatcttaaactccttggctcagagcaatctgcccatctcagcctcccaaagcgctgggattactggcatgagctaccacacctggccaggacttttcaacattaaaattacaacttacattattcatgaagtacttgttcatttatagaagctagactcttagtctgccagtgttttttcctataaatattttgtaaaacttcactaaaacaagatcataatttggtaatctgctacttgccctgccattaaatatgtcatcactatctccttgtcttagtagcatcatttttgataacaagtattccattttacagatgtaccactatttagttttaagttgctatttacttttaactattgagagcatagtgaacaatgtagttactaaatctgaggtcaactattaagaatggacatttcccagctactataaatggaattgaatctaagagtcatagacatgtgattcatttttatttttatttatttttatttttttagacagagtctcaccctgtcgcccaggctggagtacagtagtgcgatctcagctcactgcaacctccacctcccgggttcaagtgattctcctgcctcagcctcccgagtagctgggattacagatgtgcgtctccacgcccagctaatttttgtattttcagtagagatggggtttcatcatgttggccaggctggtgtcgaactcctgacttcgtgatctgcgggcctcggcctcctaaagtgctgagattacaggcctgagccactgcacccgcctcatttttaaaattgtatcaacttcaggctgggcatggtggctcacccctgtaattccagcacttcgggaggctgaggtggatggatcccctgaggtcag

SEQ ID NO: 102164 - DNA, 1068 bp, Homo sapiens
gctttctgaaattgtttatggatctgataaaatttagatctctaatattttaagccccattcctgttggacactgcagctcttttcagtttttgcttatacacaatttcttcttttttttttttctttttgagatggagtcttgctctgtgacccaggctggagtgcagtggcacaatctcggctcgctgcaacccccacctcccaggttcaagcaattctcctgcctcatcctcccaagtagctgggattacaggcataagccaccacacctggttaatttttgtgtttttagtagagacagagtttcgccatgttggccgggatagtctcgaactcctgacctgatccacctgcctcggcctcccaaagtgctgggattacaggcgtgagccacgatgcccagcccacaatttattctttgtagctaattaagctaaagaagcctgggaataaagtttgaaacaaacaaaaattgcctttcaaccaccgtttagaacacagtttcttatttggagtctgcctataccttatatcttgacatgatataattgtaagtaaaatgctatactttttaagctagggtatttggaattgggcagtcccagttaagtcacttctttaaggctgtatcatcacctgaaaaatggactgattataaagatcaaatacatatgaaagcagttttgaaactaaacagctatagaaatgatgttatattcaactgagcattcattctgtgcaagcagtggtgtttggcggctgcatatatacttgtagaggtgctacctaatctcaccctttgtggaaacaagtgctatttctcctgaaatcatgcttggtggaaagttctgttagacagctggtagagtacattttcttaaatatttgcaggacatagccatgtgttagttgttcatgttaagagtagcctgtgccactgtttcctagacagatttataaatactctgatttctttgttcttgtcttatcccaccaggaggtgaaacagcagaaatgcctgacatgtatccccctggagagtatgacctagctgggtttgccgttg

SEQ ID NO: 102165 - DNA, 1021 bp, Homo sapiens
ctgtgttaaccaggatggtctcgatctcctgaccttgtgatccacccgcctcggcctcccaaagtgctgggattacaggggtgagccaccacgcccagccttaattactttcttaatcaattctttgagcacatggtgcaatctctcatactcaggaagggcatctcttgtttcagccattcttatgaacaagtggtatgtatatacatgtttaacctattaacatgttacatgttaatctattaaatgattacattctcccagttgatttgattatgtcatctctgagaacagctgttccaatcatctatttcttccagaagtacatctcacaggccgctaaatatactggtttttttaaactagtagacatttaaataattacatgtttaatctattaaaatgtagcaagtaattaatttcctctccaacaggctgtaaagttgatcttggaggttttgctggtctttttgatttaaaagcagctggtttcaaagatccccttctggcctctggaacagatggcgttggaactaaactaaaggtaatcagacacctttgtgaataaaggccttttaggaaagatgaggaaatttatatcaaatatgtatttttcttctcttgacatatatgagctaaaaaggaccatgccaaataaccatgtaaaatggctaaaatatctgcacatttctaataacaaattattatttagattatatttggatggaagggtactttagaggataaaaggggatgcttttagaccaagtagcttgtcagaatttcgtgttcttttgtttttaggtgttaagagcagctaatcaaatggataagatacaattttgaacttattccctaatgtggatgtttatattgttcttacatagattgcccagctatgcaataaacatgataccattggtcaagatttggtagcaatgtgtgttaatgatattctggcacaaggagcagagcccctcttcttccttgattacttttcctgtggaaaacttgacctcag

SEQ ID NO: 102166 - DNA, 1045 bp, Homo sapiens
ctcaagcagtccttgcctcagcctcccaaagtgctggaattataagcatgagccaccgcacctagccaagttaaaaaaaaaaaaaaagaaacttgtggaaatcgtaaatcacttcacggtgtgaaatactgttgctatttgaaatcatatgtcaaatatgctctcttctagggtttcctgaggctcaagctctaggactggaggtgttccatgcaggcactgccctcaaaaatggcaaagtagtaactcatgggggtagagttcttgcagtcacagccatccgggaaaatctcatatcagcccttgaggaagccaagaaaggactagctgctataaagtttgagggagcaatttataggaaagacgtcggctttcgtgccatagctttcctccagcagcccaggtaaaactctaagcaagttagctgtagtgccatttcagaaactggcctaaatggctatgtagaacatttcattaaccctataagtcattcagtattcttttctctctgtgggagtgatacagtcttggtttgtattttgtttgaatcaaaactggttatagcaatactcaaatggaaaaaacttcatgatagcgtaagtttggaaagtttagcaaaatcacagtggtactgatttttatttgttttctattttttttattttatatttttaatttttttaacagggtcttcctctctcgcccaagttctcatgcctcagcctcccaaatagctgggactacaggcacaggccaccacacctggctaatttttttgtattttttgtggagatggggtttcaccatgttgccaaggccagtctgaaatcctgggctcaagtgatcctcctgctttggcctcccaaaatgctgggattataggcatgagccgctgcacttggcctgatactgatttttattccttgcgttatcacatagtgttgtatttgaaacatagttcatggttttatcaaagaactgaagatgagaatactggtcatctaactttgtaatttgatttgattatactgtaaagtttgacagt

SEQ ID NO: 102167 - DNA, 1138 bp, Homo sapiens
cacctattcttttcattgaagatagtcataatgtttgtgctaatgtagtgcccctttacatatttttcttgcttaaaagattaaaaataggccaggcgcagtggctcatgcctgtaatcccagcactttgggaggccgaggcaggtggataacctgaggtcgggagtttgagaccagcctggccaacatggagaaaccccgtctctactgaaaatacaaaaattagctgggcgcgatggcacatgcctgtagtcccagtcccagctacttgggaagctaaggtaagagaatcacttgaacccgggaggcggaggttgtggtgagccaagattgcgccattgcactccagcctggacaacaaaagtgaaacttcacctcaaaaaaaaaaaaaaaaaaagattaaacataaacttcattttttttaaaagacttcataagtgtaggccaggcacagtggttcacacctgtaatccaaacacttgtattaaaactaccatttggtaatagtgtattctaagaactatatctgggtctaatttttacaattaaattcataaacccagaatcttacatatatagacttatgaaatatgcagcgtatactgggaagagtacaaagaagccttagggtaggagagaacttgtttcatttctattacgtttcgggaagttatttttggctagttcttttaagagtgtattttttgaaaatcataaagctaaaatacctacttgacagagtcattgtgaggattgagaaagtttaaatctttcaagttcaaagtgttcagcatgtttcaggtagtaaaaaaatgagttatcctcatcatccccttctgttgtcccatgtaatactacttagactttttaagttacctgttacatttaactgtttctgcacgttctccaggtttctaatgatctattactaaaaattaaagatactgttcttcagaggacagtggatggcatgcagcaagagggtactccatatacaggtaggcccacccacattactatggaagccacctatagagtaactttctacttttgataaaacttattttccattcccttttttttttttttttaccactttttaatggaccattttttaaatgtttatgatttttccaaa

SEQ ID NO: 102168 - DNA, 1916 bp, Homo sapiens
ccttgagcaagtaacagttttgttacttactttgggtaagtctccttccagacccccaggcccacttgataatttcatatgtgtactcccagaaatggtctgtgtatgcttactgttgttatacagccgcattttctacctgaatgagagtactatttgctactttgtatcttagagattatgccatatctactctatacatctacttattcttccaaagatattgcctatgtaatctcatgataaatgaaaaaagcaaaattgtaggtactgtatgattggaactacaaaggaatacgtaggggaaaaaatcctggtgggaagtacatcaaaatgtgttggaatgataattaatttttttctttctgcttttcagtcattgctatagcatatcgttacaaaatcccacagcattttaaaatcttgagttgtaatggtttattggatgttgacgattactctgtctttacagtgcagacttccctgctttggttgtgaaggccagtggtcttgcagctggaaaaggggtgattgttgcaaagagcaaagaagaggcctgcaaagctgtacaagagatcatgcaggtaggctgggtcttctgaaaaaatttacttttctattcatactgaataaataccgttttaagtttaaaaaatgttcctcacaataaggaaaatctattttgcaaacatatgggtaagttattttttataatcccatgtattataatccatctctataaaatagttatggatttacactgtaaattaaaccatgattgtattattttgaagtaaattgtaacatcctttgttgtctgccactgaaagaaaatcctcagactctagaacatataaataaattatcaagccatccatgaggacaaaagtatttgtcccacatgtcccgggtctaagagaagtaaattaatgaatgaatatgccttgtctttcgtgatcgatctttgttgttgtgggttttctgtccttgtagaagtctactttcacaagcatgctttagtatagttattacagccaaacatgtataattataatcggaagtaaggattaagtggcgataatgaaaacatctgtttttcccataccttatttgaaactggatcaccaaatcttcaggagaatattagaggtgtgtttattccgtctgtaccagtgttagctacactattgccacattaaaaataggaaacatttatatgttccctttgagtctttctgaaagggaaagaaaaattacagtactcactggttcataatacaaatgctggataatgctaaaagtcaactaagtatcaaaaacttaccaagcctctttttttaaaaaaaaaaaaaaaaaaaatcttacaatcaggagaaagcctttggggcagctggagaaacaattgtcattgaagaacttcttgacggagaagaggtgtcggtatgtatattcatctttttggcttttgtagtgtataagaagctgtcatctgacctgtgtaccccagaaaagacttgatatactctggttgcttcatctaaaaacataaacccagcagttacaaaggaatttgtatacttttattgttgggggtgcaaatgaaaaaataatcgatcctctgttagtcatccctagtgtgttagtgggggcacttggacttacacactattgaggttctggattaattcaagcattcatgctttttctttcatatacagtttattgcacaataaataaagtcaccttaaaccaagttttaatgcctggaagcttaaagtgggggaaaggttgaaatcttttactttgagagtagcttgattttttctgacttccctcaaaaattacaaatccttcagaagttgagtacattatgattcttgatgtatgtagcttaatgttattgacgtttcggttca

SEQ ID NO: 102169 - DNA, 1019 bp, Homo sapiens
acagttgtttagttttgatatttaaatacacaggtcagtggccaggcacagtagctcacctgtaatcccagcactttgggaggccaaggcaggtgaatcacttgagctcaggagttagagaccagcctgggtaccatggtaaaaccctgtctctacaaaaaatacagaaaaaaaaaagccgggcatgatggtgtgcacctgtagtcccagctcctctaaaggccaaggtgggaggatcacttgaacccaggaggcggaggctgcactgagccaagattgtgccactgcactgcagcctgggtgacagagtgagaccctgtctcaaaaaaattaaataaatatacaggtcacttctgtgttgaaaatgtaatgctaggtctttaggctgtctcaagatgtagtaagataattaaggaaaaaactttctcaataaatattatgtgggttgtcgttttccagaaccaaaataaaatgggatcctatgcatacagagtttatatgatcttgtggccttgcaggaagatgacatttttaataaaatctgagtagttcctcaggggaaaaatacacttggttctgcagttgtgcgctcttcacagccatgtttttggtttttggttccccgccccccaccaccaccccccaacctgagacggggcctctctctgtcacccaggctggagtgcagtggcgtgatcttggctcacagcagcctctgcttcctggactcaagtgatcctcccacctcagcctcccaagtagctgggacaataggcacacaccactactcccagctagtttttatattttttgtagagacggagttttaccatgtttcccaggccggtctcaaactcttaagctcaagagatccgcctctctctgcctcccaaagtgctgggattacaggcatgagccgtaacactaggcctcacggtcagattgacaaacgcagtggcatcttacaacataaagaacattgattttttttgtcataaataattaaccagagtgagtaa

SEQ ID NO: 102170 - DNA, 1380 bp, Homo sapiens
tgctgtttttttgtttgtatgtttattacccagcgttcctacagcgtattgtaaacatgttaagtatagggaccctgcttgtgttgataaatttttttttttttgagacagagtttcgttcttgttatctacccaggctggagtgcagtggtgcgatcttggctcactgcaacctccgcctccccagttcaagcgattctcctgtctcagcctcctgagtagttgggattacaggtgcatgcccccacacccagctactttttgtatttttagtagagacggggtttcatcatattgttcaggctggtctcgaactcctgaccttaggtgatccacccacctcggcctcccaaagtgctgggattacaggcgtgagccaccgcgccccgccgtgttgacatcttaataccagtgctgaggacagtacttagcacatagtggattttcagtacaattgattgattgacattaaaagaccaatttctgagtatatcttacgttttttgtttaatatacagtcaatattagtgacgtgaacaatatcatggaggtgatactttatggctctttgggaagtttattggtgttttcatctgtctacaatgataacggagaactgagctctgttggttagcctaatgcactctcctctgaatttcacatgttgaaactgtcatctctgccaatataagaaaaccaacagataacaagcatactaaagtatagaacttagtttttttagtgagacacttagtttacttaagtggaatgtttttgtaaatgcagtggtttttttttttttttttctgtttacagccatctcaatcagtgaccacactgcccttgctcaattctgcaaagagaagaaaattgaatttgtagttgttggaccagaagcacctctggctgctggtaaagtttgtttctgtttattgttacagtatattcagtgcaaacagaagcttagggatcatctaatccaattcattttacagatgagaatttgtaatattatcttggaaaaagagcttccactctcgaaatttatggagtctagattttttttcccaagcatcagttatatgatgagttagagatcaaatttgcagccatggaaaacattttatatgtctttattctgctgtattctggtgtgtgtttaataatccatatatgcaaatataacaacttttgatagatttgaataacatgttaatagcattttatctctatccagtagacaacatgaaaaagttagttatcctctgccaccagtcatctgccttgtctagatgtagatatagtctgatactaattcgtcttcaggctgaaaagcccctggggagaccttggttcacctaaggctactgttttcatcaa

SEQ ID NO: 102171 - DNA, 1122 bp, Homo sapiens
cagaaactcctcagtattctaataatactcagaataaaactcaaattccttaccatgcctttcaaagccctttgtgcagtctgtcttctgcctgctcttccagcctgatcttttatatccctttttctcttttcactataccctatccatgctgtcctaccaatttcccaagcagaagcttgctgctttggactttatatttgttcccaccccttactatgactgtctcctcattattcagagctccacttaaatgttagcctccttaattatatctctcctacagtttcttactaaaagcaagtgtccatccccatttcatttgtttatgatcatgaatgtctgtgtttatttttacttcactattgtctgtcttctatgttcttttcctccactagaatataatctctagtagaatgtaagctccatgagggcaaggaacttgtctgtcttgttttgcatggtgtgcacagtgcttagttccctatgtggcacataatatttatggaaagaagagcatggacccaacaagccacaaactgggagaagatagtggcatgtatataagaccaaaaggaataatacaaattagcaaatacctccttttctgggatcttaattctacgggtgagatatttgtttattagagaactaggacagtttatctgcgattgaggtcatacaggcaagcccatcaaaatctcttaagatcatcatgagactactacaagtagtcttgtaagactactaaagagacctcttcctcttgttgccctctgctatactgatatagttgacgctgctcagcctagttgtgttcagaaccactaacccacagtgcgtggtactccatcctaatcacattcaggcagttgctgcagattgaggaccctaccttttctggacttggaccctatacagtagtcaccagcctatccacaattttactttccacagtttcagttacccacagtcagctgtagtccaaaatattaaatggaaaatttcagaaataattcataaattttacattgcacaccagtctagcatagcatgatgaaattttgtgccgtccaacctgagacgtgaatctttttgtccagcatatccatgttgttactt

SEQ ID NO: 102172 - DNA, 1082 bp, Homo sapiens
gtaagtgcccaaagtaatacaggattattagggcaatgatgtattattgctagaattatcacttttgcagaatgtgttgttttttaagtggaaatagatccactcacattgctttttaaatttttgtgatattgctagtagtgttttggatgagaagagacccgagctaagagaatataattttcctgacaaatctctggctgcaataagtagttgtttgcttagtttaacgaggtgtgtttttgtagcttttaaaagctagtctttcctttagaaaatgagcgttttattataatttagaagacatgaaaaaggagaaaagaaaaaactcacgttattgatattctcatgtcatttcatttccccccccatgtattgtgtgatatgtgatcatcttgttttgtattgatcatttttccagctaatacgttgtgaacaggtttatccctctcagtctcagtcttttggacttcttcatggctgcatagaatcccattgtaggaatatactgttgcatatttaggtggtttgaaattttcattgcttttcagtaaatgcggttaacgattgctggctttaagatgaaatcattacttccttgtagattaacttttaaaaccataattacttttctgattttcaaatttgtcataattatgtataaatgcttaggaaaattgtaaaataaagtgctacagaaggaatatctaaaaataatattagacgaagcagtttattactagaggaatatgcagcttctcttcaacacataatgcgttatcagtctgcaaacaagtttttgattatttgccatttcagtgagctgttttttttctcatctgcttttatgtaaattagagtaatgaggctgacatttagatagttaaaacaagttatcgaacttctgttatagatggtgtgtaagaatatggcctctggtttgagtaccagcttcacctcttagtagctgtgtgaccttcagctaagtttcttcatttataaaagaataatagtggtgatctcagagttttgttaggattaaatgagttaatgtagaacagtatgacactagtagtcaataa

SEQ ID NO: 102173 - DNA, 1028 bp, Homo sapiens
ttgatttttcaaaattttgcaaattcacacaaaaatagtaaaaattactgggcgaatgatatgttcttacctatttaaaaatttctctggccctgtgaatggaacatgtgttaagccatctatgcttttactgttggtataaatgccacttgttttatgtgagttttataaaccagagttcttgataattgtgtaaaaattacataaattattttcctttttaagttcagtggcatttcagtagcaatgtaagcctggacagaggttacaggttaccctttttattcagtgtgcctgtggctaacttttgtgttccttgatactattgatggtgattgtgatttatgcacagctgtggctttaatgtagccatggtttctaccataatgttaggccacatgtttttcttttgatttgtgaccgggctcttattaatttttctcccctgaaagaaatatgtgggtatcccaaaagcctaaagttagatttctgaaattattttgtttaacaaagagtgtacttagaaacctgttttcttaattttcatagttctgaaaactttaattgtataaaaatgaaatgtccaaaatataagtagatcatggtaagaagcattattagtggtgaatatctaaaataggaaaaaggtaaaacatctgacagtcagtacaacatatgattattgtaattaattggatttttttattaatggtatgataaaatattaatgaatttcgataacttttcatgtcaagtggaaggaatgaaggccagctgaatggtgaaacaaatacacccattgaaggaaaccaggcgggtgatgcagctgcctctgccaggagtctaccaaatgaagaaatagtgcagaagatagaggaagtactttctggggtcttagatacagaactacgatataagccaggtaagttggagataattaactgtctcaaaaattttcttttaagatttttttgaaatttgaaggttaatgttagtttttgacttcagtatttaagatatttattaaa

SEQ ID NO: 102174 - DNA, 6335 bp, Homo sapiens
gaaacctcgacctactgggttcaagtgatccgcctcagcctcccaaatagctgggactacaggtgcgcgtcaccatgcctggctaatttttgtatttttagtagagatggggtttcaccatgctggccaggctggttttgaactcctgacctcatgatccacctgccttggcctctcagagtgctaagattacaggcgtgagccactgtacttggcctgtactaaggtgttttaacatggaatgtaaatatgggtttatatgatttaatctaactctactttggggaatgtctgacaaaattaatttctattacttttagacttgaaagagggctccagaaaaagtagatgcgtatctgtacaaacagatcctactgatgaaattcccactaaaaagtcaaagaagcataaaaagcacaaaaacaaaaagaagaaaaagaagaaagaaaaggaaaaaaaatataaaagacagccagaagaatctgagtcaaagacgaaatctcatgatgatgggaacatagatttagaatctgattcctttttaaagtttgattctgaaccttcagctgtggcgctggagcttcctacaagagcatttggcccatctgagaccaatgaatcccctgcagttgtgctagaacctcctgtagtatcaatggaggtatcagagccacacatcttagaaactctgaagccagctacaaaaactgcagaactgtcagttgtatctacatcagtaatctcagagcagtcagagcagtctgtggcagtaatgccagaaccatccatgacaaagattctggattcctttgcagcagcaccagtgcctactacaacactggtgttgaagtcatctgagccagttgtaacaatgtcagtggagtatcagatgaagtctgtgctgaaatctgtggagagcacatctccagagccatcaaagatcatgttggtagagcccccagtagcaaaagtgttagagccttcagaaacccttgtggtatcatcagagacacctactgaggtgtaccctgagccaagcacatcaacaacaatggattttccagagtcatctgcaattgaagcgctaagattgccagagcagcctgtagacgtaccatcggagattgcagattcatccatgacaagaccgcaggagttgccggagctgcctaagaccacagcgttggagctgcaggagtcgtcggtggcctcagcgatggagttgccggggccacctgcgacctccatgccggagttgcaggggccccctgtgactccagtgctggagttacctgggccctctgctaccccggtgccagagttgccagggcccctttctaccccagtgcctgagttgccagggccccctgcgacagcagtgcctgagttgccagggccctctgtgacaccagtgccacagttgtcgcaggaattgccagggcttccagcaccatccatggggttggagccaccacaggaggtaccagagccacctgtgatggcacaggagttgccagggctgcctttggtgacagcagcagtagagttgccagagcagcctgcggtaacagtagcaatggagttgaccgaacaacctgtgacgacgacagagttggagcagcctgtggggatgacaacggtggaacatcctgggcatcctgaggtgacaacggcaacagggttgctggggcagcctgaggcaacgatggtgctggagttgccaggacagccagtggcaacgacagcgctggagttgccggggcagccttcggtgactggggtgccagagttgccagggctgccttcggcaactagggcactggagttgtcggggcagcctgtggcaactggggcactagagttgcctgggccgctcatggcagctggggcactggagttctcggggcagtctggggcagctggagcactggagcttttggggcagcctctggcaacaggggtgctggagttgccagggcagcctggggcgccagagttgcctgggcagcctgtggcaactgtggcgctggagatctctgttcagtctgtggtgacaacatcggagctgtcaacgatgaccgtgtcgcagtccctggaggtgccctcgacgacagcgctggaatcctataatacggtagcacaggagctgcctactacattagtgggggagacttctgtaacagtaggagtggatcccttgatggccccagaatcccatatattagcttctaacaccatggagacccatatattagcatccaacaccatggactcccaaatgctagcgtccaacaccatggactcccagatgctagcatccaacaccatggactcccagatgttagcgtctagcaccatggactcccagatgttagcaactagctccatggactcccagatgttagcaactagctccatggactcccagatgttagcaactagcactatggactcccagatgttagcaaccagttccatggactcccagatgttagcaaccagctccatggactcccagatgttagcaaccagctccatggactcccagatgttagcaaccagctccatggactcccagatgttagcaaccagcaccatggattctcagatgttagcaaccagcaccatggactcccagatgttagcaactagctcaatggattcccagatgttagcatctggcactatggactctcaaatgttagcttctggcaccatggatgctcagatgttagcgtctggtaccatggatgcccagatgttagcgtctagtacccaagattctgctatgttgggttcaaaatctcctgatccctataggttagctcaggatccttacaggttagctcaggatccctataggttgggccatgacccctatagattaggtcatgatgcttacaggttaggacaagacccttatagattaggccatgatccctacagactaactcctgatccctataggatgtcacctagaccctacaggatagcacccaggtcctatagaatagcacccaggccatataggttagcacctagacccctgatgttagcatctagacgttctatgatgatgtcctatgctgcagaacgttccatgatgtcatcttacgaacgctctatgatgtcttatgagcggtctatgatgtcccctatggctgaacgctctatgatgtcagcctacgagcgctctatgatgtcagcctacgagcgctctatgatgtcccctatggctgagcgctctatgatgtcagcttatgaacgctccatgatgtcagcttatgaacgctccatgatgtccccaatggctgatcgatctatgatgtccatgggtgctgaccggtctatgatgtcgtcatactctgctgctgaccggtctatgatgtcatcgtactctgcagctgaccgatctatgatgtcatcttatactgctgatcgttcaatgatgtctatggctgctgattcttacaccgattcttacactgacacatatacagaggcatatatggtgccacctttgcctcctgaagagcccccaacaatgccaccgttgccacctgaggagccaccaatgacaccaccattgcctcctgaggaaccaccagagggtccagcattgcccactgagcagtcagcattaacagctgaaaatacttggcctacagaggtgccatcatcaccatctgaagagtctgtatcgcagcctgagcctcctgtgagtcaaagtgagatttcggagccttcagcagtgcctactgattattcagtgtcagcatcagatccctcagttttagtatcagaggctgctgtgactgttccagaaccaccaccagagccagaatcttcaattacgttaacacctgtagagtctgcagtagtagcagaagaacatgaagttgttccagagagaccagtgacttgtatggtatctgaaactcccgccatgtcagctgaaccaactgtgttagcatcagagcctcctgttatgtcagagacagcagaaacatttgattccatgagagcctcaggacatgttgcctcagaagtatctacatccttgttggttccagcagtaactactccagtgctggcagagagcattctggagccgccagccatggctgccccagagtcttcagctatggctgtcctggagtcttcggctgtgaccgtcctggagtcttcgactgtgactgtcctggagtcttcgactgtaactgtcctggagccttcggttgtgactgtcccggagcctcctgttgtggctgagccagactatgttaccattcctgtgccagttgtttctgcgctggagccttctgtgcctgttctggaaccagcggtgtcagtccttcaaccttctatgattgtttcagaaccatctgtttctgtccaggaatcgactgtgacagtttcagagcctgctgtcacagtctcagagcagactcaagtaataccaactgaggtggctatagagtccacaccaatgatactggaatctagtatcatgtcatcacatgttatgaaaggaattaatctatcctctggtgatcaaaatcttgctccagagattggcatgcaggagattgcattgcattcaggtgaagaaccacatgctgaggaacacctgaaaggtgacttttacgaaagtgaacatggtataaatatagaccttaatataaataatcatttaattgctaaagagatggaacataatacagtgtgtgctgctggtactagtcctgttggggaaattggtgaagagaaaattttgcccaccagtgagactaaacagcgcacagtattggatacctaccctggtgttagtgaagctgatgcaggagaaactctatcttctactggtccttttgctctggaacctgatgcaacaggaactagtaagggtattgaatttaccacagcatctactctcagtttagttaataaatatgatgttgatttatctttaactactcaagatactgaacatgacatggtaatttccaccagtcctagtggtggtagtgaagctgacattgaagggcctttgcctgctaaagatattcatcttgatttaccatctaataataaccttgttagtaaggatacagaagaaccattacctgtaaaagagagtgaccagacattagcagctctgctcagccctaaagaaagtagtggaggagaaaaagaagtacctccccctcctaaagagacactgcctgattcaggattttctgccaatattgaggatattaatgaagcagatttagtgagaccgttacttcctaaggacatggaacgtcttacaagccttagagctggcattgaaggacctttacttgcaagtgatgttggacgtgacagatctgctgccagcccggttgtaagtagtatgccagaaagagcttcagagtcttcttcagaggaaaaagatgattatgaaatttttgtaaaagttaaggacactcacgaaaaaagcaagaaaaataagaaccgtgataagggggagaaagagaagaaaagagactcttcattaagatctcgaagtaagcgttccaaatcttctgaacacaaatcacgcaagcgtaccagtgaatctcgttctagggcaagaaagagatcatctaagtccaagtctcatcgctctcagacacgttcacggtcacgttcaagacgcaggaggagaagcagcagatcaagatcaaagtctagaggaagaagatctgtatcaaaagagaagcgcaaaagatctccaaagcacagatccaagtctagggaaagaaaaagaaaaagatcaagctccagggataaccgaaagacagttagagctcgaagtcgaaccccaagtcgtcggagtcggagtcatactccaagtcgtcgacgaaggtctagatctgtgggtagaagaaggagctttagcatttccccaagccgccgcagccgcacccccagccgccgcagccgcacccccagccgccgcagccgcacccccagccgccgcagccgcacccccagccgccggagccgcacccctagccgtcggagccgcaccccaagccgccggagaagatcaaggtctgtggtaagaagacgaagcttcagtatctcaccagtcagattaaggcgatcaagaacacccttaagaagaaggtttagcagatctcccatccgtcgtaaaagatccaggtcttctgaacgaggcagatcacccaaacgtctgacagatttgggtgagtcattttaaagtttaatgggatggtagtagaaaatgttttaaaccttaatttttttctgaccttgagtcaagtgaaatacttagttactggttt

SEQ ID NO: 102175 - DNA, 5382 bp, Homo sapiens
gatttaaggtgtcagaaggagagtaaggtcatgataattttgtgaaatgaaataggctttggcaggtttatatcttagagtgtgtgtagtagggtgatcattatagttgtgtagtaacctattgtaatattctaatgggaagctcaatatgtggacttaattccctgaatgaggccactgctgaaaaactttgagccagtggtttgatcatagctgtaacttagagcagaatattgatgcctatagttttttcctttttttttttcttttttgttagatacccaagttcttcgatggatctaggatgcctttagttttgttagtatgttagacttttggtaatacaaaatgtacagtcttttaggaaaactgcagcttgtatttttcttcttacagataaggctcaattacttgaaatagccaaagctaatgcagctgccatgtgtgctaaggctggtgtccctttaccaccaaacctaaagcctgcacctccacctactatagaagagaaagttgctaaaaagtcaggaggagctactatagaagaactaactgaggtaagctagacagaatttgttttcattcttaaatggattattccagtgatgttgactctggagcgtgccaaaacccgaattgtgggcagaactgataatggctggcaccgagtggccaaaacccgaaatacagatgtggcagcggcagaagctctgtttagcaggccattatccgggatggctaagctccgctagctaaaagttacttcccattacttttgctttccagttttagaagccaaactgactgaggagtgggacggttcgtttgaatggaggaggtgttgagtgagcaacacgcagaagctcgcctacagtttcgtttccattcacgacgcgttcactgatcgccacgagtatactgcatatacgcaaagacacagacaatcttcagaaatgatcttttgccaccggagcttggaaattaataagaatagctggccattgcctgaaaggaacttctttcgcatcaacatttcgggttttggctgtttggtaccagccattggcgataatggccggccattatcagttcttcctgcggttcgggttttggcagtaacatatatattttaaacacacttatttttgtttttaaaagtttgatcttttcaattgaggcttttttggggctttgttttattactatttttttggtgtgggtggatggggggagatgctaaaatattgctgctaggatccagaaataccacactgtttcatatattggaacttgttattggctagccttatgccagcctgccactgtcaatatattctgttccccttggttacaagcttaatatactcttgtgtttttggcgaaatgagctttttatcctattgtaatattttcaattgataatagatgtcattaaatctactgcttgtatagagacaggtgtacccaaatttactcttgacctttttataaagccaggtaatggagtctgttcctttgcatctcaggaaggaattgactttgctttatgtatcagacctcatcaattgcaccctctccatcatgccttattttcctaagttctccttaaagaaactcaacccacaaaacatttatggagagacatgttgctatctaatcctgttgcaaatatttcagatcttttgttttgccatacatctgggaaaatgtaaagcttctgaatctgtttcctcacttagatttattacaatatgaattacaactttttttaaaaaattaaggaccttgtaaacgcttctattgcttatttacctaatccaagctccttatccaaaatgctaaggacagttagtattttgctgttttcggccccatcttcagccttcttgtcccaagtttcttctcacctttttaccaccacctgactaggatgacttctcctttccctaccagtctttgttctttactatgaaaatctggcttagaactcttcaaggaatattccttgattctctaactctgcctgactattctctcttaagcctttgttcttttagcacttatgtactcagtttgtattatatcagtttgcacttgttattgtgttgctctgtaaaagtgttcaattatttcatgtatatgtattccttctcttgtactagattgtaagctccttgagagcagggaccatgtcttctactttttttttttttttttttttttgtattccccagacagtgcccagtacagtgctctctctgcacatagtaggtgctcaataaatgttgttgactgactgaccagccagagtgtgtttaaatagtagttaatatgccaagttacgtatctataacctatcatgaatcttgtttaactttggaaagttgctattatgtggttttgattctaagaaattacatgttctacataaagcgtaagatttatcttttgtttgtttttacttttaaagaaatgtaaacagatcgcacagagtaaagaagatgatgatgtaatagtgaataaacctcatgtttcggatgaagaggaagaagaacctcctttttatcatcatccctttaaactcagtgaacccaaacctatttttttcaatctgaatgtgagtattagtgcttatggattggtaaaacagtgtaacttgtggaactatttaaataaaacccaaatcgaatttagtttattaatttttgttttaaatactgtgagaaataatggataatatcatttccttcagattatgtagaaaatctcaaaccatttaatgtagatatcatattgagctttaattaagaaacactttattttttagattgctgcagcaaaaccaactccaccaaaaagccaggtaacattaacaaaagaattccctgtatcatctggatctcaacatcggaaaaaagaagcggatagtgtttatggagaatgggttcctgtggagaaaaatggtgaagaaaacaaagatgatgataatgttttcagcagcaatttgccctcagaggtaagtaggaggaatattatgtatttttccttttttatacctgaatctgccatttcattgttatgttatgtctgatttggattctgtttcactcttcttagggccgggttaaacggcagggccgggttagacgacagatgaaacaacccgcagcttctcatttgacagtaactcgatgcaattcactttgtggaaccaagccacaaagtgaaaagcatcgaattgcagagaacagtgttatcacatccctacccaacattgggccctccctgcacttgtgggaaggtagtccaaggtacaactatttagcttcccgatttgcttcaaggctctatagctctagattttggtggtagcaaatttatcgggtggagggattgatcggagagggcagatcctcaggttcaacacaagaactggattggaaaaggtcattgtaggttgatgtgagcatcttgggtacatagcccattgcccttaatgatggtttcttactgtttctctgggttgtttgtcagatagcctttaattttaattatttttccttccctttgctaccttggcccttttaaattcttgtgtttaacctaatgctcagccttggtactccattcccttctccttcccctctttgctactattaaaagtcggagaagtggaattcaaacgttgaaatttccacggggctatagttgtatcttaataatgccaagtgtcaaaacaaccccattaaaatgccgcctgattaaataatgtgctgctaaatatagtgcacatgaaaacagcaagactgtatatatatgtaaatatatatatatatctgtatctttgtatgtatctctgtatctgtacctttgctgtatcttttaataaacagtttacttttatttaacttgttgtgcaaaatcacgcttgggggatgtgggagggtggagtcttaataggggggtgggagttttaattactatagattagttgtcatcgcctcttgcccttggtttccaaagcccagacttttgccaaggactggactaggtatctgatgcccatctggacatttttcttgcagttcttggatatgtagatcagagacacctgtactcttcactgtaggttcccttccttggcttggccatatcatcatcttccagtaaacacctccaattctacaaataaatcctgtttataaaatcagaaagtgaacagaacccaaatcagaaactttttgatagcagtacttttctccccaagctattcacagctgacattttcactttttttttgtttgtttgacctgcagcattttgagagaacaagttctgtacaatgaagctggacatgataactagccagtgcaacttacagttactggtgataatctgtattcccatgggattcaacaagtgaagcaagttatgccatcaccagttaagagggagatagttggtttggataatattttagtgagaccatttgagttgttaatcccccaatcaggctacctgcatatctcaagagagaaaggttaactgacatgtgcagctgacttaatcttcttgtagtagctgaatagaaaccatgataagagggttgaacaggcttacttagaaatcctaatatgtatgcttttagtaatttcctgcagtttaagcatttaaaaaagagttggaaaaaaaaataggtagggagagagtctgtatgacaaatattttccactgaagacttaacaaatattgcagaattccaagggatcttcctgagaagataagtgagcataactgttttgaatttcttcggttcaatcatggggaaagtgcttagtaactcctgatgcttacacttttttgagagagagagagtgtgtgtgtgcgtctatttatttgaaatttagtactcagccattttcaatcttaacactgagtgtggtgccttagccttgtttgtcatcaaaagttgtcagattttaattaaaggttgaggagaattattcttaaatctggtgggaaaagttgatagagaaaggtactcaaataatggtgacattattttttgttaaaaaaattttttttcttaccaaagaagaatcctagaaggtaaaattattttacaattcttttcaaagggctaaatgaataaagcagatgatgtctcttgtgggacgatatatgtaactatttgatataaaacctctttaagctgcttagaagattagactcaaaagaacatacagattaattctaaagaagagaatcccaaaatacaagggcaaagaggcaggattgccttttgctttcatatctgcacttttacctggcaataatgttaaaatgtgtagaggaaatagtcacaatttaaaatgtttagtt

SEQ ID NO: 102176 - DNA, 1252 bp, Homo sapiens
ctgacaaattaagaattggctccaaagattactttgaaaaaaaaagtttcttccacttgccgtaaggttttaaaaggtagaatatgagctttgaaaagaaacaaaagtgtttcagttgatgttatggacttccacagaaatattgtaattataaatagtgtaatatacttaatataagtaataagtgtgtataaactgaaaacatggttcatttatttatatcctgaatatattgtttaaagaaattgggttcttaagaccaaagtgtccacaactggaagatgttaaagatacgctgatgagtaaaggagtgatcatagtggttttctgcttgcttgttcagtaattttgcttactgctcttgaaggttatgctaatgagtaaaatgaaaactgctaaggaatgtaataaccttaccacagttcaaaaaatttgcagtttactataaatggctttcaatcatgaagagtagcgagttttaagttcttaatggaactttctatgattatagtttgatatatatatataatagaaaattgactaaattcagtcagattttgggttcagttctgcgacctgtgtgatactttgtaatttatcttaatcctcttctgttttccaagattactttctctttctgagtcttctccctgttttccaagattattagtattataagactattattttgtttttgatatgtagcaactaaagatatgagtacttttcagaatttaggggactatggtaatttgagataattatctctgttttctttcttagcctgtggacatctctacagcaatgagtgaacgggcacttgctcagaaaagactcagtgagaatgcatttgatcttgaagccatgagcatgttaaatagagctcaggaaagggtatgtagcagttttttaaaaaaaattattatttaccatcagccaactcacaccaatgtaccagttttaatgtctaaataagaattttgctaactagatggttgagttgtaacatcctttaccttattttcaatgtcttattttaaatgaaagtgattcgaggcctgatcatttattcaataaatgtttattgtttactatgtggcaggaactgtttcttgagagaacaaaatagaaaaatttccctgtcctcacagagtttacaatctggtgtataaaaacaactaagtgcctacaaccctatgaaatgtgtaggtattaatagttgccatatttcagccgagaaaactgaagtaaa

SEQ ID NO: 102177 - DNA, 3057 bp, Homo sapiens
aatatgttttaaaagttaaatatttaagtctgcttttcagccatttttagtgaattattaccagtgatgttttaatcaggtaattttacttagttaactgagactacttcttttcttcagattgatgcctgggctcagctgaactctattcctggccagttcacaggaagtacaggagtacaggttttgacacaagaacagttggccaatactggtgcccaagcctggattaaaaaggtacacagtatatgcacatatgaaagtgtcgaacaaaaagtttaaattttttggaaactgtttattaaaactgcatgaaaagaccagtgactctaaccaaagttccaagtaaatttgctatgtgtatatgctccagggcggacactgaagacggactggattcatgagaaaatggcaaatgtataaatgtggctcaagagccactaacttataaggttattttaaaaattgttactgctgcttttgaaggggtgatttaactttattttgaacgctaatagtgtatcaggtgctgttcagaatattccacagttcctgctggactactaacctaatcatttcaaagcagtggttctcaaatttttcttcatcatgggatactttattacaggtttatttttagtggatcactgcccccaagagccctctaccaccttaattttccattcctctattcctttgccctcgcaccccacccgcttcattagtgcctgtgccttcttgtaagatctcttggcccccgttcctcactcctcttgtgacctgtagccccaggaccttttggttgtcagctgctggttacagcaagtggttgggaggccctagtattagctctgcatgtggtgatcttgccatgggactggaagcctgagggaggatggctggagtggggtgggctgtggtgaaggggatgggatggagattaatctgtggaccaccatttaggccctagtggcctctggtgatccacaggctcaatttgagaaccactaatttcatgacaaaacagatatgtaagacctaaaatcaagggagagaatggacgcctcgtgctacgaagatgtaggtgcatctggtttcagattctgcagtgagacctgtgaactccacctacggctgcctcatcattgggggagtcttaggtggctaagaagggcattctgaagaaacgcgttgtggtgaagggacaaagcttggttggatgggtgatgggaaatttgttacaggagtactggcagcatagcagtgctgaaactgggaggccgcgtggtctaatggattgggaaggtttctttatcctgttgtactcctgactccttgtgtaatcatgggcaagtaactctttggaatttcaaagtctctgaggtgtctagtggtaatcagtaacgtgatggttacctatagagagttgctatgagtgccagtgaatgagctgaatttctgaaaaatgagacattggttgctttgtgtattttaatcttgtaacatttatttcaattttgatagctttatctttgttgatcttactaacaaattaatatgaaacatcatgtatactcattatgcctgcctttttttgggaagtagttgcactgatgtgtatagtgagtacacagttagattcattaagaaattacaatttctgcagtttgctgagggttggtgttagaataaagggtgaaaatgtatatagcaaaatattttaaagattggattaatcttggacttctatattatagttactatgaaagtgatttatataatatttgaaaaaatgtctttcatctttggaagaactataaatgtacatctatttctttagttttaattctttaatactatttagtcttgaagctaagtactcagccagtatttcaggaagttagaaataaagcttatgggtgttaaaataggcacataatacagagtcatgtacactgctaggtagaaacttctgaatgtgcttccattacaaaattttggtctttatctaatgatgtgctgatccataatgtttgtatacttataaatgtgttaataacttaaataacttttaaaaagtgaatcttttactgactcaattggttttcccctaaaataatttcttctggtatttgcagtcttgtaggcagttaacagactttaataactttaaaatgtttagtagcaccttgaaaaaaggcttcaactttatattttatgtaagatatactttgggaagcaaattattttgataaattatgagataaagatatgttcagaccaaattttaaattatagataaaagtagcacttaaaggaaaagattcatttgtatagaattactgaagaatatttgatgctagtatcaactaaaaaagaaacttttgaaaattaaaaatgggccacaacatgtagaagtcattaggcagctgaaaatttaggatgtatgatccatgttaaatatcacaaatattgtctactcattaaatgtttagttgtgtttagaaaacctgtcaaacgatcattttggctcttctttagtatagtccagcatctgccttatgtgttaaaaaacacatggaataccaacatcctccgtgttctttttagtttgttgcagtgtatttttagattacaaaaaaagcaaagttttatcagtagtctcattaatcagtaaaacatttaaagtagttcgtttaaaagaaattttatttctagaatggaatgatttggatgtgacctgataaatacagtttgttattgtggtctcattaaattaatcagctttttcacactggggtaaagaaacagatgatgatactagggaatggaaacaaaattggaaacctgggttatttggggatttatattgtactctgcacagttgcccttttttttaggcgtgttccctggaaaagagggacggatgaacctggaagtaagtaaaagacattctaggtgtgtagcatcaaggcagttaatatccaagcatcagctttctctttatacatctacactgcatggcctgcaccaaataaggaactgaaccaggggtat

SEQ ID NO: 102178 - DNA, 1398 bp, Homo sapiens
ttctaagtaaaatatttatacttgctttatagtagaatggggaagaaaactttggatgacaacagtatgcttcttcagtgtctaaactatttctaagtgatttctgggctttattcataaactaggtacacctgggacaattaatatcattgattgttttaacattgccttctttttattttgcaagctaagaagagataccagtgaacctaaatagtggacgaaaacaggagtgttctaattttttttttttgaggggggcacgagggctactgtttcaaaactgccatttacttgtcttatttgacttccaaaatactattacgttaatgtgcaaataatcagaacatacacactacagtatgtataaagtatagaggaatttacatttaattgctataacagatctagaagtaaagtaagattcctctttttagaaagtaaacaatgaatctgtcaccaagttctaactgtaaaatggggacattttacctttctttctttggataggatcagttcttaagagcagccccggtaactggaggaatgggagccgttttgatgagaaaaatgggctggagagaaggagaaggattaggaaaaaacaaagaaggcaataaggaacccatcctagttgattttaagacagaccgaaaaggtaacaagttcttttttggaatgtttattaacgtctcctttaacattacctttaatatatccttttgaacccagtgatactgaactgaaggcacttcttgtatatatacaggtatttgtcagaaaaaacattaaccccttttggggttcacagagcagcttatttttatataactatggatagagacaccagtttgaacttttaaaaggcaccttttgttatgctagttgctaaatatggaaatgtgtatatatctaattttattattacacctccaaattcaactggatttcatgtttagaaaacaggatttccattttattttctcttgacaaggaaccatccttttttctagagtttagtttattttttgttagatattttagcacatcttcattatttcctattacaatactggtttagtctagatttcataaaccctgtttgcttttttcttccaagctcagtagttaagttgggttagagtatagtagaccagctgctgacaataatgttacttcttcctgttgccttgtgttaaggcatcttggaactgttagcattgactgtattttccttttaccttcagatacctgggcagggcagcactgtgtcttctatgtagcttgtatgtagttgctaagtatttaatcattcccacagatgatagctaattggcgtcttttaaataacttcttcccttggaataatgtaagtggaatcatgagaggcttgccagc

SEQ ID NO: 102179 - DNA, 1019 bp, Homo sapiens
tggttacagcattttaattatcattttacgtctatctaggtgtagctgaaattcaaaatgcacatcaaagtaaaactatatcacaactcaatgccatactaaatgtactggcctctgcaatagaattctagtcagacttcattttttactcccttcttatgacccaagtggctttaacaggaatgcaggacttagtgctgatcatcacacaacataccactttctttttagaacctctacaaaattttgaggggagatggtggcattagccctgtggaacagatcttgatcacctcaataacactggcccattatctgtccagcagaacccattgtgaaatagtacaaggtgcacagcccttcactgattacaggcaagtgttacagtagcctagccataaggaaggggagttacatcatagtacaaaatacagtataaaagcgttatttaacattccacactgaagattactctgatgccttcaaacagtcgtttggatgttagccacttaaacaaatacatcactaaggtaaacaatataaacataccaaaaccctgtatggttaaatacaatttccatggtacaaaaatcaaagcctggagatgtttttacagattgctttttacacaatgtcttaaattgccaaatatttacaacattaaagaggaaatacattgtgatgcagagtaaaattctgaaatgattattataaaacctcaatctatctacgtgaggcactcctgaagcaagtggcattagccatgaggtcctttggtacaaggcccattgcttgaagaaccacagtagctgctgtggctttagcatgcttcttattagggctggcaaagctgggctggtaagcgcttccatttatcaatacctattcaagaaaaacatacaattgggtctggtaagggctccatttctcaatacctattcaagaaaaacatacaataagaacagcatcaaactttaatatctattagctttgtattttttcactaaatgctagaaaaa

SEQ ID NO: 102180 - DNA, 1144 bp, Homo sapiens
ttttatactgtattttgtactatgatgtaactccccttccttatggctaggctactgtaacacttgcctgtaatcagtgaagggctgtgcaccttgtactatttcacaatgggttctgctggacagataatgggccagtgttattgaggtgatcaagatctgttccacagggctaatgccaccatctcccctcaaaattttgtagaggttctaaaaagaaagtggtatgttgtgtgatgatcagcactaagtcctgcattcctgttaaagccacttgggtcataagaagggagtaaaaaatgaagtctgactagaattctattgcagaggccagtacatttagtatggcattgagttgtgatatagttttactttgatgtgcattttgaatttcagctacacctagatagacgtaaaatgataattaaaatgctgtaaccaacttatctaataaaattggcaaccagccactattttgttgactatgagaaagttaaaagtttatgttaatttttagggtctgatagaatatttcatgtgtattacagtggtattcatatgctatgtctctaaactttattttcaaaagcttaaggcccaaatacaaacttctctggaataaacgtggtgttttattttctgggttataaagtgaacaaatacttagatactattatttctttacccaatgcttttgatttttaagcacttttattttaaaaatgtgaattatacagtccccccctacacacacacacacacacacacacacacacacacacacacacacacacacacacacacacacacacacacacacacacacacacacacacacacacacccctataagcacattaaatactactttgccgtgacagctcagtgtacttcacaattcttaacactattctatgtggaatacaaaatgcctttttatctgaattaacatgcatttaaaaagttttagtatatgtgaaaataaaggaattataaatcagtaggaaagatattaaggtagaagcatcaccaatcaactagctcagtagatgttgtctgtatttattttctacctttatgaaacaagaacctgctaacaggtaaatcgtaaagtaacatatttttgccctgatgccattagtca

SEQ ID NO: 102181 - DNA, 1249 bp, Homo sapiens
tcttgcatccaaaactcaatagtacctgattcctttatagtttaaggaaacaattcactgtgggtatttaaccatatttgcctttaattttgaacatacttaaggtttttagagttagaattaagacctttaaaattgtctcatgcatctcagttggctagacttataaccattaatattttgggattttgtcactacaaaaattcttagcatcaacttctattaataggatgaatcacattaatcagccatttatttgtcagtctccatagtaattatttaactcttctgtgtttaaagactaatgtgctttttactgacttgtacacacatttccacaggaggttgttcataaggagcttactaactgtggtttgcaccctaacactctggagcaacttagtcaaataccgttacttgggaaatcatctttacggaatgtggtgctgagagactacatttataattggagatcctgaacaccaaagtaagcctaaaaggaatctttgaggaaaaaagccttctagcaaggaaattcaagattcttgaagttgaaggaatatactgaaatgtttataaacataacttttactacagtagcatctaaggttttaaatgtgttttactattttcagattagatttttagatataaagatgaaaaactcagataactcaaatgagatatctatatccctacaacctaattgtatattgagcagaaactgaattaatatgcttccttgcaaatgggaaatcacatagcagttaccccatggcattgtgactaatggcatcagggcaaaaatatgttactttacgatttacctgttagcaggttcttgtttcataaaggtagaaaataaatacagacaacatctactgagctagttgattggtgatgcttctaccttaatatctttcctactgatttataattcctttattttcacatatactaaaactttttaaatgcatgttaattcagataaaaaggcattttgtattccacatagaatagtgttaagaattgtgaagtacactgagctgtcacggcaaagtagtatttaatgtgcttataggggtgtgtgtgtgtgtgtgtgtgtgtgtgtgtgtgtgtgtgtgtgtgtgtgtgtgtgtgtgtgtgtgtgtgtgtgtgtgtgtgtgtgtgtgtgtgtgtgtagggggggactgtataattcacatttttaaaataaaagtgcttaaaaatcaaaagcattgggtaaaga

SEQ ID NO: 102182 - DNA, 1075 bp, Homo sapiens
tattttttgtagagacgggttttcaccatgttggtcagggtggtctcgaactcctgacctcatgatctgccctcggcctcccaaagtgctgggattacaggcatgagccactgcacctggccgccctgcattcattcattcattcattcattcattcatctatctatttagagacggagtcttgctctgtcacccaggctggagagcagtggctcaattttggctcactgcaaactctgcctaacgggctcaagcgattcttcaacctctgcctctggggctcaggtgattcttctgccttagcttcccaagtagctgggactataggctcacaccaccatgcctggctaatttttttgtatttttaatagagacgaggtttcaccatgttggccaggctggtcttgaactcctgacctcaagtgatctgcccaccttggcctcccaaagtgctgggattataatcataataaattatatatgtaaatacaaaatacatgctaaatcttagcaataaaattgaatggattttaaatttttgtttttccaatagtctgcattgacagtgtattactaaatcagataaaatactatatgaaaaaatggtattctctggaatatacttcacctgaaaatctcttaatatggaaaggttgctgaaaatttactaagtatttgtactcacataacattgtttagatgtcttgggaaatagttttattccataattgttaaaagagaggaaaccccaaatggaaatatattgaacatatttttggctaggcaaaaggttgagagatgatcttaattttccttttctttacattttcatgaaggcacggagtgtgaatgtgaagacacaagctctttctggatacagagaccaatttagtttggagattacaggtcctatcatgcctcattctctgcattcactgaccatgctgctcaaatcttcacagagtggatctttctctgcagtactgtatccacacgagccaactgctgtatttaacatctgcctgcaaatggacaaagtacttgatatggtaagtagacacctatgagcagactg

SEQ ID NO: 102183 - DNA, 1083 bp, Homo sapiens
tgggtgtgcaagataaaattaaaaagccagacatactttctatcaagctgtatcctttcagttgttgttaactagaattaattttcattgaatgacgttagtgagaagtttaacattggcagttttatatgattataatcttaaattatcttcaggtcatattaaaactaattctccattgtaatactaaataagcccctaagtatcaacaaatggtgaactattaaaccttttttaatcaaaacgttcaattatgattgtgggagaataggtgtgttttgactagagaagaaattaggtttaggtgtcagtttgtagcaaattcagattgttaacattttgattgaaacatatgccttatgattcggtaaagagaggtagcaagaggatttccatttcattatggagaaaaggagtctcaggtgattcagaatcaagataactgctttccacattaggtgagatttgcttttgcaatttccttgattgtcatcttcaggcgtaaagagaaacatgaagtacaaatggatcacagacctgaatctgttgtgttggtaaaaggaatcaacacctttacattgctcaattttttgattaactctaagagtttagttgctacctcaggtccacaggcaggacttcctccaaccctcttgtcccctgttgctttccgaggtgccacaatgcaaatgcttaaggtaataaaagtctgcataacctagcttttaagaagtactttactttgataggataaattcttgatttaaaaaaaaacctcctagcatttttacttggtacatattttcattttgctttcctcccattaaaaaaagaaacaaaaattatataagacagttatatcaaagaaattatgtggaaatatataaattatatgaaatcctttttattttcttttcgagatggagtcttgcgctgctatccaggctgaatggagtgcagtggcgtgatctcaactcactgcaacccctgcctcccgggttcaagtgattctcgcgccatgcctcagcctcttgagtagctgggattacaagcacacaccaccaagcctagctattttttttg

SEQ ID NO: 102184 - DNA, 1036 bp, Homo sapiens
acagctactcgggaggctgaggcaggagaatggcatgaacctgggaggcagagcttgcagtgagccgagatcgcgccactgcactccagcctgggcgacagagcgaaactccgtctcaaaaaaaaaaaaaaagtatatatatatatatatatatatatatatataaacacgcagccctaattctttaatgctacttcttgtcagtctctgcttccttttttagcagcagctcagagaaagtcagcaggcaattctcaattaagttttgtttaaagaaaaaataagtgtttaagtggtatacactatttgttaaagtattgagaagtcatcagcgagtcctcataaccaatttcagtcctttaaagctaagtcatacgtaaccacaaaaattaaaaccattatctaaaatatttgtgttgtgttttaaaccaggtatcaaactgaattattcagaattataaacattgcattaaatgtttaataataccttaagaaaatttttttacttcataggtctgtgagctttacttctctatataatttgctgaagacaaaactttgcccctatttctacgtttgtacctatcagtttactgtcctgttccgagcagcaggattagctggaagtgacttaatcacagctctcatatctccaacaactcgaggtttaagagaagctatgagaaatgaaggtaaaagtttaggtttaaagtgagaatactatactatatagtaaacctattttggcctaaaagctatttaaatttaaaatgccttttaccagttgattagcaacattaagaaatatattatttctttatttctggctttttttccctcccccacaattatttaatccagcagtccgcaaactttttggcactagggatcagtttcatgggcagtgaggaggatggtttcgggatgaaactgttacacatcagatgatcattctttttttttttttttttttttttttgagatggagactcgctctgtcacccaggctagaatgcagtggtgcaatctcggctca

SEQ ID NO: 102185 - DNA, 1033 bp, Homo sapiens
acgaggcacgagaatcgcttgatcctaggcggcagaggttggtactgagccgagatcacaccacttcactcagcctaggcgacagagggagactccgtctcaatttaaaaaaaaaaaaattcttgtattgtggagaacgtcgacctgaagcagacaggttgaggggaaatatttgaagtcaggaaatgtttcttaaatatgggctttgttagccctggatgcagagtttcagaagcttaaaagatccaaaatgttttaacacttggaatatttctacttcaatacaaacatctatactaccataaagaactgtaaaaactaaaaagtgaaatctgcccctccaccacccctacccccaacaacaaattcccgcttcccataggtaaccatggttaaaagtttagtgtgactcctttcagacttttttacagtgtgtaatgtatttttcatgttatttattatacagcttatatgatttttacttttcagtgatcatgttagctgataaaatctttaggttgaaggttttttcttgatactcgactaatttttgcattctttgttttctaaagacttcacatgtatcattctccgagcctgatattccgtcctcaaaaagtactgagttacctgtggactggagtattaaaacgcgactccttttcacctcttctcaaccctttacctgggcagatcatttgaaagcacaggaagaagctcaaggtcttgtccagcattgtagggcaacagaagttactttgcctaaaagtatacaggtaactctgaaataaaatagttatgtgttaaagtaacaaattaagtgtgaaatgctctcctttgcaaaatagcagatgctgccttccattaagtttttctttggaaatttaaagatacaaagacaggaagttttgtctttcccagatggtgcttatggtgctttcataccttttttttttttaagtcagattgagtaactgctcatacatttagagacttgtcttgcaaattaatcagtgttgcaggcaagaattgt

SEQ ID NO: 102186 - DNA, 1136 bp, Homo sapiens
agccggaggccccggtcccggtgagtgtcttgtagcctggccgccaaggggctcttgtctttcgtgggttgagccagctgtgaatgggggatggaaagtcctcgcgttcgaggcaaggaaatgggcgcgaagacttcggccgcccgtggccttagggtaccccgccctgggagccgcgattctggcaaggccgggtttgtgggaagagcgctcccctggctaccccgctgcgggctgtgctcacgggacgcgttcccgaggaaagtgagggggccccagagggcagcgaggagccccttggagaggacttagaggtgacttggaaaagagctcgaaaaaccctgagagcccccatcttgcaaggacgctgttcgatggggcaggtgacaagccctgcttcccccgtgatttagggcctcccttctctcacgcactccaaattattctggagatgggggaatgtcgaggattcgtggggtcagaattcactagcatctgtcttacccaaagccttttggatctttcggtttgaaacgccggtccctgttcccctcaattttgatactaaagttcagacacaaaactgaagtgttgaaactcatagattggatggggtgcctctgaatttaggtgtacttgcgtttattgagaaacatgtatgccaggtgaggctctgtacatatttaacgcaaacttcagcatcctttaaattttaaaggagaatatatttaacctcagtttttagattctaatcaagaaaatgatttgctatgggaagagaagtttcctgaaagaacaactgttactgaattacctcaggtaatactttttaaatatcattagaatgtgtatttgtataaacttttttttcataggatttgagcctatttttaaaaatacatttatacttctcagaagcattttgcttggaaagtagttttacagagaggcttgatcatctcaaccagggatgaaaataccgcatcagccaaggtaaaggagttggtttgatacagtaatgatgactgtaaagatagccagcgctaaaataggcctgatagacgtgggggttttcttttactctctaacagtttttaccactcttctttgggcagttgacttctccagttcatcac

SEQ ID NO: 102187 - DNA, 1043 bp, Homo sapiens
cactccagcctggatgagagagccagactctgtctcaaaaaattaattaatacactaatagatttgagcactagcatttgtcatataccaccctgtttgttctacttatctttaactagacctgacatttctaatttcattccttctcagacctcagttggatgaacccattccactgtatgaggcaaaagtttccatggaagctgttcagaaaaatcaaggaagaaaaaagcaagttgttcaattttaattttcttctttctcagacctcagtcggatgaacatattccagtatttgaagccagaattttctttggaaattgttgagaaaaaccaaggaagataaaacaagttgcatttttaagcacgtttctctgctaagacaagatgctcagttgacacatttgaaaagtgtttgaaaaattcttgtgcaaatgatcaagataattctataattaacatcttaagggaatttttctaaaaaccttttcattgtttctatatattttgcccctgctataaaattccttccatgaagaaaactgctgctttcagcaaaagtcacactactcttgataaaagctgttgcaggcctttgctaagctatcaaagtaacgtattaattttgtatcaactccgttctcaacaccttccttaagtctttgctgtcataatttaagcatttgagtatattttgaagtcttaaaagacttagcccataggcacttaaattttgtgttttcaactattcattcactccggctttccccaggatcaaagaagatcccattaacttgccagtggcagctgcctggaagtctgagatgaccaggcactgggaacggggaagggagggatgtcggtaggctgcgctggcataggaagcgtgctgacgtcttatctgagttctctgggggttgaggaaggtggcctagtcccctctcctcgcctcttgagagcagtagccactgccctctcttaagtttatggaagcagcagcccatcgccgcagctcaagtttgtttccttttcatccaggcgcc

SEQ ID NO: 102188 - DNA, 1109 bp, Homo sapiens
cctacagaatttctctaacttaacatgttgagtctctgagagtgcaaaacttgaaacaagagaaagtggcctgcctggcatcctctgcttattgaatggttttatttaattctcctttacattgccaccttaacaatccttccagctacgtatcttaaaggatgtgatggagaagttatcaactggtgttttcaggtacgctaaagtaaccaaatcattgttcttgtttgtttttctattttcagggagctaaggcaggcagtcccacttttgttttagctctcgccatgtacctgttgcctccatattttattattaggttggtgcaaacataattgtggtttttgccattgaaagtaatggcaaaaactgcatttacttttgcactgatcttatatttcgtttaaatagctgctctttaatatttatcaaagtgtatctggtggtacaccagtaggtactcgcagagatagaagtggcttgtgagttttcctcactccattatgtagtgtacctcaccctttgcttttcctcatcacccctcccaaagcaacttgaagtaaccaatagcttgaaggagagaaaaccatggtatatttgtttaaagttgaatatgtttatcagttataaaagagggagtaggccaggcgtggtggctcacgcctgtaatcccagcactttgggaggctgaagtgggtgaatcacctgagatcaggagttcgagaccagcctggccaacatggcaaaacactgtctctactaaaaaatagaaaaattcgctgagcgtggtggcgaacgcccataatcccagctactgggaggctggggcaggagaattgcttgaacctgggaggtgaaggttgcagtgagccgagatcacaccattgcactccagcctgggcaacaagagaaactccgtctcagaaaaaaagagggagtaaataaagtagataatttttttccttcaaaacttaaccacttttaacattggaaacactaatggacgaatttgtttgaattacttaaagtaatagatttgaggccgggtgcagtggctcatgcctgtaatcccagcactttgggaggctaaggtgggtggatcacttgag

SEQ ID NO: 102189 - DNA, 1012 bp, Homo sapiens
ctgcctcagcctcctgagtagctgggattacaggcgcctgccactatgcccagctaattttttatatttttagtagagacagggtttctccatgttggccaggctggtctcaaactcctgacctcatgattcacctgcctcggcctcccaaagtgctgggattacaggcgtgagccaccacgcccagcccatcagggagagttttaacaaggagtccagatgctcccaagactctgactttgttctataacatcagccatcatcttactgtcactcagaggggaaagaagaaagcgatagcaggagtggcacagtgcacttcccatcccatttctgaattttttcttgtccacactagtaattactggaaccttcctcaaaatttcactgaacaaaatttgtaataatactggcctctcattaggaatgaatttttgacttacatccctttaatttcttgttttgatttttaggaattttgcccctggactctgaagaccctggactttgtgaagttgttagagtacatgagcattacttgggtatgtagcaattcagtactttggagctcacataagtcttacttcactgacatatggtttaataacattttaatttttttgaatctaccataagtgttgtacttaataaagtatcattagccagtcatgtatgtaaaaaatgttggctggtcatgtgaatacttctagcttataattagtattcataaaattcatattcagactaaacaatatatagacctttaagttttactaacactgctcatggtaagatctttgaaaagtgatttctctcttggctcttaaattatatacctaatcagaattaaaaatttttttttactcttggttattgactgaaacaaaaaacatataaaatttagacagtacatggagagtttgagacgggaaagaatcaagaacactcatctcaagctaggtgtggtggctcacacctgtaatcccagcactttgggaggccaaggtgggca

SEQ ID NO: 102190 - DNA, 1003 bp, Homo sapiens
ttaggatataagtgaaacgaactccttgcccttaaacggttcactctctaggggagagacaaatatacacatgagcagattattatgtaagcttggaagaaagttgcttaacctggccagaagaaacaggaaaggcgtcttggagtaagatgtccaaatcataaggggcaagcatgttgagaatcacacctagcagggaggatattatgagcaaagacaagcaagtgaaagtgggatgtgtataagaattacaaagagtttggtattgctagagcaagataaagtcctgggcaggcgtcaagggtatggtacttggtagcagagaaacattttgtcaagaaaattctcctcctaggctgggcttggtggattacacctgtaatcccagcactttgggaagcagaggtgagaggatggcttgagcacaggagtttgagccaacagagcaagaccctgtctcaaaagaaaaaaaagaaaaagaaaaaaaaattatccttcgaatattgcagaataaaagatattgtacaaaatactttcatgattatgtgaacactaattcctgccttcctaaaatgaagcaggaggataggcaagggccagacctttggttgagccttagatatcagattgtattttagggagattattagagtaggcatttgaaggaagggtggatgtaaggcaaacgagtctaaaggcaagaggactggttgggttgtagaccaagaggcaagaaacagcaaagtccataacctcaacagtggtggcagaggtggagaagagggatggattcaagacatattgaggaaataaagtctgcaggacctagtaactgggaaattaaaaacagatcagaaccaggaatggcttacagagttcttgttcaggcttgaattggaaccaacatttgataaaggaagatgatccaatttggaggaatattatgagtttagatttatacttactgagttcaaggaacttaagtgacatctcactggcaata

SEQ ID NO: 102191 - DNA, 1196 bp, Homo sapiens
gcgggtgcctgtaatcccagctactgtggaggctgaggcaggagaatggcatgaacccgggaggcagagcttgcagtgagccgagatcgcgccaccgcactccagcctgggtgacagagcaagactctgtctcaaaaaaaaaaaaaaatcagtaaaggttatacgttatgtgtatatgtgtttaaggatatccctgtaaatgtgaagagccggtgttctgagattatttaggttgaaataaaggagtacagtatttgctgctttactttgttatcctaactttattgtctacatatatatccatattgttatttgagtacttttaaaaatatgtatccaaaagcttttttaaaattgtacccccaaattttctttatttttttattatatacatttctataattacttatagttgttaaaattagctgtgagatttagggtctgtctaattttgtttaattacatgtaaaaattttcacagcataaagacatattctcataggaatgtgtaaaataacatattgttttgttatcatttggttctaggaagatcttcctgttacagaggataactttgtgaaacttcaagttaaagcttgtgctctgagccagataaatacaaaggtattggttcttttattatggcacaaagtaaaatgagagtttcttagtgtatttagtgtataaatataacgataactgacctctcaatgtgaagaatttattaccatcttcatttttgttaatttttttatttgagacggagtttcactcttgttgcccaggctggagtgcagtggtgcaatctcagctcactgcaacctctgcctcctgggttcaagcaattctcctgtctcagactcctgagtagctaggatcacaggagcgcaccaccacacccagctaatttttgtatgttttttcataaaaatgggttttgccatgttggccaggctggtctcaaactcctgacctcaggggatccacctgcctcggtctcccaaagtgctgggattccaggcatgagccactgcgcccagcctaccatctttagaatagaacagctaggggaaaaaatttagtgtgcttttgtatatttctatataagggacattattagtctgattgaagttacgtattttatatgaaaatacaaatattttataagaaaacagacataatgtaaatattttata

SEQ ID NO: 102192 - DNA, 1040 bp, Homo sapiens
atcccagcatttcgggaggccgaggcagacggatcacaaggtgaggagatcaagaccatcttggccaacatggtgaaaccccctctctactaaaaatacaaaaactagccaagtgtggtggcacgtgcctatagtcccaactactcgggtggctgaggcaggagaatcgcttgaacctgggagatggaggttgcagtgagccgagactgcgccctccagcctggcgacagagcaagactctgttgcaaaaaaaagaaaaaaaaaaagtattcaactttaattgatatatctaatgttagcagctcagtaggaaaccattaaaagccatggttaggagtaatgactttggaagaagtagcacctagtttatatcccagttctggcccagctggtgctatgagacaccagctacatgctttaagctaagactcactttcctcattcatagaataaatgaaataatagtattcttaccaaaaagtatatacaagaatgtttttaacagaacaattcataagagccccaaactggaaacaattcaagtgtctgtctatagtggaatggataaatagcaatttgtttatacagtggagtactatgtagcaatacgaatgaatggaatacaactacaagtaacaacatgagtgagactcacaaacctaatatagaaagaaagaaaacagacattaaagagtataattttatttatataaagttcaaaagcagacaaaactaatctgtgctgttaaaatttaggatattgggtctccttaggaggagaaggggacacagggaacttctggaggtgtatgatgatgtgtctcctgccatgatgtgggcatattcacactgtaaaattcaacaagttatgcgcttcaaggatttgtgtacttttctatattttatacttctgtaaaatttgcataaaaaatagtcttaccacataattactctgaaaattaaagaaacaattgtggaatctttagagatacctcaagaagttcacagagccgggcgcggtgactcatgcctgtaatccc

SEQ ID NO: 102193 - DNA, 1096 bp, Homo sapiens
cgaagcacaacccaaaggggttggccgggcctatggttggaatgaggaagggtgtggtcttcggctaaaatttgcataaaacggaacccatccgggcgattccaacttcgcccatttattggtagtccttggggcggggcctcgcctctttctccgcccccgagcggaacatgacgggagatgtagttccgagaccggttgccatggcgttctggacagcctcgcgagtccgaccccgcccttcaggagtgacgagcggcctgaccaatgggagcagggggcgggctctctgacgaaggactggaaggtggcggtggtgaaggtgcaggccgttggggcggctcagaggcaggtgagccccgggaaacgcgtcctgtgtcttgggaaacgggcctttaagcgaaaggtggagagatgccccacagaaccgtgcagccctggggaggatggtggttcgcgtcgaaccctaacctgggacttgttcgggcccaggcctagcttagctgaggccgctgaggggtgggtaagactagatttgagggacagtttcctggaccttgacgggttttgattgtaggtcttatctcagtttgcatctccctctacttttatggaggcagaggtctgggagtgcccttccacttaatctcccaggttgggtttttctcctctgcttcttgttcctagaatttgagtgtctttttctttctctgttacttcttctcagccacttctttcttcctcatcactttgctgttttcggaaagcagttagtagttattcgctgtatgtggcttttgagccagatcggccctcttcattatgctaaacggcggaatcatctggagcgagatgtaagcatcgccttgggataggtctgggtcggggccgaacatctgcgtttctaagaagctcccaggtgctgctgtccacgttatgagtagaaaggttttacctgaactctgtccagtacaaatataatgcgagtcccttatgtcattttaattttggggtagctacatttaaaaagtgaaaagaaacacgtgaaattaattttaattatatgtttcatttagcctagtatatctgagacatt

SEQ ID NO: 102194 - DNA, 1009 bp, Homo sapiens
catggggaggagggggagagtgctaatcctgcccccacacagcccctgctgattggctcattcggcttgtcactctgttgtcttacatttctttggctcaccctctttgggttcgcacggtgggcggggccagtggtagggggtggtgagaaggtgcgggccccttcttccaattggctggcggtttccccacccacttatgggcggagatggatggtggatggggggcgggggaggcagcggagggagatgaggagataggcgggagcgagggagcgagggagggagcgaaggaggtagagaagagtggaggcgccaggggagggagcgtagcttggttgctccgtagtacggcggctcgcgaggaagaatcccgagcgggctccgggacggacagagaggcgggcggggatggtgtgcggggctgcggctcctgcgtccctcccagcggcgcgtgagcggcactgatttgtccctggggcggcagcgcggacccgcccggagatgaggtgaggagagggctgcaaggcggcggcctggaccacgggcggctgcagcgggggcgggggtcggcgcgggggtctgcgcgatggctgcccggggcatccgtcccgcgcccggcgcttgtctccccggccgcccttagcccctcgccgcgcgcccgagagacggcagcggctgcccctctgccttgtccttcccgtcctcgggggtggcggcggagtggcgggcggacccgcactgggaggccgggggccgcggtgggccgtggggtggcggccgcgggacgggcgtggggatgaatgggcgccgcggccccgccgccgagcgggctccctcctctcgcggggaccccgggcggccgctccttcccgggctgacctcgctgccctcggccgccggcgaggggcggcccggcctcgcctcccgccggcctcccggggacccgcgttggcgggagcggcgccgcctctgcctggagccccggctccttcctcggcccctcgct

SEQ ID NO: 102195 - DNA, 1226 bp, Homo sapiens
aaggcacagagatctcatggattatgtagtggacaggatgtgagggcaggaactggggccaggacccagcaggccagctggtttgcatggtgccactctaaacccccaaaatatgaataggaggaatgtatttgttgggatacctttatttttagatgactttaaggttgagagtgcagaagcttaaacatccttcatagttattatttcttagtttatctctgagaacaaaatatgtttctgtttaaaatttcttttactggtgtgcttgaaacgttattttgatgggagtttccttgtaagtaaaaacattgaaaaatacatacatatgaaagaaaaatccttagtgcagatgggtttgtaaagaatccagggacttttaagtcatataaattaagaagtgagggacactaatttgatgatggtgttaaaattatttcagacacctttaagtagtccagtggagatcatttctgatagtatgatctttttttaaaaaaatggtatttctttatctaggaatgcttctgttgaaattgctacggcgcatggtaccgtcacaaaactcttttattattctgcctgagtaagagaggaaatgaacaaatttttaatgtactttggaaccctgcggattgcacagatactaagcattgtgaaatagggcataaaatgagtggtagcaagttagttctgtgaaatgtttgtcgctgttagcatttttttttttttttggcagtcgactagcaattttcttttccctaaagcttatcttcaatattggtagtagaacctctgctcaagtttatcttttccccaagtgcctagactgggacaaactatcaagcctcctgtaagagattaaggaggagctgctggtaaattcctttcctttttttttttcttgaggcagggtctggctatgtcacaggctggagtgcagtggcgcaatcttggcatactgcagcctcgacctcctgggctccagtgatcttcccaccccagcttccagagtatctgggatcacagatgcacgccaccatgcccagctaattttaaaattttttctagagacagggtctctctgtgttgctcaggctggtctaaaacgcctaccttaaacgattctcccacctaggcagcctcccaaagagctaggattagaggaatgagccaccatgcttcgtccaaattcctctactctaaattatctttttaatttgcta

SEQ ID NO: 102196 - DNA, 1032 bp, Homo sapiens
cttttaaaagttacttgtcaaattaatctatcagttagtggcatattaaagcccagcatattacaaaaaaattttttttagtagtcactgattttataaattaggagccacaagcactataccccagtgacttctgtaagtttggttagtttagaaaggagagagcctttcccaggcgtagtgtgctcaaggtgattagccagaaagaagattcagaacaaagcatttgcttagagagtcaaaatgtaaatttaagtcacagtgtagtggtaaatcatatatcaaacttatatttggtatattgtcttatatcaaaatatcattttataaaccataagtccaacatactgctataaaaattggtttctagcaaatagagaaaattgttatgttttccaatttcacttttcatactaataaaatttgacctttacaccttcttttcaagagttcaccacagggcaccatagatattatgtagttaagagctcaaactttggagaatattgtgtttgaccacacatagtcagggagtttgatctaacctctcaatgcctcatttctcagctgaacatggaaatagtaataataaagttcacatacttctaagtgcttacctaagtttttgagacacatccacttaataaatggtagttacagtgatgataaagaattggggtgtataaaaatacctaaaactcaaaagctaacccatttaattattgtactactggacttttatgatagtaagtagaaatctgttgcttaaaaaagaagtttctttggtggtgtgcgtctatagtcccagctacttcggaggctgaggtgggagaatcacttgaacccaggagatcaaggctgcagtgagctatgattgtgccactgcactctagcctgggtgacagagcaaggccctgtctcaaaaaaaaaagaaaaaaaaaagtttattgctaactccttggtactatgtataatttttttaattgaatgactagactaaacattgaaagtatttaataagctatcaaatat

SEQ ID NO: 102197 - DNA, 2353 bp, Homo sapiens
acataagttagctcagaaattagctttgggaccggtgctgtgggtcactcctgtaatcccaatacttgagaggccaaggtgggagcattacttgagcccaggagttccagactggccagggcaacatagcaagaccctacaaaaaattttttaaaaagtagcccagtgaggtgatgcccacctgtagtcctagctactagggaggctgaggtgggaggactgtttgtacccagaagttggaggctgcagatgccacagcactccagactgggcaacatagtgagatcttgtcaaaaaagaaaggggagggcagggcaagagagagagaaaagaaaggagagaaagagaaagagaaggaaggagaaagaaagaggagagagagaaaaattagcctcatcaactgtccagcattcatccttaaagtagtcttgttatcctttactctgtagtggttttcctaaagtacccctgcatgaaaaacaggattagagtgctagagaagactagtgaaatttgaaaaggcagttcacttgtgatgtggacttgtcttagaaacgcaagactgtacagaagtgtgatgagggagacagctgggtgtgtgtgtccaggtagttccatgttggcgagtttggagatagaaagtggcctaaggaagtttacttcctgaatgtgaatgttggccactttggagatagaaagtggcctaaggaagtttgcttcctgaatgtgaaggcctcagtgtagagagatatcatccactgggagatcactgaaaagtaaaccaaaacatttttattaatacatgggatggtagaatgtcactccagttttgttcctaaagttcgtagctctctaagaaagtgaattttaagcaagttaatctattttaatgcatcactgctctttcggtgtttttctagtagaattaatgataggtagcttgctttattagcttactgcccagagagaacattggtgaaattgttttggcttcagctctctggactgagtttggctgcctagctcagttttcagttggtcaccaaaacctgtcattgtttttgtgtggtatggggtctgctggagtcatgtggtagtgcgtttggcccttcattgagtggtggagccaggagttgagctgagggctgtggcagaattttgaattcaagtgaattcgaatgtgaaaataacaatgtctggccgggcgtggtggctcacacctgtaatcccagcactttgagaggccgaggtgtgcggatcatgaggtcaggagtttgagaccagcctggccaacatggtgaaaccccatctctactaaaaaatacaaaaattaggcgggcgtggtggcgcacaagtgtaatcccagctacttgggaggctgaagcaggagaattgcttcaattccctgcttgaacccaggaggtggagatttcagtgagctgacatcgcaccattacactccagccttggcgacagagcgagactctgtctcagaaaaaaaaaaaaaaaagaaagaaagaaaataacaaggtcatagcaacacagcaagtggtcagaattttacccttggtggttaaaattaaacatcctctttttaatacaggaggacaatgctcttgctcctctgttgcactggtgagcatttgatgtgttcctccttgcattatgtctgcaaatcgttctggtgtctggtggcatgcatttgcaagacatggatacagttcatggacgtggacgaggtcagctggcttttagtgtcaggctttaaccaacctagttaagaaggacgctgactcttaccataaaagcactgcaacaagattggaattggagctccaacgaattggagccattcgttttgtgtgtgtgtgtctgtttgcctgtgtgtgtgtacagggttaattacttctctgcaaggcaaatttcctgaccggttttattgttctaacacagacaaaatgttgtgtaaacacatatatcattccagtgtgttatctataataggagtgttcattgtggatccagtgtttcacaaaaatcaattcatttccgctctgaacttaagatagtagattttaaaaccaagttatctttcaatttctgaagttatctgaaactcagctgccccagtcttgcagaattggagaattgcattttggccactgatgaatgaaagctatatagctagtaatgagagaaaccttgaaaaattgacaagaaaatgagtgccattcttggtatatagcagatttcaatgaatagtagttccctttgcctttatttttcctctttcctgcacttaatataaagagctaatattaaagtcattaaatgagaatagatctgtattata

SEQ ID NO: 102198 - DNA, 1074 bp, Homo sapiens
cttgggacttgactctgaatgtctgggaagtaggaagttaatgtaagttttaagcaggggagtcccatgatgtgcttttgtttaaaaatctccttctgagtatcatgtgggagtggattggaggatggatagagaggaacattccattgactcggcttccagctgtctatggatgttgacgtttctacctagccttctgctttatctttgtgatgaggataatgtggtgtactttgtgaggtctcaggaatggtttgagatgaatggtaatttgtgtaaactttccggagtttctctgaggaaaagagaaccccataaaattattactattgatcaaatgaaatagcagtgtaagacaaagatcaagaattatttagctttataaacaaattaattgaggttatgaatataggtttctataggagagattttgtttcctttttttagtgaaagaaatcttaaatgtatgggaatgaatccttaaaatagcaggcttttgcattgtctatagaagctgttctctttgaggaagatctgttttgtaaaatgctgctgttgtctgtccaatctggagttttaattagtatcaaagggagggaaatcctgcagtaatcgtaaccttactttaattcttagttcaattagttttaaaccacagtcattatctgttatctttagttgttttgatcttggtagatgaagtgattaatattacagttgtgatttggtaatttaaaaaataacatgttttttcctactacaaaaggaatacatgtttattgaagaaaacttttggaaacatatataaggaaagaagactaaaagcctaccaagatcttaccatccagtgataatgactgttaataccctgtgaaggtcaacatgctcaaattacccagcaggtgcctggtgtgaagctacttagcccgggagagttgaaggcctgttagggaccacgagcactgaaggtggcaggacggtccagggccagtcaacccagacctttgtggttctgggaggatgcgtcctggtgttactacaccttatagttatttaggagaatgtgggtttaat

SEQ ID NO: 102199 - DNA, 1008 bp, Homo sapiens
ctcatttctctcttgtgaccgccatgtgagacataccttttgccttccaccatgattatgaggcctccccagccacctgtaactgtgagtccattaaacctctttttctttataaattacccagtctcggtgaaaatgaactaatacacgtaagaattttgaccatctgaacccccatgaaagggtcttaggactcccagggatccacagaccacaagagaattgctgccttgtaggataaaatctaaaccttcactcacagtttagagtgcattatgctgtatccctgttgaccttccccttttcctcttctatttctcttccatctggatctcaccatagaatgttcttttgtcactttagctttacagtttatttcccttctgcctccccctatctgtcccttatcctttaggcctaactgggtgttactgaagtgaaaatacccgtacctgccgcagctatgagtcattttccctttgatttccagcactgaacttttggctctacctctttccatctattttctagggacctctgatttaaagttccgaatttacaaatcccatcataacaggaaagcattttacatccctcttgtgacttaaacttaatttatactaatatttttcattttgaaccttcttatacctaattaaatgaaacatttgagcaaataggtgatggggtattgccttttttggggtcttctgttctgtcagaaatggtattatagttaggtctagcccagggaaaaaactgatttcctttaacagttatttgaatgatacccattttcctaatcaggaaggtttcttggtattatctaggtactgggttttatgctgccaagttcatcagttaaatggcctttagataaaggacaggttggagttgtgctcagctcatataaaatgtgctttagaaggacttctggtattatctgacccacactgcccctcatgtcacacatgtttctgcacgtacacaggatgagtactgagtacc

SEQ ID NO: 102200 - DNA, 1122 bp, Homo sapiens
gatgcggtaggtttctggttttaaaaaaggatgtctggtattgattaaatctatagttttgaactttctaatccagcagctctgtggagtaggtactgatacttggattttataaccagggcacaaaatggttaagtaacttatctgtggtccgacggctagtaagtggcaggtctggtgtttggatccatgaagtctgtttcctgagtctgcactgttcacagtatgcgatctatgtaataccgctccttatgtacattgtataataatagctccctgggaatgtatgtgtgaagttcccatttggaaggctggcatcgtagtactgcactgatagtggtggcagtgattgtgaggtgggttgggttctggtgcctatggcaggggctccagcaagcagatggttagaagacagatagggagcaaggataggaggatgggctgctataggggccagacctcctgcccaggatatttctggtccagttcgaaagttggacctttccttcctagagattggctccacttatggctttataataggacctcttccccttctggagtcctttggagcaagatgcattttcacagttttctcccaacctctttacttgagtctagcacttactgcctttgaacttctctgagggtttttactaccaactagaaatgaaagaaaaagttgaagagggagatggtattcaaaagataagtgatacaaattggagtcttttaggattcatattattgaaacgcaatttgtcaacctccctaagagggtcacatcactgtggtgtgggcccccccaaggcatgtcatcactgaggttaggatgggctctctgccatgaggagtaagccagtgcctccagctactggctagaaacagggagtgttgtcaggagatctgcactggggctgaaggacatccccgcctacttcccttttgctcttcttactatcagtctttactaccgcagatccctttctagggtccacgacctttgctggggtaaagtgggatgcagggatggggcctggggatgctctaggcagtttgcatgaaggagtggctccattggtgttaaagattaggccttctgatactttcttctccacttgt

SEQ ID NO: 102201 - DNA, 1023 bp, Homo sapiens
atctaccacttagaacattaagttgtaaaccagagtcagcacagccagggtggagattacttatttgtatcccttgctcgtaggttatttaatattctctgttgtgtcaaagtttagtcgggtatattaattagtcagcttttgctaaattatgttgtggtaacaatctccaaatctcagtagtttacgacaacaaaactttgtttctcagtttaaggctctttgtgggcttcatgccatggtagaacctcaaaagtggcatgtgccatttcaactcatacttcattggccaaaagcaagtcacgtggtcatgcagggcctcagtaagcaagaaatatttacccgcccggggatggacaggtaggaaagggtctgttaaggaagggcagcaaatatttggataacagtactatgtgtttgtatggagcgatatttaagaaggtttcctaggttttttgaggggtattgaagctgagaggttgggggcaggcaggaagctctgcagcctgtagcctatggtatcaagcttcatgagaacgagaattaactagttacatctttattaccatttttggcatctctgcagacagtggatctaatgcatgatagctgattaataaatgtttgttgaattaatgaacaaaatagcaagaaagtaacgtattctgaggcaggagaattgcttgaaccaggaggcagaggttgcagtgagctgacatcatgccattgcactccagcctgggcgacagagtgagactccgtctcaaaaaacaaaagaaagtaaacagattattttcatgctatttgatgcctccgcttagtttggaaccagtttttattttattttattttattttattttattttattttattttttgttttgtttttgttttcgtgttttttgagacggagtctcgctctgtcgcccaggctggagtgcagtggcgagatctgggttcattgcaagctccgcctcccgggttcacgtcattctcctgcctcagcctcctgagtagctggg

SEQ ID NO: 102202 - DNA, 1263 bp, Homo sapiens
cttatgttttaagaaaggagtttatgttttcactggatatactcggcgttcagggaatcagagactttcttcaagtttcccttgtcttttaaatagggacgtatttgcaagttcttatctgtttggaaattcctgtagcaagttcaggtttagtcattctgtactgctttggtggtgccttatctaaatagtattgaaaggaagaaagaattatttcaccaagagttggccttgaaaggagttagatgtattgggtatatttaggaagtaccccttcaacgctgtaataatataccaacttttaaagctacctcataatagctcttaaaaacacatttaaaacacttagaggtgatcctttttcctagccatcagtgggacaaattaattcctttttgagtaaaaaaaaaaaaaaaaaaaaaattctctttttttagtactcaagatcagcaagtattggttgactcattctttgttgttaaacctcttggtttctcaggccagtgtgtctttttgtatactttgaccttgcactttaaactgaattccttttgtcctttgagggaggcataaagctgtcagttcctgttggtgagtgtgggaaattgagttttcactcttctctataatttctgcatttcaagtggttttaataataatcataactatttctcaattttacttcttaaaaaagtagattcatcagactgaattgaatatttgttttccttctaaagctgaagccaattttgccatacttgtttgtgcattcttaagagtttagtacttaagcatagaaaactgtggggttcacatttatattttgctttattacaacttagaaggtaattgatgacttggctctgtggtatgctcaaagtgctggactgagctagttcaagaatgtcattagcagtgaatgggaaatatgtgtctacttttcttcagtagctaaacagaagtaattatatatttacattctacctatttcatagggatgttgttagaattactgtgattagatttttttttttaatttccaaatgtatttaagcttctttacagataggtgccatatcaaagcaaggtgttaatgtcatttttctcaatttgtgtttttgtcactagaaatatatatatattgctttttctcttttcctggtatatttttctgataaatgttttgaaatttgttatcttaagtttttcatagctggaatgctagaaaagcatttatgtcctatttttagtgcaagtgatgag

SEQ ID NO: 102203 - DNA, 1028 bp, Homo sapiens
aagacaatctgaaatgtatttgagttttgatgtttctaatctgtagaacttgaaggcctaaggattttgtagttttttagggaacagcattcctctttctctcaggtgatctatgttatgttgacctactcaaacatgttaactttgaaaatgaaccaacgttcaggaacaaatgaaatgacattttcaggacagcattccaaatacatagttagggacagttgttcgtagcttctggagtgtttgaaaatggccctcatatcatacaacttgaattggcattcattgacaatcactttgcttttaaaagatgcttaacaaagagttgtaagtaacatactttgagactgagtaaataaaataaacatgcgaacctttgatgttaagctgagtttgtttgatttttcaggctgaatatacaaagactgtttctaggaaaacttgtgctttgtacagatagaggaacctcctaagaattttgattgtggcttccaaaatagcagatttctagaatatgattacctactttatctaagatttcaaaaagctgctttgtctattttatgatataaagttttcaaaaaatcatcactgttttgtttgccttttttttttttcttgaaaaggcatgtgtttaagcatcagccttattagctggactgttatttcatgtatttctgttagaacgctggataatggacttgaaacttacatggctaatataataccatgaagtttaggaaactaagggctcatttctgttgtattccttggaacgtatgtgggttcaagatcaaaatcattatttcttctttgttttggtatttgtctctttcgggaattaaaatttgttcccaaacattcgtaggactacactgtagcaggaatctgaatagaaaacactccttgtttagttctgagtttatgtggatgaggactaagtgaccattgaaggtggaagggtgatcacagagattactcagaacttaatttattaattctaaaatgcgttcattgaatacacatgg

SEQ ID NO: 102204 - DNA, 1022 bp, Homo sapiens
ttttttctttttttttttgagatggagtttcgctcctgtcacccaggctggagtgcagtggtgcagtggtgcagtggcacgatctcggtgcactgcaccctctgcctcccaggttcaagcaattctcctgtcttagcctcctgagtcactggaattacaagcacgcccggctaattttggtatttttagtagagatggggtttcaccgtcttggctaggctggtcttgaacacctgacctcaggtgatccacccacctcggcctcccaaagtgctgggattacaggcatgagccattgtgcctggcctggtcacttgctcatagttattaatctgaagaagttctacagtaaatcaaatgttcaggattgcctaatgttgacttactgatttagaatatcattctcttggtatgcttctataaactaccagtgctcaatttttcttttcaattttgaacttgttgatggacagtgtctacagtctcttgacagttatgtaatttgtgtctatttaggtttaagctgtcaccttcccaaatgcggcatctgtgtagccccagagggagcattctaaaaggtaaatctgagcctggcgcagtggcccaggcctgtaatcccagcactttttgggagctgaggtgggaggatcacttgagtccaggagttttagaccagcctggtagcaagaccctgtctctacaaaaaataacaataaataaaattaacaggcacagtgatgtatacctctagtcctagctaccgtagaggctaacatgggaggattgcttgcactcaggagttcgaggctacagtgagctatgatcgcaccactgtactccagcctggtagcaagggcctatctctaaagaataaaaaatagactaggcatggtggctcatgcctgtaatgctagcactcggggaggctgaggccggtggatcacctgaggtcaggagttcaagaccaacctggccaacatagtgaaaccctgtctctactgaaaatacaaaagttagccggg

SEQ ID NO: 102205 - DNA, 1505 bp, Homo sapiens
ttcaggaacttgatataatgttttattcttgatgacccactggaaaatagaaccttctagaagaaataaagtcactttattgaagctttatgaatggctctcctatctgcatctgtagggctctacaatctgatttttccaaacaaatagacaaactatggataataacttttcagatgttactttgcagttagttggtggtctggaagaagaaaaaagagcttcaaagaggggactgttaattccatttatctcttgaacaggaattgctttcctgtctttcattgctgtcccttatttttcacctttatgttgtagctaggttttggttttattagctccctgatgaattctctcttcctgccaatattaaagtaaggatgatttagaagaactgaggttaaaatctgcctattgaagctctccaggctagataccctgacatttctctttgtggaaagtaagcaggagtaaagggacaaatcgtccgaaatgccattgagtgttgccaagtgatgtgctgacagctgtacctgacagtgattgctggaccctggtcattcctgagtgtctccttttcacctcccatcccctgctgccactcccccctaacaacaacagaaattctgggaggaatgcctgttccctatttagaggacaacttgagtgatcatgatagtttgtcagatataatgtggacaatgacctttttcagttttagtaataagattcttctttttatcaggttctttatcctttatgcagttttaaaatattacttatgaacaagctgcatatcccttttaggtcatcttgttcttctacttcaaatagcacatgtagaagccacatttgaggctcagggcttcagacatgacaatagggcattgatcaggttggctatatgtttgggatttgtcagttcctttgtccattttttgtctcgctttcagtaccttttctctgtgttttaaaagggctttgtgtacctcttgcctttatgtgtaatcttacagggcagctttcttctttttcattcatttcctgctctaagagtcatctcaagataggaatctggtataagactcacttatagaacagggacataggctcttccagttgttttcattcattgcagattattttaaataagagaaaggtttccttgtatttttctttaatgttttccaattttgaattgttatagatgcaaagcctttaaaaggataatatgtggaggcagtatttgtttggggtatcttttaattgtttttctagatcaaggacagatatagatagattaatacctgaaacgaaaccctaacaactctcaaatatcagataatttttttttatgtttctgaggatgtttttatatcctttgagatatttaaaatatacacatttttatgtttctcccacatttggacatttctttcccctcaatgtttcattgatgccacatttctaccaattttaatcttgtattctatatcttactatcc

SEQ ID NO: 102206 - DNA, 1002 bp, Homo sapiens
gttctacagtctttgtgtgataatctcaacattttcattgtcttggagttggcatctgttgattgcaattttttttttttaagaatttgtcagattttcctacttctttgtatgtccagtagttttggattatatcctggacattgtgagtttcatgttgtatagatgttgtgtgctgttgtaatcctctgcagaatgctgtttgtttcagtaggtatctaacttggttagatctgccttggttatataccagactataaattctctatgctgtctgtggacaggggttcctttctcagttcagttttcaagaccagtgagtgctgtgcttctttgagcctgccgtgcatatccatatctcaggtgtgagcctaagacaagcgggagttaattcacacaatggcaggtcccatttctaccttctttcctctctggttttccccacactttacagcccacaggtgcctttttcattagttcctttaaccacaaagaccgtgtttctgttggagttttagtctctgcacctgtgcttcactgcatagctccctgactggggcccacctgtggggcagagttgtagagaaaagacaaaaaagaaagtttttactccatggaaaggaaactttttagaaactttttactcacctcccaaatctgcctgcttttgtctacttcttattgtcctcaagtattatagttacattttgtgttctgtctgctatagcagaagcagaactctggtttgtgacattttattttatttttatttttgagactgagtcttgctcttgctgcccaggctggagtgctgtggcaggatctcggttcactgtaacctctgcctcctgggttcaagcgattcttgagcctcaccctcctgagtagctgggattacgagtgcccaccaccacgcccatctaatttttgtatttttattagagacagggttttatcatgttggccaggctggtcacgaactcctgacctcaagtgatccgc

SEQ ID NO: 102207 - DNA, 1050 bp, Homo sapiens
tagccatttcttaataaaattataaaaaataggaatagaaggaaactacataaatatggtaaataatctttactaaaatacaacaacaaaccaacctattaaaatatgaaataccaaaactgtcactgtgaaagtcacaggcaatacaaaaattattgctatcacaactattttgtatagcttagtattattgctttgggctagtaatgtaaggctaaattctttatttccagaaaatataggtctaggaaatctaaagagattcatatgtgagactattagcactaataagaaagtatggtaaagtagctggatacaaagaagagaaatcaataacctctttattttgcaacacagtaaaaaaatggaagtaaaactgaatgaacagaatgtattctcatatatattaaatatctgttttactatgcatttaaaatccagagcttaccatttttgggaaactctacaaaaagatatatgacatgttgattccaaaaggattttatgaggactaagtgagataaaacacactaaaatgttcaagagaattatcaaggttgcctatacaatatattgaatgagaaattgtcgaggaaaagaaaggcagctgcaatttctaaagggaatctacagtgagaagtagtctgattcacaaacctctggttaaatatggtgtcttgactacacttgttttctccttccctaaagtctgcaataatctcaaaggaagcttaaaaatgttaattcatagctgggcagatggggtgttgtcacctgtaatcccagctacttcggaggcagaggcaggagaattgcttgaacccaggaggtggaggttgcagtgagccaagattgcaccactgcactccagcctggggacggagtgagactctgtctcaataaataaataaaataataaaatacataaataagtgaaatcttaattcataaggagaaacataacagtaaaggagacagtgaccaaagattttaacaatttttcaaaacagaaagtgaatggagggagtagtaactgagttcacagagaaa

SEQ ID NO: 102208 - DNA, 1050 bp, Homo sapiens
tgtataataatttttagcaaattatatagagttgtgcagccatcaccacaatctaatatattaatattttaatcaccccccaaaagattttcatggatatttatcacactcaccttcttctttcataacttttgcctgtggcatttaaggcacttgagagtacagttttaggtttaagttaatttagtctgttgcttgggtttatgtaagtaaattattaatttactataatcttgctaactatgggattataaaacaagtttctaaaaaaggaatgtgtgcctcttcttttctttccctcccattctctctctttctgtttcttacattttgtgtcctgttttacacttttctaactttatatgcataacttccaaggacaagaagatgtgaatttatcaagtctttataatacattgacagaatcttgaagtgctgtggaaatagtgtgtgagagcattttgttttccttttctcactgaataatttgtttgtcttttctttggattttaggcagcctggatatctgggccataactgtagaggaaagagcgaagcatgatcagcagttccatagtttaaagccaatatctggattcattactggtaatcacagtcagcattttttcatttttacttatcagtagtgcagatgtctgtggaaactctatcatgcaaagacgagatgggcaaatatgaccaaggagagacatttacctgttttgccctaaccttgtgcctgtccttttacaatttttttacacataatggaatcataccttgtttgcaatttttagtgcatgtcaaaccacttgttttgtgcatgtaatttatgggaattggttaagatcaaaggaccaatggctcacacctgtaatcccagcactctgggaggccgaggtgggcagatcccttgaggtcaggagttccaaaccagcctggccaacatggtgaaaccccgtctctactaaaaataaaaaattagctgggtgtcgtggtgggcgcctgtaatcccagctacttggaggctgaggcaggagaattgtttga

SEQ ID NO: 102209 - DNA, 1005 bp, Homo sapiens
tgatttcttatgttataaaaggagaacatgtatctctagcctgaaatatcttgttacttcttaccagagagttatgtctgaaaagtgtctttctcatatggaactaaaacaaaacaacaaaaaaagtggtgacatttgaatgacaacactgtcaaaaagttgaatttccatggagacatctaaattttggtgttccttcaccaattagttttggcttcacccatatcacccacatttatttgaatgtcccacatttcttgctttataatggaatgattttttatctttcattgactgaagaataaaaggtaaagaaaatatttgagagttagtgcatggtaaatccataacattaatagataatagtgaattatttgactatcacaaataggcattcaatcttttaagccacaggaaatacagagagtataataaaaagggtggcaaatacagttttggattcttggctcatggctttggagagccatgctgaattctgttgtcctctaagatgtctcatttttttcaccaagggtgcttaatacttcacttccctgagttaattagtgatacgaaggcagctcgctatgaagaaagagcatgtaggctgggcgcggtggctcatgcctgtaatcccagcactttgggaggccgaggcgggcggatcacgaggtcaggagatggagaccatcctggataacacggtgaaaccccatctctcctaaaaatacaaaaaattagccaggtgtggtggcgggcgcctgtagtcccagctactcgggaggctgaggcaggagaatgatgtgaacccaggaggcagagcttgcagtgagccgagatcatgccactgcactccagcctgggcgacagagcgagactccgtctccaaaaaaaaaagagcatgtgatttgtagtcgtacacctgagtttgattcccaggtgtaccattttcagtgtctctgatttggagatacagttaccctctttgacctcaagttttctaat

SEQ ID NO: 102210 - DNA, 1113 bp, Homo sapiens
attttgttttcgtgttggtgggagtggtggttttggaaaggttcttttatggtcacagttgttctcaggccatgctgttggtttgcagggcactagctgacatgaataatgatggaagaatggatcaagtggagttttccatagctatgaaacttatcaaactgaagctacaaggatatcagctaccctctgcacttccccctgtcatgaaacagcaaccagttgctatttctagcgcaccagcatttggtaagtctgaaaatgaattggtttctgtattttcttgtatattttaaaaataaatgttttcctttttttccctctcggtttataacattatgaaattctaggaggtaattctgtctgaaaaatgatggccccctgcaggaagatagtgctggggagaagaaggagcatgttcacatttgaaccctgggatgtaaagtaatcaaaatgaaagcagagatgcaggccgccagtcaggggaaaaggaagaaacttacagtccgctgctgcagcttctgggtttttttttttttttctcttccattatccttcaggttgttgcatacttccttttgattttcggtttccataatgtctgtttctccttgtgcataaacaattcctttggattatggcatctagaaatatatatattttgaatcacagtactgagtcacttggccacattaaattctttcttagaacaaaatggaatagagaaaaaataaacattgttatcctgattaaaaacctaattccagccgggcatggtggcttacacctctaatcccagcactttgggaggctgaggcaggtggatcacctgaggtcaggagttcgagaccagcctggtcaacatggcgaaatcccatctctactgaaaatataaaaaattagccaggtgtggtggtgcgcacctgtaatcccagctactcggagaggctgaggcaggagaacctgggaggcagtggctgcagtgagccaaaattgtgccactgtactccagcctgtgcgacagagcaagacttcgtctcaaaacaaacgtgattccataaaaaattatctttcaaccaggtatttttcttataagctaattgattaattagt

SEQ ID NO: 102211 - DNA, 1131 bp, Homo sapiens
aagcacagtaggccaggcacggtggctcatgcctgtaatcgcagcactttgggaggccaaggctggaggattgcttgaggctcctagttcaggaccagcctgggcaacatagtgagatcctatttatatttttttaatgtaagtagatagatagatagatagctaataaatttttccttttctgtaaaatggaaaaattattatgtaagagaagatttctaacaaatttggaagcttaaaagatgcttttaccagtctgatgattaaacagtatttttaaacttggccttttcctcagtgtctttttgaggttagcctccttttaggttaggggtctgcagcacagatggggtacgtgtcttgaaggttaactggttgcgcagtatgctgtgtcaagccttttgaaagtctgaatgatggctcatgaaaacttttggtttgtttccatctatttttatttgttgcttgagtagattgacattcttacttaagcaaaaaccaggatttggagtataattcagtatagttatcaaaagaaccaaatttttaaaaagaaaaacacattaaaaatatagttatcaaataatcttagaaaattttggaattctaaaactgacaaggtaaacctgatacatgttgctatgtgtggatatgtaaagttaatctgattccaaatgagatgtgtggtaatgtgcttgatagtgtgcacgtgaactgtaaaccagtcatctagatgactataattataaacttactcagtaaagcccaagttagaatttttttcttctctttgttggattttcagtgtctataaacattgtttttaaaaatgaaaataggccgggcgcagtgactcacgcctgtaatcccagcactttggggggcccaggtgggcggatcatgaggtcaggagatcgagaccatcctggctaacatgatgaaactccgtctctactaaaaatacaaaaaaaaattaaccaagcatggtggcgggtgtctgtagtcccagctgctcgggaggctgaggcaggagaatggcgtgaaccctggaggcagagcttgcagtgagctgagatcgcgtcactgcactccatcctgggcgacagagcgagattccgtctcaaaaaaaaa

SEQ ID NO: 102212 - DNA, 1049 bp, Homo sapiens
caaaggatctgagagatttggagcagtccagcccctatgaactcaaaagactggcccaacaagccttccttttgggacagggcttcatactcaggaaaaatgactgggagtggaatcaaaattgagcagtatagggacatggatacaaaggaaagagatggtccagacaaaagtaggggaggagaatggagactggaattcctaagaagcaaggctcacataaaaatgagcaacagaaagtatcaagcaaggtcaaatccactgcagaaagtgtcaagcaaggtcaaataacacaaagttattattaggaaaaaggagaataaagggagaaataacacccctgtggacagtgaaagcacaccagtaaatcactacttcaaaacaagctcaaagagaataagaaaatgatacaagacttgaaagatgaaaatcagagtttttaaggctcataaataaggtgacagaaagaatgagaaataaaagaaaaattcattctagaaatgaggatgcaactagaagcaacacaggggatactaactgaagaaaaatagaagttacaaagaggaaaaaaatttaaattaaaaggaaatgaggctgggcgcagtggctcacgcctgtaatcccagcactttaagaggccgaggtgagcggatcacctgaggtcaggagttcaagaccagcctggccaacatggcaaaaccccgtctgtactaaaattacaaaaattagctgggtatggtggcacatgcctttaatcccagctactttggaggctgaggcatgagaatcgcttgaacccgggaggcagaggtggcagtaagctgagatcacaccactgcactccagcctcggggatagagtgagactaggtctcctaaataaataaaaggaaatggaaaagatataaaaagaatttgagaaacagtaacaagtatttaagacaaagaagattgaatgtatgggcagcaggagtccctgaggaagaaaactaaaccaatggaatagaacaaatgataaaaatgaattcaagacaactttcttaaaataag

SEQ ID NO: 102213 - DNA, 1070 bp, Homo sapiens
tttaattggaatatattacagctggaaagtgattttctttaagcagtactgggttaattattattcagtgttgaaatgtgattggatgtgaatggtgttgagctgttttttcttcataggtatgggaggtatcgccagcatgccaccgcttacagctgttgctccagtgccaatgggatccattccagttgttggaatgtctccaaccctagtatcttctgttcccacagcagctgtgccccccctggctaacggggctccccctgttatacaacctctgcctgcatttgctcatcctggtatgtgacttgctgaaaccataggctgagtttttactacttgtattttgctgttcattattaaaatattttctcttcacgttctgattatgtttaaatgatattttagtccagaggaaaatatctttatttttttcacttgatttcacattttttccactgtattaaatgggatatgttagtgtggagagagtcaaagagaattatagatttctgggtaccactgtggacaaaggtgagctcagcagtgaaagccacaaatgtaattttctttcaagggctgagaagagcaattgaagttgaactgtagttgaacattttctatttttatgtatcagttactacttttctttagccactatgaattgctaataagcaagccaatcccctaggaatagaactatgttgggggttgtgggaaagaataaaaaagaacagtttatactattttatggtattacatgcctgcttaattgaaggaaaggatttaaaagtttctggtttaattaattccactttgagactttattaagtcttttttcctttagttaaagtataaaactgtagatgtagatagccttggtctaacatcttaatgaattcatatcaatatggaaagtattatttttaaagtactttgactacatctaagtaaattcagtattgacgacatgggttttagcatcatacttgaaacatttctgcgcctttggccccctgaatttgttgtatatttatcaggatatatatttaagttatggccaaataagc

SEQ ID NO: 102214 - DNA, 1148 bp, Homo sapiens
tgaccctttactgatagtttgtcatttcctggtctagagcagaacatttaacaatatagagctgggtatggtggcttatgcctataatcccagcgatttgataggctcacttgaggccaggacagatcagcctgggcaacacagtgagacccccatctctacaaaatattttaaaaattagctaggcatggtggcgcacaccttgtaatctcacgtttgggaggctgaggcaggaggatcatttaagcccggaaaggctgtggtgaactatgatcttgactgcagtgaggctgcagtgaactgtgatcatgactgcagtgagtctgcagtgagctgtgatcatgactgcagtgaggctgcagtgaactgtgatcatgtcattgcacatcagcctgggtaacagtgagagctcatctgttaaaaaagattcatggaatatgagtgtattatatgttaaatatgcaaaggttggggaagagtatcattataatcatagcatttgttgaatgaggaacactgtcccaactacctgtaattttatctttgcagcagtataaaataggtactattttgacaaaatgagggacaaagagactcagttggcctgtggtcaataagaaaacataacttttaaatcactaatgaatagtaaaaagcatgaattttcatgaaaccggattacagttaactttttgttgaataggaatctttctgacattgatcaagatggaaaacttacagcagaggaatttatcctggcaatgcacctcattgatgtagctatgtctggccaaccactgccacctgtcctgcctccagaatacattccaccttcttttaggtaaggaacatgggctctgatcaggaattgtatgcggagtatatgaattccaaacttggctttattgactatgtgtcttacctgattttcatccctgacaaggaaactaagtatccgtgaattctagagactctcatctaggtctatgttaatcttgggcccattttgttcttcaaagtacttgaagtatattagtgaaacaatgaagtaaaacatcaatagattgttgattttctaccaacctatgtcatcaatgcttaccagaaattttcacaacagatgccagcagcaagagagaaactgcatg

SEQ ID NO: 102215 - DNA, 1013 bp, Homo sapiens
gagagatgggaaagggaagagagatgctcctagtgagctgagctgctgatcttcccttggaggaatttaaggttacttgagagggcaatggaaatagcagctcccacttagtgctcaccatgtcccaggcattgttcttaccactttttgattattaactactttcatcctttggaattgtttcaattttggtggtgattcttaagcttggcactcagagtctgatgacattccaatattcattaaaaaactctttgtaaatagagaagaccaaatctttatattttccttactgtaaatgaaatttgctccatggcatggtaaaatctttaaaaatccttcttcataacttgtccaactccacccagacagctctgtgtgaatctatttttctttttccccgcaattgcagaagagttcgatctggcagtggtatatctgtcataagctcaacatctgtagatcagaggctaccagaggaaccagttttagaagatgaacaacaacaattagaaaagaaattacctggtaaggcagcctttatgttgagttaaatcatttagattaaacgaaattagagatttcctatctctaagacaaagatagaggtaaacataaatttagtttttgacatttttgccttgtaacttaactgaccttagttggagataattgttaattaagcttgtggatttgggtctggatagagaaataagaacattatgcactctgctaatgcaccgttgttctaacttgtaacttgaaatctgattataaactgctaaacaaaaattatgtaaatgttatccatagaatatacagcactaaaaactgatgagtattaaggtgattgcttaataccaccagtgcagaaatagaaaatcaaatcatctactgttgttttctcatgttgttataagagaattggaaactccttaattgcaggaacctattttaaatttaatgtgaacctattttattttatttattttgttttttgagatggagtctca

SEQ ID NO: 102216 - DNA, 1038 bp, Homo sapiens
gtaaatataatacccagttctgtgtattccctttattcccatagaaggaatactgtatttttatgtaattttttgttttctaatgtgatttcttgtaatgtttaatatttcatccctaaaaggaaagacttcctagatgccatttttgtgaaaagacattgtgtagtgtaagaactgaaaaattagtaatttgtctctgtaaatgtcacaggctgcaaaacgggaacttgaaaggcaacgacaacttgagtgggaacggaatcgaaggcaagaactactaaatcaaagaaacaaagaacaagaggacatagttgtactgaaagcaaagaaaaagactttggaatttgaattagaagctctagtgagtgaagtttggttatactttgaaaatatactaagatggaaccattaaaaacagtaataatttttattatctttcatttgttcaagaatgataaaaagcatcaactagaagggaaacttcaagatatcagatgtcgattgaccacccaaaggcaagaaattgagagcacaaacaaatctagagagttgagaattgccgaaatcacccatctacagcaacaattacaggtgaggaaatatgcctcttaaaagctattatattaaactggcatccttttctctaattcatttcatttacttacttattcagtaaacattaagcaactgtcttgtactaggcactgggaagcaaaaatgaagtagacagggtccttgtgtgaaaagtagcctgtcaaggagacaaactcagcaaatatttactgagcactgcttcgggccaggtgcttttgcagtttctgaggctacagcagggacagacactctgtcttctgggagcttaccctctgtttgcaggaggaacagagactaacaaaataaagtgtgtactgtattagaagatgaaaagtgctatggagagtgagtagggaagggaatagagagtcctagggataggaaatgttgtgattttaactaaggtagccaagacaggtctttctggatggtgacatttgagca

SEQ ID NO: 102217 - DNA, 1168 bp, Homo sapiens
taaagggcagaagttttaaattttgatgaagttcagtttaccgttttttttcttttggtgttcatgctttttatgttctatctgagaaatctttgactaccccatgactgcaaatattttattttcttctagaagtttttggggcttaaaaaaataatttttacaagtttttataaattgaaaaaaacttaaaattttaagtttcatagttgtatcttatatgtttaggtctatgagctatttcaagttgatttttgcagatagtataaggtaaaggttgaggtttatatttttacatactgatacacagttgttatagcaccatttattaaaaacactggcttttttcccattgagttaccttggtagcttgttgaaaatcagttgaacatatttgtaatggtctattctggactctattctgttcttttgatctgtctgtcctttaccagtacctcaccctgttgatacctaatttttgaagtcaagtgatacgaattctctgttattgttctttttagaattgtttttggttattccaggtccttaacatttccatgtacattttagaatcagcttatcagtttttacaaaaatgcttggaattttgttggaattccattgaatttataaatcaatttgggaagatttgacatctcagcaatagtaaatctatggcataaatctctattttggtagttataaatttctctcagcaatgttttgtagtttgcagtgtccaagtcttgtagatactttgtaaagtttatccctaagtattttgtggcttttgatgctattgtatattgcatatttttattttagtttccagttgtttggtgccagtatatggaaatagaatttatttttgtatattgaccttatatctgtgattgcttaactaacttcctttgtgtgtcttactttgttgaccagaacctcccatactatattggatagaagtgggaagagccttgttccctctcgatgaaggaaagctctctcaccatagagtatagtgttaaccagggttcttgtaaacaccttttatcaggttgatggacttctccttttgctgagggtttttatgatgaatgggtgttgaaatagatcatatgttttttccccgcatctattgagataagtatgtgttttttctttcttattt

SEQ ID NO: 102218 - DNA, 1022 bp, Homo sapiens
cttataaacaatcatatactactttagatgtatgtagatattagcatttttgttattcttataagaaattggatgttatacttttttcccctccaaatatttgttttccttttctaacataaaattctttttaagccaattcagcttttgacagtgggaagaagtaaaactcctattctataattctaaaaacaaaattaaaaattagcatatttgaaacttttataatagttgacctttggattgagattctaggccaaattgtctagacatctgagtttgaggtatgtgtgctgttctttcagagtattaggtaatgatcttttctcaattgtacgattccaggaaagtgctcttaggggaaatattatttgagccaacttagtgtttttcttcactttgctttcatgcttacatggtgtgtgtttgtgtgtacactatatatgttctatattcatgcatatatgattatgtgtggtatgtcagtattggaagtacagctgtaaattaaccatctctagaataagtgcaattagaaacaaaaaaacaaaaaagaataagttcaattaaagtatgctcacattaactttcattgtcacttgtctcttttataagcaaaaaaaaaaaaaaaatagcactgttgcaaagcctatgttgctttttaatagtctcttgggatataaactgttaaatattaagctctcttctgaacccaggcagtagtccagatttgtgccttcacattgattctttttctagaaatttgactcccctaaaaaaggttcaggtattagaaaatgatactctagtgagaggcttttgataaatgtctagaagattaaataattttggtgattgaatttctgttgccattactaaagagaacacccttaatatgtggcgagtcacccctactttgtttaattgactatggctgctttcagtatcacagagtttcttacataaaggccaattttagcccccttttccactagccctttttccaaatatgcttattttta

SEQ ID NO: 102219 - DNA, 1058 bp, Homo sapiens
taattaatatgatgagtttaaaaaaaatcacaggtcaggtcgggtgtggtggcatgtgcctgtaatcccagcactttgggaggcaggtggatcacttgagcaagtggatcattcgagactagcctgggcaaaagggtgaagccctgtctctacaaaacacacacacacacacacacacacacacacacacacacacacactagtcaggtatggtggcatgtgcctgtagtcccagctacttgggaagctgaggtcagagaatcacttgagtctgggaggttggggctgcagtgagccatgattgtgtcactgcactcctgcctgggcaacagagtgagaccctgtctcaaaaaacaaacaaacaaaacagtaaacaaatcacaggtcagtataactatattgttttgttatttaacacgcatttggaggacttagtgaatatgttgtgttatggttattatctctagtattcctctcaaacctgataaagccaaaacaaacaattaaattggagaatcaaaagatttatagaatttgattgagacaactcagagatggatttatcatttagtctcttaagtgtcacttgcccacttttctttgttgtagccacactggaaaatgaaatactttttttgtaactttagagcatgtgtccattagcaaccatgttttcttggatgaagagataggccaggaggagccagtctcctgactcttggggtttcttcagtgcccctcttgatcggcagtgcctttagagcatccacgctgttgatgcaaaaattacttctgccttcctgggatgtgtcatttcacacatctaacctgatagtgtgaatttgttgtatcctaaaccttcctttccctaaaggaagccagctggagagtacagaaaagaaattagggcttcctgttcttttgtatttcatgttcacgtagattgttcacctggaagaaggaaatgcagttccctcattataggttagtactgtaacactggaggaataccttacagagtacagaattttaaaattagttgatcaggatactaaatc

SEQ ID NO: 102220 - DNA, 1074 bp, Homo sapiens
ggtgaaattttccttagccatttcccccaataatttgctcatttcctagatatgtaatttaatggcactagatttgtttgtcactttgaatttttttctttctgaaggagttaaaaggatacttcttaataactgtaactgtacttgagtctctttaatagtatggagaagaatgagagaatagtgtagccatctgctcccctatgtgaaaggactgggtattctacaaggactttgttctggcaaaggaaggagagtcattcactcatttttttaagagtatatatttcttcattctatagattgccttctcggaagttcaactttttaaaaagcttatcaacttagaaatcatccatgttctgcttatgttgattcatgccatagtaaactctttaagtccaagaaaagagaagacccagaatgcctgcctctgggcagcatgttgatttccttacaactgtgtatctcagcagtgtttgacttggatgaaggaaatgatagaaaaactttgccatcttgaaatctggatcataaggtgccagagccttctgttagcttatttgtcgtctgttattttatggttcctgcaagctccattccttggaggtgcttgaaactgcaacttacataatcagttcctaagatcggttcaaatactgctatactcaaaaacaagtgtgtttaaaaaatttaagtatcttttttcatgtatttgatacatttaaaaattatttttgaaactgtgtcataggtaggttttttttctgtagattcttcaaaatcactttttcttacaagcttttcaattttatagtctctcctaatgtattactagctttacttaaatccggtaatcaatgatctataaatccatatccagttacaagagcctagtatagaaaggaaatgtgcggtataattcttggggaaaaatgaaaaatcttcatttgtgcctatgggctatctattatagtatgttgatacatcatggccagtgtccattctggttgtgcagtacctgttgttgaatattttgaatatcactcatgaatacattttttcctggatgaa

SEQ ID NO: 102221 - DNA, 1042 bp, Homo sapiens
ggaagagtgtcttcatcggggattatcagtataaccaaaatcagcacttagtttttatatgaccaggttaaagagcctaaaacatctgcattttcatgtttcagtatggaaactggtgcctctgttccctcccaaacaagttgactccttggctgattcagactttgggtcatatcctaactgctacattgtactcaacacactgggtagggaggagggcgggtattgatgctttacagatctgcactgctggagcccaaggaaagaggcagagacaagggacctttaggcagcctcgccgcacccaggcttggagtgacctttgtttagagagagtcactaatgaactctctcatgggtttttgttgctgacgtcagatttggctgtgctttggcattcagtatgtgtttcagaaattccttgaatggagggaaatagttcagaggttaagataggcaatagaggagaggttagttgtttggcttgttgtcatacatttgtgttctctgtaattatttatttttgtcccccccacctttttttgtaaacagaaaaaggtccacttaccatttctgcacaggaaaatgtaaaagtggtgtattaccgggcactgtacccctttgaatccagaagccatgatgaaatcactatccagccaggagacatagtcatggtaagaaagactccagtgagagggtcatttctgttgaagattagcctctgtcctctttttttcactttattcaacaattgtgagattgtcagtgagtatgaaacccaataatccagcatctagatttttaaagtataagctcaatcttctttcttttctattaaaatgaaagatggcatttaaaaaaatgtatcctaacatcattttaaaattgagttgataaagacagtgtgttcttatttttaaatctataaatgtctgataatttcagagtttagattactacttatatactatgagtatacatatatatgtaatacatatattttatatatgatgtatagacaatatatatactagtgtgcgtg

SEQ ID NO: 102222 - DNA, 1016 bp, Homo sapiens
gtttgtatttttttaatttcatgaattttgcagttaacaaatgatgagcatgagacatgtagtacaacattactgtcagtctccctaggttgaaaaatccggggttcacttatacttttgtgggcacagtcatcagattctcagattcctcaaacgtctttgggacatagcttactataatatgttcgatttttagaagtctaacattgtgacagtgttttttaatgtaggcagtcttagccttaaaaatattttgtttttagaaaaacttagcctggttttatccaaaactataatttttcatgtttaacaaaaatttaatgtggtaccttgtatatagcactattctcagcactgtagataatagaaaattatcaagtctgccattcatatgtttaaaatctttttagaaaaatctagagaaacacatgaaaaggccaacatgtgatgaagttctcaataaacattcactaactctgctaggaatttaaaagaggagaggaatcagtgtaaagtgatgtgctcagggaagaccaaatgctttcaattgagtctgaccttgatggctaaggcttagatgcgtagaaaatacatggcctctcttgatctggaactcccaatacttggagggtgaattaaatcaaatttgacatccgtaacatgttagtagaacataagaaatgagaagacctatgctcactgctgttttgttgaagtttatcttgagaacacaggctgagtgtctaaatcagtacaatcttttggctttcatgggccacattgcaagaattgtcttaggctgcacataaaatacactaacactaataatagctgatgaacttcaaaaaaaagcttgcaaaaaaaactcataatgttttaagaaagcttacgaatttgtgttgggcctcattaaaagctgtcctgggccacatgcagccagtgggttgcgggttggacaagcttggtttaaatgcttatccttggactggtacaggcctgaatgcatccagattgct

SEQ ID NO: 102223 - DNA, 1080 bp, Homo sapiens
tcagaattaaaatgcaaaccttaaaagcatttggcgtaataaatggcctctgtgaaatttttaaacagtataatcctggattttcctgtgcactgaatatgcaagttaaatttatacaaaagaaaactacaggaccttaatacaattgattattgctgtaaataatgacttccttaattttctcatcatgtgtctgtggagcttttaaatgcctaaacacagcagcagtcagctttgcttctcgtggaaaccatttaaggccatggtttttttttttaaatcttccttgtccttatactgaataaatactacttagttattggaggttttcagagtactgaatttatattgattgcaccctttgctttcaactttaagtaataaactcaagtcaaattatttttaataatgacatgactttctgatgaagcctgttaagtcacttcccaaatcaaaatatttaaattacatgcctcaggactccaggcactttgtctcaactgccattattaggacagttatggggtaaggcttttttaaaaagtgcagagaataagagcttgaattatagtgcattttttttttcagcattactgcttagactcttttcccagacacttggactaagatgaagagattcctatgccatatgtcaatctaaagagggcagaggcttgggacttcactgtagttgggtgctgggtctattcaggggttaatttagttctacttaaagctgtgactttttccacaggtggatgaaagccaaactggagaacccggctggcttggaggagaattaaaaggaaagacagggtggttccctgcaaactatgcagagaaaatcccagaaaatgaggttcccgctccagtgaaaccagtgactgattcaacatctgcccctgcccccaaactggccttgcgtgagacccccgcccctttggcagtaacctcttcagagccctccacgacccctaataactgggccgacttcagctccacgtacgtgttggtgggctctttctgatgatttttgaaatcccaatttgatcatttcccccccacccccttaagtatttt

SEQ ID NO: 102224 - DNA, 1116 bp, Homo sapiens
gtggagaaatacagtttcctaataatctattttgacatccatgtcagtcagcaaattttcagagttatttcctgcatgcaaatagcacttttttttgccaggcagaagcaaaaattgaattcagtcatgtggttctgaataagatagaaagctgtttcctttaaagctttccactttcattaatcttatacaaatgtacagtagaatgaagaggtgtttgcacttggccagttagttctgtgccctggttcatcaggaaatggcattttaaaaactgtgtgtaagcagaggtttgaaatgatagatgaaatggttgttcagacttccagttatagggccatgacctagatgagcaattgtctaaaaatattttatactaggatacaagtatgagtgatttgaataagaagtgtttaaattttttttcaagtctaatcatctttcagaagaaacaaattgaaggcaaggaatccagatgtattgctggagaaggatcagatggaacaaatagagggaagaaagaataattactcagggcgggaggaagtggagggaaggatgtaaggaatagcaagtttttcatactttattttcacataaaaggctgaaggcgctaaagaaggtcccctcatctaatctctgctttaagaaaaaaaagccttccattagcttgacttccaagttgaaacttttccttactcttttggtcttgactgaaaagttctgagtttttaaactaaagcttaggctaaaatagaagactaataccatattttccaggatttgttttgctggggatcaaatcagtatgcctcttcttcaatatatgtatggtgtgcagttctcttgctataattatgggcaccttattttccaaatgaaaaatcaggaattattttgattttcagatttgtttgtatatcttataaggatgtaaaaagtaaattgcctttagatctgcagtcacacagacatgtttatctaaaattattttttattatttattattattttgagacagggtctcacttcatcacccaggctggagtgcagtggcatgaccatggctcacagcacccttgacctcctgggctcaagcaatactcctgcctcagc

SEQ ID NO: 102225 - DNA, 1507 bp, Homo sapiens
tcttttatttatttatttatttttttggtactttactgtgggtaaaaagctggcatattagggagtgcttgcttttttttttttttggtactttactgtgggtaaaaagctggtatattagggagtgcttgttattcatggtgttgtgcttttccctccaggtggcccaccagcacgaatgagaaaccagaaacggataactgggatgcatgggcagcccagccctctctcaccgttccaagtgccggccagttaaggcagaggtccgcctttactccagccacggccactggctcctccccgtctcctgtgctaggccaggtaaaggcagccagtgagagtgtgaagacttagcatgctatctagtgccaaaaacttcagcaaatgctttttggcaatgtcattttgaagcaagccttgttatgtgtgtcttggttggctggcagtatgggaatccagtgcaggagccagaaatctgctgtgaatagttgggagttgggggtgggggtgggacacagtcaacttctcctgcctgggttgatgaaggaagcttcattgcagaagtggcacttgagctgcatcttgaccagtgggtaagatcttactagaaaatggagagagcctgcctgtcagacagaaactgctgggaaggctcgaaggcagacagtcagaatgtatttaaggaaaatcacatacccctccatttgtctagaccattgagttttttttggaaaaggtagaccaattaaaggttaatgggaggctctgaaatgccctgctcggaaagaataatgtctgaaaggataaaggtggttattctgaatagttctcttttgcttaatacaataatgataaaatactcaaatttctatcaataatcatgccaaacagcaagtgcccatctgggaggcactggaggttccagcatcatttctgatctgagaacacccagatggaacacagggtctaggcagatccatctggaggagcggtgtgcaggaagattagagtggagggccggcagggcggtgccaccagtcagggggctgttggtgtcacccagctgagacctagggcaggcctggacccagctgagttcatgttcaccaagtagggaggtgccggtggaagcagaagaggcgagcacgtgggagagactgcagaggagagtgaagaggttggagtcacaatgcctatgggagccgaaggaaaggaaagagggctgggattgagaataagggcccaccttaaagcgggaagggagaaaggcagaaaatgaaatgaatgcgcagttaaagggaagagttgtgttttagttgtgttgagttgaaggtgaacgtgggaccctgtctggcaggctgtcggaatatagatctggaggatggaagagagcacgagactgggattatagattggagccattcccatagagaacattatcggatatcaggaaatgtgtgaggtcatccaaggagagggaatacagggagaaaatagcaaatccaca

SEQ ID NO: 102226 - DNA, 1045 bp, Homo sapiens
gttaatgatctcatgatagttcataaaatgtctgctccactgttaatcctccactaaaaatgccagtcaaattggaaatggggaggtgtcccgggcaacttgagagtgaaaatagaaccaaaatataaagggcacacagccagatgcaacagaataattgtgacctcctggctttttgaaatagagagttctagatggtcagacaatgactttgtgaagaggctggaaggctttggcctccacttttggaaataaacaattgttgggaaacagtgaagcatccagccctcctgctgtgctgcctcagggccctttgtggctgtgtgtgcttgtctggcctgtgcttgttggagaggtgccatgctcacgtctgccctaattgataacaaagcgcaacataacgagaggtcctttatgttattccacacaagggtgaaaaggtggaggggctacaagctcaagccctatatccttggagagccaaaaaagacaaccacttaaattttaacaaaaatgatgtcatcaccgtcctggaacagcaagacatgtggtggtttggagaagttcaaggtcagaagggttggttccccaagtcttacgtgaaactcatttcagggcccataaggaagtctacaaggtatttttgtatttatctgcttgtatttgatgaaaacaatattaggcgttatattactgtttgcactagttaagattcacagacaggagttgcgggattagtttgtcttctagatcttttaactgcaaaagttatagtatatagagtaccaaaagggagcctcttatagataagtgcattctttcttctctcatgaaaacctatgtgccttgtttttcattgccttatgcaagaaggaattcagctctgagacctggaacactcttgtgcattagttggagattatgactctctttatgcttattacccagtgctgtaccagatatatgtgaatacttggaaacccaaaggatctggggaaatgatcagaaggacttaattgtctttttcattagggtcttatagcat

SEQ ID NO: 102227 - DNA, 1089 bp, Homo sapiens
ttttttaaaaacctgtgacgtagtaccctcaaaactgaaatacacatatttaatatgcttaccaagagcctgcatatgaatgcatctgacccagtgctcagcacagagtaggtattgtgtaactcttagttaaaaataaatgtaaaaaccattttcattcaaaaagaaatcatgatgctaaatggtagatcactcttaaatactcaagtgtcggtaaacatgcagttgggttttttattcctgtgtctgggtcttcccaggaattgtctccctgtctgcagctactgaacttttatgtgcactgggggaatgtggagcccagggcattctgcagctctgtattttatctgtgactagcctttctcttgaatggatcttgtcctaacttccttattcgtaaacttgcttttgcaaagctgtctgggatttctttaaacaatcaagctctctccgtatctcaatatttctccccaccagaatttattgccatgtacacttacgagagttctgagcaaggagatttaacctttcagcaaggggatgtgattttggttaccaagaaagatggtgactggtggacaggaacagtgggcgacaaggccggagtcttcccttctaactatgtgaggcttaaagattcagaggtaaacccacattaactgtttcctctccctttctgtgcggtgattctctttgtggggagtcacgatgtttgacagcggaactttgttgggttttgctaagttctggaatgtgacagtaaatccagtgtgacctgtcattgtttgatcttgtcatttggcactgcgcagtaagcactggcttcccccaagcagaatgccatcagggctaagtggaggctgagtgtgatggggctggtccgcatcagctgggaggataatgttcagtattaagctctcttcctgcctgtaactgacttacgctttggagtaaactttcttgattagatcattatggtcattgatttttaaatgcccaagaatggtagcaatattttgcctgtataaacagaagtattctggtgataatcgccccagaatattggatattattagaaagtttttagaa

SEQ ID NO: 102228 - DNA, 1072 bp, Homo sapiens
gcagtggactagccacggaagacagaccctcaggtgctcctgaggaatggaggttggaacagcaggagcaggaaggaagaaggccttgctggggaaggcctcgggtctcacacagtcccgtctaccactctgtggaagtgagcctgaggccaggacaggaagagccacactggagagctgaatatataagaaacgcatcttggccagaatagaaggcacaacctggagtgtaactaaagatgaaactttccctggagagtttgctgatggacacccataaatgtccagatactactcactggttaaggaatctgacctctggaggcctggaaatccactcctttttgtcagcatgccttctcctgtgctggggagggagaggcctccttagaccctcgggtcccactccctgcttagagttgtgctgtatcacccattggtccttccagcatcatgcccctgtcctgttctggagacgtgggagactcccatcgcctgtcctccttgcctgccaggggaaggcttcctgcggggcccctctccccggtgcagcctcacgtcttaccgctgagcaatggcgtctccactccagcctctttgaaacaccagcaccccctgctctcctgccttgctgcctttgttcatgacatttctcaccagcggccaaccagctccaacctctccactttcgcaagagctgggagatcccacttctggaagctctctgtgaccatcccaaccagaagcaccgtgtccctcccctgagctccagcactggccccgtgccggcaccactctttagtattttatattactttgctttctgtgcacatttcttacttccacatgtagctgactagcaccttggaggcagcagccgtatttttcagtccccacacctctagcactgtgcttaagtgagtgtttgagtggttcttaggattctcaataaagtggctgagttgccatgacccaggagagctcctggcgctgtcaccagagtgactctcagcgtggatccacaaatgaggaaacaccagtgagttctgtgctgtgctgcagaggtgtggga

SEQ ID NO: 102229 - DNA, 1042 bp, Homo sapiens
aatcccagcactttgggaggccgaggggtgcagattacgaggtcaagagatcgagaccatcctggctaacacggtgaaaccctgtctctactaaaaatacaaaaacaaaattagccgggcatggttgcggtgtgcctgtagtcccagctactcaggaggctgaggcaggagaatggcctgaacctgggaggtggagcttgcagtgagccgagatcgtgccactgcactccagccggggtgacagagcgagactccgtctcaaaaaaaaaaaaaaaaaagaagtactcagtgtgtattggtggccattattattattattattattattcctaaaacccatatacagtgttggcattaaccataatgtctacattacctgaaattaacagctgagtgctagcattacatgagtagaatttcctgtcccaggcaatccatggtatatcttaattttgtgatccacacagtctagccgaagcaaaaacattctgggctttgctgaccagtgattgccacaatttgaatttttagctatggtgttttacttttgtgacatagtaatccatagattttaccgttaatgtcatttgtttttcagttatatgtaagctttacataagtgctctgttataaagtgagctgtattataaaagatgcgcctttaaaaatgtttgatgtaattattttcttactaggcacgtgggaaaaagcgccagataggctggttcccagctaattatgtaaagcttctaagccctgggacgagcaaaatcactccaacagagccacctaagtcaacagcattagcggcaggtaaggagtttcgcatctctaactggaagatggtctgcatgccacttgagtttttccacttgattttctcattaaatatcttaggttgtttttcacatgtgctttaaagcacttcctgtacttgctgggactgacacccaactaatgtgatatggaatatgtctttcaaaaggaccagatatctaagtggcttttctgtgctggatacaacagaacccttgttggaatg

SEQ ID NO: 102230 - DNA, 1034 bp, Homo sapiens
gtgatgtgggcctggggtattttaactctggaagtttctgttttgctttatctaaattgaaaggatggttttgcctttcagcctttagaagaagccacactctctgaattaaaaactgtcctcaagagcttcctaagtcaaggccaagtattgaaattggaggctaaggtaggttttaaattatttatggtacgttttctcgggttattttaagcttaaaatggctacagaaagtactagtgaaatattagatctaactctatactaatttttctgtagttaaaattttgtatttattttaaatttaaatgattatctgactgtgcagttttacttttgcctttttctaggtgtaattataacctcttacatttgtgcaacacatttagcctttcaaaacacttttttgtgtgtcccatttgattagcgcgttttcacatttccagtcttacttcttttgtagactgatccgtcaatcttgggtggaatgattgtgcgcattggcgagaaatatgttgacatgtctgtcaagaccaagattcagaagctgggcagggctatgcgggagattgtctaaaagtgttggttttctgccatcagtgaaaattcttaaacttggagcaacaataaaaagcttccagaacagatcatattatgttcactgtcttttaaactggaatgtagaaggctttatttttatgtccttttttggtatcccctgagtataaaggccaaaaagcccttttggcctagagaatttggtttgagtagattatgtttaggaattaattggttagacacagcacctaacacatggtcactcagcaaagtctatctggtcctgcctgccaaaatcccgtgtctttaagggtttgttcagagttcctggtccctactagatcatcggatctgtgtttgatccatagccctccagggaggcctcttgcccttgatcctaacatgaacacacctagttgtaggctgctctgtagctttcaaggccatttcatgtacatctgaagctgcatgacagc

SEQ ID NO: 102231 - DNA, 1055 bp, Homo sapiens
tccattcctagcaaactaggaggttcgtgggaaggtgatttcccaagcaacttggcataatcctcattgggtaagtttaccccttagtaatagtaagtagctcaccctcatgtaatatgtgaatatacaaagagacaaaagtaatgattttaaggttatttaaaattttttgttgttattgagttaaatgcagaaatccttcaagtaattttgtttgatctattttcctttattgctttgaaggtgcgatgcttcagtacctctgtggtcagaccatttgccaagcttgtgagggtatgttaatttatattcttctgtaatgataaagtacgcgaaagtgtgagtcaaacagcagtacagtcagggcgtggatttttgtgtagttactatctaaacctttttgcgtgacttgtggttcccaaaatgtgctgtgtgcatagggtggggaaaggaatggtgttgagtatttgctttttgacaggcccatgcataatctttaaatatgaaaactttttaatcatttgtttttccattaaccctctaaaataggcaagctagcatttacttactttttttttttaatgaaagaaacaggtttaacaaagtgacatgcccaagttatcacaggaagttattacaggagacgatattaaaatcaaggtaccgggctgggcgcggtggctcacgcctgtagtcccagcactttgggaggccgaggtgggcagatcacgaggtcaggagtttgagaccagcctggccgacatgatgaaaccccatctctactaagcatacaaagattagccaggcatagtggcgcatgcctataatcccagccactcgggaggctgaggtaggagaattgcttgagcccgggaggcggaggttgtagtgagcagagatcatgccactgcactccagcctgggcaatagaccaagactctgtctcgaaaaaaaaaaaatatcaaggtacctgggtttctaatgcagttctccatgttccattctggtgagaaatattcatactcttcacaccctttctttccagtaggcaccaa

SEQ ID NO: 102232 - DNA, 1487 bp, Homo sapiens
gccttgcgccgcgaaggtccctagctccggggagtcgcgggcgaggggcacgcgcacggacgagaccgcaccgcagcgcacgcgcactggcgggcactcactcgcccgccgcccgggaggagaaggaaggcatggaaagttccagccggttcgagagctaggtagcaggcatggcaggaggcggggtaggggcaggcagggtcgcgagggggcgtgcggccgccgcgagccgctctgggccgcgtctgcagcaccgcccctagccgcggccggcgggctgggctggggtcggggcgggggcggtgcggcgggtgcggggctgcggagggggcgtggcggccgcccgcgggcggagagggggcggggcggcggcaaggcgcgcgggcggggcggggcgcgccgagggggcgtggcgcggcgtctgcgcagctgccagcgcctttaagcccgggctcgcgctctcggaccgtgctttcgccgcctgggagccgtccggcgcagcagtttctaggtccccactgtccccgccgtcccgccccttcgcgtcccgggaaccggctggcttccgagccgcactcgccgatcctccaggcatgccccgctacgagctggctttaatcctgaaagccatgcagcgggtaagtgaccttccctcagagccggtcttcccgcgcgggcgcccccgctgccgctaggccgccgtcccccgcgcgccctggccgcgggaccccgggccttcctgcactcctcggaggaggccggggcggcgggcgggcggcgggcgtccgcgggaagggggcgcgcgtgggccggccgggcccggccgcgtgcgcgcgggaggcgggggtgtgcctgcgcgtgtgcgcggtccgggagggtgtgcctcgcaagcggcccgccgggcggggggcggggcggaccgagcgggccccgaccccgatcccggcgccggcccgcgggagtccagtggaaggtccgcgggaggacacgcgcgggcgcccagcccgactccggcccgtccccgccagtcgtgaagctgcctcgtcgccggccccgccgccgccgcctggtccgtcccgctccgccgcccgccggctgccgccgaccgcctccgctctagcgcccgccggccgcccggaacgtccgcgcccaataaagcgttcctccaaagcttgtttgtgccgttgtctgtattccagtctcttgcaatcgctctcatgttaaaaaaaaatcttttgacttttctttttctgacttcagcgaaaatcccgctccgggtgcccttagcccagtttcattcatccaagttgtggcctttcttgcgcctccagaagacactttcttccccctgcttttgattgatcttgaggtaggggatttcaggtttggagggatgctaagcgaaccagcggcccctttcaggtgacggcgtggccaaggacaggggcccgcggcccggaggcagctcacttcgtcctctgtcctgg

SEQ ID NO: 102233 - DNA, 1085 bp, Homo sapiens
aagtcgtcgccgaaatccccattctcccgtgaattcggaattcggtaacgtagtttggtgttatgtttttttttctccaccaggtgtaataaaacaaaaatcattgtaccacgtccgaactttgtaagcacagcttcctacagcgctagaggagtggacgcatttttacgtttgaaattaggctccaggtcaattgcgaggagtattaccaagtttggttgaacttaagctcaattgataaactaacaatcacggagcgtcgggagattgttaggaagtgtgctttgcatattgttaactgggaagggacgccagtgcctctctatgaggtccagacagcctggccaggcatgccattgtgtcccccagcttgttcttcatggatttggaagaagttaagatagtatctgttcagcctcttgaatatcccttttggccctcctccttgcttaccagcatatgtaactccgaaaggataggagcagtgaaaacaaagcattattaaaagggaagatttttaattaggtggaagttgtttaagccctcccttcaacttacgtgttttagggaatgtggaacctgggaaattcgttactgaaattccttttgtttactttccttgtcttggggaggtagcaggtgacactgaaagaggcaacctgtaggcaataatatttgctcattctgtaaccctttgaaacctttgaaatgaagacttgccctcccctttgtttttgccatagttgccaagtatcttggttaacatggctgcaagtattaagtgtatttcttttaccatttttttttatgtcctgtaataacatagcctttggatgtggagcacccatttttcactctagttcagatcaacagagcgtaatttggttaaaataataaataaccttccttgaaatcttcgcatgagggaaggggggcaaaaaaaagaaaaaaagccctagaaagtagataataaaggtgaactgcctcttggagaaagaggccccatggcagtagatagaaggttgtaacagtggtgacttatgtacaatggcgaagttatgttgaggagatccttgacctaaata

SEQ ID NO: 102234 - DNA, 1085 bp, Homo sapiens; identical to SEQ ID NO: 102233

SEQ ID NO: 102235 - DNA, 1085 bp, Homo sapiens; identical to SEQ ID NO: 102233

SEQ ID NO: 102236 - DNA, 1065 bp, Homo sapiens
tatctgcttgaaaccaggcaacttaaaatagttacctagtaatggaagacttgaccctgtgaacaatgttatactttcatttggtattaaattttcttgggttacagcttattgccgcagcaagctattgaagaaggaaggagtcctgttcctgcccctgagctacagctaaggtacaaggaatggcttgggggtaaggagtccttcctcaccagatatggtttgtatgtatgaagactgcttgtcagaagttgacattttgcactaattttttttcttaattcatgactcacacattcaatactgatgtttctagattttaaaaatctaggttatatctagtattatatgcagactattgaatcttctaaccttttagattataaaatcagtttcaaaaaattaagagttcaaaagcaatgacgggaaaattctgaagtaatatttttcatctagtgcctttgctgtgtttgtactactacatgtttaactcatctaaaagaaacctggaataccataatggggtttaacatgaaggtggaaggaagggtagagaacaaatgataaaatactgtgtgattactcatgttataaaaagttgttgcaatttgattatcagacttttcctatttaatgttcttagctttgtgttagaatttccaatatactcatgagtttatctgtttttagtggaaggcaatatttttaagacgtgttatcaacacatgtagttacctcttaggggaatccttacttaaggaattagtcaaatgaatgtctggtaagttatcaatttgtctaaaggaagaactacccttgggtttggaaagtgacagttaattcagcctcttatcctttttgttgctttgaaattagagcaagagttggcagcctgtggcttccgggccagatctgacctgtcacctatatttttgtggcttgtgaagtaggaaaagattttacagttgaataggtggggaaaaaaacagcaatactttatggcacttgaatttcataaaactttcacatttcagagtccataagtaaagttacattggaacatga

SEQ ID NO: 102237 - DNA, 1065 bp, Homo sapiens; identical to SEQ ID NO: 102236

SEQ ID NO: 102238 - DNA, 1065 bp, Homo sapiens; identical to SEQ ID NO: 102236

SEQ ID NO: 102239 - DNA, 1032 bp, Homo sapiens
aataccccaccacctccatgaaaaaccagtctcatgttcttccaagttcatcttaactcatttggtacattaaacaaatatcaagggcctgcaacattaggagtataatagactaatctttcctttggttgcatgaatctcatcacgtctcccatcacatggatcactttctactttgtattacagttaattggtgaatatgttttacctcctttgctagattacaaattcttgagagctgagtctttcatgtttgttctgctatgctttgcatatatggtagatacttactaagctgccttgaggggttactactctcatctctataaaacagttatttgctatgatacagcgtgttgacctcgtgctagtagtttgcttacaagtcagtgcacttcgctcacgctgggtgagttgtatgttaccagaagttgtgttgatttccaagactgttttatgacaggtaatcttgtttccgtaaaataatttaaatatcatgtgagctgatgaaatgagtgcaaacctttgtttcctgaaaaccaagttggattctttgggaagacttgataaaaggtgagtcattaaaataatgactgtagaattagatatggctgaaataactcaaagtttgggaagaaaaataactaggaggattgtgtatgtggagtgttttacaaggatcttttaaactttccactttaatgaagctgaaactggaaattgtagataatgccatctgtagatgtcgcttagatcaagcagaaggaactcaaatcatcagggaactccaggtcatcgattccattctccaagtgcttgtcatgacccctatattgaggttggcaaataaatgtatgtttatgtgttgaataaaatacttaataaaatacttaaggtacgtatatatagttttatgactggatatggctttgggtatgaaggcttctgctttatagaaaaatgctgatttttttgttttctattataaatgagtagaaaaaccttgtaagatctgaaatgaagatactggat

SEQ ID NO: 102240 - DNA, 1032 bp, Homo sapiens; identical to SEQ ID NO: 102239

SEQ ID NO: 102241 - DNA, 1032 bp, Homo sapiens; identical to SEQ ID NO: 102239

SEQ ID NO: 102242 - DNA, 1231 bp, Homo sapiens
ggcctggttttgccagctttttttttctctcttcctcctaccagccagaaatccagattttataggaaatctggtttttttttttttgatgttgccaactaattgaatacttaggtaccatggatcaaatgtaatgtatctgtgggttaggttggctctcattttgtaatctagatattcagataattagctgtaggttgtctgtaaatctcttagcatttatgttgacaaagcccaccttgttaattggtcactggtttgcagtaggactgatttcagcaatggcaggcatattcaattcttgaaagtatctatagtttcggattgttgggttgtatatgtgcatttaggctaaaatatacatgtaggcttcagagctgcaccgtgtaaactgtgagggagtgacattcacagtccactttttctttcaatgtctgagtgatatcttgttttaggcatgtattagtactatttggtttgtacccgttgtattaacctcttaggtgtttgaaatactactggcatgcaaagattgctttgcctagaaaatatttttttttgctcagagtgtatctgtggaattaaaaatagtttacccatgatccctggaaaatagtattaccatgaaaaaaattcaggtgctctcttggtaaagattatagaggagggaggtgatgacatttttatttttgaccaggctttgtgtttccataaaatagaagccaagttattaccttgactaaccttctttttttgtcttttttttcactcccactccagatagataacatcaaattgcaaataaaacgaactcagatcccaggttgttcttacgtacgttttggcccaaggtgtaattgacttgttttgcttccccttgcaatcatttttactatgattacagtcccaggtaaggtaatttctgtccactttgggcatacctcagtagaggttggtgtagatgaaagcttaaaaatgaaattgcaagtgaaagcacagacttagcaaaacttctttattggagccctcaatcctcataaactggcatttttctgcttctgccccagaatcgagaattcctggttttgtctttgttttgacttgagtttttaaaagtttctctgtaacacctaccctggagtggttaagtgctttaattttgtcaggtgaagaaaccaagtgcagttatggtagccgggttgctgtggatataatccagtttgagaaaatt

SEQ ID NO: 102243 - DNA, 1231 bp, Homo sapiens; identical to SEQ ID NO: 102242

SEQ ID NO: 102244 - DNA, 1231 bp, Homo sapiens; identical to SEQ ID NO: 102242

SEQ ID NO: 102245 - DNA, 2031 bp, Homo sapiens
ctaatagttgatgagacagttgggagtctaaaatgtttgagagagctgcatctttaatgcattattttatctaatctttctatatataaataacttgggaaaatcctaatatgccttgcacatagttgacagtttaatttgaaaggaactaatatcacttctagtatattcaggttgtagggagtaaactgacatttactgagccacctccccattgcactgggcaatactagctttctctgttacttattccttataaatcataaggagcaagttggtttcattttaaaagccagacagttgagacttgttgaggctcatagagatgaagttgttgcctgagatcctacagttaggaagtgacggagcatggaacccagcccttaaaaactgtgctgttttcttctgtaccgtgccacctacatagatgtggtacctacacccacctcccttcttacagaatcatgaaatctgtctgttggggtggggagaaaacaagcttgggtatgcccatgttttttgtttttggtaggttacacaaaagtgattgtaattcaggtaattagttttcagaggtgtctgtgtgttctataacccttcaattattagctggctaagtgaatatttttcatttggatcagaggatgagcagggctcatcaagcttaccattgacagagtgctggactaggcgtctcagattgtaccttgagtgtgtggtttgtaaattgactccaaagctaaaagaggtggttgtttggtcacgtttaagattattgcgtactactctttgcaggccccgccctgtgtcattgaacttatgacttgaagccctgagtataggagataatttttcttgttccttgtttggttttagtggcaggtggttttttattttattatttttttgatagagtgcccatatatcctgctgtttacatatagttccagaataagtttctggtttggaagataaattatatggtcacccagacagtactagagagatctggtcatgataactaattacattttggttaacatggttatatcacctgaaggagtgcttatttaaatttggtcttacctttttttctctttctatttggtcaaatgcagcaaatatttatatttacacttctctatttggattaattcttcagttgcaatttaatttatccagatgcgtggaatagaaccaaaactgcattctaattctgtgcaaaacaataaaatactactttctgagaaggatgccttctcttttgggaagaaggggaatctgctctgtttcaaagcacctttgtgttcaaggtttggctaaatctgctcatcaccactaggggactgtttctttttgcattctacaagtattactcccattacagaagctttttaagaaaaaaatggactaccaaggaacccacctacatgcttttcataactatacctattttattgtcttataattttacttgagaggtttgcgtgaatgatgaactgtgacaaaaagcatatataaatataaaaatacaagttaaaaagcctcatgttagctgaagattcttccatgtgtattcttataaaaataagggaaccctggacagtgctcattgtattttgttgaagaaatgttaacttctttaaaaggaagaaaaacatatatatatatataacatactgtatattcagaaccatttttaaggaatgtagtttatctcttgaaagactgaaattcaaggctgtgactgtgactagagtgtaaaatatagctgcattgcattatagtattttatatatttctacaaaccaaattgacctgtttttggttttgtttttccttttccagtctttaccaggtgctggtctctgcatgtgttttgtttaagttggaaaaatctagacacgacccacagagtggtatggtatccagtgagaagggaactgtccgcagtggctttgaaggatatgaggaagcctaggcggagagttgagaattcagccttgagctagtgttagggtactatttggt

SEQ ID NO: 102246 - DNA, 1052 bp, Homo sapiens
gggtagcagagagccctggaggcagggtttcataactgcgaacagcagttttcattgtaattgacacagcagttttcattgtaattgacaagcttcccttatgcagaaacatttaacgatacctttttaaataatgtttactagtcatctgattagattttattaaaaatttagatgattcgtcctacataatgtcaaagcatttgtttaaaaacttggaagcttttgggggtggggaaggtggtcatagaaatatgatcatcttcaggatttggcaggtatgaagtgatacaaacctcaacttttaagatttttttttttttttttgcttttctctggcaatcaatcttatttatgccagccgttgacacttagaaaggatttaaatcacttttcatagcataattattgtattgcttaatgctttaaaaaggcacgcagatgggattgagacatttctatccaggcagttttttctgcattagacctaagaacctaattttgtagggcagtagtctctaggcattatgtttagctccttttgtcagtgagaagtgtgttgtaaagtttctaatactgtggtctgttttgaacggttttgagaagaggtagctttagtataatttataggacttaaaaggaaaatgcctagaatcatcagaaaaagcatggaaaaacattcttctctgaggttgccttattggaaaaggagaaatcatttagaagttaatgtgtggaaggcattaggttgaataaaattgttgttcgtattgatctgtcagctgcaattacaattaactgaaaatttagtatttgtctctttttcaggagagaagccgtcaaattttaatacatttaattttaggtatatttaaatgtctgttttgcagagtgattatcttaatccagaactgaaaaattcctgatggtcctactgaagatttatctaatggtccacaaatgtctgttttgttgaggtttggcggacataataataaatcattttttagtcttctgaaaacttttctcctcctccctcttttctctgcttc

SEQ ID NO: 102247 - DNA, 1047 bp, Homo sapiens
gttttgtgtggaatgtcgtgtttcccattagggcagggggcgtctcacaagatctaggttactgtatgacaactatatccatttactggagtttaagaagctttataacaatacatttccagagactaggcagtacttggttttctgtatttaaattttctgagggtagatgataacatctagtaaacaccacctgcctgttccatccaggaccctaactggccataaagttacccccaaactctcttaggattcatagtattttaagatttcatttttgtgcccttattacgaatataattagtgttttctcccctttagggtgctttaagatcttagtgcctgtcctaatctgagcataccacagtaagacaagaaagggcaatgctgtggtaggcagttagctgctgaagttaggccacttagttatgaggtagatgaatttctgtcctcagctcaaaatgataatattctcactgacaaaagtatcagctgtgatcatatagattgctctttcctgtggaactgaagtgtattaaaaaaattttttttcttccaataaagaatgtctcgttgcgccgggtttgctagactgaaagtttcctcatcacgtggcgagacctcctctacttcaatctttgtcttttgtctctgctgccttgcagggttggtacagtaggcttcactagacttagctgcaactcagaatttctcctccagcacctgagtaaatgctgatggtcttgtggagagtggattaagagtacgagctaagttctcaatcccaattaagaagcggaaaatttaaactgtcttcttcaaagtttatcacaaccaccaccatcaagacagcaaaccaaaggacaaagactttgaccctgctgtgttgctctgtgtagtccagttcacgtatggtttacagacttggctggggttactaaaaataaataaaaagttggacacttctgtcattggagcgctattattcacaagttaccagaatgagagctgtactggacacagcagacattgccatagtggccctgt

SEQ ID NO: 102248 - DNA, 1708 bp, Homo sapiens
cctttccaacacaaattcttgtaatgtctcccctaagaaagaagccctgaaaatgctgcggaatccaacagatgaagatgttccttggcctggattcattcttgggcagaccccagcttcagtatggtactggtgtgctgaccaagtcatcgtgcagagggtccttgcagccaaaaacattgctcatgccaaaggctctactcttatggctggcttcttaaagctcctgccaatgtttatcatagttgtcccaggaatgatttccaggatactgtttactgatgatatagcttgcatcaacccagagcactgcatgctggtgtgtggaagcagagctggttgctccaatattgcttacccacgcctggtgatgaagctggttcctgtgggccttcggggtttaatgatggcagtgatgattgcagctctgatgagtgacttagactctatctttaacagtgccagtaccatattcaccctcgatgtgtacaaacttatccgcaagagcgcaagctcccgggagttaatgattgtggggaggatatttgtggcatttatggtggtgatcagcatagcatgggtgccaatcatcgtggagatgcaaggaggccagatgtacctttacattcaggaggtagcagattacctgacacccccagtggcagccttgttcctgctggcaattttctggaagcgctgcaatgaacaaggggctttctatggtggaatggctggctttgttcttggagcagtccgtttgatactggcctttgcctaccgtgccccagaatgtgaccaacctgataataggccgggcttcatcaaagacatccattatatgtatgtggccacaggattgttttgggtcacgggactcattactgtaattgtgagccttctcacaccacctcccacaaaggaacagattcgaaccaccaccttttggtctaagaagaacctggtggtgaaggagaactgctccccaaaagaggaaccataccaaatgcaagaaaagagcattctgagatgcagtgagaataatgagaccatcaaccacatcattcccaacgggaaatctgaagacagcattaagggccttcagcctgaagatgttaatctgttggtaacctgcagagaggagggcaacccagtggcatccttaggtcattcagaggcagaaacaccagttgacgcttactccaatgggcaagcagctctcatgggtgagaaagagagaaagaaagaaacggatgatggaggtcggtactggaagttcatagactggttttgtggctttaaaagtaagagcctcagcaagaggagtctcagagacctgatggaagaggaggctgtttgtttacagatgctagaagagactcggcaagttaaagtaatactaaatattggactttttgctgtgtgttcacttggaattttcatgtttgtttatttctccttatgaacttaaggatatggtgagacactaacttaagacaatactgactggtctttggggaaaaaagttatgtaactgtgcatctctcaggcattgtttacgctgtaggttttagccaaattttacttagcagaaaatcatctaattacaagactttattttcccagagatggattaaagtaaatcttcaacttaagtgaagccaaacctaacagactgaattgtgcaaatgtggttttaaattttgcatac

SEQ ID NO: 102249 - DNA, 2204 bp, Homo sapiens
taaatgttgctgatgatccccatatttattgatcatattaaggttgtttatatagtttggaaatgaccagccccctaagcagtgtttgattaacttatgctaatcagatgattactcatatattctgctaattttctagctttattcttgttatttggaaaaattattagccaaatgccttcctaggtggatccagttggaagatatgtccagaaacctgaagaaaaattgacgctgcctttgtgtgctggattgctctacttgattagatcatgatatatcaaggttgaatttttagagggaaaatttaattctgatatcttattgcatccttgataagtttttccctgattttttttttcctcaaaagactttccatctgtacacagcctctacatttttgttgtagtgacttagagcataaggatgtttcagtgcaaactggccgtcggtaacagaaaactcagtgcatactttgctgttgttaggttgtcaatatagtctttctgtaggatggatagcatgtttgagaggtgccaaacaagaacttttggggttagtagtgtgtcttgtggagggtattacaggactgtgtaattataggactctaacttgacatggcttggcacccacttgcagctagtgggtacagggtacaaaagatgttagagaaaagctctacagattacgtacttctgtgtcttcgtatgctcaacactgtcctttgtcctccatgaaagatgaaggaagcaaattatgtatgtactttctttgaccttctttaatctctgatactttttagattgcatgattttactaggcttgtatttagggaaattactttcataaatacttttgtagattttgaatcaaaactcagtctttttaatttttttgtagtctataaactagtttcattatgatggacttgattagtccaaagttaattttagaaattgtcaggtagcatagtgtcttcccatgatcaggaggctttctgaaggactgagtctgtaaatgaaaaaataatttatgtatgaatagcatgtatttctgaagagcttagagtgccttgtagaatttttttctcaattttattcttgaggtttataatttgggggccaaatagatagagctcatcattttcttgtttggaagttgaggctgcgacatgtccaaggttatgaagtctcttttgggaagaacagaaaccaggtctccaaatctggactcatggtttgttcagatgtgtctggacaaatggttgtcaatgttttgtcctgttttttcaaaggaactgttcttcctttgggacaaccttttggtgtttgggaaagtaataagatcttggatttttcaaattaacattaagttgtaagaactaaaattttctttgaaccacattactgtgtaattcactgataattgacatattggctgggcagcctatctcttccatatccagcgtaaatgaataggaggtgtttgtgattttttttttctccctttatttaacattgagtcctagtagtttggagaattagggtccctctaccttctttctgctcttgtcttagtaagatacataaggtacatcatcttgtgtctgtgtgtatatagcagtaggtcaagtttagagtactaaagtctgtaaataaggaatgactattagcatattcattagaattgtttattcttgccagtataaacatcattttatttagactaaagtccctgaagcttgtctttcttattgcttcccagtaatagataatgtgctcgagtaagtttgtgaattgctgattgcaacttaattcagggaccagtcttcaatctatatttcattagaatgattgttcctggaatgatcatacatggactgtcttaagctagcaaaatgttcatactttacactgactaaatgggtcctaaatgatgacattggtctttagacattaacatgtgtatatttttatattagctcaagctaaggttcagaattgaagcttgatattgactagaatagctaaaagtcaaaatgaggtgaggacactggtcttggaaggtagagaaaaataaatgtcttaccaggtgttaatggtatccccagttcttagacttttgtcttctcaggcaattttcatctcaagatctgatgagaagggcatattacattggtatgcaggatgattattgcatatttt

SEQ ID NO: 102250 - DNA, 1008 bp, Homo sapiens
tacaagacctttcctgttaaattacgtgactacagagacttgccaggacaaaattttcctaagaaatcagaaaaatgattaagtgagataagtacctgggtgacacagatattagcccgttggtaaaagacaacaaatattagcttaaaatctgcatatgtagaatcattttcattagatttagagcttgaagcaccttggctctcagctactttaaactcctccccatataaatcagggcaccaataaataagtttcagctttttaaaccctggtttgatgttaagcattataaagtacgaagtttgttaccacagtagagataatttagtagaaaaatgctttgaggcttcagtatttgtaagattttgcattagccagatgctaggttgttgaaggcatttcagtgttgataatagcctgagcagacttctttacaaatgggatctgtttctatatgtgtatatgcccacttaccattcagagagactggtctttctctttgtcttccttcacattgctgtgtcagttctacacctagtcttttcagcacttagcaaattcaaattttgatttttttgtcagcttagttcactttaaggcatattggcatggtgtgtgaaagtgatgttttgccccagtattgaggacttttagatccaaataatgactcattaaatataattatgttttaagtatactgaatttctgttagcttaaaatgttaattctcaggaatgattttctcacactttgtgttggctaataataaaagcactgttttattctcaaaactcctttttcaaaaattagggagagagcagtagtgatcatttatgtgagcccctttgaaatgatggtgtcagagtgcagagaaacaatggagttttgatgccaaaaaggtttttttgcagtaaaagtaaaaatttggaattagttggcatatagaggaacccttttgtactggaacgtatgaggctggattgtgaaaaggtaatctttcgattg

SEQ ID NO: 102251 - DNA, 1944 bp, Homo sapiens
agcctaaatgttgtttcttttatatccattaaaaacttaaagttacttatgttctgtgatcttaattttgttgtgtttccattgtaggttgataggtatatcgagaacaggtacgtgacaacagtttatattccatgatagaaagctaaagtccatagaaagcacaaaatcgtgttcacacattagtgtacccacacatagaaagcacaagactaatagtattctctgtatcccacaagtgccagtcataaaggccaccaggtatttgtctcagagttgctatgagcactacagtattgataagcccaagacaatgcggtatctaaactggtcctaatggtaagggacccaaaggaataatctcaataagtttgtaccacattgatggagggagagaatataaatgtcaagaatgccaaaattatatttgggggttactagctaaaatggggtttgagggctttttactgcaacttgaaactggagaaatagggacagatgtctaggtttttggtgggtggaacaggtgacatatttctgttttaagctgtagtgtgattggggttttttgtaaaaaatcttaaatcttttaggaaatattacctcttaacagtgcccccccaaacatgcagaaagtcatactttaacagggcaaatactacttgtctttgattttttttgtgtacgtttgtatgtgagagatgaagttacctttatttttttcctatacttgactgtgcttcattttaataaaggataatttgatctgagtgttctgagcatcagactaattctgaagcatatttgctagaggagctactttgcttttcacaatggggtggagaggattctttcacttgtcccattaaccctcttctagtctagatgagatgaaatctgttaatgtgtgtgtagaagaaaacgtatgttcttctactcagcattgcccttttccacctcctcacttcacctccgagtagcttgtttatcaagaatgaatgaatgtctttgtcttaaattttgcccatgtgttaaaagatgtaattctcagaatgggagagaaatgactacctttgttcctactcttttatataattatccttttagggaaagacttggtcaactctaatatatctagaaggaagactatatctggtgtagactaatatgagatgttttagaagagttaacctgaacactttgagggagagattattcttgccagcaaaaagctagccaggaatgagcctaccacattatttgagaatatcaaacctcaggcctggggggatgaggggaagaagattaccagaagtgcaggaaagagaagtttgaggaacacccttggcttagcaacatgtgataatgcaaagctgttataacctgttaatcctacgtactatgtgttctgtacctttacatgtttttaaatttaagatagtttgtaagaactgtacaaaaaaatgcttctggagatttctttggcagaaatgcctttcatctataatttcatggagaactgctttaattagcctaggtgaaaagtagtcctagcagtgtaaatatgtataattagagttttctaatttcactgtgagatctctaacttttgagtggcaaacagatcaagtcttttgctcatagacttttctgtggggttattaaaatgcaaaagctttattttttttaataatgccatactccattagtgtcagatgatggtatggaatttgttcccttgctttcccccactgttactgcttcagtttatagattgccagcagagttcagaaatagagcagggatttacccgttctttgcttggacatcccattttcttttgtccagacccatgttggcaatcatgtatgaactgtgttatacttctcagtgctttcttttttctttttgataagatggatatcaaaaatagttgctgtgcaa

SEQ ID NO: 102252 - DNA, 1298 bp, Homo sapiens
ttatttttaagccaaatgtcagcagagtgctgctgcttttatctagtaattttgatatgtaagtattaatgcatttttaaaagatgtctacattgaaacatgttcttcccagtgtcctgcttatgatgctttgttcagattttttgtaagagaccagttagtacactgggggtgtatattgtgtacatgtgtcattttagttaggcattgtaggccaaatgtgattataaatgaagttgatgaacattaattttgttattagtgagttttttgaattgtaaatggatttccagtttaccttctgttgtctacagcttttttaattttaaggtttgactaattgtatccatctcattgtacagtgttttagttgcaagcagaaagtagaatttggtataaagcaggttatttctatattgaaaggagtacagttgaaattgtagatttaagattgttaaaatcatgacaattctaacttgtctattctaacctattgtgtacaatctgattttttaaaattgtaaacatgtatgatcttggtttcatgtgtttttgaaagtgttattgtttaaaaaatgaaaaaagcatatctgctaaagagctgtcagttttcattactgactctgtaaaatacactgttctttgtgtactgtgtgttattttgccagctgctgcattagccttcaaaagtatttggaaacttaagatgaactacatttcttgcaaagtacattcctttctgtggtattttgtcctgtaactgaagtatagtaattattttatggaaatgttagcaattctgtaccaactttgaataaaatgaaaaatttatatttctgtgactaagtattttcagtatgaacactgccacaatgtagtgttctgggtctcagagttgaagaagagtttgtacctcagtttcttttgcccttggcccatgaatggtttccagtgaatttccccctactaatttttgtcatttttaatctttgtaaacactgactcacaggtattgactgagaataggattatgtgtaaaacatagagtaaattaaaatattcttaattttttcacttccaattttgaaatttcaagttataggaaagttgttaagaatggaatgaggaatttaggacttgacttcatccaggctcaccagggattaacatactgcctgccacattggctttgccattcttctgaagcataaatattttttctgaaccatttgagatactatttgcagacattgttcccctttactccctgagtactttgcgtgtatatttcttaagaa

SEQ ID NO: 102253 - DNA, 1034 bp, Homo sapiens
gcacacatgcaaaaaaacatggtactaaatagacagccaaaggacccttgtttatgatatgtgagctgaaacaagggcgaaacattgcctttgtctgcctcagctgggaatgtgtgcaataggggactgcagttttccaccatgctgtgcatgtgtgcatatctacagatgactgcagtattgttgggggtattgatttgggggctacaaataaattttagcaagtaggcaaattggcatatatggattccatgattaatgagaatcacttggaattgtgaagcaaatacctatgtaaccaccacccataagaaatagaacattaccagcaccaccacccgcttcctgccaaggaggctcattccactttcagaaagttctaaactttaaaggattttctgattgaccttaaatctgtctctggcttttactcccaagttctacctctgaagtgttatcccctcccccacttctatttgaagagaaatgttgaagataaatgtattctgaagtctcaaaatcagacatcatgttcttcactctctgggtgtatagcacagggcatagatttcagacccttcaccatcttgctcttctgttttttcctctggataactttgaggcagttgaggttccttttcatatgtggcctccatgtttcagtaattgaggagagacactgctaataatgcaacaaaatgagagccaccattccctagggcttgcccccttccaagtctaatttgggatctcactggcataccctaaggtaggccccctgtaaagtcctgttgtctcttcataggagtttctgactctctttccagctttccatggcttttcagagttgaggtttttttttttttttgttgctgtattgttccccatatgcttcaggagttgaacatccatttggttttgtattttaatcccaagaatttttagaagtttggatgcactgttaagtgtttctgcctgtgccttagatgttgtttctgtcttttgtcttatttctagttcttttactctgcatc

SEQ ID NO: 102254 - DNA, 1031 bp, Homo sapiens
ctcatgttgtaggatttcctaggagtgggtgttagagaagatgggaatcaggttttagcgcggtaggaaaagtccaagagtagaagagtcagctctctctggcactcagcaactctgtggcctccccttctgtttctggcttctttgggcacagaactcaggttatgggtctcccatctgcattgccacaaggacccagcaagacagtctctgcagatgtgctctgcgacgagaatgctgcttgtagttatgtgagtcgagctgtcttgtgcaggtacagtacgtgtgatagggcctgagtggagtcgcgtctcacatcgaggctttcttactgcatttaaaccttctgccgtgctgcaaatttcatcttttgattgcttcaccttgttttgtgctagtgttcagcttcttgagaacacctctgaagagaatgcctgaggcgttgctaggcaacaggaaatgcacagtggctaggcttcttccacagtcataataacaatgagggatggagagcatgtgtgtctgtctgtctgtttcttttaaacttaatcacaaatgggtgtggttttaacagcgcagttatggatccttttgccttttttgttgaaagaggagcatataaaaactgtccgagagtcattagcgcagttcttggatggaaggcagtgaagaagtcagtttctccactcatgtagtacttccaggggtttctgcccttttttcaagtagaggatttgactttgttgagagttggcatgaccagcatcctaggatctgcactaacacgtagcctgagtaatgctgacgtcacttgtctgaggaccaggctcaagaactgctgtgttcactcagttcattttcagacctctgtgtgcagtggtgggggttgggggtgggtagccgtttctctttatgggtggaataaattcaggtcctggaggagcccactgggaccaagccagaactgctgagaacactagccctacttctgggttcccccctggcaaaggtgcatgtgcctcgctgaggaa

SEQ ID NO: 102255 - DNA, 1979 bp, Homo sapiens
tttacatttaagggcactgtcagaaaatacagttttccccctggacaactaggggagtcggggaagggctggcagcaccgggcagtctgcatggtgactgaatggtggaggggctaggcctctccaggggaggggcagaagggacatgagagctgctggctctcttacaaccatgctgctgtgaatggagtgtttttggtggcattgttttccagtattggggcacagtctgtcttggggaagccatttctctgagtgttttcagatctctagagggtttgggccatgtagtagagagttttgtagcatgtgagtgtcttaagaaatataaaggagggcacattatcacctggaagatcacgtgggcaagttctacctaggaagaagttcactattgctccagctttcaaacactgttatctgcagtgagaaatgcattagtgtcctgaacctttcttggttacttcttgcctggcatcagtcatctcctcacttccacttctgcagagttagtgtgggtcaaagttacgtgcttttctatagaaaagagagatgcttttgtgaagctgatagcaacttcatagaagtggtgattctataattagcaccacacatgtaaaaacaaacctttaaaatgtaaacactgctcggctttgtgttcaaggcaatgttggtgcttgcatggaccctggctacctggtaggcggaaccatgtcacttgtgccatgtagcacatggtcgaaggtgctgggaatgtgtaacgtaattagattttagactgttttcccaaaatgagctgtgtacttattgattcaatcaccaagagtagaagtggaaaatggaaaactagctatttggagagcttttgttaagtaagaatgtcagctttggggcatgtctagtcagttgcaatgtagtcaaatccagacgtttgtgccttgagtgaggagttgatcgtgagtccacgtgcgttaggacttctggtcttgtgttttgattctgcctagtttggctggggaagaagcagacactgatagctcattgtggttgtggagtcctcttgattctctcttttcccagggtcaggaggaagttggggcagagggctctaactcccctggagacactgagccccttttctggtcaccttcccttgaacagcagctcctctgattgttagaatggtttctccatggcaaccttcatgaggatgcagggagcgggcatcaagggagttagttccaaggccattttttcagcctaactcccatttttgtaggtctcttgtggacctgtgctgtcatgagaaagggatcctcgcaggcatcaaaagccacccagccccaccaccccacacaggttgtttctaggcctgactttcttcatgtgtaaaaatagaaatgcgggactgtacttggtgttgtcatagctgtaaaaagtctcattctcagtccttaggtcatctgtagttagcaaagcccagcagtgagtcaggggtccttgcctgtcatggacagtctcccacaggactgcggtggaagcctgggtttctgctcatgcagcagctcgtacagcctctctgcccagctgggctgcatattccaggaggatgagaccatgtgtgcctcatccatttaacctcctgaggtttgtctgtagtagatgctcattaacaagttaagtttgcccagatgaataggtaagaagaaaaggatatgtactggaagcaaccaggaattggtgaaggtcattcctgtgtgggaaaaccataatggaccatttatctgtgtacttgggtcactgaagcaggcagagattgactttatcctggacttctggtcagttctcttgtggcctgggagagacatcttggttccctgggagaagaggtcgggagggggttggtaagaggttcaacttcggagagtggcgaatacagtaaggtctgcctgtctcggagtcacttctcaccttcgctg

SEQ ID NO: 102256 - DNA, 1701 bp, Homo sapiens
gttgctggggagagggctgctggaccccaaccaacactcggcaccactttctcttcttccctttcctcaattgccacacggagtggagctgccacttctctttcatcctcttcctcaaaagttgtctgaaagctgtgaaagtactttgaaaattagagtcttatgaaagacacttcttttttaagttcagaaatatgaggtttctgatatatctggcttcctgtttccatccttgggtattctttttacccttatcacatcatagaatccaaaagctttgggtgtatttcttaggattattgagtgagtgctgagtatatggagaacactttcaggagggctggatgagaattgattagtgggcagttgagttggttgttggcatctgtaaacacactttctcttagaacatgttgagactcctaggctagctcacaagcttctaaccctgtgaagcagttgaatggaaaatggaagaaagcagtgcttgctatgaacaatatcataagtaagaccaagacagccccagaggtgctatttgaataagttgaatacttgactgtaaggaagggcaggcttggacttcctgtggactctctggagggaggggcatggagcactcggcagtggtggtgtctgggttacttgatggccagagcatgtcatgctcttgctagagcctccctcctgatgcatggcatttcagcagcacattactctaagcacagggcttcaaatggaatgaagcaagagaggaaggcttctagggaaactggacaaggccaaggaagaggcgggagctcagagaaaaactacctgctatagacttcagtgtgttgggaatgttggcagacagggtgaggtcataacttgtccgtggtagattggaaggacattttgatgaatagtgagtgaaagagcaaatggataaatgggaaggaaaaaagcattgggcccctgttgggtgagagttccctgtactgcccaccaggtggccaaatggaattattgtggggcaaggggagtgactgggtaaaaggctgagggttgcaaggaggtggtgatttgaggttgatcacactattttaagctctgttccagagcctaactcaaagtaagtaatcaataattaaatcttgaataaatgagtaattcataagttgggtcattgcaaccctattacctgctatatggagtagaaataagcaagtggaattaaaccttggaaaatgtggccaggattatgtgtagttttcagagtgagcccaagtggcagtcttgtcagtgagcaaatgtgcaagtcactgcttcaagaagtttgtggaatagtggattcgtttgtaccgtttttatttcgttgcttaaggaaccctgggagtcttcatcagctgtaattgctccctgttgcctccatcccacatcagctcattgaccaagtcctgcccattcagcttctaaactgccattttaaaatcatcagctttatagcgatgattagcatgtaataaactgcatatatttaaagtgtataatttaataaggtttgacatatgtatacactcacagaatcaccacggtcaagataataaacatatttgtcacccctaaaatttcctcctcctccttcgattccttcctctacttgtccttcatcccaagcaaccactgatcttttttctttcactgtcgatttttttcgac

SEQ ID NO: 102257 - DNA, 1028 bp, Homo sapiens
tgaaaggaaggggaaacttcagccaaggagaaaggactggctcactacaggagagccacgaggacatttcaactcgaagatttgcaaaacagcaacggatctgtgtgttttagattctgctccggggcgtacaaagaagccatggggcttcatggggctttggcaatattgccactccacctactgggaggctttggctacaaataacagaaacccctgcttgaaccagcatcatcaataagataatgcattctcttatataatacaaatgctctgtaggggagttttggagacagttgaataagtggtttaagaatgtcaacaattatccagttctttccatctctgcttttggtgtgggcttcattctccatctggtatcaagaccacggtgggaattctaagcatttcattaatgatctccaccaagaaaacaagtggctctgcattctgagccactcaagtactactgactacagatggatgggctttgagggaggacaaaatccaagctcccaatacccaaagtgacatttagatctaaagagacattttataggctatgaaaagacagtctgcttgccctgaattcaccaacaacaaaaaggaggctccatatcatagtggcctccttgaaattgcgaaacaatatacttcacaccccagggagtttcaattcagcctctatcccaaatcactaggcaagtggccacatttgagggggatccaatagcaagaagctttagaagcaatccaggcagcagtaaaggaagctttacccaaagcccctatctccttcagattctataaaatctcagttgtccattaacacacttccctaatggggttggacaaagagactccaccagtatttctaaacctcttaggacttgagggcatcctccacctagtaaaatgcaatgccgaacttgtagctgactcacaggtgagaagtaaaaagataaaacttgactgtatatcaaataccttttcaaaaagaactaccaaggaatggccaaaaaactgag

SEQ ID NO: 102258 - DNA, 1046 bp, Homo sapiens
cacactggttctctttttttctcagacctaaatttcgaccactcaactttcagcctgctcacccctgcttattgccatccacctttgggctgggttagacctaatcctccccttgacaaagccctcaaagtagccttcacaagataagagtcgagacccctaacttaccaacaaattttaatgaaacttctagtaaactcaaagcgctttgccaacatccttaggagcaacccagttctcgcagcaccccatgtgaggtcgctgttgaagtatctttggctgcagtggtgtggaattcatctcaacagagttgacggtaaagaccagacatgtagcagcctcactgcttgttggaggaaccacccttaagaaaatttcccaagatagtagttttcccatctccgtactttgctagttaatgttctccacttgcttgcgtttatcctttcaattcctttgctaattaaattgctgaaaagtatacattggtaagaatagccactgtcaatggactgcaaacaaaactcgtttctgttattgatgataaaccatttcagagaagaccaggctgagtctaaagggttcagataattacaaggggaaggcagagagagtagttcatggccacaggacttggccacctctgggcaacacataatgcttgctaagctaatgactgtagggatatagaactggccctcagcctctctgtcttcctttggcctctgctcttcctgctgccttctctctttgaccacgatgacacactttccataggccttcctcaccacatcacagaactcagagaagaggctgtcttcttgtttgatacacagctcgtctcttaggaacacccgatatttccaaggcacccatccttgactacccgcagcatgcacaatacaccaagttggggtttgtatgaaatatccatcactaatatcttccccagttacgagactttctgggatattggtttccccaaaatatacggtcttaaatccatcatattgcagtgttctcagggttttcagatattggaggca

SEQ ID NO: 102259 - DNA, 1096 bp, Homo sapiens
tgggaagtggcttttttttttttttctggcatctgatccagagtcccggagagggaggtgcagagctgctgctgggtggggaaccctaggggcaggtggagccctggctccctgtccctgagaagctgtgtcctctcagaactgtggcctaggctttggactttcagagcttgcctctgtggtatgaggagcggggagagactgattccaagagccctcctgacctcaatgacagtgacttaaatttccatatatactaaagtcacctctgctgattttctgtccatctaggtcaagcgtaattatttgcagtccctgtgcctgtgactcccatagccctgggagggggctgtcatcctatctgtgccacaaccagagttcatatgtccttttgccctccccattacagaccatcttacaattggtcctggaatcacacctgtcctgacgcctggacattgacctgcccatctcccggaactggcgttaggtgctgttgcctcactgcagttcttccctggcaacaactgacctgtgcttattttctctcctcagaccttacacataggaagctcacacctggctccgccaaatccagacaagcagtttctgatctcccctcccgcctctccgccagtgggatggaaacaagtggaagatgcgaccccagtcataaactatgatctcttatatgccatctccaagctggggccaggtgagcagggccctcgggtgggagggaggcagggggagacacagctgctgccctgcaccagggagcagtaccaccactacccccgtagctctcctgagcccatgccggcatgttttgtgagcttctctgtattcttctgcgccaccgtcccttgtgctgggagcatgcctgcctcttggcaccacctgcagtgttagagagactgcggctgatcgtggggaccctgcatcacgcccctccaccccccgcagtgtcccaggaatccattcctgtgtccactgagcacagcctgcgtgggaggcctgagccccggccccaggttctgtcgctccggatagggatgagtgattggactttggaaagggaaaatcgatgccccct

SEQ ID NO: 102260 - DNA, 1037 bp, Homo sapiens
tcttgaaaggattgatgatccacttcctcagtaaaaaatgtattgaggaggccaggcacggtggctcatgcctgtaatcccagcactttgggaggccgagggatcacctgaggacaggagcttgagaccagccttgccaacatggcaaagccccgtctctactaaaaatacaaaaattagccaggtgtgctggcaggcacctgtaaccccagctactcgggaggctgaggcaggagaatcacttgaacctgggaggtggaggttgcagtgagccaaaactgcaccactgcactccagcctgggtgacagagcaagactctgtctcgaagaaaaaaaaaaaagtaatgacatcatctagtcaagggtcatatgcaggtaaatttcaactccttttatttttattgttatttttcaggccaaatttgagtccctctttaggacgtatgacaaggacatcacctttcagtattttaagagcttcaaacgagtcagaataaacttcagcaaccccttctccgcagcagatgccaggctccagctgcataagactgagtttctgggaaaggaaatgaagttatattttgctcaggtgagttgggttcattgctatgcatgcttctccctcctccctccctcccttttgtaaagcagcttatacgttgcttatgttatatgctgaccggaaactctgagacttcaccttgagaaagacaaaattcctactctgaatgttcagcgtctcacttgttttaagaagatatcaaggtgcatttgaaagcaacctcagacattgcccctgaccttcctgggttgataatgatgggggaaagaaagccttccctgttcactggggagcttgcagggtgcagcggggtaggcgtggctatgcaaacaccctaaggtttgcgcagcaggtttccatgaatttgctcaagggttggagctcatgacccactctagactgagcagaccagagtggttccctgctcatgtggtgctgggggtactcagcagagaaacaggagtctgcagaagat

SEQ ID NO: 102261 - DNA, 1138 bp, Homo sapiens
ctaaggtgttgacgtcacctctttccagtagaaacttacactttgtccctgtctgcctgcaagcatgcaggacttgactcaggaatttgctgtccaaacaggatgctgtggaagctgcactttttttttccccagggagtgggggctggcccttactgctttataagcaccagctcaagaaggaacctacagcctcttggaaaggaatctcactaggggcttgactgcgtgggtctgtagcgctttcactgtaagaaagcaagatgcattttagaaactttaactacagttttagctccctgattgcctgtgtggcaaacagtgatatcttcagcgaaagtgaaaccagggtaaggcttctaatataacgtgattttctttagttttcaaagcattatgctaactgggactattaactgaatacttgggagaatgtggctctcttgtgggtttgggggttttgaaagaaatccaaagtctttcgagccttgaaaatcaaaagctgttgcctgaggaattaactgaggaaggaatttctaaagatctcaatatttgacaacatccaggcccctgaaccaactcactaggaaggcgagagttggggcatcgtgtgtttttcattctgtgtatgttgtaagtgaacttttcagaaagaggcctcttctgacagtgaatagtgttttacttttgtagccagcgttgtgaataatttcatttcgtcttaggaaataaatgttataaagatatttgtatgtttgtagtaattatgagggcctggcctcaagctcccagatttctctaacaagagaaaatgccgccagagcaaataataaaactggagaaattaagtgtgagatcagtgtgcctcctgggcagcagctctctttgatggtgattaatataatcattttaatcactacacttttcttcttcatttgattaaaatgtaagttttttcatcagcagctatccggctaattgagctttaataatactgtataggaatgaatcctgtatgctctatttgaggggtggtatttgtgcctggtggtgttatatgctttatatccaaagccatattgggacatgcgaaggtttctttttttaaaaaaaatcaaatgtaactccataattgtat

SEQ ID NO: 102262 - DNA, 1162 bp, Homo sapiens
cggccacagtgaaatggagctctgggcccagggtggccacatctccccgggccaccaccaccaaaaagaagtcagaagttctatttctgtgtgacacctcccaatttttcaatattaacaactaattttccgtcaatgttaatgggctacagttcaccaggagaaaactaactgggccattctaggcctgatggaaagggaacagctcttaggaatcagatactcggtgcaaagatgtgtgcccacattttagtcacttgacgggaacacctagattttcctgatgaaccaggttggcacagttgttctctctttgggtggacagagataatatccaagttgtggtggggtcttgcttgttctttgtatgtagtttattgttccttcagtatgttttgaatcattggtgaccttcatgaagatgacaggacatgcttcctcgtgtgacttgttatcaggcttttaagtcatcagcaaagaatgcaggccaaatgcagaaagaaagcgtttgcagtgccctgttgggacttctcaactgcagacatggaaacagggtgtgtgtatggtaatggaaatagcaggtaagagcacataactcacttttctcccagcacttggtgaaaaagaaaaaacaaaccaacaacagaaaaccatttctgacctgcctcttgagttttgaaactgggtgtggatacaaacgatctttagcgaagccattcagaactgggttttctgtctttattgaagagttgcagattttgatcttgctcatttttttccccttccctccatgaccctctcacctttactcctccgctgacattcagccagctattcaccaggtgccggcgtggtgtgtgcctggacccctcactgcgccagcctccctgggagaatcatctcctctaaggagagtatggaatgctgcagcggaaggaaaaggttttccaggcagcattaaccctggaaagtagaattcctactttgcgtgtgaaggactgacttgttgagaatgaaccagccgtggggttgtgaaagctgcttagcgcagggatgagggctaaccagacactggtgttccctgggcctgagtgaccacagccagcccactcctgggtgattgttcttccccaggtttttgctgctgcagtgctgtgcccct

SEQ ID NO: 102263 - DNA, 1014 bp, Homo sapiens
ggctcactgcaacctccgcctcccgggttcaagaaattctcctgcctcagcctcccgagtagctgagattacaggcgtgtaccaccatacccagctaatttttgtatttttagtagagatggggttttaccatgttggccaggctggtctcgaactcctgacctcaggtgatccgcctgcctcggcctcccaagtgttgggattacaggcgtcagccaccatgcccagccttttacagcttttaaaggaccataaatgtgtccccatattttcatcaggagtgcagtgaaagcacccttctcagcatggccctgcaacctcataggtaatgtgattgacgtcacaccactgggctcagtattcttctgttacattggaagaaacaaaaacttcaataatacttggtcttcacctgaacggtgcactgaaacgttctgtcatatttttttagccttttgaaaagtgttctaaatatttttgctactgactgtattacaatgattgcaaaaataaactatttccaagagagttctgttgtatatttttagtatcatcagagtatcagagacctcacttgaaaaatcattaaaaattaaattacatattttcaacttgtatgaattgtacattttattgtgaaagccatcttatgccacatccctttagaattagcatgggtagtgctgaccttattttaaacctattattattattattattattattattattttttgagacaaggtctcagtctgtcacccaggctggagtgcagtggcacgatctcagctcactgcagcctcgacctcctgggctcaagcgattctcctactttagcctcccaagtaactgggactagaggcgcacaccaccatgtccggctaatttttctattttttgtagagattgagtttctcaccatgttgctcaggctggtccgaaactcctgagctcaagctatcctcccgcctcagcctcccaaagtgctgagattacagacatgtaccacctcac

SEQ ID NO: 102264 - DNA, 1044 bp, Homo sapiens
actagaccgaagttctgaatttgaaaatagatttcagattagcatgagtggtgaaatattttttttctaacagaagtatgcctcttagagcttgtgttctcaactttcgaagtattcaggagtttctttcttttttttttttttttgagatggagtctcactctgtcttccaggctggggtgcagtggcttgatctcggctcactgcaacctccgcctcctgggttcaagcaattctcctgcccctttcccttaggccagaaatatttccacttctgctgcagtgttgtgtagtacattccagagtctcccgagtagctgggactacaggcatgtgccccccacgctcggctaattttttgtatttttaatagagatagggtttcaccatgttagcctggatggtctcgattctcctgacctcctgatcctcccgccttggcctcccaaagtgctgggattacaggcgtgagccaccgcgcccagcctcgggggtttctttttagtggaaattacttgtacctttcttactttgaagcattttgtttgtgtctacacaaattttgaaattttacatagaaccacagcaggatttagggggtggggaggtgggaggcaaagcagtaccattgatcaagtttgttagtttaaagctggtgtagtttggatgtttgtcccctccaaatgtcatgttcaaatgtgatccccagtgttgcagggaggcctggtgggagatgtttgggtcaagggggtagatccctcatgaacggctgggtgctgttcttgcagtagtgagttgagttcttactctatgagttcacagaagagctggttggttaaaggagcctggcacctcctcctctctcgctctttctcttgccatgtgacacgcctgctcccccttcaccttccaccatgagtagaagcttcctgaggccacaccagaagccgagcagagctggtgcgtgcttgtacagcctgcagaaccatgagctaagtaaacctcttttctttatacattacacagtctcaggtattccctgag

SEQ ID NO: 102265 - DNA, 1051 bp, Homo sapiens
tctctgcattcaaagactggatccgggaaggaattaatcagtgtccctgggcaaagtcttgaattctttattgtttgagattatgacatgagattatttcctcatctgtaaaatgtaaataacacctacctcagagccaagataagaaatttaagatgatatatataaacacctagcacagttgctggcacacaggatgtgcttaaattgtgagtcgctttttccttccttttccttccttttctctccagttgttcctcccctgtatcccatcaggcactccatcctgaaagctctgccacagtgatttctccaccttagcctctggcagtgactccagggtaggcaggtggaggaaggacaggccctgcctttctgtctgagctcatagatgctatcataagtgggtttctaatctaggatatggtaacacataaaacatcaccatggaagaaaggtgcgtttgttagtatttgtattaaattattttgagataaaagaaaaaagctcttatttgaggcccagtcttttaggatttatggtgattcctatatagcaattcttccaacttcaaaaataagctatagtctaaaaaaattctctctctgcacttgctgtttagtgctggaaggcattttccacagagacaatactgtattctcaagcccacagaaacctatgcaacctatagtgtgactaaataatactgctcagaggctactctaaaatttacacactaagtgatatggtttggctctttgtccccactcaaatctcctattgaattgtactcccataattcccacatgttgtgggagggacctggtgggagatcatttgaatcctgggggcggtgtcccccatgcttttctcatggtagtgaataagtctcacaagatctgatgggtttatcagaggtttcacttttgtttcttcctcattttcctttgccgccgccatgtaagaagcaccttttgtctctcaccatgattctgaggcctccccagccatgtggaactgtaagtccaattaaacttctttttcttcccag

SEQ ID NO: 102266 - DNA, 1048 bp, Homo sapiens
gatgccgtaaccattgtccatgttttattcataatttgacgctaaaacctgaaaagttgtcagtacggtttatgctaatacagctataaaaatgttcttcgatgccagctaagcagctggtgaggattacgttccttctgagtaggtctagcttctgacgcgggaggcacccgaggagaacgtgctcagccgcggaagcagacagacactccgtgtttacactcaaacaactgctgaaaatcatttcatgtcacgttttacttcatatttggatctgactttcttgaatggcatttttatttttcttagagtttgtattatctttttttgacgcattgtgtgctttatcagatcctcaagttcttgtatcttctcagttatgacaaacattctattattcacgtttcctattctggactggcttttcccaggacctgaggctgatctaccttctgggggctcttcttcgctctgtccctaagttgggtctagtgcatcctaaatctcatgtctttctcctttatggtttatgccatcattttgctggactacatttatattttctcccctagaaaagagaatgaaaagtcagttgtctgatttcttgaaaatatacgtagtatctcaccctcacgcttgattgatagcttatctgcaggtagacttctccagtggacattgtttctcagaacttctaggaaagctcattggcttatagtgtccaatttagctgatgcaaagactgatgtcagtccaacttccactcccttgcaaatgactgattttttgtctctcttgaaacatccttctttgtcttggatattctgaaatgctttgtggatgtgtcttcacatgggtctgtattcatagtaggcttcatttggtgagtcccttccattggaaaattcatcttctttagaacctgaggatttttgtagcgttccttaagctctgccctttgatttctgttctttctgggcctcctagtaatgctgggcctcctaaataggaactctgtatgtcttatattttcctcctttatatgttt

SEQ ID NO: 102267 - DNA, 1159 bp, Homo sapiens
agagtgaaactgtctcaaaaaaaaaaaaaaaaaaaggccctatcgccaactgtgtagtccagttctacggtactgatggttagggcttcaacacataaacttgtggggagtgaaggacatgaacatagttcagtccataatgctgttagagccagctgagctctctcagttatattcagagtgtctgcaggaatttattagccaacactgttgttcctaaaacaaccagcaagaggctctctctctctctctgacactctttagaatggcatcagcctccatctccacaccgcacagccaacccagcagccagtcctgggtgcctcttcagatgatgttctgggctcctctgctttttaccctccctctctcacccctgtctaaaccagtgtcctcccctgcctgtgttatcgcggaagcctccccattcttgcttccctcttgtcactctggagctctgcctctcaatggagcagccagtggtgttttgaaaacatgaatcaaacctggccactctcttgctctgagtcctctgagcacatttagcgcgggctccagatgcttgcctgggcatgtgaggacgtggcccgctctgccctctccagattcagctcctcctcgcgtctccaataccacagctgggctactctggccttgctgctactgctcccatgtgccaagtgtggtcccttcctcaaagcctggaattcccggaaggttcttcccccagatacccacatggcttactccctcactcctcccaggtcgctgcccagatgctccttcctcagaaatgtcttcccgagcccctagctaagcgagcgcaccattccccccaccccagaccatctgtcctcaaagtgtcttcatagcactggtcactccccaacatcagggtatataattgcctgttgtctgtgtttgctagaacgtcagcttcacgaaggcttttgtctcatttaccactaggtgcccagtaccttaggagcttggaagttcttagtacctaagaatagcacttgcttcatgaatatgtattaaattgataaatgacattctgtggctcaagtgagtccgtggtgtcaaaggttatgctgggcagactgcctttggtaatgagcatagacccctctttaggtccaaagcaacccccgggaga

SEQ ID NO: 102268 - DNA, 1064 bp, Homo sapiens
tttatagttacttagggagagttgacgtctttacatcctaggttcctgtggtgttattctacttatgtaagccatcttttctctactcagtacagggtggaagttttctttatatagaccctatctatttctttaatttgtatttatgttttagattcttcaatatgaacatttttatgtaaatttaagaaattatttaaaaatgggatttttaaattacacttatttttacctctatatagagaagattattgtttctgtgtattaattttgtaaccaaccacctgtgctaaagcctttgactatttctaatagttgattcttttgcattttctaggtataaaatcgtatcacctgcaaataatgatgatttttccatcttgtttataatacttcaaattgtatttcaacattatagaggcagcagatgggtattctcatcttatggaaacacgctagtctttcaccactgaccatagcttgggtgtggcaatatggtattttatctcaccttcaggtatcttgatgactttccctgttacagacctagttaccccaacagacacatctagctttctttcattacttttacataggctccaagctgacacacaattcttctttaaagaagcagcttcccgaacgttctgtgagccacatctccatctgcacactctcgatgctgccctgtggaggactccctagggtggtgggagtgtcctgtatccgcactgtccactgcagtaaccactggccacttgtggccactgagtgcttgaaatgtggtggacatgactgaggaactgaacttttaatttttttcattttaattaattttcatttaaattgtcatgttattgagcacttaaaatgtagctagtactaccgaggagtgtttacttttgctaattttcattgacatagccccatgtggctggtagctgcagaactgggctgcacgggttcctcgctcattcatggaagggtaagatatgaatgctagaaaggccctggtggccactcattgtgcccagagatgctgagattgggcccacatcacacag

SEQ ID NO: 102269 - DNA, 1062 bp, Homo sapiens
gcttatccctgtaatttcagcactttgggaggctgaggcgggcagatcacctgaggtcaggagttgaagaccagcctggccaacgtggcaaaaccccatctctattaaaaaatacaaaaattagccgggcgtagtggtgggcgcctgtaatcctagctactcgggaggctgaggcaggagaatcgcttgaacccgggaggcggaggttgcaatgagccaaggttgtgccactgtacttcagtctgggcaacagagctgtgtctcaaaaagaaaaaagaagtgaccccaagacggattctgtccagttactgcttgaagatttgccaaaaatagcctcacaaggccagatcacttgagtaaaatgtttctcaaaacatctgccaacattgaagacttttccaaatgtcatgatggcaattattgattgataaggtgacatgtctcatccactttgtccatcctggcttatgcctgtcatccaagtgaaatcattagtagcaccctctcccactctgaagcttgagtgataaattataattataggtcctctattcacttagcacttacaatcaattatacttacaatcaattataggtctcctatttacttagcacttaccacttgtgccagatattttaggtacatcatctctttgaatccttcttacagccttctaagatatatactattatttccccatttcatagatgaaggagacttcttcaccctttataaaaataataagcactgtggaatcccggggtaactggatatccgactctggggttctcgaagtcctgggaccagaaggttcttccaaggctgtgcctttcatctcttcagtgagaaattcgtgctgagaagggtgacgaaatttcctcaagggtgctcaatagatactagcaaaactcaaaagcaggtctttttttcttgcagcctgctggttttactctgcccacttaattctccaacgaataatgttctcccctttcccagcgccatccaaaagaacccggagcatacaaaccgggggacttcgggagtccaagccagctggaacc

SEQ ID NO: 102270 - DNA, 1321 bp, Homo sapiens
ggcagaggttgcagtaagctgagattgcgccactgcactacagcctggaatacagagcaagactctgtctcaaaaaaaaaaagggagcaaatccaaacggatccctgacattattaaaaagacttatttggaggaaaaaaagaggatttttttctaatctgatttttttctttttagcttcagctccataaaagaatagttttagccactatagtttaacatggaacacttcattgagaggactatagctaggttactaagtttctgagtatcaagagcagttaccccaccatatttctgaacaaagaactcgggaagctaaaccttttataacttggaaaggtccagtacttttccttttgttactaatttcagcaggtgccgcatgaaattcccatgtgcaatcataattaatgccaaagagagaggtatctgaggtcggcctgaattcacgattaagagacaaaaatattatttaattcagaaagttcctcaacataacaatagcatgtcttattttatcactgtattattaatcttctcaggctgccataacaaaaaacacagattaggaggcttgagcaatagacatgtatttcccacagttctggagcctgcaagtctgaggtcgaggtcccagcatggtctctttctggtgaggcctctcctctgggctgcagatggcccccttctccctgtgtccctacgtggtctttcctcagtgtgtggagagaggagcaagctctctggtgtctcttcttataagagcactaatcctattatattagggccccacccttctgacctcctttagcctaattacttccttagaggcctcatctccaaataaagccacactggggattagggcttctgcatttggacttgggggatgcaagcatttaatccatgataatcacctttaatttttgttaatctttgtgctttattttaaagataataaaatagtttctattcattaatatgaagtgctttattttgtatattaagtaccctatttatgtaatacatgtcacgggtgcacctagccggggtcagtgtcacaggcagtaaaggaatttaccaagacagttgcaggtaaagaaagccagatttattagagaaagtataaaaatatgttgcaagggtgcagcaggcagcacagcagagaaggggccgtctgccaagcggcagaggctggaaggaagttttatagggttgcgctggaggggcctatgtgctgaaaaaggtcactgtgcccggggttgtttgtgattggccatttctcagaatcactgttcattgttctctcccatctggg

SEQ ID NO: 102271 - DNA, 1405 bp, Homo sapiens
ttccagcctcaggacaattacataaaggaacaaaaaataggctttgtgctagagcagaatagctaaggcaggagctgttggttccaatgtttatatttcaggctatattctttgtctctttgtttctctccttttaaaaaaatgtgatccactcattttcatacatatcaccgcagggcctgtttgcgcaggtctgagaacgcatcactcctggtacagtaatagtgactgtgcacacatcagcatgtgtgggatgggtagaccctgggtgtacattgtctatgcagaatcattaggactcatctcaaggatgctgaggaagtgccagtcatttcacatacagttcagttgtgagagacaattttttcctttgtaaatactaatcaccatcaaagcataagaatgctgatgagacacagccgatcactctgccatgatctctgagcattaggaggctataccatggcagtagaaagtaaaaatgtctcttcttgggaaaaacagaaacattttcaaagtgtaacctcaggagaatattaattaccttaactcaaactttgacgttggggaaagggttggcttcatgttgtgtaaatttcaatcatcatagaaattctttaccatatttgatatagttggggtaggttttttatttattttcacctctgaagatttagctgggtttaatatgctcacattccccagtgaagtctacatgaggaggctgggaagcatactggttaaggctatgggtcttaagcatacctttcccacttatgcagtgtgactctgggaagctatttatcctaccgatgccttggtttccctgcctgtaaatggagctgttgatagtactcacattttatgatacacataaaatgcctgtcagagtgattgggtctgtatatacaatataggtttgtgtattagttatctactgccatgtaacaaacccaacacttagtggcttaaataataaatgttaattatgtcacagtgtctgtgggtcagaaattcagggatggcttagcctggtgcccctgcctcagagtctctcccaaggctgcaataaaatatcagctgtggtttcatctgaaggctgaactgaaggagtggtatctactgccaggctcacttgtgtgggggctgctgcaccctctccatagggtggcttgcagcatggcagcaggcttccctcagagcaagccagatggaatgggatccaccatctttttgtagcctaatctcagtgatatcccatcactttcgctgtattctattcctgagaagcgagtcggtaagtgcaaatctcactcagggagagggaattacaaaagggtgtaaataccaggacgtggggatccctgggggccatcctataggccagtggtccccaacatttttg

SEQ ID NO: 102272 - DNA, 1694 bp, Homo sapiens
ggttgtgcactgatgtccaattctagggtcctgtgagatatacagcaatcagtgaaaacccaaaaaccaggtgggctaagggagtcccagtctctgagggcaaatagctctatgcagtgggcaacctgagagctaaagtcacagcgggtccttggtaagccttgcagcaagtggaccatttctcatttagctgaaaccatccttctaggtgggaatatgtagtttctgcggtttcaatgtggcagtcttactgttaagactggggtgtcacctttggatgatgtaatgtaaatgtaaatctactttaggttggtggtatctccccttgtgtaaacagatcattaactgcaatgctgacaaaagtccctgggggtctggccgtcccctccttagccagtctgttggatctggagagtgatggtgtgaggaaaaaagactggatcaaacttctttatatatagtcacatgattctgtaagcttagtcttcaaggaaagaaaaaaaattaacctgaactagaattcttttgaaaatttacatcagaagctgttttgtaactataattgcttggccagatatgtaagatttgttttcattggctggctcaggatcaatattgtaaatactgtataatgagtttgttaattaaatgtattagattcacactgttacagatgaatgaaaacttttattaaaatatgattattttctgtttgtacaaatatttgatgaacatattccattatagtactctttttgtgagtctttttttcttttctatttagaaaagcaaaacaattcaaaatgctttgaaccagtaattacatgtgctttgaattgctgaaaatggttagttggttccctggaataagagtttattcagtcatcatcaagctgaccaggaatttaagagttctcagataatattccgttcatttccaagcagtgaatatagttccgtatagtaatggaaacaaatacccttttttcagttgtctgaaatatgaatgtatatttgattcatagagctttgctggaaggctaagtcagaaaattatagaaaaatttactcttttcgcttgagtaaacttacctaaaaaaaacaaaaacaactcacctaagatttgtgatagatgtagtgctatcatgactttcttttaataacaaaatattcggatcagcatgaaagaagtagaagtgacatccttccattctttatgtgagtagagacctttgagcagtgctcccaaccttagctgcacgtcagagtctctagggagctttgaaaaattcccatttccaggccactccaaacccattccaatctctggggctgggaatcgcctggaaagctccccaggtgattctaattgttagctgaggttgggaaccattgtctgaagccggggtttggcctgaccagaggcatcgttatatcttaaaaagatcactgaaaatttgatgaagctccacttctagctagatgacttaccctttctgtgccttgatttcctgaaccgggagccaggcccttggtctgcaggcttccttctcctgattgttgtttgaccctgtggcctacaggcggggtcactggtgcccacagaccaggagatggggcatttggtttaaccttaggttacctccgttcgccttaatgggtgctgctcactctccacccaaacggcagatcat

SEQ ID NO: 102273 - DNA, 1021 bp, Homo sapiens
taggcccagaggataaagcagggaacatttcaagctccttgctttcatggagcttaggatccagtggttgagggggagatagacaataggaaaaaggcaagtgaacaagatcatttcggatagtgataaatgcgatgaagagactgaaacagggatagagagcaaggggagggggcttggtcagagtggtcaggtcctaacactgtgggggttttgttgaagagctggtgaattggggcagtcctgagggaactaacaagggatgtccaggcctgcagccatgagcaacagctggaagctggagctgggggaggaagtcacgtggctggaaacctaggggaggagctgcctgccaggagctgtagacttgaaggtgtggagttgagatgctaaggcagggtacaggcagggaagaaattctcaggcttctgatttcattggcagaactcaaaggacagctaggaggcaagggagcccctgcagtggagtccataggttgggtcatcctttcagggcccacagaagggtagataatggctctggggacagtgtggataaaggggacttacacagaggagttagtagggagccactttagatggagtggcccagggaggcctctgcacagcctggaccaggttgacaggaagaagctccctggggaggtgtttgtgtggccggcatcccggcagagggactagcaggtgcagaagctccagtgcagggtgaactccatttttaaaggacttgaagggttgcatgagagacagagaggcgattggtagctgaggttggataagcaaccagaaaacatccccctggggccatggtaaggattcaggtgtgattctaattgcacatcttggtggagaatggctttcaggagggaaactgggtaggctagagaggaagcaaggagacctggtaggaggctgttgccatcatccaggggagataggaagggagtgggactaggatggtggtattggagatggagaaaggggcagagcctccatctgag

SEQ ID NO: 102274 - DNA, 1101 bp, Homo sapiens
cctagtttaaagtgcaagatatgagaacttttatagatgtcacacatcgttttttggcaataaaatcacttaatgatggaaacctttccaaactcctgttttcaagatattcttactgtagcacaagtttctggcagacagtgattactttctcacacattgttaactggcatcttgtgcttgaagggccaggtcaagctggtttatttatttatgttaaatcatcaccatggctcgaaccttgtaacctggctggcagttgctcatgcgcagaggggagatgtaccagctctgttcctttcttgccattcatctctgcttatgtccttagaaatagcttcataccttaagttctagggtacacgtgcacagcgtataataatgataataataaataaataaataagtaaaaagaatcctgaaaaaaaaaaaaaaaagaaatagcttcataccatttcttagcaggcatccttgccagacacttgcctgtttgtgtgaggactggctcagttaaagactagataatataaaccacacattctcttaatgaaaatttgggatctgcaataacagcacaattctggaagcagagaaggtgtgtggagccatgtcagcccacaccacctggcaccccaggtgcccatcagggggcctagtgcacccctctgatgcctgtctggcttctgcagcaagagcaagcaccagggtcaacccacataataaagcagcagaggaataattttcttttttagaaaaaagaaaaacctaatataaacagaagcgctaatatttttcactcatcccagtgagtggaggtcatcaccttccaccatggagaccttgacctatagggtggatgagcggggaatggtgggcaaaactccaccaaagagagctgcttcctcccagactgtctcgctctaacccctggactgcgacttcaggctgaggggctttacctaggtcagaaacacaggctaatttcccaagaacacatcaaacacaacaggtcaaaatgaaagccatctttcccatccagtctactcactctgctctgtcctgatttctacccacaagctgctcagtaaccggggaagaaac

SEQ ID NO: 102275 - DNA, 1026 bp, Homo sapiens
agaaggggtgtgtgtgtgtttcttccctagtgagaaggtgctgtttctggcttttttcaagaccctgggacataacctcaggacaccagcccctgagaggctgctgggaagagctggagcgcagtgctgctgtgtgaccccaaatctgctcctctccatcaccttggttttagaaatttcccgttgctgtggttgtaaggatacatgattctggcacacggcctcttagcacagttttgatggacagtagcagcttctggctagtctccctgtttcagttctctgtcctctccaatctagtctctttgtaatagccagtgagctgcggacaagatctgatcattttatttctttgtgtaaaattcttcagttgtttattgcagaatttcaggtaaatccccactccttaggcagcccacaaggccctttgtgatgttatttctgccttctttctttctggccttggcattgctgggtgtccccaccctttgttacctgtggtctcgctatgccacctggattaaactacttactgttccttgagggagccacgttctttcctgccttgaaactttctacattatgtaccctctgtctgaatggagtttctcctcctcgcccctgtctgccctcctgcctagttatctgccacaagtccaagagttagcatggatgtcatatcttccagtcccagtcggatgaccctgttaaggcattgccctcagcctgctatgtctctttcctcagctgtgtgaaattcatcattctatctccagcgcagaacacaggtgtgggatgtggtgaaggcttgaatgggcggctagctgctggatagtgtggtgatcaagaacacggactttagagccagtgggtctgggatcaaatcttggctttgctaatttcttgccgtgtgaccttgggcaagttacttaatcttttggtatcattgtggtctcattgataaaatggggacggtaatagtacctagcccttgaggttaccgtgagaaattgagaattagattac

SEQ ID NO: 102276 - DNA, 1410 bp, Homo sapiens
taccaaatttcctcttcaaagaggtgataccatgtaatgctcctctgacactatatcagtgccatgcttatttccacaaacttctctgctgaggtattatcaaatattttgaatctgagaggtgaaaataatgtccattgtcatgtaatttgcatttcttttattatgtgtgaggtcgagtatacttttatatatttaaaaagtatataagtattcttttatatattgatatttgtttttctgtgagatggctgcttatattctctgcatttttcttatgggcttttgacctattctttctgattttgatgttaaagaagttagacttttgtctgtcacatgtgttccatatatttttataagagtgtgctgactgtttgcacttgaaaatgtatccttttagtcttagtaatttcttgtaattgatgcatgggaaagcaaagtgtggatgatgatggcactcttagaatctccaacttcattcattgacatctttaaaggttgctttactttatactctataacctcttaaatcctgaagaatcaggtatttccagtcctacccctttccctccattttttttttttttttttttttttttttgagacggagtctcgctgtgtctcccaggttggagtgcggtggcgcgatctcggctcactgcaagctctgcctcccaggttcatgccattctcctgcctcagcctcccaagtagctgggactacaggcgcccgccaacacgcccagctaattttttgtatttttagtagaaacggggtttcaccgtgttagccaagatggtctcgatctcctgacctcgtgatccgcccgtctcggcctcccaaagtgctaggattacaggcgtgagccaccgcgcctggccccctttccctctatttttaattaacaggtacattttatcaagtgtatgcccttttagaatgaaactccatgtggcatggtaagaatcccttttcaaaacaaagtttaaactgtacagacaggaggatcacttcatgcctatatcaccccatcttcagatgtaagatatatcgctttgatctttgcataatatctactgaaatttatttgattcccataaatcaaaaccattgtgaaaatatcacctgtgatgcagtgatataaaaatattgcctctgaggttgtgtctcttggccagatattctatttgtgctccagtctgttgaaagaattgaccaaaatttatagagaatgaggagatccagagaattgtggaggacaatgaagcctacctatagcttatgtttacggagtgggagggtgatatggtttggctctttgtccccacccaaatctcatctcgaattgtaatctccacatgttgagggagggatgtggtgggaagtgattggatgatggaagcagt

SEQ ID NO: 102277 - DNA, 1010 bp, Homo sapiens
atgcttcttgctccacactgtcttatccaaacagattcttctcttttccttttaggagccattctgactctagctctctagtcttgaggctagacaagtttcttctcctttattcttggaaaagactttcattattttctgagtctgtttcccatagttggatcacaggaacttgtttggagcttccggcaggaatgtccagacccttgtatattccctgacaaaggacagacctcttgatgggtgagggtggggtgagtggggatctttctctggtccggctcacagctcagagagggtgagggcacagcgctgcctggatatccagcggtgcaggatcagcctcgaggccagtgctgtcaccccacagcacagccaagttatcatcacatgacattttcttctcgaaatagacaagcacatatctttccctatttaattgcctgctggtaccttattgtaaaatatttgcaagttattctctgtagagaatatattttatcgcctccttttcgaattccagttttctaaagcctcactttcctttatcccttaacacaggactgaaatatggcagtttcttaagtcactggacttgcctagattggatttagcgtaacacatgagcttatttggaaaatgccagcctctcctttgtgtggtgtaggtgtgtttgttcatctgcaggtggcagatgaagtgactcattaccctgacactgggttgctgtgttcgccatatgattcgcagccagttagggacattggtttcctggtcactgagcacaactgccccctttgaaaacaggagcctttgaatatctgctcctcaactgctttatggacaattacatgaagctgatttcagcctgggtcagggttagtgaatcctgaaatagtgtgggtgccccctccttttcttttccccagggtgagggtgggaaaggagttataatacatgtcaaaaaaaaaaaaaaaaaaaagcatgtggcacagaaaagaattccttat

SEQ ID NO: 102278 - DNA, 1007 bp, Homo sapiens
gatctggcccaaaatgtcaacagtgtcaacagttgagaaactctgatctacagatatagggaaccctgcctaatacacaaatcctccgtagttcccaagggcggcctgtaggtaagaaaaatgcagagagagccagtgaaccacaggacagccctaaagccagttggtgaaactgtaaatccataatcctaacaaaataatgtacagtcgtaacaaagtgagttttagagacaaagctttacaatttctggtaaaatttccacatgtgcaaaaaacagagtagataaatcaaggtcctacatctacttgtgttaacaaactagtgaagtgcataatagagaataccaggtgaactcaaggcagtactgtttctaaaattgtggaactagtatgaaagtagatatggagaggaggagtggtaatggtattccctgacattcgctcagcagttgctactgagccatgcattcgcttaaatactaggaaattatcaatttttcaactgtcgaaggcctataaaaatggcaattttctatcattcaacctaaatactatgtgtaatgtattattatatattaatattgttaggatatatattatgtataacatattgtgttagtagtaacatatttgtgcatcctttacattagtgtcaaattatcatctgctatattaatatcacagattaatttatattattggtatattaatatattgatcaaatagagggtcagcaaacttttttctgtaaggggccagagaataaatattttagggctgggcacggtggttcatgcctgtaatcccagcactttgggaggctgaggcaggtggatcacttgaggtcaggaattcgagacctgcctagccaacgtggtgaaatctcatctccactaaaaatacaaaaattggccaggcctggtggcgggcgcctgtaatcccagctactcgggaggctgaggcagtagaattgcttgagcccaggaggtggtgggtgcagtgagccg

SEQ ID NO: 102279 - DNA, 2260 bp, Homo sapiens
ctttcttttttgagacaaggtcttgctgtgttgcctaggctgaagtgcagtggcgtgatcttggctccctgcaacctccaccttccgggttcaagcagttctcatgcctcagcctcccaaatagctgggattacaggtgtgcgccaccatgccctgctaattttgtatttttagtagagatggggtttctccatgttggtcaggctggtctcaaactcctggcctcaagtgatccacccactttggcttcccaaagtgctgggatataggcaaacggccactgtgcctggcgtatactgtctcttaaccattaggtaagtgctggtcttttttccccctggcatgtttttggaagagagtgaataggtcttttaggcctgtgtagagacaatgatgctgtcattgttaacattttctgaatcattctgaaattttgagtagaatgtatggcagtataggaatctggatgtcgaaggattgatgaaaactttctaaatacattcaggcaacatgagatctttttatcggcaattgtgcaagtaaaaatactgtgatacataatttgtaatagagcaggtaaacttaggaataaaagctttagaactgcaacaactgtatatgagcatattcagttttggtttaggttggtgccctccaatagagcttttagcaatgacagatgttttttatgcattgtccagtatggtggccactagctctgaatggctattgtgcaattaaaacatagcttatcttaccaagggattgaattttaaatattcaattctaaataattaaaggttaaatttaaatagctctgtgtacccagtgattactatatcggatggtgcaggtctcagttctttccaccattttttccccaccatattttatatctttacataggtgagacaaatggacttaggtcaaaaggtttacaactggagaaccaagttggaagcaaagaggtttttttgcaaagaggaatctcttgcaaacaaacctggaacttggcttagtgagtcagtttttctgacatgtaagtatggctctttcagagcactagcactggggctgtgctcccctggagaggaagagccttaaggaaggaaggaaggaactcttgagtctgttaagtaaactgagtgtgttgacagtttgaacacactccttctggcagcaaaacaaactgcttggcttatttcgtattttgaatcaaagtaattcctttaaactggcttttaattttcaaaggtggaagcctcctccatctcctctgctggcgctgtgcacctttttagtttcagaaaagcatgctgggcaccgatctctttggaagccttacctggagattttacccaaggcgtatacctgccctgtttgtttggagccggaagtggtgaaccttcttcccaaatctttaaaagcaaaggctgaagagcagagagcccacgtgcaggagttctttgcttcctccagagactttttctcttctctgcagcctctgtttgcggaggctgttgacagcatcttcagctacagtgccctgctgtgggcttggtgcaccgtcaacaccagagccgtgtacctgaggcccaggcagcgggaatgcctttctgcagagccggacacctgtgcactcgctccgtacctggacctgctgaatcatagcccacatgtccaggtgagaagctgacaagggagcagctattctatttggataggaaggcttccgctgcccagaacctgtggctgtagatgtgggtggcaccacagggagaggtgtcggcggcttcaggtgaccctgtcaggttggcctgacgtcaggaggctcctgttgttcttctagaccccactatccctcccgcagtgcttgccttggccccttttcttcactctgctcttcaggcctacagagcctcgtgctgcatcctctgtccggtctttcccagcagcctgtggtgcggagccttccttccttctccctcgttcctccttccgggactgaagcttagcttgctttcctgccccgtcccttttaaactggtgttgtagctgtcacagcatttctcttcgctctgatcgctgactgacttgctctttttcccactgagctctgaaatctttgagaatggggtctttgtcttgttcctctttgtcacctcagtgctcatggcagggcctggcacatagtaggtgttcagtaaatgtttattgaatggatgggtatttgtggggaaagggttctgggaaataatga

SEQ ID NO: 102280 - DNA, 1113 bp, Homo sapiens
agcactttgggaggctgaggcaggcagatcacttgagctcatgagtttgagaccagcctggccaacatgacaacatcctgtctctactaaaagtacaaaagttagccaggcgcggtggtgtgccctgtagtcccagctactctagaggcttaggcaggaggattgcttgagcccgggaggctgaggctgcagagagccatgatcatgcccctgcactccagcttgggcgatagagtgagaccttgtctcaaaaaactaacaaaaaacaaaaaccactttcttctggaacattctctcacagaagttgggcagcttgctatgggtgtgtgcctgcatacatggccactccactcttcccacaggtgggcaagagataaccacagggaggaccaagatgctctttaaaaggatttggagtctgctgtagcacagagatagtggtggtgcaattagggccccaaaattctacatcacagggcaggctgcatcttacagaaaagtcaaagcatatgccacacaatgctccccttggccattagaattattattcaagtacccattaggtaattgaactttgagcaaattaacttcctcatataccacacgccaaggcaaatgatttcccacttgtgccccttgctgagtgaggtgatgtgtgtaaagttgttctccatgagtcagttacacatcatgactttgaactaaaatgcttgatttgagccattttctattaaggccccttctagttgatggtcatgaaccatattgtcagcctctaaaataatgcttgactttctgtttttgtgtgtcaaagatggtcagtaaaagccacacccttagatgtacagaacagagtttttccccagatgatcaagagagtcagtagtgtcagcagtaaacttgccgtgtctaaggcctgcccacatctctggtgtcatttgccctaggaaggatgggtttaaaatcatcaagcaggaatcagcagatggtttagatggaatacctgagaataggtcatctgtttgtaatttggagcagtaaagagttcctatttttaaaagtgagcacaacttgccctggccccagccccagatttcgggtgatgcaggtggc

SEQ ID NO: 102281 - DNA, 1031 bp, Homo sapiens
tttttttatttttttgagacggagcctcgctctgtcgcccaggctggagtgcagtagcgcgatctcggctcactgcaacctccgcctcccaggttcaagcgattctcctgcctcagcctcccaagtagctgggattacaggcgtgtgccaccacgcctagctattttttgtatttttagtagattaagctgtagtcactaggtctgcaagataaaactgttttagagggactgatataatgggaattctgttactgtagggatcatgatttagctcacagtataaacgtttcatgtacaaaagcacttgagagaaacagtttaccaaaacatacatttgtatacttaaaggtacaaagaacagtgattatcatataactggaaagtaaatcaaagaaatgttttttattttagattgagcatttccacagaaattacagttttgtcctttttgaaaaaatagaactgtatttcagaaaaaagaaactacagttttagcatgcagaaaggaaaagggagaacaagccggatcagaagacgaaaactctgcggaagttctgaatcaagaggaggtatggtttttcttttagtaccagtaatgaaaaaagaaatccttttgtgattgcttgtttgttcatacgtagcttttctttctttctttcttttttctgagacggattctcgctctgtcacccaggctggagtgcagtggtgtcatcttggctcactgcaacctctgcttccccggttcaagcgattctcctgcctcagcctcccaagtagctgggactacaggcgtgagccagcatgctcggcctaacacatagcttttctcaaaggcacacagtgttcaaagagaatctttcttttttttttttttttggagacaaggtacattctgttacccagattggaatgcagtggcgtgatcatggcttgatctcccaggctcaagtgatctcctcccttagcctccctcctgcctcagcctcccaagtacctgggactacaggtacatgccactgcacccgg

SEQ ID NO: 102282 - DNA, 1027 bp, Homo sapiens
aattattttgggaaaaccccaaagtgagaaaaacaagtgctgagtaattttcttgggtgtgcgcccatcatgcactgcaaaatgcgaatgtttgctttttcctaagatgcagtgacttacttagacacagtaactgcttctctggacataggttgccttgcttgcttaaaaggaactcaagagagggaactagatgccctgtgagcgcacttagcaggtgtgggcaggcgacatcgctctgggattcccagtgaatgtgcccccaagtgggagggaatgtttttatttaatcctacctaactcctacgggtgctaaaagtgtctgcatttaggtttgtccagggaggatatagatctataaagatctggattgatcatatgttctcacagatctgtgtaccggcaaagaaagttaaaccaaattcccaaaggtgtgtcaagctgtgggcacaaaattagagtctcatccatcgtcttcagtgtaaactgagttgtttgatcagtgactttgagatttggggagaaccatgacatcatcacgactcagccttttccatgcagagctggctaacccgcctgtgtctctgttactctgactctaccttctctctcaagtccttacttgaggttccggaggtgggcccctgctgtgatctcctactgtgcctcccccagtatttccttcttttttctcctaaagatcatttggtccgggcgcggtggctcacacctgtaatcccagcactttgggaggctgaggcgggtggattacgcggtcaggagttcaagaccagcctgaccaacatggtgaaacccccatctctactaaaaatacaaaaattacctgggtgtggtggcacgtgcctgtaatcccagctacttaggaggctgaggcaggagaactgcttgaacccgggaggcggaggttgcagtaaaccgagattgcaccactgcactccaacctgtgcaacagagtgagacttttcaaaaaaaaaaaaaaagatcatttggaaccttgttttaagga

SEQ ID NO: 102283 - DNA, 1029 bp, Homo sapiens
agtagctgggactacaggtgcgtgccaccacgcctggttaatttttgttttttgctttttctattttatctttttttgagacagagtcatactctgtcgtccaggctggagtgcagtggcgtgatcttggctcactgcaacctccggctcccaggttcaagtgattctcctgcctcagcctcccaagtagctgggattacagatgtgcaccaccacacctggctaatttttgtatttttattagagatgggatttcaccatgttggtcaggctggtctcaaactcccgacctcaggtgatccacctgccttggtctcccagagtgctgcgattacaggtgtgagccaccacgcccggcctaatttttgtatttttagtagaggcgggtttcgctatgttgcccaggctggtcttgaactcctgacctcaagtgatccacccacctcggcctcccagagtgctgggatcataggcatgagccaccgtgcccagcccctgtatacactgttgcggccccttcccacccagctgccgagagatggttctttcacaggtctcctgcttccgtgcaggtagcttattccagggacagggaagcaggaggaaaaagcactaggaggaagaccgcagactggattcagaacaggctatcgtggagagctgtgtgcttcgctgccggcctgaggctctgcgttcccctccttggtgctcaggctgcccggcatacgcagcaagtgctgacccagcaggcagcccacgtgcgcttcaggtgtgggaggctctgcgggctgcggggaacaggatcgctgtgggaggttgagcctggagctctgaacagccactctgcgcccaatctgctgtagcgctgagggtcaggaaggcctctgggagttctctagaagaaggcgctggggaggaggagttaacatctcatttcattagagcatgccagttctgttctgggtgtgacttttgaagaatattgagttctaccagtagaactttggggactgaaacctgttgaggatt

SEQ ID NO: 102284 - DNA, 1091 bp, Homo sapiens
atttttggctgtgctcaagttggtggcatctaattgcttaagtctttgatcagtctcctcagcatatgcttgtttttgatacaccaatggctccttccgcttttctgtgaagtggctgacctgcctatccctcttatggtggaacctcccttccgtgagcacctaggcatccgtggcacggccagggtggagatgggtctctgccctgccacgcacgactgcttagccactttccattggccaagacaccgcgctgcctagtgacattggttttggcaaatccagggtcagtgtgacagccagcaggtggacacacacagcagggtgagagatggcagcggctcccggcgatgaggaaggtggggcttccccagccaggcgaatccgctgtggttcttcatgcagcattcgcagagcagtgtgcagtgggactcgggaagatggggcgagcccttgaaccctatcctctctcatcaacagaacggatgctctgctcctgagactgtcgctggtggttggcaaagaggtgttttacaccgccctctgggggagcgtcctggccagcccgtccatccgcctccctgcctcagtcttcgtggtgggccacatcaacagggatgcccccggccgggagcagaagtacatgctggggaccaatcaccaactcacggtgggtgctgtgttcctcacagggcatggggaggaggcgacatgtgggcacagcatcctcatgggcaggttgtcactgaagctgcaaagggacatccaggaaagggaggtgcaccaagcttaagtctgggtaacgaacggctgagcaaggcgagaaggaggccttgtgcagttgaggctggtggtggcttttttaacatatgcattaaggttttttttgtttttgtttttgttttgagacggagtctcgctctgtcgccgaggctggggtgcagtggcacaacctcgactcactgcaagcttcgcctcccgggttcaagcaattctcctctctcagcctcccgagtagctgggattacaggcacccaccaccatgcccggctaatttttgtgtttttagtagagatggggtttcaccatgt

SEQ ID NO: 102285 - DNA, 1035 bp, Homo sapiens
cagagagcatgtgggtgtaccagcctcctctttgctacccaccgctctccttctcctgctttgggtgcctcctaaatttcattatacacttaacacagggattctctagtctggagagtgatgattttgaaaaacagaattgaaatacattcatgatttcaactgatacttaaatagcttggtgttaagagatgcacaattcacatctttttattttttacagagtccagtaaaaggtgaaaacggcaaaataattttggaaacaaaggcagtgattcccggtgacgaagatgcttcgtttccccctctgaagtctgaggacagtgggatcgggctcagtgcctcgtcaccggagctctctgagcacttgagggttcctcgagtttctctggaaagggacgacgtttggaagaagggcgggagcatgcagaggacgtttctttgcatccaagagctaatcgccaactttgccagcaagaacatttttggagtacagctgacagcgtcaggagaagaaagcaagtccgaggagcctgcagggaagagggacagggatgggacgcagagcctggcagccaatgattccagcaggaagaactcttgggagcccaagcccatcactgtgcctcagttcaagcagatgctgtcagacttgttcacagcacgagggtctccattcaagacaaaaagttcagagtcaccatcgtcttcgcccagcagccctgccaggaaaaacgggggagaatgggatgttgagaaggtggtcattgacctggggggttccagggaggaacgcagggaggcctttgccgccgcctgccacctgctgctggattgtgccactttccctgtctacctgtccgaggaagagaccgagcagctctgtgcaacgctcttccagctgccaggtgagaggcagccctgccgaagtccctctttgggaatcatacgatgaggcgattgacgtgggtggaatatcccctatccacaatgctagggaccaaatgtattttggatttcggacttttttcagat

SEQ ID NO: 102286 - DNA, 1057 bp, Homo sapiens
cgcctgaggtcaggagttcaagaccaacctggcaaatatggtgaaactccatctctacaaaaatacaaaaattagctggtcatggtgaccggtacctgtaatcccagctactcaggaagctgaggcaagagaatcgcttgaacccgggagacagaggttgcagtgagccaagatcacgctgctgcactccagcctgggcgacagagcaagactctgtctcaaaaaaaaaaaaaaaggaccttatttcttaggttttgccacatgcatgtgcttcccagccatctcgagccctcagtaaaaccatatcattgttatgggtttgttttttctgcaggaaatcagtagctctgatgagatcaccatgaagagtgaattcccgcttctgcgccaacattctgtttccagcatcaggcagttgatgccattcttcatgactctaaatggtgcatttaagacccagagacagctgcctgctgatagcccaggaactccattcttggactttcctgtcacagatagcccaaggatcttaaaacaactggaagaatgcatcgaatatgattttctggaacatccagaatgttaaccatgtgagagagaatatgtttaatccatgtattggtactttactgaaaaccaggttatattctaaagaagaaagaaggcaggatagtgcttttgaacaagcctatttccattttgaaagtagatttcaggctaggtgcggtggctcacacctgtaatctcagcactttgggaggccaaggcaggcagatcacttgaggtcaggagttcgagaccagcctgaccaacatggtgagaccctgtctctactaaaaatacaaaaattagctgggtgtggtggcggcgcctgtaatcccagctacttgggaggctaaggcatgagaattgcttgaacccaggaggtggaggctgcagtgagccgagatcacgacactgcactccagctgtgtgacagaatgagaccatctccaaaaaaaaaaaaaagtagatttcagataatttactgttcagcaacaggacacacctccctaaa

SEQ ID NO: 102287 - DNA, 1003 bp, Homo sapiens
ctgtcacccaggctggagtgcagtggcacagtctcggctcactgcaacctcctctacctcctgggttcaagcacttgtccctcagcctcccgagtagctgggactacaggcacatgccaccgctcctggctaatttttgtatttttagtagagacagggtttcaccatattggtcaggcttgtctcgaactcctgacctcaggtgatccacccacctctgcctcccaaactgctgggattacaggcatgagccgctgcgcccagccctatttttcatttttaaacgtatttcttcctacacctattctgagagaaatgagtatgctaaacaaggatgttaaatggagaagtatacagaaataaaaatgtaaaagccaccagaaacttggtttaacttggttaaactgaaaaggatcacaatttaaagaaatagtagaaagtaaatcttccatccttgtatgtaacttagcagaaaatgttgctgccttttcatttatttattgattattgtgtaccttccattgacactcagatctctttcccctacaatagccaggttagtctctctctttttttcttttttttccatttttgagacggagtctcgctcttgttgcccaggctcgagtgcaatggcgctatctcagctcattgcaacctccgcctcctgggttcaagcaattctcctgcctcagcctcctgagtagctgggattataggtgcccgccaccatgcctggctaattttttttttttttttttaatacagatgggatttcaccctgtcggccaggctggtctcaaactcctgacctcaggtgatctgcccacctcagcctcccagagtgctgggattacaggcgtaagtcaccatggtcagcttttttgtttttgtttttgtttttgtttttggagacagagtcttgctgtgttgcccaggctagagtgcagtggcacgatctccgctcactgcaacctctgcctcccaggctcgagcgattctc

SEQ ID NO: 102288 - DNA, 1099 bp, Homo sapiens
taggaataataatctgcttattttttattcttcttcttgttcatttgaaatcaaactgccatgttaaaacttagaaaataggctgagctcggtggctgatccctgaaattccaccactttgggaggccaagacagaaggattgcttgagcccggaattttgagaccagcccaagcaacgtagggagaccctatctctacaaaaaaaatttaaaaattagccggtcgtggtggtgggtgcctgtggtcggtcccagctaggctgcagttagccctgatcatgttactgcactctagcctaagcaatagtgagaccctatctcacaaaaaaaaaaaccttagaaaattatttataaatagtttttctgttatttaagtttatagagttagttttcatattgtaattatgaaaactatgttgtcaatctgagtctttaacttatgatatacgacagatgattaatttagcagaatcaaaagccagccttgctgcaattctggaacattctctgttttccacggaacagaagttactggcagaacttgatgctattataggcaagaaggggacgaggatcatcatttggaatcttagaaggtaaacgtggacatagatgttgaccgtttgggaagtaaagtgcacgtgcagggtggtggtgttatattcatctctcgttacacacagtagaaatacatggaaaggtactcattttttggtgtagttactgatttgtctttgcccaggatatgttatagaggccatttcagcttcaatttgagatattttcatcttgttaaaaaaaatttttttttgagacgaagtctcactcttgttccccaggctggaatgcgatggcgcaatctcagctgactgcagcctccgcctcctaggtttaagcgattctcctgcttcagtcccccgagtagctgggattacagtcgcctgccaccatgcccggctaacttttgtattttagttgagacagggtttcaccatgttggccaggctggtctagaactcctgacctcaggtgatccacccgccttggcctcccaaagtgctgggattacaggcgtgagccaccacacccggccaaaaaa

SEQ ID NO: 102289 - DNA, 2032 bp, Homo sapiens
gatgttaggtacacttcattcagtttcccctgctggtaacatctaacaaaactatagtacagccaggcacactggctcacacctgtaatcccagcactttgggaggctgaggcgggtggatcatgaggtcaggagatcgagaccatcctggctaacacggcgaaaccctgtctctactaaaattacaaaaaattagctgggcgcggtggcgggcgcctgtagtcccagctactaaggaggctgaggcaggagaatggcgtgaaccagggaggcggagcttgcagtgagccgagatagcaccactgcactccagcctgggcgaaagagcgagactctgtctcaaaaaaaaaaaaaaaaactatagtacagtagtactattgatattgacaggattttgatgttgatacagtcaagatgcaggacactttagtcatcacaggaatccctcatgttgctcttttgtagccatacccacttccctcataaccccactccctccttaatccgtggcaacctctaatctgttctctatttctataattttgccattttaagaatattacataaacaacatggaaaccttttggatttgacttttttcacttagcataactcctggcgttttccaggttcttgtatgtatagtttgcaccttttcctttttcttttttttttctttcttttcttttctttctttctttcttttttttttttttgagatagcgttttgctctttcccccagggtggagtgaagtatagcgccatctcggctcactgcaacctccgcccaccgggttcaagcgattctgctgcctcatcctcccgtgtggctgggattataggcacctgccaccatgcctggctgatttttgtgtttttagtagagacagggttttgccatattgaccaggctggtcttgaacttctgacctcaggtgatccacatgcctcagcctcccaaagtggtaggattacaggcgtgagccactgcacccagccagtttgcacttttttcttgctgagtagtgtttcattgtatgtatggaacccagtgtgtttacctattcaagacatctaggtttgtagttttgggatattacaaataaagctgtaaacatttgtgtacacagttttgtgggaatatagtcttcatttttctgaaataaatatctagaagtgtaattgctgtatcatatagtacttgcattttattttctaagaaatgccagactgttttcctgagtgttttcctaccagcagtgtatgagtgttacagtttctccacatcatccaggatccgttttctttctttttctcttgcctttgcacccccaaccccccactgacgtgcaccatgtgtaggtttatttatttgcttacctttttaatgacttacagtgtttgctggcttatcttgctgtgaagttaaattttggttctttctaaaaattatttttacagctacaaaaatgcaacagagttcgattttgaaaaggataaatatgatatcagaattcccgaggatttagatgagataacagggaagaaggggtacaagaagcaggaaaggatggaccagattgcccctgagagtgactattccctgagggtatgtattcagctctctttgtggaagtgagaaaatcattgaatgctggtagtattaggagaggtcatgttacctgcttgtgatagaaaggctgccagtgctctctaaatgaaagtatctcagacatgattttccctggcccactcagcctgggcaacagagtgaggctgtatcacacacacacacaaatttagttaaacttttcattagcacactggttgatttatttgtttggaaaccctttttaaattatgaagtcgtcaggcctaacaatgcttgtagtttttactatatgctgacattattatcttattagaatcaatatattagtcagtatatggtggccagactaattcaaaaaacaacaaattcaaagtcttattaaattttaacgtatttgcccgtgcacggtggttcacacc

SEQ ID NO: 102290 - DNA, 1055 bp, Homo sapiens
aggtgggggggtctccctctgtcccccacactggagtgcagtggtgtgatctcggctcactgcagcctccgcctccatacttgacagaaaaatcagaaaatgtacctttttgtacatatatacattttttaaaattaaaatgtgatcataccatacgtgctgttttgtaatctttttcacttagtaataaatatatcagcatctatatagatcagttgattgtattctgcaagtcatttttactggctgcggtatattgagcttatttttaatgaaaaataaccaaatcagaataacatacagctttatagcctattttattgaagagttaattgatcttttatcaagttaataggagagcttctgtgtaaatccatgtctaagtaatggtgagcaaacctgtagatactaacttcttgttatgttattttccaggcttattgcagtatattatatctaaagccaagaatgcagatcatcctacgtggacagaaagtgaagacacagctggtttcgaagagtcttgcctacatcgaacgtgatgtttatcgaccaaaatttttagtatcctttttctgattccttatagagatatgttagtcaggtgtattctcttttgcccctttccccttatatgctgatagggattctagtctgctctagctttgccctcctttgtgtgcttttggacttaccaaataatgaaatagaaaggatgatttgaactgagtgaggtgttgtgttcaaaatttaccttaatattttaagtctaaaacagtgagaattacctttggattcaactgcagaaataaagatcattatgggataatgatgtatcacagaaatagactcatcaaagcttatgaaaaagttggatgtcagttaagggtaagctttattttttatttgaaaagaaaatgtctattttccacaaaagttaggataatatatgctcttgagtcaaatgttaaataattttattgtaccttttgcctatagctttttaatgtaaatttgtaaaaaataacactgtggtatttgaacttttattaact

SEQ ID NO: 102291 - DNA, 1013 bp, Homo sapiens
ctcccagttaatctttgtgtttttttgtagagacagggtttcaccatgttgtccaggctggtctctaactcctgggattataggcatgagccgtcgcacccagcctaattttgaaagagttacgtcataatttttaggaaaggaattaaataatggcatcttgtggtagaaatgatgtggaacatctgatgaagtatttagagtccatatttctgtgttaatattttgttcttgttttgggacaggaagcgtcctgatcagacatgggttcagtgtgatgcctgtctaaagtggcggaaattacctgatgggatggatcaacttcctgaaaaatggtattgctccaataaccctgacccacagttcaggtaccatagagttggtagtaccctttttggaaagacggaaagtactgttcacagtgtatgaataggcgctggtgacatgttattcctatgtgatttttctgaatagaaattgtgaggttccagaagaacctgaagatgaggatttggtacatcccacttatgaaaaaacctacaaaaagacgtgagtgttgtattgatgtatagtgggtaataatgcccagatcatgaacagtgatgccttggcaacattatttgatgcttctccaaggtaaagcacctgtaactgaaaaagtttataatgtggagtgcgtaatatcaagggctttaaaaacaaaaacttatgctgtggatacctgctgtttatttcatgcttattgctgccatatgtgcggatgttttgtgtaagagcagtctgctgttgtgagctgtatgcagaggaatcattagtgaataccccccccattgaagcttatagagaaggtgtaacagaagaggtgatacatgaattttaccagttacgtgttggtgagtgccatagaagctctggtccagtgctgtaaggaagctcatagggagagtagttctgtctggtgggcaggagagcagaaatagatcaggaaacttcatgaaggaggtcatttttgt

SEQ ID NO: 102292 - DNA, 2094 bp, Homo sapiens
tgaaaaacaaaacaaaaatgattgcttgagtactcgaagtacagtttctgctgaatgggtattgcttttgcaccatcataaagttgatgccattgtaaatcaggggccatctgaatgcaagtaggcagttgtgcttcttgcttgagaagtttgggtcttgataagtctagtagcaaagaggtcaccacatggtaaatctttttggctttgtgggccacataaagtctctgttgcatattctttgttttgttgctttgtttcttcacaccttttaaaaatacaaagccattcttagcctacttgcaggctggatttagttcattggtttacttgttgattcctggtatagcacaaggaatttacatgtttggaattgtttttgtgtcttctgggataagggggaagaggaagattatatcttgtgttttgggcatgtcacactagaaatagttcctttaaggtgatgatttttccctccaacagattaatgctgaactgttgtttcggccaactgctctttcaactccaagcttttcttctcctaaggaaagtgttccaagaagacatctttcagaaggaacaaattcttatgcgacaagacttctaaataatcatcaagttccacctcagtctgaacctgagagcaacaggtcagtggctaagattggttttccatttggggaatattaaacagagcttttacttgacacttctgtgacagtgatgcaattcgggatcattgtaggttccattgtgaattgtaggttccatgaatgtgaaaatcttcaggacaaattgtcttgcttttattgtctaaacttaggctaaaccctacttctgccacctgttaaattcgttaaaaagtattaattgaccagcctggccaacatggcaaaaccccatctctactacaaatacaaaaaaattaaccaggcgtggtggcgggcacctgtaatcccagctactccagaggcggaggctgaggctgaggctgaggctgcaccccagcctgggcaacaagagcaaaactccgtctcaaaaaaaaaaagcattaattgtattcattgtagagtttgatcgcattctcacctgtttgaatttctatatagtatgacaattcctgcttttaagatgatcaggacttaaaaaaatgtgaagcagcccgggcgcggtggttcacgcctgtaatcccagcactttgggaggccgaggtgggtggatcatttgaggtcaggagttcgagaccagcctggccaacatggtgaaaccccgtctctactaaaaatataaaaattaggtgggtgtggcgttacatgcctgtaatcccagctacttgggaggctgaggcaagagaatcgcttgaacctgggaggcggaggttgcagtgagccgagatcacgccactgcactccagcctgggtgacagagcgagactccatctcaaaaaaaaaaaaaaaaaaacatgaagcaattaacagtacgacactatagtgacccagaagttctttgcaaagcctatggcacactgtaggcacttaatttattggaggagtggatggagaaggaagggacaaagagaaagtgatgcatgaattgaatagttagccatcttgactggattgatcagcgaaggctttgtgatgaggtggtacttacgttggttcctgaagttctgaaaacagtagtcttgtagatggcctcttccaatttaatagaatgaagacaagtgaagaagaatgaatgtgatgtctacaaacgagtggatcacactgactatactgatgtttgttattcgaagaggaacattgaaacaagcttctctaagatagtggggccagattttttttgagatgttttgtaacttttatcaaattctcaaaggaatttttgaccccaaggaagattataaataactaactgcctttatgcatatataaatcaaagagggcatattctagaatagtttgctcttcctttctttatttttttgagtcggagtttggcttttgttgcccaagctggagtgcaatggtgcaatctcaactcaatgcaacctccgactcctggttcatgcgattcccccacctcagcgtc

SEQ ID NO: 102293 - DNA, 1764 bp, Homo sapiens
tcagtgattggtactatacaatgcgtcactttaaaaaatgagcctgggtatttcttagtattgcaaaacttatagctgggcacagtggctcatgtgtctaatcccagcactttgggaggctgtggcaggcagattgcttgagctcaaggagtttgagaccagcctgggcaacatggggaaaccccatctgtactaaaaatataaaaattagctggacgtggtggcgggtgcctgtaatcccagctcctcaggaggctgaggcaggagaatcacttgaacctgggaggcagaggttgcagtgagccaagactgtgccattgcactctagcctgggcgacagagtgacactccatctcaaaaaacaaaaaaactgttacaatactgcatttgttagaatgattacttcaaggtcatctattttgtccatattttataatcttatgttttatgtataaaatttttttcagcttgaaacggagactttctactcgttcctcaattttgaatgcaaagaatcggagattgagtagtcagtttgaaaattcagtttataaaggtgatgatgatgatgaagatgtcatcatcttagaagaaaacagtacccccaaacctgcagtagatcatgatattgacatgaaatcagaacagagtcacgttgagcaaggtggtgttcaggttgagtttgtgggtgacagtgaaccttgtggccagactggttcaacaagcacctcatcatcccgatgcgaccagggaaatactgcagctacccagactgaagtaccaagtttagttgttaaaaaagaagaaactgttgaagacgagatagacgtaagaaatgatgcagtgattctgccctcctgtgtagaagctgaagcaaagatacatgaaacccaggaaaccaccgataaatctgcagatgatgcaggctgccaattacaagaactgagaaaccagctactccttgtcactgaggaaaaagagaattataaaagacagtgtcatatgtttactgatcaaatcaaagtgttacaacagaggatactagaaatgaatgacaagtatgttaagaaagaaacttgccatcagtccactgaaaccgatgctgtatttttacttgaaagtattaatggcaaatctgaaagtccagaccatatggtatctcagtatcagcaagctttggaagaaatagaaaggctgaaaaaacaatgtagtgctttgcaacatgtaaaggctgaatgcagccagtgttccaataatgagagtaaaagtgaaatggatgagatggctgtgcagcttgacgatgtgtttagacaactggacaaatgcagtattgagagggaccagtataaaagtgaggtgagttatatcatccaacatgtagtcatggagtccagggccatttaaaccttaagaagctgccagttggctgggcgcggtggctcatacctgtaatcccaccacttggggaggccaaggcgggtgggtcagtcacttgaggtcaaggagttcgagaccagcctggacaaaatggtgaaaccccgtttctactaaaaatacaaaaattagcctagcgtggtggtgggaggctgaggcaggagaatcacttgaacccaggaggcggaggctgccgtgagccaagattgcaccaccacattccagcctgggcaacagagcgagactctgtctcaaaaaaaagctgccaattgcttgattggaatgctttcacttaaaaataattctgttcttattgagtgtctgttattc

SEQ ID NO: 102294 - DNA, 1820 bp, Homo sapiens
ggcctgtgcttccagctactcaggaggctgaggtgggagaattgcgtgaaccctggagagcagtggtgccatcgcagctcactgcagccttgacctcctgggctcaggtgatcccccacctcaccctcttgagaagctgagactacaggtgtcgtcaccaagcccggctaatattttgtgtttttagtagagtcagggtttcaccatgttggccaggctggtctcgaactcctgggctccagcgatctccctcctcggcttcacaaatgctgggaatacaggcatgggcaagtgcacctgactcataaaagtgaattattaaagtaaattgagttctctaggggaggttttgcttttccttttgtttaattgtatattattctacggagatttgattttgatattttactttttaaggtctacatgaatcttaacttgtaatgctcatctaataagttacatatttgtatttgcagcctcaaactccgatctcttcgagttaacgtaggacaactgctggctatgattgtgcctgatcttgatcttcagcaagtgaattacgatgttgatgtagttgatgagattttaggacaagttgttgaacaaatgagtgaaatcagtagtacttaaagtatatgttatgtaagataaaatatttgctcaattcttttggttgtacagctttcaaaatataattaattttgttttatagatatgataggcaacagactgaaaaccataatctttactgtattctatgcattcaaatgtggtcacaaatattgtggacacattatcttatgttttgaaatacctgtgaattgttggcattgagcagctgaagctaactcatgactctgttttgaatgtaaatatttgtaattaagcctgcacatatttttttattgccctagagtactcaagtgtttttcaccaagagcttttcaggttgcccctaagctttgtgcaattttttctggttccccaaagtgtatttttctctaagtcgagggctatgccataatacaaatggaaatgttacctttgattttcttataaaggagtttaaataggatttttaaataatgtagtaacactcctgatacaactctggttataagtgaattgagcattaatgtttcttttgtataaattcctgtcctgaaatattttattcatgaaaataaggtaagcaaaaaccaactccattttgccaggattttgttgtgctgagattgccaatcacggttaaacacaaagtgtttttatagaatgaagaaacagtctttaacagaaaaaaggtattgaaatattaaatggccaccaagtttactttgaagcccatttttggctgtttagtcagcatgaagtgggcatgataattttttaatatttctttttgtgaaatttcctgtacagccttttgtaggattactacaggttaatgtgagttgaggaagacagtctttctcaaacaatactacataccttttattatattacaaacctaagtgttttatatcctagagtcaaggaacaaatttccttaggattatagtattacatgccataaaatactatgctttattggtcccatgttttgtgcaattttaaagagatggctttctattaagtataaactatgtatatataagaaccatattttccacaactaaaatgtgcattattttttccaaagttttatcattgctatttatttttacctttgtttttgaacattcaatccgttcattttgtatgtatgcttaatacgtgtcggtcatatacagtattgaatttttactgtatagtaattctgg

SEQ ID NO: 102295 - DNA, 1718 bp, Homo sapiens
gcgctaggtactgaacaatttcatagctttgaactctccaaaatgttctagaagccaatacagaaaacccaaaaatctcagtttttgtttgcagaaggggcaagagaaccggttgtgttagccctccaagtgcccagcgccagcatagggtctgtctaacacacagcccaggctctgtaaacctttgctaaaagagcgaatcaacaaggaataagtaatggataataataataaataataatgaatccattcttccttcggtcgtgggtctggcaggcataaattccggccgggattccgaccccagggccagagcaggactcgccttggcgtctatgagtgggcggggcttccctggggtaccgcccacgtcgggcgggacctgagggccgctggaggggcggggcgtctatgaggtcccgcccatgcgggggcggggcctgcggcgcgcgggaagcggcgcgcgctgcgcgggaggtgacggtgcctctgactgtccgggtccctccaggtacggcttccctggcccgggcagctccgcggctcttttggtcgcgtcggtccgggccagaggccctcgccgagggcgggcccctgggccccgggatagctccggagcggcgcgcgttggggcggcggggccccgtccacccccggccccgcgcggcctcctcccggcggcctcagtcccagcttcccgggcccagcgcccggtccctgggaaaggcggggttctcctctcgccccgccgccccggtcccctaccccgtttggccccctcttccgggaggctcctcccggggcgggcccctccccgggctctcagggcgcgcccctagcccctactaagcggggacaggccgtgcagacggccggggcccctaggtagcctttacctgggtgtttcgttttgcttttctggatgtagcggcgtatcataaacttgtggatgtcaggacccagcgaagcattttaggtggagctagcaaggtgttattgtcagatggcaacgttaacatcctttcccaatgcagtgtgcattttaaatggctcctggcccctattcagcgctcaataaccctttgctgctgttaacactgttgtttaatccatcaccagcattttgcagctttctcctgtcttgaagaagtagaacggtgcccgagaaacgtttttccccttcgagactcaggaggatgaaagtcatcacttgtgaaatagcctggcacaacaaggagcccgtgtacagcctggacttccagcatgggacggctgggaggatccacagactggcgtctgccggcgtggacaccaatgtcagggtaaactggggcagagatagacatccgggaacactgcttgaagcaatagttttcattcttttacttaaaaccagtgtcggctgggcgcggtggcttacgcctgtaatcccagtgctttgggaggctgaggtgagaggatcgcttgagtccaggagttcgacaccagcctgggcaacagccagacatgaaaaagtagcgggacgtggcagtgtgcagctgtaggcccagctacttgggaagttgaagtgagaggatcgcttgagcctaggagtttgaagcaagcaacgatcactccactgcactccagcctgggtgacagagccagacccttctcttaagtaaatgaatgaatgaattaacgtatgtcaacaaactaaactactttgtcatctagcc

SEQ ID NO: 102296 - DNA, 1146 bp, Homo sapiens
tgccaacccttgcactgagggttctttgctgttttgtttttctattcagctatttataggttatgccttcagatttattaatgtagccagtcattttgcagtggcatttgctggcctagggacccttctgtttaaggtgattttgtatagctctgatctgttatgaatttgattttggagttttagctcagaaggcaatttgcctactttccctgttgaaatgcttggaagtaaatcatcctggccatagtgtccactgaacaacataaatgttgttttaataccctaaaaatcctgacatgcagctaatttttttgtatttttagtagagacagttagccaggatggtcctgggaggcagaggttgcagtgagccaagattgcgccactgcactccagcctgggcgacagggtgagactccgtctcaaaaaaaaaaaaaaaaatgaaaataaaaatcctaatatgaaggagtgtgggtgaagcgtggatcactgttactgaatcaccctgcagatgctgtcatcctattgtggaaggtgaatgataacaaggagccggagcagatcgcttttcaggatgaggacgaggcccagctgaacaaggagaactggacggttgtgaagactctgcggtaacttgggagggaccatggcagtgatctctgtttacgatgagtgcattaaatggaatataccttttgactttttttttcttttcttttgagatagggtctcattgtcgcccaggctggagtgctgtactgtgatcacagtaccctgcagccttgacttcccgggctcaagtgatcctctcacctcccaaatagctgggactacaggtgcatgctaccatgccctgctgatttttaaattttttttttttttttttttttttttttttagtatttattgatcattcttgggtgtttctcggagagggggatttggcagggtcataggacaatagtggagggaaggtcagcagataaacaagtgaacaagggtctctggttttcctaggcagaggacccagtggccttccgcagtgtttgtgtccctgggtacttgagattagggagtggtgatgactctgaaggagcatgctgccttcaagcatctgtttaacaaagcacatcttgtaccgtc

SEQ ID NO: 102297 - DNA, 1054 bp, Homo sapiens
cctcccccggtccacatgtgtgatccttgcttgttgatgggtctgtctgatctgtgggctccctgagggtggggactgcatgaagtcatctttgtgaccccagagcctgacacagggttttagtacagagtctctcacttactgcctgctgagtgatgcgtggtaaagggaataatatttaagtcatagtttatactatttgggctcaaacaggttttggtaatgctgttttggtgcgtgtgtgtgtgttttttttgtaggacaaaagatatcaatttttaatgaacataaaagttatgtccaaggagtaacctgggaccctttgggtcaatatgttgctactctgagctgtgacaggtaaattcagctttggcatttacttggaatttctttgtatttacttggaattttctgaagagaggtatttatcgtaacttagccaagatttatcatagtctaactttgattcttttgttcttgttttcatactcattcttacaacataatcagaaattggaaattaattaggacaagtgccttacacgaagtttgtacttagtaaatctttttttttttttttttttttagacacagtctcactctgtcacccaggcaggtgttgtggcgcaatctcacaatctcagctcactgcaacctctgcctcctggtttcaagcgattctcctgtctcagcttccctattagctgggattacaggcacatgccaccatgcccggttaatttttgtgtttttagtagagacagggtttcaccacgttggtcaagctgttctcaaactcctaacctcaaatgatctgcctgccttggccaatgtgctgggattacaggcatgagccaccatgccccgccctgaacttagtaaatctttattattattactatttttttttttttttgagagaggggcttactctgtcacccaggctggagtgcagtggtgcaatcacagctcactgcagctttgacctcctgggctcgagcaatcctcatgcttcagccccccaagtaattgggactacgggtgtgcaccacca

SEQ ID NO: 102298 - DNA, 1046 bp, Homo sapiens
aggttggttttgatttttttctcctcattgtgggtcatatcttcctgtttttgtttgcctggtactttttgattagatactagacactgacttttactttagtggatgctggatgtatttttattcttataaatattctttttttttttttttgtgacagagtcttcctctgccactaaggctggagtacagtggtgcaatctgagctcactgcaacctccgcctcctgggttcaagcgattctcctgtctcagcctcctgagtagttggtactacaggcacacacccccacgcctggctaatttttgtatttttgatagagacggggttttgccatgttgcttaggcaggtctcaaactcctgagctcaagtgatccacccggctcggcctcccaaagtgctgggattctaggcgtgagccattgcacctggtcagaagccttgtttctgtggttttactttgtctctgtccccaacccccaggtgtggagctgatgagtctgccctaccgcctggtgtttgctgtggcctcggaggattccgtgcttctgtatgacacccagcagtccttcccttttggttacgtgtctaatatacattaccacaccctcagtgacatttcatggtgagtggctgctaatgagggagagtgagtgaaggagaccgtggctgtatcctggaagacaccccggggttagggagcatttcattactaaagatggctttgggggacatattcaccaattttgtttcttatttatttttttgagaccaagtatcactctgtcacccgggctggagtgcagtggtgtgatctcgtttcactgcaacctccacctcccaggttcaagtgattttcatgcctcagcttcccaagtagctgggattacaggtgcgcaccactacgcctggctaattcttgtggttttagtagagatggggtttcgccctgttggccaggctggtatcaaactcctgggctcaacgatcctcctgccccagcctcccaaagtgctgggattacaggcgtgagccaccacgcccg

SEQ ID NO: 102299 - DNA, 1784 bp, Homo sapiens
gtattttacaatttttctgtttgtttttatgtgacggaaggtattccttgaactatttttggtattaaattatttttcccctcttgatttcttctgaattatttaccaagcttcttgaagatgtaatcttttgcaaacaagaatagttgttgaaaattaagactctgggtttttatttatttatttattcatttgagacagggtcttgctctgttgcccgggctggagtgcgatggcatgctctctgctcactgcaacctccgccttctgggttcaagtgattctcctacctcagcctctcaggtagctgggattacaggcatgcgccaccatgcctggctgactttttgcatttttagtagagacgaggttttgccatgttggtcaagctggtcgaaaactcctgacctcaagtgatctgcccgcctcagcccgccaaagtgctgggattacaggtgcgaaccatcttgcccggcccaacgctctggattttaaaaaagtattacctgtgtttcgacgctttctatatatagaaaccatatctgactgccttttacagcagccagcagagtgttcacaagaccgtcggtaatgaacagaacacaggttttgaaacttttcgatgactggttatggtttaagttgactgttataaatgtgatggtttaacttaatacatgaatgtaatcctcagttattaaacaagtgggcacatcttactatttaatgccttgaaccagaagttcagctgaaaatttaagtatttcctttggtagttttgaaggttggtatcatacataaacaattcctgtgatactaatgagccatcacccctctacttttttttttttaaatcaaggagaataaacttaacacccttaaagacggacactccaccaagttctgtaccaaccagtgtgatttccaccccttctacagaagaaattcagtcaggtaagtaatattgttactggtttaatataatgaaaggtagagtatcttttcttttgttcttttggaaattaatgccgcctaattttaagtcagttctgagacagcagggatgcatcttattggaaccattgtttaaacccgccggctgcctgtttacgcctcagcagggggcacctggccagtgagagcatcctggtgagccagggagtgggttcagcaggagattgtctagctcaggtttctccacctgatgactgctgaccttgtgggccaggcaattctttgttgtggaggactgtcctgtgtattatgcgatgtttaacagcatccccggctgctacttcttgcccatgacattctttttttttttttcttttttttgagatgcagtcttgctctgtcgcccaggctggaatgcagtggcacgatttcggctcactgcagcctccacctcccacgttcaagcaattctcctgcctcggcctcccgagtagccgggactacaggcgtgcgccatcacacccgggtaatttttgtatttttagtagagtcgggggtttcaccacgttggccaggctggtcttgaactcctggcctcaaatgatccacccgcctcagcctcccaaagtgctgcgattacaggcgtgagccaccgcgcccagcttgcccatgacattcaaaaatgccactagacattgcccactgtcccttgagaggcaaaatcgcccctggttgagagccactctatagaacttccattatatcagtataggatcttgccaggcagctcagttccgtgtcttggctctgtattctgtaaatgtcagccc

SEQ ID NO: 102300 - DNA, 1069 bp, Homo sapiens
agccgctctggagcctggctggactccagctcccatgtgcaagaggactcagccgggacgctgccaccctcctgccttccctcttctgccaaccagacgcttccaggacggagtatttgagagaaaattgtctagacaattacagtgttccttagaatggcctgcgtgggcacacgtgccacttggttagctagcatgagaggaggtggcttggccagagcagacattcaagaccaaccagaaatgtcatttctgcactgtggaaaaaaaatgcacgatacacctgaacctgggcatctccttcctaacacgcgctcaggatcaagcctccccttcccagcctggcagggttgcagggcgtccatagtccagcctacgcctgcccaggctctcggctccgggtccattggctgttcacactcacttccctgtgtcctggaactgcctgattgttgtagattactaaaaatccacagctcattccctcctgcgccctgaccacctgcccacagcgactgtgtcctcctctgagccaccacctggcggttgtcctcacactgctttggacttttctgctattgagtaactcagcttctcagcctttaggctgctatgggccctagatgcatgctggtcgattctgatcaacgagcaactgcttttgtttgtttgcttttttctacagctgcagctgtgggtgattcggatggtctgttggtggaatgtggagctggacgggtcaaggagcacagtgtggaaagagggacaatttgctacaagttggagataagagacatggcatactgtgaaaccagtgctgacggaagaaggtgactttcttggaaggtcaagacacttgcttgacagcgatgtccaggagggctagggagagttctgctggaagtgaaggcagcacctgagggtggctgagggaactggtcagggctgggaacgcctccagccctttgaggaatgattcgctgattaagagatgtttggccttgaaaattgcaagaatgaaatctcttggtgggaatgtgtagccaaaagccagcaccctgagtggctc

SEQ ID NO: 102301 - DNA, 1039 bp, Homo sapiens
ggtcatcgaatacactttcccattagggaaggggcacgtttccttaagagtttgggggatcagaactgaatccacgtctgtctttttgataacataattcaaatatggcgtaatggcgcctgggggagagggagtgaatttgaggattattagtttcactgctctggaataggtcccagaggagaccacgcagagaccttgcccaacaaattgctggacctctttttgctgagccctgtctgccaaaaggctccacgtgtctttcgcatctccactatccccaccatgaggtctcttcccacagtctccgaacctccatgggagccaacattttctaataatcgtttcctacataaaatcaacaaggggaaaaattcctctttaagcacatgtctagatgattccatttctctttgacagagaattatcagtgacggccctatggctcataagactgtaaggattgtaaacctctgattaatggagtaagacagattgttgttattcacggaattcaatatcctaacctcagacccatgtttacagcacattgacttgcaactttgaaaaaagccctgctttttttttttctccaacatgtttagttattaacagagagcgctacggtaaggaaaccaggccaacatatccagttgggtagcctaaaccagaatatgcactgtatgtagtgatttaggatttaaaaccccaataatgcacggagatgctatgactccaatctttttcccatattacctgcaacttgttctagatgaaacccttcaaagccctccgtgattaacttttcaaaacagtgtcatgcattttcttgttctctaagcagcagagaatgtagcccatgcatctcaggctgctatcattaatttttttcctttccttcttttacttttaagttagtgattaaaacacagaggtcttcatgaaatatgactcccctgaagaatgataacatttcattctgcatttttgcagcacccaagttcatgtttagatgaaggtgaccactttcatttccatc

SEQ ID NO: 102302 - DNA, 1048 bp, Homo sapiens
tttctcgctgactttgaggtattacgtacttgatgcaatccagggccacagatcaattcacgatgggatgaagatatgccctggaaaatgtagctccagcatctttcatgtttgccttttccttttatcccaaacttgacactcccaggagcttacgagtttgtaatcagcccagtggccgcaagcacctccttcttcccgatggcagacggatgtcttccggcctcctcacccatcaacgtgagccccctgatttatggtcctgaacccagcaatcagggcctgctgaggctgagctctcacctggcctttggggtgaatttggagggaaagtggggctagaagtgaatgggccacctcatttaggttttggagatttggttctctgttttgtcttgatgtgcacataagaaaacgcttttgcacatggcagcctgctggtgcccacatttggaagggatcaagccaaggccatctaaatcattccgagggagcagctgcaagaagcatctcataaattgtaagagcaagcacttgtgcagaggggctgcagtgaccgtgaggccccagggcctcaactcagaggacagagtcattgcatgggtccagttcgactgagaagtcaccaaaaagaaaaaaagcttctgtgaaaaccggaagggagaagtgatctagtgatgctgagatttgcattcatagggctgggtgatatttgactaagtctcctcctaagtcagagatctaagttctcaattttaagaagtcatatttactggtttctatttctttaacaaactcttactgttgactgagtgctttacaaatattaattcacttaatctttctaacaatcctataaaatatgccttgttatcatcaaattagtggttatattattacattcatatgctatctcctatatgtgtgttaagattcctccaacaaactggtttaagtatttcatactgaattactaacaggtagatcctggtataggcagtggtagaagtgggatttactaacttccttctgtatgatagatataaaa

SEQ ID NO: 102303 - DNA, 1027 bp, Homo sapiens
acttaaaaaaattaatttaggtataagtaacataaataaaatacacagctaccgggggttcagttcaacaatctttcagaattgtatctactttggtaaccaccaatcaaaacaagatataaaacatttttgaacacaccagaaagttcccttgagcccttgatagtcaatttcctctcccccatcactttctgatttatgtagatatttatacatatagattagtattgtcttatttgaattttctatgaattgatcaaactatgccttcttcggagtttggcttcttttgcttactgtgttgtatttgagattcatctgtgttgttggctgtatctgcagtttatagttttttatttctgtatagtattccattgtatgaataaggcatacctagttctagcaaaatttattacaaaaactttcctttctccattgaattactttgacatctttgtggaatatcagttgactgtgtttgttggtctattgagcaactctttagttaattcagttgatttgcatgtccgtctttatgccagtaccctactatcttgactactgtagctttatcatatgtgaactcatattatttaagtcttccaaatctgtggggttttttcaaaataatttcagatattctagatccttcatgtttccatatatcatttagaatcagctcatttatttctttaaaagaaacttgctgtaatttatatatatattgtatagaaccaatgaataagtttaagacatcttaacaatattaagtcttccaatcaatgaacatggtatatccctttatttatttaggcctcttccattttcctcagaaatgtcttatagtttttatgtagatgtcttatacatattttattagatttatccctaggtatttgaagttttaatgtcattgtaaatggtactgatttttgaaatttcacttcaaagtgtttgttactggcatatagaaatataactgagttttgtatagtgactttgtatattatagccttgttaaatccac

SEQ ID NO: 102304 - DNA, 1019 bp, Homo sapiens
caggactcactactgcaggaggatgcagaggaaagggatagggtggagagcgaggcatgctatccactgaaagagagggacaggcacatgtgtaagttgtaaatctcagaaaagagaagtaaagattagtagtgagaaatgggaaagccgagaggtgttatttgaatgcacacattgaatgaatgaaaaaagtctcacgacaggattagatagaaaaatgcaacgtttcctttttaaccaaaagaggcaagagttcgcagaggaaatagattgtgcttgagaacagccatggcaatttttcagcaatacaatcaggcattttaggggaaacttaataaatggcttggatctcagtggtcaggaaaggatggagaacagatatcaaaggctgacatagattttctgagcagaaaaaataaggtagagagagaataagcctgggactggggacagagaattcgaatgcccaaggtcaaattcagtctgctaatgtctgcctggcccctgcacaaggactcgttccatgaggcagcgcctgcgcccacatgtgtacagttgacttccaccgattgttcacccaacgtggaccaccttgcctcagaccctatttgacacaagttctatctccaacaaaccagctgtcaggaaatggtctcaaatctccaagaacagaaacttctcttgacagtgcattctgttaccttcagtatgaaaactggcaatgacacagcaagacctgcaactcaggcttcctgtccccagccctccacaatgctaagagcaatggcagagcacctgtccaaggcctcgaatgagctgttggctatacagaagcatctggaaggatgcaagagcaccctagaatgactatcataaaaaacctgccccattcccccacaaccctttcccagcccttctgtaatgtgtggttaaactgagtctcatccatttttccttcctgctaaagactaagcttgggaagagagtggaggggaggggtgctggacttgagtgtggag

SEQ ID NO: 102305 - DNA, 1094 bp, Homo sapiens
taggggtgcggctaaacaacccaccacgaacaagacagcctccgacgacgaaaagcgatccagctaaaaatgtgaatagtgctggggtcgagaacctgccctggaggacagatgtgcttttgctgaagtcacttagaaggcaaggtggctccatctgcccttcccctctgcagcttggataaagggtggaccacacattgttcagcagagcagatgggagcgcctggcgccctgggatcccgcatcctggccgcggtctgccgacatggggtaaggaagagaaagatgatgatttgtactaactggtacaacctactgccaaatcgccagggaaagcgaatgaaacacatcccaagaaactctgtttatggtgcaggaagggtttagtgactttactgctcagattaccatttggatatcagtttcatcatcgtcaacctccaatttcctgttttgcttatcttagaatgactcttttaaaaaatgtttgcactgctcagatggctttggcttcaagttgattagatatggaactggtttataatggattagaatgcaggatttgtttgctttgtaatattttaagaaagcaatgaaagaagcggcaatgacagggagagatattgtatacttacagtctgattcttttttcattaccggaaaagacaactaatttaggaatgtggattatggcccttggtccctttttgatttgtgtttcacttcagggttttcctgagttacaaatccctgcagatttgtgagacttaagaggtacacatgtacatttatttttccttttagcatttttttttttagcctgcaggatcccatggggtttttttccccctcctcctttcctttatgtgtttcctgataagccaatctgtgtactgctttccctgcactgtctgtacagttggaagcattattcaaatgagtcctgtgaaactgatggcctgtggccccggttgttaaacaccgacacgctgctcattaacactcagcatccggatatcctaatttcagctcagattttggtaaatatatattttcttgatcatttccaactaccatgcaaagccacatcctgt

SEQ ID NO: 102306 - DNA, 1951 bp, Homo sapiens
gaactgtaagaacatgcttggacacttagtcattgttctgtgtttttattaatgaagaaaagggaagacagacttccaagagttactgtccacccggtggtgtggccccatagcgaagtctaaatgcctgtagagatagagctagctggtgtggttgcagtgaccttgtagaggaaatcagttcattactttgacatcattcagtgagctctcctttcctaaggaagtttaaatgtccttagttagggactgactttcttaagtaagtttaaatttactacatattgtgaagagacaggatcaagttcagaatccttaaatgtctgattaggcatcacttggatgaggaggtgggcgatttggctctgacagctggagatgaaggcacactcataccacatacaagggaggatttggagcttttaagccagtttcagatttactctgaaatgtggagcattcctgcaagactgtgcagctcacggaatatagaagacatggcattttactcagaagtcataagtttttgcccccctcatttacctcgtattaccaagaaagaaaatgttatcgatactaaacaccatcagttcagagggaggatgtgtgtgtgtgcccgcatatgtgtgtgcgtgcgtgtgtgcgcacatagctttaaaagaagacattcaaaatttgatgtgctacaagcctcatgaaagaacaaaagaaatgaagccttttgatatgcattcgctattcccagatgtacgccatgccttttccatgtccctcctatctctgttgaacttatgaatcatactcattacttttcagctttttaaaaggccaatttttgtccagttttctctcttccagtcccagctgaaattagtggaaagaaagtttgatggagctttcagctttgaacaaaatcccttcattgtaaactagcaccatctttatccaggtcttacccagtcaggctaattccagaaacttgtggtttttagtatagtctgtctacctttagccaggcacaggacagccctatgaaaaaatacccaatatatattttttggaaatgaaacattaaaagaacttaaaaagtaatttttggaaatgaggcttcaattagaattatttttctcaaaaaacaaacaaacaaaaaacacaaaaaaaaccactcttctccaaatgcccaagccttctttcaaaattagttagaaacttaagtaaaatacaagtccacaccatccccaaattacaaaatggacttacccttgagagggcatctgcagaatatcatcagggacaaagatctcgaggctaacgatgtaggtttcatttctcagactttgtaatataaggcaagccctctctcagagctgccatcatcactttttgaatttctttgggggttatttaatgaaaaacatgctatgttttgttttaagctgaagtcctattctggacactctgctttgggaaaaaatgttatcatttaatttcctttctgcaaattaaaactaatgaagtgtggccttgtcaaaggctatggagatgttccgggcatactgctgtgctctgtgctttccagcaggcgctcctccctcacgcaggagactcagttgtcctgagagagatgaagcagccttgaagcagatgctgcgttttccataaacctgattttgcctcacatgaaccaaagactctcaaaactccgcttctatagaattagctgaataaaggcattttactgatagctgttcgtgttagcgaaacctgtctacctgctatagcacactctccgatttgggccatttatgcaccccgcaacctgggatctcaaggagctttaaagtcttaatgggaacttggcattttcctgatgatctttaaaatgtggtcactaaactcaggattggcgtgtgcttttagaacactggagtagcccttgttttagaggctg

SEQ ID NO: 102307 - DNA, 1060 bp, Homo sapiens
ccatgaccaaggtttgaaatctctgagtccagagtttacttcccaagtcctgaataaaactctattttcaagcgtgggatctgttattcaagcaggagaagaaaccagagattttattctctcctggactcagtgcagagctacaatgcttggtagaccacttatttcagaggcaacactgatacgttttgtcccatatttaatagcttctattgaattaaattgaatcaaatgtggctttcttttttcccacctttttatttgcagtaaggttgagatggttttagcttgaacaagaataataaaagaaggacaaaaaggaagatggacagaaatacatgtcactcttcaagtggttagagacacgaaatctgaaatgaggacaaggaaggaggaagttgacagtcaagactgtaactttttccatgtggcagagaggaatgtgtgatgccatcaacaggctgagctgctcaattgtttgtttttgtccaggctgtggatttaatgtgactaacagtaaccctaccatctgcatcaacgacctcatcacagaatacaataaacaacacaaggcagaactgaagcccttaagagccgattatctcatcgccagagtcgtgactgtgctggagaaactgatcaaagagtttcaggacaaagggcccaacagcgtccttcccctttattaccgatactgggtccacaggtcagtgctggctcatcttcattcttttcaactcctttattagtatcttagtagttctgtatcttttttttttttttttttttttttttttgagacggagtctcactctgtcgcccaggctggagtgcagtggcacgatcttggctcactgcaagctccgcctcccgggttcacgccattctcctgcctcagtctctcgtctcagtcacctgagtagctgggactacaggtgcccgccgccacacccggctaattttttgtatttttagtggaggtggggtttcaccgtgttagccaggatggtctcgatctcctgaccttgtgatctgcccgccttggcctcccaaagtgctg

SEQ ID NO: 102308 - DNA, 1033 bp, Homo sapiens
atgcaggccggggaagcggattggtggactgcacattcatttaaggttgaaatgcttagcattgtaaaggtgactgtgaattttaagcttcattctttattgacctggcagatgggagagtgctgtgtcttggtgtaatgaagcattatgttggtacagtgaaaaggaaactgccttcctggctggaattcggtctccctaaaagctcatggtctggtgaggtggatggcttgggagtgaatgtgtgtatgtgtgtgtgcacagacgttgttcctgatggggaaattgagacccaattgcccatcaaattgcccgattctacctggtggtttcctgaaatggatgtttgatagcaaatccattcctgtattgcaggctttttttttttttcaataaaaaaacaaacaaaacaaaacaaaacactttggaagtttttttcaccttatgagtttttttttctttctttctacttctgctttggaaacatggaaatgattcatgtagagaaaaaaataattgaaattgaggaataaatcagttgcgggatacttcttacagccaaaacctgtcggggctctgagctctgtaagggaatgccaaaagcaagctgctgcctccagaagcctcgctgtgcgcctcgtgggcataaactggaaccttggcaataaacttctgcacacaaggtcgccctgtgcgagcgtttctggaatccagatttaatactgcatacaacaccttgttttgaaaagagaagatcactgctttcaatgttatggaagtctattccatgctgaacatcgaaatactgatgctctctaggcagagaccatggagaaggaagctggggacgttttgtcctccctgctgcctgcctgcaggagtggactcagctgagactgtgccatgagcctccttctcatcacaaaggccggcttgtcaatggaagaagatgtgccagacagccacttcacacccagctcagtgacgccttgggctttgtggacctagtagtgtgttctgacctgtcttcaaa

SEQ ID NO: 102309 - DNA, 1044 bp, Homo sapiens
actctttgctttttatgtcatttaataagttgtgcatacatattctaagggaaattatgagccgcctgattcattacacatttttccaacttgtaattatgttggcatcagatgttggcatcctttgaaagaactggcatattacttgatcattgtaaatctctcagtacttttaacaaaatggcattagaaccattttcttcaaaatttcctttctcccatgatccctgcttgggaaataggcagtgtggtagaattctttcaggactcatttgaaaaactcaacctttcaagaacaagtcttcttgctattggcatactgacctgaaaaacataaataagaatgtctgtggagttcaggcatgagtgagattattacaggaaattatgacgtggaagaaatagaagctagaatattaaaacaccagttgtttggctgcatgtttgcgttgcttagtatcatgagcaagtttgttcagaggaatgctgattaaagttgtagtctggtaaagtgacattcctcgttacagcaaaattatccatgcagtttacatatttgcaaatatgcatagcatattgccagaaaacagggacccaaggcttctggtagatcttttcttttcttctctttttgagacagaatctcgctctgttgctcaggatgaagtgtagtggcatgatcacagctcactgcaaccttgaactcctaggctcaggcaatccttccacctcagcttcccaagtagctgggaccataggcatgtagcaccatgcccggctaatttttttatttttaatagaggcagggtctcactttgttgcccaggttggtcttgaaatcctggactcaagccatcctcgcacctcggcctcccaaagtgctgggattacaggtgggagccaccgcgccagccctgatttttttctttttaaaaggaggaaaagtcagaggtgaaaaatttagtatttttttcctctattttttctgtatattggtatgttgtctctggcttgctctttcatatgtaatttcttattttcagt

SEQ ID NO: 102310 - DNA, 1061 bp, Homo sapiens
ctgtatttcaaatgttggcttaaaagaactgaaattcatctaggcttgttaggaactgtttcacgagtgtgcagtgtaatacaaaattgaggattttgatagatttcccatctttgttactcttaacgttaaaatcatagttcacagagtgaagttggtgggattctttcatttgtttctaattaaaaaaaaaaaataacttcttactctaattccttgtacccagtgaagaaactccctctgccttccaggtgggtctattccttggttgttgggagagagtgtcccgccctttactgtccccactctatggctcccctgccctcttaggtgttggttggcagaatgccagccttctagtcccctcttcattgtttgaagtcatatatcaccagcaggtgtcttttatccgtgaaattgttctagtctctaacttgctgcttattgtctagaagctgtatccccagagtcatgctgtggcattgccgacgtctggagatggtggagatgcatatgtggcctgcaggtgacatcaggatcagccaccagtgctctgccttacgctagctctgccagagtcctggggcgggggtgacctggggataaatctcgagcaaggttggtagaaccagacccacctcctgcattttaatggaaacaagaaggctaacttacttggaagatgaatgaagtgtatttttttaatcacgtagaacaatatatatgtatatttacgtgtacacacacacacatacacacacacaccagaaccaaaccagtctcaagaataggttaacacaaagacaataataataacaattattattattttaattgagatagagtctcactctgttgtccaggctggagtgcagtggtgtgatcttgacttactgcagctgtgaccttctaggctcaagtgatcctcccgcctcagccgctcaagtagccaggaccagagacacatcctaccacacctggatcagtttcgtatttattttttatagagacaggacctctcactatgttgtccaggctggttccaaattcctggcctcaag

SEQ ID NO: 102311 - DNA, 1052 bp, Homo sapiens
gaatctggaacctcattacctcagtgtgtagaacttaggtgagtatagtgactcccagtattcatgaagagctgcagtgtgtcaggggataaatacagctatccttcagtatctgtgagggattggttccaggaccccggcgtacgccaaagtccgtgcgtactcaagtctggcagtgagccctgtggaaccctcgcctaggaaaagtcagccctctgtacattacaggttttgcgtcccaccaatactatattttcagtctgcgtttggttggaaaagaatccacgtataagtggacccatgcagttccaacctgtgtcattcacaggtccactgtactaaattctagcaaatcctcttcaatccgggcagttgtgtaaaggagaatcatctcttcccaaaactcacgtccatagctcgtgagcaaattttgatcgcaggaaatattttcaagctgcagttgttccagtagtcattttagttgggaatctttggctcctttaccacttgcttatgtttgaacttcttcattttatctgatttatccctccctggtttgactgatgccttatcctcttctgtttatttgaggtatttccacaacttattctgcctttactgaatattaaaatctccatacagagtcagtgtccaaatcaaatatatatatatatatatataatttttttttagacagtctccaactctctccctcaggctggagtgcagtggcatgatcttggctcactgcaacctccacctcccaggttcaagcaattctcctgcttcagcttcccgagtagctgggattacaggtgcatgccactacatctggcttatttttgtatttttattagtggcagggcttcaccatgttggccaggctggtcttgaactcctgacctcaagtgatccacccaccttggcctcccaaagtgctgagattacaggtgtgagccattgcacccggccaatcctagcactttgggaggcctaggtaggaggatcacttgagcccaggagttcaagaaccagcctgggcaacaaagtga

SEQ ID NO: 102312 - DNA, 1081 bp, Homo sapiens
tttgatcggggccgagtggccggctgtgagcatgggaggggagggaaggaaaatgagtcatcgtgaggcaaaaggtgtgcagtgacttctttgaacagaaagttttcttccatttaagaagaataacaatcaaaaatggacaaaagttattaaacccatttcctgggtttaaaaaaaaattgtggttgtagaaaatgaaagcataaaaaatcaagtccatgtaagcttgaaaagaaacctgcagtggtggatttgcacatcggccttaattggcccaattgaccttctctgctgtatttacaattgccttaaaattgtaagcagatgtttgaaaccccgtctttaataggtctccaacatctgtttcaccactgctgctgcccaccaaagcagttgtaattagggagcaccgaatgcatacatctttccttatggacccaatcgatcggatttctccccacggtattaaagtcgacccttattcttgcttttatttgaatacattttccaatatattttcttacacaggacagtatccagccaagtacaaaaaaaaaaaaaagatagtcgttctccatactgaattgttaagatcatgtctgtataaatcactgaccgtgagtgacaaagatgttcacacatacaagcacaaaaccctgaaaatagtgaaagcttttgttctttcctgtggcctgtgtattctaaactaggtgtttcctgcagaaatgatcaaaggtaaaatgtgggcatcttagaaggcgggaggaagcattatttatttatttatttatattttaatcaatagacttcacttcttagagcagtttaaggttaacagaaaaattgaacagagtatagagttcccatatactccctccctgtccttctgtctcgcccgccgaatccccctccgtttccccctattattaacatctttcattagtgtggtacatttattacaattgacgagcttctattcataaattgttgttgaagtccatcagttccacgatggctcattcctcgtgctgcggagttctatgggtgttgccaaatgtatagtgatacgtatccaccttta

SEQ ID NO: 102313 - DNA, 1041 bp, Homo sapiens
tttgctgaaatcgtaatgtactatgttccccatacttccaatatctacttgtatactaatcttattacaaaagaaaatcaggctagctaatatgtctaactcttgacaattctcttaattttttattttttcaatgagatgagtggtaaagctataacgggagtcctaagttaaagtctcagctcttgagctaattagtgggacaagttacttttttgttcctctgtactactatgtgtatattgtgggcagtaatacctttattaatgagctgtgatctaaattaaatacaatggtaagtatgaaagtgccagtacaatttctgacctttaataggtgctcagtagtagtagtttcgtttatttacttgaatttcacttgggatagaatatctctggttagtacaatttccttttaaaattagaattgtatgtttcttctagcttctgtctagttcacaatgacccttcaatgattacccacagagaatgtaattttatcatcttcatgttctcaggttctatgaacttgaaaataagacagtaataattatctaatctgaagaagagagaaaaagatttaaaaaataaacagagcctcagggacctatggataatatcagaatgtttaatatatgtgtaggagagatggaaaaaaaatttgaaaaaatgatggccagatgttccctcagtttggcagaagacataaatttccaggctcaagaagttcagcaaactccaagccagatgaatatgatgaaaatacatctaggcatattatagtccaactgctgcagaccaaagattaaaaaaaaaaacaagtactgaaagtaatctgaggaaaacagcatttcatgcagtgaggaacaatgatttgaatgtctgtggactttttctcagaaattattaaagccagaagagagtggaacaatatttttagagggctcaaggaagataaacttgtcaacccagaattccatatccaacaaaatgtttcaataatgatggcaaaatacatgtccaggtaaaagaacactaagat

SEQ ID NO: 102314 - DNA, 1035 bp, Homo sapiens
ttttcccccttttcttcccttctgggtctgtgctgctaactgactcaactctgcaccctcctcccctgaagtcgaggcccgagaggacagaaattgggctggaactaatttaatggctgagtgacctcacagtagagaaacagccggatcctaataggggtctttgtctacatttccaccctggctggtagcatgccagtcaagagtcaagctggagacacaggtggaagcgattagacctgtcataaagtttgaaaaattgattctggaggcgaagtgaatagattgagcttgacagtgttgtcctaaagattctaagggaaaattctgtagtttaatttgaaatcccttgattattcattagctttccagatggcttttgttgatgttttacatattaatgcctgtattgtgttattggtgtactcttaatgtgcacataggtaatgagcaaagaataaatacattggtaagtgtcccaaattaatgggatattagcgtaattgtgaaataaagggttttaaagaagttgattgcttgggataattagcacgaatttttttatgtgtcagtttggtactttaaaagtgaaaattattggagaattttaagaaaccttcattttaatgtttacttctaaaatttaaaatataactttggcctttgactttggcaacggttgtgactgaagggttattctggcaaattctccatcaaattttttttgttgttccaattcaacacctgaataagttaacctttcacatgccaagctcctgaagttgaattattctgtggcctggtatttttcagagaagcttctacattaatttttagtgttcttggttgtttattttcatattttgtcaccgatttttcaagtatggtagagttattttgatgtttaccattttgtgatagtgataatgtgttctatttaggtgcattttcattagaactgagccgtcccagtgtcctctcagcgttgatgttgatgtcttcatcattccggggtgcagtaacaaagtggcatcc

SEQ ID NO: 102315 - DNA, 1222 bp, Homo sapiens
cccagctactgctccgattgctcaaggtttcgtgctctgcgctcaagggctgcgttttggtgtctttgttctgcccaattttcttattgtctaattttcctttttttcttttaatttttggaatatttcagatatcaaatacagagggggagctaaccaatccatgattcagattttacagacgtgattatttaatcttttgccaaatttacttcagatactctttttttttaaagaaataaaattgctctcagttccttcccctccttttctagagatagccactgcgttgaggtttgtgtatatctttactttgcatattttatactttgatcaaggtgaatccatacacaatatatattattgtttgtttttaaactttaatggcattaaaatatacatgcctttttgcaacttgctttttttttttttgctcagcatcatattttgaggtttatatatgaacaaattgaatgattgtgttatctttggttcattcattttaattgctggtatagaattgcgttgtatgaatataccatatttatttatacattcccctgttgatagactttgaacttgtttcagtttttgactcttaaaaacagtcctgcaataaatatctttgtacttgtctgcttgtgcacacatttggaagtttctgtaggaagtacacctaagtagtagatttgccggattgtaggctatgtgcgtcttcaatttaaccaagtatcacagaagctctcgaagtggttgtaccaattttcactgtcactggtgttgagtgagaacacaatttcctcacaaccctgctaacactttatgttatgagactttacatttttgccatctctttactgaccagcttccttatgacttttggttgctgctaaatttgcttgtagccaccttggcttctcttgtagccctgtgtcagcctatggatttatctcttatagctaattggcttagtctttatctcctttggttctcataagattaattccaatgaacatttgttgtatacctaatgtatgtcagatcctatgattgatgtatagatagaatttccatgatatgttaaatatgtacctctttagtggcaggtgaggtgatttaattaaaagtattttttttcttatgatgaatgtttaaaaaatttttcttttcctctccattttattgtagtatttgataaattcaaaatatatgtaaaacatat

SEQ ID NO: 102316 - DNA, 3010 bp, Homo sapiens
aggctggagtgcaatggcacgatctcggctcactgcaacctctgcctcccaagttcaagtgattctcttgcctcagcctctgagtagctgggattacaggcgcgcaccaccacacccggctaattttgtatttttagtagagacgggatttcaccatgttggctaggcacgtcttgaactcctgacctcaggtgatctgcccgactcggcctcccaaagtgctgggattacaggccaccgcgcctggcctacaaagggataatttaaaataccactatagtgttagggaaagcctcttttaatcctggcacttccccatccatttccttaagagagatatttccaataaagttgcttttttttttatgttatcagggtatattttttggccaaccatatgctggtaataattatacatttaaaagaatgagataatcagttttactttaaaatgttactgtgatgttctagaaattcaccctttgcaattatttaatcttatggtgatattttttaaatgtcatcttaatgggtaaagggtatgcaattttaaaaagcacttttggtggtttgcgagcaaaaaaaaaaggttgaaataccaccatgttaatttgttcagcagcaaaagaaaaagaaaagagaaagaaatactgccgtatcactatagtaagctgtttgctagaaatgggattgctagatcaaggggtatgaatgatcagctttacaaaataatgtcagattactttctgaaggggttgtatcagtttgtactttggccagcagttttgtctgtttatatactttgatcaacagtgtgtaagagttacagttgatctacaacctctccaacacttgttattgtcagacttaatatttgccaatggaatgggtatgaaatgatgcatcattgtggttttaatttgcattttttgttattaatgagattgagcatcttttgtatgtttatgaactgtctttgtttcctttttatgaaatatctagtcatatattttaccctttgttctgatgagttgtcttttaaaactggtaacatcgattatgtgcgttgtaaatatctttttctggtttgtggcctgtctttctactgtttatggtgtattttggtgaacagaagttcttaattttaacataatctgattggaacctttcttgccctgggcttataaagacattcctctgtttctttttagaggttttaaaatgatgtcttccacatttaagttcataatttatctggaattgatttttgtgtatgttctgagatagtgatccacattgattttttttttctcctgtgtggttctaattatccctgtaccatgtattgaattggccctctgttcaccagtggtctgctgtgccatctcttttacatgtttagttactacctgcatgggtctgtttttggcttgcctttctgtgtcacttgtcaccttgtctgtctctgtgttcataccacactgtcttaatcattaatactatagttttacctgaaatctcggtatctggggaggacttgaatctcacctatttttggtcatttgttcttaagaattagcttgttacatgacatgaaaaaccctgtaggtattaattagaattaattgaatcagtttgggggagaatcgaaatctttaagattttgatcctttttatttttaagaatatggtatgtatctctatttatgtaaagttttagtgtagttttgtaatattctccatagaggtcttccactttttcatatgttaattctgatgttattgtttttgttgctattataaatggtggtgttcttaaagattctatcttaacttatttattgttagtaaatattttaacttattgttaaatagaaatttaatgaatttttaaaaatattgaccctttagtcatccacttgataaacttactacttctaatattttttctgaaattcctttgtgttttctgtgtggataattatatcatttgcaaatagtgacagttttagttcttctagttatttttgcttttaatttattcatttttttggtcttaaatgtgctggcatactttatacttacgttcaatggaagtgattagggttgttcattagaagcgattatagtgggcatagagttcttgttctcaattttaaagagaatatttctcagctgagaataacatttgctgtgaatttttgtagatacctttgattaagttagggaagtcttttcagttgtcacatgcttttctgcatttgttgagaatatcttgtgtcttttcttctttaatctgttaaatgtaatgaattccgttttatagatttaaaactgttcattttcttttatattctttcttgagataaacccaaattggtctttatagattatatttttatgaactactagattgagtttgctcatattttatttagatttttgtgtctgtttatggctagaatcacttctcatttttctttattggctgtcttatctgacttgggtattaaagttacactgactttataccatgagttagagaatagttcctctttttctgttccctgggagagtttggattggagtgatttgtttcttaaaagcttggtggaacttaactataaggtcatttggatctaatgttttcttcttggaggtttagtagtaattagcagttgaacagtcataggactgttcaggtattctatttcttttagtcagttttggtaagttttagaaatttgtcctttcatcaagtttatggtatggttttttttttttttttttttttttttttttttttaagatagagtctccctctgttgcccaggctggagtagtgcagtggtgccatctcattgcaacctctgcctcctgagttcaagcgattctcctgcctcagcctcctgagtagctgggattacagccgtgcgccaccatgcttggctgatttttttgtatttttagtagagacggagtttcaccatgttggccaggctcttcacaa

SEQ ID NO: 102317 - DNA, 1713 bp, Homo sapiens
gaatactattctgctgttgcttatacaaagtgtgctgccagttttatttatgcctttttttttttttttttttttttttttgaggtggagtcttgctgtgttgttaggctggagtgcagtggcgccatcttggctcattgcaacctccgcctcctggattcaagcgattctcctgcctcagactcccaagtagctgggactacaggcacctgccaccatgcctggccaatttttgtatttttagtagagatggggtttcaccatgttggccaggatggtcttgatctcttgacctcgtgatctgtccgcctcagcctcccaaagtgctgggattacaggcgtgagccactgcacccagcctatttatgcgttttttgaagaaaatatcatttttcttttagttacattggattttctgtcttttgtgttacatcatttcacttctaagtctagatagagattatatttatcctattttggatgcatgtgtttcatgattctgcattttgtctttcatgagatctagaagtttctgagccctgtattctttaaatattatgtctcattagtctcttctctcctgctggaactttaactggatatatatatacactaaactgtttccagatcacttattctttatctttcatattttttatctctttgtttctctttaccagaatttacagtgctggataatttcataaggcatatattttagttcaccaattttctcttcaactgtgcctaatatcctctgtaacccatcctgtctcttttttttcttttaacaattgcatttttaattactttttttttttttttttaagatggagtctctctctgtcgcccaggctggagtgcagaggcgcgatctcagctcactgcaagctccgcctcccgggttcacgccattctcctgcctcagcctcccgagtagctgggactacaggcgcccgccaccacgcccggctaatttttttgtatttttagtagagacggggtttcaccgtgttacccaggatggtctcgatctcctgacctcgtcatctgctcacgttggcctcccagagtgctgggattacaggcatgagccaccatgcccggccgcatttttaatttctaaaagttctgcctggttcttttttgatatgtccagtcattcttcatgttctcatgttatatgctgatttttgtgactctatagctattctgtagactatatcagacattcccaatgtctgatatccttgaggagggggatgtctaaatttattgcttttttgtttttttttctgttgtctctcctcaatgtagctgtcacctcatgtgtttggtgatcattgattatgaacttctgtttgatctttgtggtgatcttgagagtctaatttgaggatgcttgctttctgaaagcatttctatcagctttgtctgggagccagaaagtttagctggcatcacttttgagttcctacattttgcttctggcccagggctcagtgtcctgatcctattactgctcttggcaccactacttgtagcactaaactgtagccaggtttaatttctagctcaaggtttgttgcttttgcgtggagagggtgccttcacatgttcccctatttctatgagctcagcaaaaacatccaaaaagtgtttttttttttaatctaggatatacctttttcctcccaacagtacattccccca

SEQ ID NO: 102318 - DNA, 2479 bp, Homo sapiens
ctagaaatattcatgcagaataggtcaggttctagacattatagataaccagtcttttgtggaaggtcattaatgatcctaatgaaagcagtttcccttgaatggtcgaagtggaaaccaaattgttaggaaactgacagtgaatgagaatggaggattcagatgggtgaaaaatgaagagttcttgatgaagttgaagaatggctgtggtaggaaatcaggaagacatgagccgtaatgactcttggctatggtcagagaggagctaataaagatttaagaactggtttcgacccaggtagtgatctgaggtgtccccctggggtgggagagcctagtgaggtaggcagtgaagatcatgttagttgaggaggttgttaaactacaaggctagggtattgtgtgcatggacctcgatgtggctgggatgatgatagaatttggaggaaagagaaaaacactgaactagttgccagtgatcttgaaacgtgacagtaaccaagagataaataggtgacaatgacaggaaaattagatgtagtaaaagagagtgtttgagagcagaagctatggcaactaaagactggatttgaatccttcctagcttggtgacatgagcaaattacttgatttaagtgagcattttcccatctgtacagtggagataacgataattgtgcctgctaagaagaattgctgtgaagattagtgaaataatgcatgtaaaacatttggtacagtatgtgacacatagtacaaatagtttgctaggaagattgttattattcttcacttgtgatattgtgaagttttcatacagcaaattggacatcatgagatggattgattaaataaatagatttgaacttcaaggactggtagtgttcttgctttggaaagaagaaacttggtttatcctaataatagtaggataataatggtgaagtgataggtacaagtaatagtgtttatgatgcgctggtgatgataggaaaagaaagccattatatgggcaagagctagaagtaataaaatggtgcatttttcagtgatgtttggcctatgtagctattctctgataactataaaaatccttattattgaagattcttcaggaaaaaaaacccttagtctgaaactttaccaccaatcccccttgccccccattgaaatacgtatttttaaaacatggcttttgataatgtgagggttttttcctttttgcgatttagcagtgctgattgtgtattgcagtagttgtgagagcattagaagcagcagtcgataggaggatggaaggtctggatgccgccttggggagttaggagattggcagacttaccctgtaccactctagccctactcctttgcccaagacagaaacacactgagatggataggagaatatgagcagttgataggaaagttctcagtggagtcaggatttaggttaggccaggagattgagaatataacagtttgtgtatgatgaaatggcatatttcacagaatgcagtaaaagcaggtagggtacaagtgcagcaacaggaagatgtcttttcttcattcagcaaacacttatttgagagcttaccatgtgctaggcacatacaaagataaataagatgcccttgatgatcctctatttaaaggagacatgtaaacaggttaacttagagtagagatggtgaatatgtgaacctgaggaaaggaagaaatagattaaattatctggagagagaggaaaagtcagcagaatggggacgagaatctttcggagctcagtgttctgataggagttatttccttgggcataggttccaagtatttttctaatataccatagaagccaggaaaactttcttctgttatctcaaatgatttaattactgacttgagtttgtgttgtctccttagacttgtgcaccatggacaattttgctgagggagatttcactgtggcggattatgccttgttagaagattgccctcacgtggatgattgtgtctttgctgctgaatttatgagcaatgattatgttcgtgtgactcagctttactgtgatggggtggtaagtaggtttgctaatttttcatttttgacattgtgtattgaaggttttctggtttagggctatctgagtaaagatgtttttgtggtacgtgcgttttgacagggaggtacacatgctgttgaaaagttgatttgagaagggaaagtaagcactggctcaaaaataagattgtggagtgccagagaatgagtggtggcaaaaggtggttttctgacagggcataagaaaagctcttggggagagccatagaagcaaactcaggtaatactgtaaaacgggtctcaaattaagactctttggctgaagatgtgtttgaagcatataaataaatgcccactgaaagttctttggttagttctgataatccttagattaaaaatcaagaacattttactagacacaaa

SEQ ID NO: 102319 - DNA, 1030 bp, Homo sapiens
taagtgttgattcattaaaaaaatgaggcacaaacattaattttaaactttttttttaattaagaatttgacatctgcagtatatggtgtagtaaaccaatttctgtcctgcaagattattgcgatgccattaaaataaacatcttctggccacttctgtttcaacatcaaaacagttccgtaatatcacgattgcatccctgtgtggacgccaagtaagttactatatgttgctcattttgtgtggacagtgataaacatgttacccaataccaagaaatgcaagttcaatggaaggcttatgtcttattcttgtatgctgctcaacgtttgtgtaatagggtggaaaaaacaaatacttgagatttggatatgaatgaataattgtaacataatcagtgaaattctgaatagtactagatggtagactggaagctgagtcaggaggaattaacatgggtgtttataagtatcagtgttatagtgcagaagagaggaaaaagatacagtattttgttcatttaataaatagcttagttattgttacctagagtgaagaaaaagagaacttattttttaatggtttgagatatatagctaagcataaagttcaatgaatttgtatatatgagaatctaatcttttaaaaaataaatttgtctttaagcaattcacgtgcttctgagataaatttgaagaaactacaacatcttgagttgatggaagatattgtggatttggcaaagaaagttgctgtaagtggtagaatgtaggttcccccgagcccttggtttaaataatataagcatttatatggtgttaggctcaaatgactaatttatagcaattaacaggtaatggttttagttttggttaacctgagataaatctgctgtccatcagtgcgtgctcagtatttgagagatcagggagatggctgatgtcatggttctacgctggggaccaggactgcatcttgtcattaaaggatagaaattggaacttgtcacagaaagtggggtatgggttc

SEQ ID NO: 102320 - DNA, 1020 bp, Homo sapiens
tgttatattgcacttgcctgctaccccaggcagtctggccaggttgtagacctcaaattgcaggtctgtagtaattgcagaagcatcttgagctctgagggtggcctgaagtcacctgaagaggtaacatatatgagtccatagtatctgttaatttatatgtcagagtctgtctactctaagttacatgccagagtagcaaaaaataagtggttgtaccagttttgtagtaaggatctgaaatacttgcataagatgaatttataatgccacatgcaaatttagaattaataaccaaagccccattcttcatttctcttttgaaacagaaaatcttggcaatggaagaagctctgaattggataaaatatgcaggcgatgtaacaattctaactaaattaggatcaattgacaattgttggcctatgttaagtattttctttactgaatgtaagtataaatgctttaaattgttacttgactcagtttttaaaggtgtttgggaaaatgagatatgtagttaagtgatttctgatttatcttagaatttaaaaaaagtttttattttgttatatatggctgaaaaagagaatttcttttttttattatttatttatttatttatttatttattttgaggcagattcttgctctgttgcccaggctggagtgcagtggtgcagtctctgctcactgcaagctccgcctcccgggttcacaccattctcctgcctcagcctcccgagtagttgagactatgggcgcctgctaccacgcctggctaatttattgtatttttagtagagacagggtttcaccgtgttcaccaggttgatctcgatctcctgacctcgtggtctgcctgccttggcctcccaaagtgctgggattacaggcgtgggccaccgtgcctggccgaaaaagagaatttcaaactggtagttttattctatattttctgtcttaattatttttatgacattgtactttaaaaattttcactgaatggatattgtaagt

SEQ ID NO: 102321 - DNA, 1023 bp, Homo sapiens
gttttgcaggtttttgttttcatgcatttttattgaatattgtgcatggtacaccatacatgcttgacagtgtttattgaattgacttaagtaattatgtggcctatttggaatatgttatgacagagcatttattgtaaatacaattacaactaatataataataaataaaggttttttattgctagaaataaaaggtgagattagattcatagcaagcaataactgatgttttctgcaacattttatcagtttatttttttactgagttatttaatagacataaaaggttacaagaaacatgtgctatttagaaagaataataatataggaccgttgtggactcacctaactcaagaattagaatattatcaataccaatttgtttttttttaaacaaatgttctctcttgctctctcctaaaaataaaatttagacaagtaccacataactaaaattgtaatggaagactgcaatttgcttgaagaacttaaaactcaaagttgtatggattgtatagaggtgagaatgaatattataaatatattttaagatttgcccattagaactttttaacactcagaggaagttaataaaactgctgacaatatacaattcataaaattggatgacatatttgagggaaagaactaatatcttgatcagagttctctaatgatttaaaaaccattaattgaaagtgaaaatttggtttttaaaaactttagtctttaatgagttgaagaaatatgattttctttggtaacagctgagatgtaattcatgtgctacactgttcattcataggaaataggactttaactcaattttataaaaggaatttgggaaaatatttaatgttgtattgaattccctaatgctgttgatatgatgtgatttagtttatttttaaaaaattgagtgttcgaaatgaaaagttttagttttttctctagcacctttcatatatattctcgttaacctaccaactcatgctttgcaattaatctaatcagcattgc

SEQ ID NO: 102322 - DNA, 1025 bp, Homo sapiens
cgaggctgcacatgatggctcacacctgtagtcccagtactttgggaggtcgaggtgggaggattgcttgaggtcagaagttcaagaccagctggggtaacatagcaagacctggtctctacaaaaaatttttaaaaattagcttggcatggtggggtgcacttgtagtcctagctacttgggagactgagatgagaggatcccttgggcctgggagatggaggctgcagtgagctgtgattgcaccactgccctccaacctgggtgacagaccctgtctctaaaaatatgtgtgtgtgtgtgtgtgtgtgtgtgtatagtgggtgtgtatatatatatgtaacaaaatattgggtattgtaatctcattttctacataaataatcccctatgttatttctgatatcgaagatagaaatccagatccatttttactaggtattgggttcttgatgatttttggaggtcattgatgggtcttctttcaccttggtttctcaggaaggagaactaatgaaaatgaaaggaaatgaagagttttccaaagaaagatttgatatagctattatctattacaccagagccattgaatataggtaagagcaaatagaacaaaagagatgctttttctatggcacatcaagttagaatggtagtcagaagaaataaaaacaagacggagaattggagagtatcttccaacttgtgcagaatagattttctcatccttgggtgttggaagcattggagatggcctgggtatatgaagctaacgtagtagcataactcaagcaagtcaggcaaaatggtgaattttctgttccattttctttaaaactttccagtacagagttacctcttttgtcttgttctcattttgctatcaaccaagtcctcccaagttattaactggtcaaaaaggattaaaggattagttcttaatagttaagatgccacccattcagggttttttgctttctaagagggaacttttacaggataattgagagaatgcatacatgctc

SEQ ID NO: 102323 - DNA, 3767 bp, Homo sapiens
taatatgtctcgtttgatcccccaacagccctatgagttagagcaactagagttatcttcattttgaatatagggaagtttaggttggttcaaacaaagttacttatgtaagaagtgaaggaacggggacttcgccagttaagactccaggtcctatattctttttgctttgccacacatatgtaaagtttaaaaaaagttttctcatgccttatgttttctacgtgatttttatttgtttcatgtgtaatgtgctttactgactaaacattgtatctttttaagacctgaaaactaccttctttatggtaaccgagctctttgttttcttcgtactggacagtttaggtaagttggttaaaatatctcaaccactgaattattatgctaaatacccatttttgggaaacgtttctgtttttcaggtatacaagaaaatccttgactggttctttggcagaaatacttaagtggttaaaagagtatgcttaggctttatatataataacaacagtgacagcagcagctattctgattgagtgcagacatatgttaagcattattttaagtgctttgcatatgttatttggttctcacagcacccgtaataggtaggtaatgttatagtccacattttacatgaccaaagtgtaccactagtaaatagtgataccaagatttgaacacagattttatctgatgatgtcaaagtctgtgtttgtggcacctatattacctctttatgctctgttaattaatccatatagtataaaagaagcattttcatcttttctctgtttatcctggtataaaaaattaagtaaatatccttcataagtgaaagaaagcaaataaatttaatattatgagagtggagtcataattaattccagttccttatattgaatttgagctgagtttttatttattagctaagaaagattgagaaagatactgcaccatgattttattgttccccagtataaaatttttagaacataaattatatatattgagcattaatattgagcaggtagactattatatttaattttgtcctgccttactgtaagaaaggtgtagggtgaattcaagaatacatccacacagtagaagaatattcaaaataaaacaaaccagaaaacgaagttggaatctgggattctcagaaccaagctacataggcataaggtcctgcataggtattagttataattcatatttgcctctgaccttcagctacccaaaatgaaatgggaaaacttgacaagttacttaattctcattgtccataaagaaacaggacaccaattggtcaggtgaaacagttttcctagtatttagttttgaaagaagttgggctgtaatattaattgagtgatggagtagagaataatctcagcagtatcttatgcatagcaaaaaactccctgaaagcacagttttgggtttcacaaatactttttttgtgaagttttctcatgaaagctgagagtctgctatcagttgtttttcagtgaaagcgcttgtatgggagggtgggagtggggaaggtagtaaactctaagcatgtagctttaaaaataacatttattgtgtttttcttttattgtaaacagaacacattctcatggtagaaaatttggaaaatacaagagtttaaaaagaagaaaataaaaatcaccagtaatccaaccaccttggagaataccgctgtattaacgttatgcagcttttagatggcttaagccgtggataaaccgaggctatctagactagaggaatggatgggcttgacacagtcttccatcaataccactgtcctcaacgggttctgacaagaaatgagctgcacatgtctttaggttattgctactggctaggtccagaattgcatttattttgtgctgtttgaaggtgaatttgtatgctttcaagatcagatgaataggttggcaacttggctagcctcttgtgaaaattgaggtgcctgtctgaaatattgcctggcagaaggttttccactttccacttctgagagctgagaggcacaccagggtgtttctgctctctttcatgagtgttgaatgctagacacacaaggaagatccttctaataccttgctgcaacaggaggtgaatcagagtagaagtacagaagctaggtagtttggtgaggtaaaggccaagagcagcttgtggatctatccttgtacctccttgctgatggtctagcttgtggtttaataccatctacatttcactaaagccaggtcagcagcattgttcctttgtttcttattaggcaatcaccaatatatattggatgcctattttattcacgaagtgttttaccacactggttttgctggtgtttcctacctcctcacacattgtctatatgatttgctcagtaatgtagggataatgttttcagagtccatagtatatataactcctgatcaggtgactagatggtgtgacttaaggaaagaacacgttgccagtaattcagatgtgccattgacacaggaggacccatgcctgagaaagacttttatctgagttactgagattaagatgttttgaagctcccaagcagagggatgctggatctgctgtggaaatctggctgagcagctgcagggacagctgggggtaaagcatccaccctcccccagtttggcgaggatgcactcctcagctgttctggaaggccagacttcttatctgctgtcattgaagcaagaattgagatgtccaaagagaacagaaatgggacaatttaatactagaaaggaataaaagggttaaagtcttgaatgctaaaacttctgaaataattaatttatcctgaaagattagaaaatataagttgaaactttaaatgaaaaagagattcaatttaaaaaagaactttggcaagattgatatctaaaagggtaaaaataataatactgtatcttacaacatggttatcactgttctgagcatttaatgtgtattaactcgtaaaaccatcacaactacgtgaggtaggtgctactgcctttttacagatgatgaaacaggtatagggaggccaagcaaagtgtctgaggacactaggtggatgtgatggagccagaatttgaacccaggcagcctggatgtagagtctctactattaatcactatgggaaggtggtgatagaataaaagggaatgtgaaagtcgaaaaaattaaaaaataaatggtctaaatagtcaataaacgtttatgaggaaatgattatccttccaggacatgtagattaaaaactacgagtttctcatttatacccatcagatggacaaaagcttaaaaatctcataataccaagtgtttgagaggatgtggaacaaaggagactctcatattcagctggagaaagtgtaaattggtacaatcactttggagagcaatttgacaaggtgaagatgtgcatactctgcaacccacttctaggctcatatcctctgaactctcaaatgtgtacccaagaagatatgtacatgccttcatgatagcattgtttgtaagagtaaagaaatgaaaacgacctaaatggccatcaataggggaatggataaatatggtatattcatacaatggaattctatatggcagttaaaatgaacgcaatgttgagtgaaaaagcaagtcacagaatgatttgtacactgtgatgccatttattaatgtttaaaaacatgcaaaacaatatgcatatatacagactgtgtat

SEQ ID NO: 102324 - DNA, 7711 bp, Homo sapiens
gattggagttgggaggggtggtacacggtgggtgtcaactgtaacaaactactacaaaaagagctgaagtatatggcaacatgttaatttcttgctaaggtggtatgccattggtacatgggtgttcattttgttaatgttctctgtacttttatgtatacttgaaatatttgataaaaagtaaaacaaaatgtaattaaaatgcacatgataaaaggaacagaaaaagaacagaaacagtgaccactaaacatcaaggataaaatagtgaacaatgatcttgaaaagagaaatataagtattgtaaggccagttgcagaagcgtgaagtgtgcatggggaagcctgaggtgaggtatatatggggaaacagatgcttccttctggtggcagtggcagtgatgattttaatgccaaaatagtcatacagtttgtaaatccaaccacttttgggtgaatataagttaggccaagagcctttcaaaacccccctgggcctgcgaatgttgcgcttggaaaacgcaggagatggggttggaatgaggcaggggttggggaactgcgctgcctcctgcgcccccactcctgccgcagcctctccccttcaaatcttcacattgaggattgtgtttatcccaggacacctggcttagaagatgagatgtccgttttattctgctccttctcaaagtgtacttttcaaatatgagttggtaactatagggcatttgagagtgatcattgtaattatagtaatcagaacttttcagtttagtcaagaatctggacaaaggaatcagtcatatctgtaccttctgcagttccaacagcttatgtaatgtacatgattaggctttgcccacttagtgttcagttcattcttgtgagactcgtggaaaattcagattcttcggtgggatgtgatgaactgtgtaagggcaaatgttaattggagaaagtgaatgcttagcttgaatcgtttttgaattgctttggaaactcatgtatttttaaacttggtgtttacttgaactgttggtattcatttaagtatttacccatcacatgataactgccttccatcagatcccaactgtgattggtagcagacagatagactttaactaactcttctcttgttgctttttttcccccctaaatttctggaagactagagatataaagcactgtatgtttctgtgagaatttcacaaattcttgtgtgtgtgtgtgtgtgtgtgtgtgtgtgtgtgttggtttggtgaattattcctcactctgccctctggtgtgtgctctttatttttacttagagccactgaatttgcttttgaagaaaacatttacttttttcagtcttctttggggtataccccctttttaaaaaaacagtaacaaatgcacatggtaagcaacagagtaggaaaaggtacactcgccagctctgacccatcctctgattcatctcttcagatccttgtgtattcccataatattttatgcctatacaagcatttatgttgaaccagatgaaattgccatttttgtaagtcagaatataggcagttttatttggtttaatgtaatgtatatgtctttttctttaaatgggtaggaacatactacatacactgttgtacatcttgcttttttttttacatttaagtcttggagcttgttttggatctgtatatagagacctaccttgttcttcatggctgcacagtgttttactgaatggattgcctatgtaatccattagtttgtattatattagtatatagtttatatatatatattagtttatattagtatatagattattttatttacaatgttaaattatagatatattagtatgtagatttccattttaaagattatatatacctatgcaatgattatctttttacttatgttttacactcaggttcaaatatatctgtaggacacatttctgataaatttattttactcatgatatatgaatgaaagaacatatcattttaattacagacactttttatttaaaatgtatgtttattcagtccgtggttattactcactgcatatttgtcagtgactgaccattatacctgaatcttgcttttgttccttagttggaagatctggaaacttggggaatagttgttatttctttattgatctggtcatatcctgaaaataattataattgaggaaaaaaggaatatcccttatatggcttgcaaaattcttgcatactttttatggtatggtttaagagagtcaataaatagcatctcctttcccttccaagtccagaatcagttaaaagatggatggaaaagacaggcaaatggtgatcaaatattgcctttattactgatgcaattggagaacaggccttaagtctgatagtcaaggggctggttactattaggttggtgcaaaagtaaatgtggtttttagaaataatggcaaaacccctaattacttttgcaccaacctaataattcacccacagtcagacagaactgggctcttgggaactttaagcctggaagaaaagggaatctggtgttttagattccaaagagtaaggccaggtgcagtggctcgtgcctgtaatcccagcacttggagaggctgaggcggatggatcacttgaggtcaggagtttgagaccatcctggtcaacatggtgaaaccctgtctgtactaaaaatacaaaaattaggtgggcatgttggtgcatgcctgtaattccagctactcaggaggctgaggcaagagaattgcttgaacacagaaggcaaaggtttcagtgagctgagattgcgccactgcactccagcctgggcgatagagtgagaccatgtctaaaaaaataaaaggattccaaagagtgagaaaaagaagaggtgaagccatgtatgattagtgtccctccctcaccattagataaattattattcatcatctggggatgttagccaagggtggggagaggaaagagttcaggaataattagcaaatccacatggaaactaggggagagggaataactgttctttacaagcatcatcttttagggcagaatgtagcatattttatatgcagtaatggggaggggctggagaaataaaaacacttccctatgtaagagcaataagttggagcacctggactagaactctctttcttactctgtttaatactcaccatgtcacacagtcttcaagagtaaataaccgtttgcatctggagtcttgtcccattttcatacatctcttgcacaggggattgctgctaccaaaagtcaaacctgattatttagaccctgggctgcagtggtctggatgagcaatagcatcatgtaattgactatgcccactttgccttagttgtaggatgtggtcatatgccagtaaatgtgaaattttattagtattaatattaattgcattcatatactaattgtgatatttataatatatgctattataacgctgtttgtagtgctatatattataagtaatgttcagcattgattcaacaaatattggggttctgttgatggataatgtcagaaatgagcaaaaacagcctctgtgtttcagacagtgggctggcattgtgagggccttgtagtgggaaggaatttgttgcatttgtggaactgatagttgctagatggcctgaatacagaggagagggtagtatgttcataggctaagccaaggagggccttgtaggctgtgttaaggcttttggcctttaagagcaataagaaagtaaaggattttaaactgaggagagagagcatgattagcacttaaaaaaaaaatttgagcatagtgaaaatggatctgaaggggatgtagtgtggatgtaggttaggaggctgttgcagtagcccaggccagagatgatggcttccagcagaatattgacagtgggaatggaaaagtagaaggattcaagagtttagaggtgaagctgacagaagttgctcgtggttggtgttggaacttgagagtgaaggtggttggaactgttctgacgtttctgccttaagcagcatcatggattatgggcctactcactcacattgggattgctggaagaggaataaatttgtaggaggtagaactggacttcactctcggacactgaatcgaagtgcctttgaaggccaggcatggtgactcacgcctgtaatcccagcactttgggaggccgaggtgggaggatcaccagaggtcaggagttcgagaccagcctggccaacatggtgaaaccctttctctactacaactacaaaaattagctgggcgtggtggtaggtgcttctaatctcagttactcgggaggctgaggcaggagaattgcttgaacgtgggaggcggaggttgcagtgagccaaagtagcgccattgcgctccagcctcggcgacgagcaaaactccgtctcaaaaaaaaaaaaaaaaaaaaagaaagaagtgcctttgaagcatccaaattccaatgttgtgtaggtagtgagttatatgggtctggaactcaaaggagggtttggatgggaaacatgtttggaatagccagcctccatgatttgaagttgtagatgtgggtgagactgcttacagagaagtttttctcaacctggactgcactttggaatcactgaactttgacaaataccacccaccccagagattctgattcaattaacctagagtaaagcttgggcattgggcttctaggaactccccagatggtactaatgtgcagtcacggttgagacccactggcctagagagaacctaggctgagactaggagaggaatcaggattgagccttgaacacatatggccaattggagaaggatgagcctgcccaggagattattaagatgtgaccagagaggtggaacaaagactaagtgtggtgtcatagaagtaagtaaaagagtggtcagcagtgtctgttggctactgagaagccagttacagtggaacttagatttggcaacatggacatcattcactaaccttagggggagctgtcagtgggaagcttgaaacatgccaattagatggggttgagaaatgcaaggaaatggagacagctagcgtaggcagcttttaaaggtgtttggggagagagacccagggtgagtctctttaaatggtaaagaaaacttaccttattcaagagttccagaagaaggtggcactagggttgtatattcagtggctcaacaatgtcatcagagacttagatttttccagcctcagtgtgtgacttggtcctcaggctgtcccctcagaatgtaggatggctgctgtaattcagacatctttagcagaagaaggacaactttgtcttatgtcctttaaaaaaaatcttaatacacatgctgaaaagtatacaagtgttaagtgcagctggaattttcagaagtcaaacaactgtaaccagcatgcagatcacaaccccagtaccccagaagttcctcttagtcatgaccctcctcctagtcatgatccatctcctcccccaggagaactaccatcctggcttccagtggttaattttgcctattttagtacaatgtaatgaaataatatactatgtgttcttttatgtttggttttcagcatcgtttttgagatccatattgttgcatgtagttgtaaagtgttcatctattgcatgaatataccacattttatccattctattgttgatgggcatttgggtagcttctcctatttggcttttacaggtagtattgttgtgaacatatgtatttatttctgttgagtgtataattaaggagtggaattgttgggacagagggtatgcttatatgcatttagctttcctgtgtgattgtatcattttgtactcttacagcagcatatgagaatttcagttctgtgccctcaacacttactatttttcatcttttattttagacattctggtgggtgtgtagtggtataccgctgtgattataatttgtattttcataaattgattaaggatgtttcagattttcataaggttattgaccatttggatattctcttttgtgaagtgcctgttgaagtcttttgctatttttttctcttgagtagaatgccctattcatttttaggagtttttcttttgtattctgaatatgagtcattggtcagatatatgtattgcaaatatcttctcacattcagtggcttgccttttcactgttgatgttttcacaaacaagttactaattttaatgtagtacagtttatcagttttttcctctgtgataagctctttttgtgttctgtttatcatctttacccattcaaaggtcaccagattttctatgtttcatctaaaggtttaattgttcaactttgatgtacagatctgcagtccatctggacctggtgtttgtatttagtgtgaggtagtgttcaagattcatatgggccaggtgcggtggctcatgcctgtattcccagcactttgggaggacaaggcaggagaattgcttgagcccaggagtttgagaccatcctgggcaacatagtgggaccgtgtctctacaaaaaaattcaaaaattagccagaaattagctaggcatgatggcatgtgcctatattcccagctactcaggaggctgaggtgggaggagcgcttgagcctgtgatgtcaaggctgtagtgagagggactggcactgcactccagcctgggtgacagagtgagcccttgtttcaaaaaaaagaaaaaagatccatatggatgtccaattgacccagcaccatttattaaaagagtatattttctccatgtaccgcagtatcacctttgtcacgaatcaggtcattatgtgtaagaatccatttctagtttctctgttctattttgttggtcaggttgtctatccttatctagttggtttttttttttttttgtacgtaaccttttagtaggtattgatatctggtagtataagttatctagttttgttcttccttgtaatctctttaagagtgatgaattagcataaatatgaatgtgaaatgatgaaccagcaaatattaatctacgttgaaaaaagaaggtggataagtcagtgagttgggtaccctgaggagataggaacaattgaacaagttaaatgggataagcaaggttatagtgagaggtggatacctgaattagtgattgaacagtttgaagtttgaacagttttgagtttgaacaccctaagttccaggggtgcagtgatgggtggctgagttgggctagaggtggaagtcattgaagataaggaagccaggaaactgatagactgtggtatggatctgttagttcttgataggttatgaaagtacatttaataatgtagtatctaatttaatatctacctcagaacaggtagaacagaattatttacattttacagatgagaaaaatgggcccagagatgttaataactccctaatagccccaagaaaattagtgattaaattagacctaacctgggtcttatggtctagcttccatgctctattcagtgtagcttaactgatgttgtgtgaaagacctggtagtgatacatttggaaagtcttactgacatgcagaaatagtacagaaaaacatacaaataggaatgttattggctgggcatggtggctcacacctgtaatcccagcactttg

SEQ ID NO: 102325 - DNA, 1057 bp, Homo sapiens
tgtccaacaatgatagactgggttaagaaaatatggcacatatacaccatggaatactaagcagccataaaaaatgatgagttcatgtcctttgtagggacatggatgaagctggaaaccatcattctcagcaaactgttgcagggacaaaaaaccaaacaccgcatgttctcactcataggtgggaattgaacaatgagagcacatggacacaggaaggggaacatcacacaccggggcctgttgtgaggtgggaggggagagggatagcattaggagatatacctaatgctaaatgacgagttaatgggtgcagcacagcaacatggcacatgtatacctatgtaacaaacctgcacgttgtgcacatgtaccctaaaacttaaagtataataataataataataataataataaagaaactatttctatttcctagtaattaaaattgtagggatttggtacacagataaaagaatgaaaccaatagtgcagaatagagggcctccacacagaacccactatgtgagtaaatattacaatgtcatattgtctgagtccttcagattggcagaaattaaagaggctgatagtctggtgttggtgggtatgtgtagtaacaggaagccccagtaaactggtgggagtgtgattgcttacaaccaagtcagggagcactataatagactccacagttacttgattctgagtgtgtgtgctctagaaaatttcttgcaaatgtgcacatggtttgatatgcaaggttggtcattgcagcattgttttaatggcacacaactgcaaatacctacatgtctattgataaagcagcagataaatgtggtattttcacttgatcaaagttgttactctgacctgtgtgatctgtccccgtcttgaacacttgttgtttctccaacctcactgctcctgctctgtccctggttcactttatcttggcctcttggcatcctcactgttcctcagacattccaggcccacttccactttgtacttgcccttccctctgcctagaatgcttttccccagagcgttg

SEQ ID NO: 102326 - DNA, 3197 bp, Homo sapiens
agagagatgagcaagagggaatttccacatgtgtgatagagaatgagatagtgaaaagacctttttattgtaattgggtttcagaaactctgagatacctttaatttaagcttcattgaaataacttcagtagggaggtctgaattaagtcttttctcaactaacaggagttacattatgttttatagggttcagggaaaaggatccaataaaaggtgagaaaagtatggagaaaagagaaagaaataaagttctctgcaaatttagtagatttggtttatgatctatcattatttcttatgctagctgtgggttttttaatgcagttatttaaactttgaagtccgtaaatgcttaggggataggatttgaccttgtagcctatctgagagatgcctttgtcttcttatactttaggtgtcaggaagcatggcctataccctttcagcaaaacagagtttaatgaaatgccatatgaattggagtctgagctaagcccaaatagtctgtctaaaaaaactccagaacctttagagccacacggtaccccagagcaggattacttatggtaaacctgcataaacacgtacccacgtaattgtttctggcttcttgtagtgaaaagctgatccttcttaaaagcgttgtttgttttttataatttctcctagattttcactgaatcacagtgttctttgtgaaatgtgtagtgaagaggaaagagctttggaccaggtgtcataaaaatcagggttctttggtttgcctcttaagtaagtgtgatattaggccagtttctagcctctagcctctttcactagtaaatcaccttgccagtagtactgtgcctaaaatgggaatttggtttgggaggagctagaagcagggttggttcagttagcttcaggttttggtactgttagctttgtagattaaaaagtttatacttaatatagaagatttccaaaatatgtaaatggaccagcaaagattttggttctgtagcaaaaaacccttatcattggaattaaatgtaaatccctggtttttggtttcttaaagccaggagctgcacttagagataacaatgaaaagctgagtgaaggggagacggctggatggaagatctagcctgagcacatcccccatctgtctgcactcttcggaggtatcggaaaaccatggcacaggcccatggttccatccagctctaaaaacttctcgatttccaggtgtaggaaaggcgatgacttagagattgttactgccttcaaatatttttaaaacataaagttatttataatgaatgacattttttactttatctggcacaaaattattatattctctgttagcaaaatataacaaaagttgaactctgctgggggtacagaaatttcttaagcaaaaatattgatccttagttattgtgattatttgtgtatttataacttttcacttagctcattaggtaatgttatttcctgaggtattaacattttacatttatttttcattggtagggacctaatctaatattttaagtaatgaatcagttttcaagcaaaacatttttccttacctgttttctttaacttaagcatatttttgagaaaaaattaaatttatctttttggaacagggtcattatcgttattgtgatgctctttctatgctgggggaatatgactgggccctgcaagcaaacataaaagctcaaaaactctgtaaaaatgaccctgagggaatcaaggatctaattcagcagcatgtaaagttacaaaaacaaatagaagacctacaaggtatttcacctaagattcttttggttacagtcttaattccctttcaaactttggagggtgggtttcttggattaacagaggaccacaaatcaatcctcagatgatttatccttattttatcatgttatcttggtcatggcacttgagtttttcatttctatctgtgtagagttacatgttatccattaagtaattataaatgatttgtactttttatttgaaacagacagcaaccaaattgttatttattcctctgtagaaaaaaaaatccctttcagaaattttgaataaaataaaagcttttttgaaacaaaattatttaaaaatatttccttcattgctaaagttatttcctaaagaaaagacccttcagtagagctgcttgatgtttccgcaccatttgtgctaattctgcagcgtgctgaatatatatatatataatatatatatatatatattatatatatatatataatgttttttatatatatagcagaaattggctgtgcaggctaggagttgtagattttcattctctccttgttttctctcctaagtctttttgctttctccaatgcctgaaagtcccttagtctacatttttagtgtatgagtctttcctgctttttcttcttcgggttgtacaaagctgagctgaacagctctgtttgaccggcagatgttgttatccatcataacatgattatgtaataagatggtgagctccttgaagacaggtgccacctttgattcagatttacatattgctgtcatcttgtcaatgatcacatgtgatggaatgtcagacaaagtttgtgtaacattttgttgacaccatcctaaaactaaagacatctagaaatgtaaaattgcttagatttacttttcagttttctaaatttgaggtccttactatcagcttaaagtaaatttgaaatcttttaaagtctgtgttgccaatccattgattactatgtgtgtgtgtgtgtgatgacttttataggtcgaacagcaaataaggatccaattaaagccttttatgaaaacaggtaagttaatagcaggtcagtagctgctactactaggaatggctttgctgcatgaatttaagaatcacttatgtttgacgctttaggagctaatagcaaccacagtaaagttggagatggaaggaagagaggtagttttttaagtgtccgtgttatcaggtgacctgtaagttgtcagatttatttcgctgttttagtgaaccatatagatataagctcagtagcctaatcctgtgggaaaagaggggtgaaatgttaattggacattactatgcttggatgggaccagtttggccatgaaactcctggcagcacagagctaggacatagcctgtgccctgtg

SEQ ID NO: 102327 - DNA, 1230 bp, Homo sapiens
ttttctttttctttctttttttttttttgagacagattcttgctctgttgcccaggctggagtgcagtggcatgatctgggctctctgcagcctctgcctcctgggttcaagcaattctcctgcctcagcctcccgagtagctgggattacaggcatgcactaccacaccaggctaatttttgtatttttagcagagacaaggttttgccatgctggccaggctggtctcgaaatcttggcttcaagcaatcctctcgccttggcctcccaaagtgctgggattgcaggtgtgtgccaccacgcccagcctggggtctcttcttataagggcactaatcccattcatgaggggacagcctcatgacctaattcctcccaaaggttccacttcctattaccatcgccttgaggatttggttttcaacatgtgaatcttgtcggggacacagatatccagaccataacagtgctgtaggctaagtctcatttgttttaagttgtgtgtgctcagtgcatgtatttatttacatatctagtaaacacagacaccgcagaacctcattacttggcatcatttggagatgaaggttctggagaagtgaatatttttgtgcttcatttatttctgaatcttaataccaccagagtttgatgaaaatcctctaaagtatattacatgcttccctgccttttaacacggaatttaggaaaatacaggttttcttgatggcttaaggttgtggtcacacataacagtgactgacctcaagcctggtggtgttcctcccaggattcttcaggtgagattgttgattttttagttagtgatcctctcttttcccttgtcttgtttgttgggtggttggtttttctttccatagttttgcttctagcagccatttctattttttgtgacctgcagctccatgttcgctcaggctcagttagttccatagatacagctacttagtattgagcatttccatttggttagcacattagcgtaatgatagggaggggaaactcaggcagttgtcctacctgatgcagttccaacagcatataaaacatctttgaggataaaacttttttttggaagatagcttttaatttcttcatatttctcaggccattactatcatttaattaaataaattctgtccacccttcagcatttacatacaggggaagaaattgaggttccaggattaaggttaagtagttttgtc

SEQ ID NO: 102328 - DNA, 1055 bp, Homo sapiens
ggtcttgaaatcacacaggtttacttagtgcttctgaaatgaactctctactcttgagttcaggccattctatccaaatcgtacttcttcctcaaaaccgaacacaaatgccatatcctcactaacatttttctcagccactccagcttaggtgatttttcccttttgtgagttgtgagagatattactgactatgcaatttatatgtcaataacaacacagtattttcttttcttcataaggatgattgttgtttaactactgaagtgatgtgtcttttcaccccatctgattataaactgagaacaggagttatctcctgtatctctctgtatctatggtagacctaaatcataatgatcactattataattgatctttaataatttaatttattatatatagaaaaatatcatcagtagcttcttttttggcttacccttttgtagttacacccacgtaccacatttctgcttctgttttcttactccaatttatattttaaaaatagttttactctcaggcttgtagatttttatgtacagattttaggaacaaatacttttgtgttcacaggtcagcctccaaaacataaaggaaaacaaaaatctcgaaacaatgaatcagaaaagttcaggtatgttttttctctaaggtatgtttttttccccttaatatactcttcccaagaaaaaggaaaaaaaattgtttttcgagtattagctactttaatgtatgtattatgatgactaccaaaatccctttcaaatatcaaaagcatatctttaggaaaggataatttttggctaaaggattattaatcctggatattaatatattgacttctgaaagtcacataatatgaaatatttccatattaatttcttaaatcccagaatatgtactctaaaaggaaaaagcattaagagagatataaggtgcacatgaagcctccttccctgctcacctcatttgaccctcctgcagtcccttctctaaggcctcctccaggaatacactgttaacagtttcatgactattgggaaacttactct

SEQ ID NO: 102329 - DNA, 1070 bp, Homo sapiens
gttagcagtcatcaatatcaaggcaagaccatccaccaacaaaaagattatgactcactagaaatacccagtgtagatgacggttgatgggtgcagcaaaccactgtggcacgtgttatacctgtgtaacaaacctgcacgttcttctgcacatgtatcccagaacttaaagtataattttaaaaaaagtttaaaaaaagattatgactcagtaaaccctcagatgatcattagcatttgtagcaataaagtcttaaattaaggtgtgtacattgtttaatggacgtaatgctactacacacttaataaactacagtatcgctaaaacataactttaatatgcactgggaaacccacaagtttgtgagactcacttgattgtgatatttgctttattgtgatgctccagagccgagcccacagtatctctgaggtatgcctataatagctaagtaaatgtcttaatctgtcactagtactgcttatatgcaaaataatatgactttaattataaattaatctattatgaatcatgcctcaaggaactctgagacagtgattctgtgttttaaatagcaggataactgctttattggaacaaaaatctcttttctaatttgatttggccaatcatattgattagtgagattttatgacaatcattgattcgtaagattgattagtgagattctattacacttctttttctgttgtgactggatgcaaattgggcagaattatattcagatttttaactgaggcatttttattgacagcaattgaacctggccatgattaactatgttttggtcgtctatggacttgccatttctctccttggaataggacagcctgaggtaagatttgtaacagtggtaataaacaattaaaatgatattgacatatcttataaaaattattttctcatttttacccattttcttctctgtaccttctgataattttgtctgaaatatctcagtttaatttagtttgtgtttttaaagaatatttagtttcctattagaaaaaggctttgccaggcaatcagtgggaatctactttttatt

SEQ ID NO: 102330 - DNA, 1049 bp, Homo sapiens
ttactaatgggctgtttttaagacagagctttcatccgtcttgtgccacaaaagactgtgacaacgtcattggaatggcattccttccaagggattagcacttaataggatctatgttatggtgtgtttacaccataattagccttttttaaaaaacaaaaacaaaaacacgatttgactctttttagtattagccagcacacgccaggcccttagtgcgtactagtaaatgcttataggttgattgtctgatgtgttcagcaggattggtttggttgtgtctctgactatccatatgatcagaaatttatataattcctaagaaagtgaaacacagaggtataattttgccacaggaatttggggatatgcagttgttattttaatattataaaaaaaatcaacctttagataaaatttatttcagtatttctctttgtatgtaagtgatcattgttttcactgctattcaaggaattatctgaagccgaaaaccagtttaagaggattattgaacactaccccagtgagggccttgattgcttggcctactgtggaattggaaaagtatatttgaaaaaaaacaggttagtagaaatgacactactttaagctctaggctggtaactcatttaaaatccaatgtgataatgatccattttctagaattattttgatatctcctctgtagcacactatcataattgtgatttactttgaggacctgaaatttcactatcagtattaattgttaaagcaaggccagtcattgcagttcttggtacttcctgattttaaatctaataagtcaacaatatagtaatttgacattaaagatttaatagtctagtgtataatcatctatagatagtgagtgaattgatataaactaatgtttttaaaatctgattgtttaatttttttgatttaattattttttaaaaatctgtatgaagatggttttaaataagaggtatatatgtgttcaaagacatcatgagtgagttaggaatataaaagtctgtcctctgaactctattgtagttgta

SEQ ID NO: 102331 - DNA, 1028 bp, Homo sapiens
gggctggggtagtgacctgagaaggcaggctggctcattctttttcctcttcaagctaccttaggaggataggaaacaaagtgagattgttacctctgatttgttgcaattctgatctctcataaaatttgagtcccaaatctaaaggtcattgtgatcattgaattagctgttagagacctaaatttgagataagtctggcacttaattgagttatactggtttattcaagaagctagtagctgcccttgtcctgctgttccaatgtccctggttagtaaatcagatgaaataatgtttataaaatatttgatatattttgaagaatgatgcaactttatgctgtggaaataaatatgttagtcaagctctctctgtctttatgtatgttgtagtgagtgagtgtgcagagacatctttaaaacgttaattaaaaaattttttgtaaccctagggttttatacgcatcagctgttgccagtactgtaaaatagaatttcacatgaattgctggaagaagttaaaaactacaacctttaatgataaaattgacaaggtaaagcataacaggattgtctgaatttttcagtatacttattgtatgtcaatttttcccccaagaattccttcctgaacattctgcacataattagaaaattttaaattataactttaataataaagtggaaaatcaaatttgtttttatttggacaatcataaaggcattaaccatagaggctttgtttttttaaagagacggatctcactgtgttgcccaggctagagtgcagtggtgcagtcgtagctcactgcagcctcagactccttgacccaagtgatcctacttcagcctcccaaagtgctgggattataggcatgagccactgcaccaggccccacttgaaagttttgatgtggaattagggatttcaaaaccaaaatttgatgaggtaatttgtactaagaagtcaactcaaaacaatttttttaatgttgggaagaaagatcaacttcaattttaaactgc

SEQ ID NO: 102332 - DNA, 1060 bp, Homo sapiens
agaagtgatttttttttatcatttgtgaccaagaaaaagcaaaagaaaagatgaacagaattatttgttggagagaattcattgtaaccagatcaaccaaattatagtgttgtgggttattattgagatgtgaaaattatattttactatgggacctttcttagaaatgagagtttacatgaattattttgcagagtaatttgtactatttctgtttaccctatgaagtaacttagatacatgaaagtgacatctatacaatctgtagactgcatccttagacatcacctaatcattgaggtttttgttttcatgaaacaagtacccttattttgacaatactgacagtttcttacattgaatggaagatgtaggccgggctctgattaaaaaaggaaaacttctaatatattgcttggaagatggtttctacgatagtcaaaggaaaacagttcattgagttgtcactaattgtaaatgtttatcagcctagagaaactaagactgaaagaagacaaaaaattgaagagaaagatccaaaaaaaagaagcaaaaaagttagcacaagaaagaatggaggaggacttaagagaaagtaatccacccaaaaatgaagagcagaaaggtatgcagaagccaaaggcatgataagaataatatactctcatttaaatgtataaatgtaagcatcttttgggccttatattcatcattattgaattgaaataaagatttcacttagtaatttaatactatcactgtcttctgttactcgaagacagaattgggttggtgtaaagaacactgaaaaacctttcagagattgtattcccactgaaaaacctttcagagattgtattttaactttctgtgcttaatgactaaacatatttattgtatataaagttaaggtagttgatgaggctgggttaggattgttgaaggaagtggccgtattttaggggaactaagttgttttttttttttgttttttttttttgagacggagtctcactctgttgcccaggctggagtgcagtggcgcgatctcggctcactg

SEQ ID NO: 102333 - DNA, 1024 bp, Homo sapiens
tagaaggaaaacaaagggactttgttttgagtggctctaaattacgtttaagttaaaacagttccagagttgtcttccttagtagtttgcagttgccttttattcattcttcagaaattcttcagtttaggaaagtgagtaaatagagaaaagcacaacattgtggcagttttcaaagagaaaaatgcctgtttactgattttcaggagcaaatcatctatctatatgaaattttgtcttaatctgctccatcaaatattgcccagctaagcagggaaacacagctgaaatactccataaggagctgaaggcttctttattcactgtttgtgccccagtgtctggtcaggtgcagaatgtctagtttggcttagtaaaagaaatatattaataataaatttactattatggcatctaactggaattacttaaaagtctgattaattacttgaaataacagtccaaccctgtggaaaataagataaaaatgttggaacaacttaattttagtatacattagtattattaaattttgtttgttttctattataaatcgtagcacttgggctgatacactgtagtgttatttttgttaaacattttatgtacatttaacttatggctagtctgtaaaaactcatatggtttctttatgttgagcttcataatgctgttatttgagtgttcactgatttttccccccattttttagtttagttcaaccaaggtgaaaaacaaaagcaagaaaaagaagccaaaggattcaaaggtatggagtattttctgtattaattcttgtctaaactctccaaaatagttagttggacatatacattagaattgagcaattcttgggatattttgaaacatttgtagagaaagactttctaggacttaaagatgttttggcagtcttctacattttgaagaaattccaggttcatattatataatagcaagtcttgacactcgtattctttattgtcttttttatttttctaggtatttctgagtaaaaaaaaaa

SEQ ID NO: 102334 - DNA, 1035 bp, Homo sapiens
tttctctttttatttaaaattcttattggcattattatctttcctgaataaattttttgttgttgtttttagaataaattatgtaattacatagttgaaagttatgaaataactttttgatttccttttgctttcccctgctcccagaaaagttttaaatgatcattttctaggaggtagacaaaattttctttatagtatcattgattgcagttaaccttatgtttgttatatttgttgttgaggaaaggttgagatcagtgaaaagtgaaacagtgttttcctttgggagaataaaagtttttttcaaatagacatattcaagtacttccttatagtaactcatgtaaatgtaaattttttccaagttacttctctcagtttttggaggaacatggtcccttggacatgagtaacaagatgttctctgcagaatatgagtttttcccagaagaaactcgacagatactagaaaaagcaggaggtttaaaaccttttctcttgggatgccctcgttttgttgtgattgacaactgtattgcactgaagaaggttgcatcacggctcaagaaaaaaaggaagaagaaaaacattaaaacaaaagtagaagaaatttcaaaagcaggggagtatgtacgagttaaactacaactgaatccagctgctagggaatttaaaccagatgtaaagtctaaaccagtgtcagattcatcttcagcaccagcttttgaaaatgtgaaacccaaacctgtgtctgcaaattctcccaagccagcttgtgaagatgtgaaggccaaaccagtatccgacaattcttctagacaagtttctgaggatgggcaacccaaaggggtctcttctaattctcctaaaccaggctctgaggatgcaaattacaagcgagtctcctgtaattcccccaaaccggttcttgaggatgtgaaaccaacttattgggctcaatcccatttggtcacaggatactgtacgtatcttcctttccagagatttgatatcacccagacaccgccagca

SEQ ID NO: 102335 - DNA, 1038 bp, Homo sapiens
cacctaaaagtaaagccaaagttaaaatgttctgtttatatctaaaatatgtataatatgtgcagctttttaaacctaataaataatcgttggtgttaattgtggagagtgacatttaaatcaaactgttgatctggtattgaacccttctaaagcaaatattcagaactaattatagtatagattggagaatttatgaatttcaataatatgaatgattatatttataaaagtgctggttttgctaagcagtgtttaggggtttttaattcctgaatgattgtgacatttcccttgtaaattttcatctgctttttactctcctttgtttattttaagaaacagtaaagaacaagatcataagtaggcattttaaatgatttttaatagattgttttgtaattcacttttagggggaaatttcacggattgaaaaggagcaccaagtattacaagaccaacttcaagaagtgtatgaaaattatgagcagataaaacttaagggcttagaagagaccagggacctggaagagaagttgaaaaggcacttagaagaaaacaaggtaatcctgtctgaaacctgtctttaattgcatgtagcatagttaggagaatgtgagtgtagctgtgcttgtgcggcctcagctgaacttctgcattggtggctaaacaaaagattctttctcagaatcgcctgcttcagatttcttcatgacatattaaagtggctgttgccatgctttagaacttctgcaaactgccttatgagaaaggggctgtaagtctgggttttcgtttagctatagttcagtttccctggttaactaaaactctattttatggtgactgagctctgaggtaaattcttgtttatattgagaggcagcataggaatagaggttcagaatgagagccctggagacagactggctgggttcagatctaggcatggttctatactagttctaatcttgggcaatttacttaacttctctgtgctttagttccttacctggaaaatgtgagtaataataactc

SEQ ID NO: 102336 - DNA, 1158 bp, Homo sapiens
atcttcatcttactcctaaggaagtataagaataacacatggagccttagacatactagaactgtaaagtcacccagagtattttgttgagatctgctgaccttgaattctgttagtcaagactgatcatcagatacatggctagtggagggatagcaattagtggcaaagccagattgaattagtgagaaaatggaatcacagatgtgaggaaatcatggtgcatttgtttttaaaagctaccatcatctgtttagaaaggtaacaaaagaatagtaattcatttaagaaaggaggaatttgttccagaagtctggatcaatagctgggataacatattaaatagaagaaaactagcttagtgggaccttaatcaggaaacctatttactaagattttagtagaaatcttagggtcagtttgtaaaggtaactgtcataacattccccaggacctgtttatactcaagatgaggctggggagagtctaaggacaagaagaattagatagatcctgagactttactcagtttcctggctgggagaagtaaagaagaacaaaatcctacacagcatagtgacacatggaacacaagtttctataagctacttgtgggtttaacaaaacaaaatagttttataaactttatattgcctcaggaaacttcagttttaattcccatgtgggaattcctgtagctgcctgtttgagtgatgaggcagattggagacatagtcttaaaggtagcattcagccggtgagatatctttctttctggccgaggctttcctggctttataaattgctggtctgactgtgtgttctgtgtgcacagttcatcaaggctctttctttgtacagtcagtccagaagagtctcggaaataaagcacccagtgggagggccccagctctcaggcttttttttaacttgttaaggctttgagtctgctgttgcgtggccctactcaagagtgccttaaaagggcaattactaagccccccagatcacaggcctgataagttattagacttgccacgtaaaatgtatacctattccctaccaggataagtcgctaatctgagttccttgggttggtgtccacataagagtagatgagatttagccacagtcatttctttattaatggtggttacg

SEQ ID NO: 102337 - DNA, 1929 bp, Homo sapiens
gatgtgggaagaactggttcctatgttaaagggaacattactgagctgttgttcaatttttgccacctaagaacagttgtcctgtgccaaaatcaaccttatccctgctgtaggattcagaaatcttaaaggaccttgactggttagcaaatctgcctttaaaaaacatgaaaaccttggtgtctaaggctgaagagggagtagtggtctcttaagttgatagagcttttgacctgagggccatgatttcctatggaatccatgtaggttgactttagtgtcctttcttacagagaagacctcgagtttctatagctgaaatgacctacgtgtgctctaagcctaagcaggaagttcaggctgtagggaacctgataggaagtaaaaaattaaaagtttccctaaagcaaatgtgaagttaggatttcattaagccgtcattgataatagtgagattttaaactagaaaatatttgtttcctttaaatattgctttgattcacgtttaaattaattattagaaatattaacatagggaatgttttacttataagtgactggtatttataagcatgtgccccacccaaaccccttgctacaattaaatagatgatacttcaaaaaagacatcaaacctttagagaatgtgtagattcagaagtttcaaaccagcaactacataggaagttgacaaagagggttaggtgtcaagtggtgctgtaccaaaccctccaggggaacggtaactagcattgtctccaaagaggttttcatttctctttgtcacactgcctgaaattctggcaggtatctcaacccaaatgcctttaatgaccagcaagaggattacatttatatttataaaagcaaacaaaaactattggccttgccaactaaaacatgcatacactccctgtagattagagaatcatttaggctggagagtaagtgtgaacacttctgggcacgtcggagtggttcttcggggtgtcttactgtaatcaggtacacgtagcgggtaggatgtggctgtctggtgtgacttggtgtcccaggcttggctggggggcatagtctgccacagggcgccagcttgggagtgtgttccactgaacttaggtcattgtttaagctatggcaccgtcacaattctagcctttcagtctcttttgttaaaaagtatattttgccatttatttaagtactttctaaatgtttttagatctcaaagacggaattagattggttccttcaagatttggaaagagaaattaaaaaatggcaacaggaaaaaaaagaaatccaagaaagactaaaatcactgaagaagaaaattaaaaaggtttcaaatgccagtgaaatgtaagtaatgattgaaaggcagtaatttttatttaaaaaaaaatattgtggcttttggttattttcacatttttgatatttaatattaaactacatcaagtaaagtaaaaatgaatactgttttcattgttttgtctcatttaaaaaagtattcattgagtaattatctcacctgaatttttttctaaacttaacattttttcagataaattatataaaagtgagagtagcatggaactgagaatccccaaggaactgacttccttccagtttgaacaccatccctttctctggccctcttttttcttatcagcaaaacatgggggctggtctaaaatctaaggttcttttcaaaagtaagattctgtgatgattatttataattacttttatcctgaatctataaattattaaaatttgtcttgtagtgtgaacgatttgataacatatacagatcctaggaatgattgtcaggtgggccaagagtgtgttttaagattctctgtgatccatccctaacctccctctgctcttaacagtgataggtcaaattcttcagcttgtttt

SEQ ID NO: 102338 - DNA, 1018 bp, Homo sapiens
ctcagggtagcatgaaagaagaggcagaacccgccttgtgcagggcatggctcaagaatcggagattcacacacttgttttgaaggattatcagagaatgtgagtgtgtgtgtgcgtgcgcacccgcgtgtgtgcatgaatgcttgttttgactttaagttctgttttaaagagtagaaggctgttttcattttgaatgagaatccacatcttctcattttgaataagatctctggttacactgatgatgatgccgcagtacctgtgttctctgcttgagctgcacatcttagactgagatagggtgatttacctgtaagcatatgccttagagtgaagaaaaaggtgatctggaaggaaaatttcccaaaagggaaatgacctcaaattattttcctatttagaagatactaaaaatgaaacaaaatgtaaaaatatatatattaaaaaatcaagaaatgtttttaaggatatgggtgcaatttactgtgtgggggtcctgttaaaaatttttcaaaattaattaatatttggtgattatgcttttataggtatacccagaaaaatgatggaaaggaaaaggaacatgaattacatctggatcagtcccttgaaatcaggcaaattaagcttaaatttatttttaatatattttaatacttttaatgccaggagtacaagcacagtagactttgaaatatattgttgcttgtctatttcttttaaataattatgtttctgttttctttatttctatttctgttgcattttaaaaattaatttataaatatattctttgaatatttaaatatttttattttacaagatttctgcatttatttcccattgtcaatataaaaatactgaatttattgttgtcaactttttttggattaacttgaaactataaacatgttgtaaaaacttttcttttgtgttacttggaatattcgtctccactgtaggctggtagtttgttgctgttattgctttataattataggttcattaaattttt

SEQ ID NO: 102339 - DNA, 1054 bp, Homo sapiens
cagcctctcgagtagctgggactacaggcacgcaccaccattgtattttttgtagatatagggttttgccatgctgtctaggctggtcttgaacttctgggcccaagcgatccgcctgccttggcctcccaaagtactgggattacaggcctaagccactgtgcccggcctatacagtttattaatgtcaccagattgtactccacctgccctcataaaaatggtgaactggaacagtaccctcaccttgattctcagcatgcccacctaatgtgcacttccatttcatatctgcctttgatcacttataaagcacaaagagcacacttgagcctgtgtattgtgtagtaaaatatgagatgagaaactgctctggaagatgtagctgaggctatcgtggtgtggtttcaaagctcatccagcctgaaacctttgtcatctcactgtgaaattttgttcaagaaagttttttttttccttcaatatttgtagcaacacacttacaaatgagaaaatgaaaatagaagagtatataaagaaagggaaagaggattatgaagagagtcatcagagagctgtggctgcagaggtgagtccatgacacttagtgaccactatggcatttgtcatttgtttttgtgtttctttaatgacatatgaggcataacagacattactgaaaagtgtggtgcataaaggatatcctgtaacccataatatatcctccctaaaacgaccactctttttccttgcctatagccttgtaatgttttaccggtattatgttgttacttaaatgcactcatagtgtacaccaaattttgtaacctgccttccttatttaccattataattcagccatttcctatattatacactttgaatactttcatcatatttaatcaagtgatgtaccatgaagtagccaaccatatttgccaatacttggaaaggaacttgaaaataatccacatattaagaatacgctccttctgcccctagaagaatatatagcaatgtcagtacactgtttcagaaactactgagacaaaaa

SEQ ID NO: 102340 - DNA, 1050 bp, Homo sapiens
attttacatttcctgcagtgattctcacaaaaatggccagttggtttgtggggaagccacagagagtctaaaatcttaaaagcataccccgaagcttttgatgcccttgccgagaacagcttctctgaggcttttctaaacttgcagaggatgcagcctttattaagggttattctgctgcaggaccataggtaatgcacactcgtgtacacatgcagttaacctggctctgtgcttatatatagcttaagcagaaagccatgtacagttattcatatctgcaaaaaggatcatggaaggtatgcatttgtgatgtcattttgttctgttttcaaatctcaaagtctaattcatgttcacctatgatacaatcaagttctgatgattctgtcatgcttcatttaaggagaaatgggaaagtggtttgaatgtttaagttttaacctttaaaatagtttcaggctgtcatttgtaaaatactcatatgtcttctgatctactggcaggtatccgtacttgaaaactggaaggagagtgaagtgtataagctacagatcatggagtcacaagcagaagcctttctgaagaagctggggctgattagccggtattgcagtttcgtgggtgttctcagcacgtcatttagaagataaagctaggaccatttgagaaaaacattattttgtattaggaccattttatttttaatagttatataattgatacatgttcaattgtagaaaagttaagacatacaaacaaaaatgataaaaatcattcctaattctaaatggatagataacatttgtattttggaataaattcatgaagtgtttgaaaaaatgaaaatttatgaattatttttactaaatagtatataggaaatttattttcatattggtaattacatatctccaacctaattttgaaaagttggatagtaattgagcatagaaacatgtcatgatttaccaaacactgctgtgctggaacagtggagttgtttgtgaatttgtgttaatataagccaccctgcagtgagcatcctta

SEQ ID NO: 102341 - DNA, 1189 bp, Homo sapiens
agaggaggcggccccctgggatggagacagctctggggagtgtggtggccatgatgttccatctgtcagctacatggtttagctcagaaggggaaaagtgtaaccaggtagaggctgaaggagggccagtaggcaggcaaaatggtctcatcttacagagaaaatagtgacttatagagataattatttagaagtctgagccctcctactcttgttctaataactaacaagttattgtcaagaattcttttaaaacgaaaatatttaattcatggtattcaggtttcctgtgcacggagcctctgcgctgcgttactgtatttattcatcggcctttgtccttgggcgtttcatccttcaagggaagccctaagtgatccatggtgtggtgtgttcctcacaggttcatcccgagttactccctgagtcttcaggcgacgatggccaagggcttgtgacttctgcaagcgacgtgactggaaaccacgcagcacttcacagggatcctagtgtgttctctgctggtgattccccaggggaggctccttctgcgctgttgccagggccaccccctggtcagcctgaagccactcagctgacagggccaaaacgggctggccaggcagctctgtcagaacgaagccctgtggctgatcggaagcagcctgttcctccaggacgtgctgcgcgttcaagccagtctccaaaaaagccgttcaatagtattattgagcacctgtcagtggtattcccatgttacaacaggtatgaacagaaaatgtctgtgactgtgtttaatactttatcgaactgaggtttcctgattagataaaatcatggctagttaggtgttaacatgaaaagggttgcataattgttttgctcagaaagacagttgctacatttctttctttttgtaaatatagagataagtattttcaaataaattggtgggttttttctttctttttttttttttttttgagacagagtctcactctgttgcctaggctggagtgctgtggcacagtctcggctccctgcaacctctccctcccgagttcaagcgattctcctgcctcagcctcctgagaagctgggattataggcatgcatgactaagcctggctaatttttgtatttttagtacaggtggggtttcaccatgttggccaggctggtctcgaac

SEQ ID NO: 102342 - DNA, 1049 bp, Homo sapiens
aattacaggcttcaaaattgaaatttgtaaacaatggggcagttaaaatatgattagccagcaggcatggtggctcacgccaggccgaggcaggtggatcacctgaggtcaggagttcgggaccagcctgaccaacatggtgaaaccccatctcttcttaaaaaaaaatggcaaaactcgcttgaacctgagaggcagaggttgcagtgagcagggatcgcgccactgccctccagcctgggcaacagagtgagacactgtctcaaaaaaaaaaaaaaagttatgctttttagatagttattgttgttatcagtggtcttcagattaattttatgtgcatttgtctttgtttctttgggttgggctgttggattaatattggcatgtaatatttcttagcagtagagaactttctgttgtcattcatcactcactctccctttcagcactgagcttgctggttttattaaaaaagtgcgaagcaaaaacaagaactcactctcaggattgagtattgatgaaattgtccaaagagtgacagaacacattctagatgaacagaaaaagaaaaaggtattttatctagatgttccagtttatccttatttatttataaaatatgagaattgttaaaaaaaaaaaaaagcttcaaaccaaaacctagagagcaatgtactaaagacagaagatggtcaagttgttggataactggttgcttccctcttgtcccctccccgccacccctgttattttcgcagccaaacccaggaaaggacaagaggacttatgagcccagctctgccacccccgtgaccaggtcctcccagggctcaccctcggtggttgttgcaccatcacccaaaaccaaggggcagaaagcagaagatgtccctgtgaggattgtatgtataactgtatagttttgttttttaatgaaaaacaagaagcaaacaaaatttttaatccatgatttagccccattcatttctagacctaatttatttgatcccaacattagaaactgaatttcaatgtacttgaatgtgtcc

SEQ ID NO: 102343 - DNA, 1803 bp, Homo sapiens
ttctgattttgttttctccttttcagtgctttaagcagtggcttaaagggcagagcgcttgcccggcctgccagggtcgtgatctcctgacagaagagtcaccttctggaagaggctggcccagtcagaatcaggagctgccttcctgctcttctaggtagtcacacttcactaaagtgtcatccaccagtgtgttgaatccgaagaatgacaattttctaccactggtgtaaaaaacaaacatttgaagacccttgtgcattgtgtgtcacaaagctaaatacatggaaatcgttaatatcgctgatattaagtaatttccccactctgagtgaatactttgatgattgccaacagtggctaataaaatgacggctaccacactcatgggtcactggggctgcgcagggctctttgaggtgggtggcttcttttggaaagtactatgaacgtctcgaagcagtattctagtgataagaattcttaacatagccaagcgccccacgtttgttccccacgtttgttccccttttctgtttgaaaaacctgttctggtagctccacaagagagatgatactgactttttaaattttttacaagagtctgtattcctgatatgcctatatttttcctcaaagattctgcattttaaggatgggcataagcaaactatattttaataatttatagttaatgttaaaatattggctgatttagaccaaaagattcaaatctcctctttgtgaaatcccatctgcatttgattttttattattttatgttcccccgttagattgttttaagtgtttgcttttcatcttttatagatgtaatctgattttcaaaaatcattaacactttttaattagtatcgactaagactttttccccctggaatcgaggctgtgtgtccgtcatcccagcccccggttggagcctgctctttgaactccgctgccttccttagcagcttctgtcctcttctgtgagtcagtcagcgagtgcttgggatccgcatccagccgtgctgagcacacaacaggctgtgtgtggaaatggccaccaccattctccttccccaccccaccacaaaaagagaagctgtgtctttagacaaccctgaggtatctgtgttacaatcgttctgtgtttgatatttgtgtaaagtatgcatgcagtcttgtactgtgacctaagaacaaaactgtaactgcattagaaaccatgaaaaaattagatattgttttgtgacttttagacagtggtaaatatagaaccatgaattctggtcacattccatttctctccaacatgaaggatcaaaaaatgtttttcaatgtgttctttgttccactggaaacttagagtcatgagtttatgagctgatttggtcaccttcctctgcctttgttcactgtgagttctgatgtcttagtgacttagttcttagaagctcacgccttagtttgaaacagattctccacggtggtccccaaaacactgtctgcatatccataagaattgagcgctatgggtgttaacgtgcatgaggatcagtttgcagcagcaagtacaaaaggagaagaggaacatccgttgaatgagtgtgttttgtacataacttcagatacttgtgaacatgccttatatttgtccaacaactgtcagaataaagaacattctaaaatgagaagttcactgtcactcttgtccattctttcttagagaagtttaaaaatgcattcttctggaaaacttaggacatgtatgtcatgctaacattttaagagtgctttcgtcag

SEQ ID NO: 102344 - DNA, 1107 bp, Homo sapiens
cagttgtgctgtcattttagtcagcgctattgagaaagagcctaacgaacagagttttattttcttctgttccttttgaagggacctcatccatgcccatgtgtgatatcactgggaacttacatttgccctggcccttctccttgcactcttgaattcagacatctgttgagattccccaaccaggaatgaagacatgtctgagaggcagtgacgggacgaggtttctcatccccacacccgggtgctccccgtcaggtgtgtccaggctgccacgtcattatcagtgggcatctgtcccctaccaggacctgggccttctccaccctggtatccaggtgtctcagtgaatgtctggatctttaaacaaattgatgatgaaggagacctacgtttgctaataaacaaggtagaatggaggaagcatgctaatttgattggtggctgtcttttctctcccaggaagtgctctctggcgtggtggtcatatcgagtaaggattcagtccaacaccagggagtgtctttgaccatggaaggaactgtaaacctccagctcagtgccaaaagtgtgggtgtgtttgaagctttttataattctgttaaggtaagaaagaatgcttagattgcaagtttttagttcaatattgaaatgttgggctgggcgcagtggctcagggccaggcgcagtggctcaggcctgtaatctcagtaatttgggaggccaaggcgggaggatcgcttgagcccaggagtttgagagtagcctgggcaacatagcaagaccccatctctataaataaactttaaaaattagccgggtgtggtggtgcgtgcctgtagtcccagctactcaggaggctgaggcaggaggatcccttgagcccaggaattcaaggctgcagtgagctatgatcacagcactctactccagcctcagcaacagagcaagataccatgtctcttaaaaaaagacatgtttatggtgggtttcacttgctgtgtgcctttattgttatctgttgttattttgcaagggatggtggtagttacacttctgatatttactaatcaacctgcgaaaatggagatactttgtttctaagta

SEQ ID NO: 102345 - DNA, 1013 bp, Homo sapiens
gcccactgtctatgtctgcttggaggaaggagagtcagtgaccaaggagaacatacggaggtgacggcgattttggccgtgagagccaagtgtgattttggtgttgctgcaactcctttgcttagtgcagcagatgtgttcttgatcaaaaagttggactcaaatgcactgtaaattactttgtgtcttggaacgctgtaggggagcttattggttagaaaaatcctgcagtaaatctttctgtagtgtaaatataattcatttgtttttataaatccagaatgttttacattcttaaattctggcacatgtactcatgaaaatgacattgttaaatattatggttgtgaaaaacataaataagagatttactccccagcatagccaggttacagtgagaagaaatttatacactgtggactgagtactgttaccttaagaacctcaatactaccttaattgggcatgcccgtaatttcttatgaaaaaaaaaggagaaaccctatacataacagttcattattatgaagaaaaattgcaaagctaaaatgctagtttttttgtttttttttttaagcttaaatattctactttaacctgctggattcttagtaaatgaatgatcagttgtaacagtgaatgcttgttgtaaggacttagggtataaaaatttaaatctctgagccagaagagatcttaaggtaattttgagaggtatgaaccttttaggaatacagtcatccaaactttaagtaggtctcttcttctgccaataacctaatactcctgaaaaagcttgtctgttaaatcataacctaaactcttatataatgcataagaagcattttcagaattatccgagattgtctgaaaactgggatgcgatcaaaagtgttcatgtagttctccacttggtgtttgttgctgcaaatcttgtaccagcctgcgcctgagcatggtaaagcctgcttgaccaccgcggcgtgtttcgatactggacaggtctcagcctg

SEQ ID NO: 102346 - DNA, 1017 bp, Homo sapiens
tcgctggaacccgggaggcggaggctgcagtgagacgagattgtgccactgcactccagcctgggcaacagagtgagaccccgtctcaaaaaaaaaaaaaaaaaaaaaaaaagagaaaaagctacctttataatggagaaatctggtagtcacactcctctagccaagcacaacaatgaacaccacttcaccatcacaactaatgagacgactgacattcggtaccccttggcatgatgcacagagaaggccacaactcacctatgtagtattcctgccaaaaatgtttaatccgtatcagttcataaggaaacaataaggaatatccaaattgaagggcattctgtgaaacaagtagcgtggattcttcggaaatatcagtgtcaaaaaataaaggcgagataatttttctagactataagactaaagggacatgagaaccaaatagaatgcttaatttctgataaaatataaattcgactatggactataattgttgtatattggtgttgaatttctccagtgtaatatttatattttggttatgtagaatactccacatgctgaagtatttaggatcaaagtgtcaagccgtagactgtgcacatatgtttatgcacatatgtgtataggagaaagaaagtgaatgtggcaaaatactaacaattgctgaatgaagttaaaagctacatgggtctactttgtattctttttaaaaacagctttataaagataatttaaaatacgaaatttaccctttgaaagtatacaattcagtagttttttagtgtatttgcagagttgcacacccatcaccacgatctaattctagaacattttcaccccaaaaagaaaccctgaacccattagctgtcactcctcattccccctccctcctgacccctggcagtcacaaattgactttgtctctggagttgcctattcttgacatttcatataaatggaatcgtacactatgtggcccttttgactgacaggcttcttttacttcgagta

SEQ ID NO: 102347 - DNA, 1014 bp, Homo sapiens
gaggagggcaggcattaccaagttaaaacctcctgaaagacaactccattgggcgaccgtctgcgccgcacagcctgacgggagcgtcatccttcctgcgcaggctgcaaccgacagacaggctcggctccgcctccagccgcggggcacgcggggagagccgttcctccctccctccgctaacccggacagcaaaggagcatttccggcgtaagactgtccctacggaaggggtggggctagcttggccccgtctttcacgcccagagggggcggggtgaaccgtgacagcgcttcggcccgcactaaggccggctcttgtgccggaaggaggaaggcgtgggcattcgcccctcggagctagggagtgtgtgcgacgccgctgcgaggtcacgtgagccactgccggcagagagggaaaggggcggggcccagaacgaagcggggaggcgccccttgtttccctggggtcacgcgcagccggaagtggcggctgctgcggagaattggagatggggaccgccctggacatcaagattaaaagagcgaataaagtttatcacgccggggtaagtgggggctgggggtggggatggaggtggggttgggcgggtctgcaggttccgctgtctccatcgctctgcgcacgtcccgcgtccctaggcggggcagggctgtcccgccaggtgcgtctccgccaaggtgggtgcgttcccgccaggtgcgtccccgccaggtgcttcccgcgcgaggctggctgccctgcgaggaggccccagggcaggcgccgccgccgcatctgcgggacgtgcagggcaggcgcccagctccggggctgcgctcttcccatctggccccttgaacacccggcggtgttgggttctcaggcttgagctccctcagtgagcgctgagggcggaggagttgacgaccaaactcccctttccctctctcctaaggtgaccgcaaaggtctaatgaacgaaagctaaaacaaaccttggaagcagaaatg

SEQ ID NO: 102348 - DNA, 1152 bp, Homo sapiens
tcgctcctctcggagccgcgggcgctgggtcacccgccagccgggctccgcgggccgcgagggattgtgggtgttccccaggcgcgtgtcctggaaccgggtgttaaatattcagatccgtgcgccccgcgtgaagggtggaaaggcacggcccccaggctctggggcttggagattggttgcaaatgaaagactgaaagctggagtgaatctgcctattatttttattcccagcaacagctgaccccagatacagtttgtgggggtggggggcgttactgcagggcagggcagtgcactgttaacgtacttcgtttattgagttaaaatctcttgtaaatgttataaatgaggattttgccaataagcagaaggtcaaatttcattttgacaaatgatttaattaaataatgcggtgaaaagtgctttttgtttaaattctttgctttttgtttaaattctttgattctgatcattattttttaaagtgcattgcttttgggataacatcagaaactatctgtaaaaagaattagtatcacgaatgcctccctcttaagaatataaaatgttttacaggccagcagtgatggtgctgcagctacaattgcatttgaaggttaataaatggtattttcaaatattcaggtcttggtttgcagctcctctctgccctcagggctttggtctctgtcttcaatgttttcctggcaattcaaaactcagcgattttagaacaattcattagggacttgaaaatcacagtctagtctatttgaattcaagaagtggatccctttccgctagactcacccatcattttcaagtggtaaaaaatcaatctcagtagacactgcagagaaacaggaaaagaaacacatgtatcaacattgtatacttggtttttttgttttgttttgttgttgagacggagtctcgctctgtcgcccaggctggagtgcagtggtgctatcttggttcactgcaacctccgcctcccaggttcaagcgattctcctgcctcagcctcccgagcagttgggactacaggcatgcgccaccattcccagctaatttttgtattagtagagatggggtttcaccatgttggccatgctggtctcgaactcctgacctcatgatccacccgtc

SEQ ID NO: 102349 - DNA, 2619 bp, Homo sapiens
ttaagggttcctctgtgacccttttatagtttatgtgtccaaagtattaatgaatatatttagcattttgattttgaggtgttttaataactcaggggaattacctttagcttttgtgttgtttaatttctcatgtcttgatcagttactttaggataatattgttttcaagtagacttttaaaaatgtgagaccagaactaaagtttcatgtgttaaggttttaagctgcagaagatcatttcaaagaaactggttatgaaaaaagcttacttgattatagtcaagattttttacgcatacttcaggtatcccagtactttggaggattttccctggtatagcagtggtgtttatggtagctgtccaaatttatttatacttcaaaccatgccagaaagttaaggatttctgtcaatgtctacacctagttctcttgttaagactagtaaaaagttctcttgtaaaaagttcatttttacctcgagaggcataagctcagagattattgcaggaggaagggtcaccccttgtgtttgcgccatgaaggcacactcctttttacctggtgggtgttgaaaaaatatttgaaggaatagacctgaatgaatggtaattattggtaggggtgggaaatggactaaatgacctagtgagatctttgttttgagatctaagtataagatcatctcttaaaccttttaacaatattttggtggaacctattagaaacttaacacattattgtgtgcaagatatctaaaaataagtccagttttttagaggcagtaacatttaagataatttaaaacattccatattagtgtaatgtcttgttagggaatgtggacagtaaaaacgaccatttgttaaattttttttcccctccaaaatattgtctgatgtttgctccttcgtgttacttatggagagttactgtttatgacttaaagatatgggggtggagaggcctaggtaactgcaacaatgtatttaggtaatttacattaggtttttagagggctatgactatctgcaaaaggaaaattcaagataccttgttataaacatggtatacagtgacctttggcatgcattttgttttgtaactacacgaagtgttaatttggattgaatctttgttttcacttgaaaaccttttttttttttttaagaaatagcttggaaatttaggctgccctgaggtgttttcgtgtgtctgtttatggttgacaagtatctagttatgagaagaaaatgtggatagaattaactgtattataggcgagaagggaattgccttataatcttgtgccactgaacacaagattagtagaagagtgggcttcacttgtgactttcttggtatttgtgattaggcgtgtgccagtttgtctttgctttggcattagctttcctcatatttgagaaggctttcacgtttcctgtacacacacaggaagcagtttcacccctccccaagaaaaaacttatctaaacccagcaaaacccaaaaacttccagaaagtctttatcaagaatttagttcctcatccccaaagttgtgttagtcttattttgtagtaatcataagcagttatttaaactgaaccaagaatctttactttctgttgagtgttttggtgattttacctccatatatgttcgtctattttcgatttagaagtaaagatattacgtgaaactattagtaatgtttcctgaaacttgatactaacagtttgctctgtgaaagtgaattgtgtgaccagtgtaatagcaccttatgtatatatggtggttttgccttttaaaagactttttaccagatgttatcttgactgttgggcaattttctgatggctagagaggtggtaatttatgacccaaagcttgctcaactttggattaaaaagtttggagagttaaaatttgtgtttaattacttggaaaaatcagcaaattatattaaattacctaaaatttctcctcagttgctcccaaatgaagaaagctttttgaaatcttgccttatgtcagtgctacaattttaagctagagttgtaaagtttaccatagagtgtttgaaagtgaaatgtagacttcatgtgactaaaataatcattgaaggttcgttcatattgggtaattgaagaaagatcttatttgttaatactggctaccagcagccttagtttgattattatttttttatatggaaacaaaatgatttggaaatattgcactgcgtaagccagctaggtatttaaaaagttaagcttttgctttgaaatcctacttccagagtactaaaacgagtgagaattgtttattggtgataataccctacgttgaacacgtgaaatggtgtggtttcttttgggcatatatgttttgctaatgtagaaccattttggtgtcttggcaattggttcttataccagagctatgtatcttctcttctagaaagcgatatttaaaagtttgtattactgttaaaactaggttttgacaagttacataatttttttttggtttggggcagatgctcatatctgatacatagtgagtaatagcttaaaatgtgtctttgttcttgtcagtgaatattcttgtttta

SEQ ID NO: 102350 - DNA, 1206 bp, Homo sapiens
cttgaattcctgtggatttgaaaaaagagaaatataaatatctaagattcccttaaactatgaaatattattagctctagtacagacttgggaaaactaatggttcccaaacagtcttctggagaacttgtcaaagttaagagatttccaagctcagatgcctctctttctgtaggtttagagtgatgctctggaatctgctttctttttttttgagacagagtctcgctctgtcgcccaggctggagtacagtggtgcgatctcggtttactgcaagctccgcctcctgggttcacgccattcttgtgcctcagcctcccaagtagctgggaccacaggcgcctgtcaccacgcctggctaatttttttgtatttttagtagagacggggtttcactgtgttagccaggatggtctcaatctcctgacctcgtgatccgcctgccttggcctcccaaagtgctgggattacaggcttgagccactgggcctagctggaatctgttttcttaaggactccaggtaatcctgatgcagtaggaacattttgagaaacaccaataaagttcatttctcacatattagagaaggaagtgggtgcagagaagctgagtgactaatcagtgcctcagaataagcaggcctgggactagcattgtttttcctgactcttcgttctttgttctttctacagaagagggaataaaggacaaggtgtacagagtgcagtgggattttataggaatagttatcatcttaaagtaagtatgtggcttttaatgtgggagcttatgtctagtgaatggttggcccagttgtcctttttgccctatagaaaaataatgtgaatatttaaatactcaagtgaatgtttaaaggttaagtgaatatttaaaggtgaaaagctgaaggttttaagtaaggttttgttagtatcagcactattgtgggcaatgtatatacagcattagaatagatgtataggcagctacttacttgacatgattagaaggaacaaaggtagttcttgtcctcaaattactactttccttttaggttgcttgtaattttcactgttggaattcatttcattagattaagataaaatctggaattctctagtttaaaattttaaaattagaatattcctagaggaatattactttttttttttttttttttttttgagatggagtttcacttttg

SEQ ID NO: 102351 - DNA, 2509 bp, Homo sapiens
gatggggtttcaccatgttagtcagggtggtctccatctcctgacctcgtgatccgcttacctcggcctcccaaagtgctgggattacaggcttgagccaccgtgccccgcatttttttttacttgacctatgttagaaatatttccatgtcagctcacagagctcccattttttaaaatttgggacagagtctcgctgtcactgaggctgaagtgcagtggcatgatcatagttcactgcagccttgacctcctgggttcaagcgatcctctcaccttagcctcctgagtagctgagattataggtgtacaccaccacacccagctaatttttaaattttttgttgagacatagtcttgctatgttgcctaggctggtcttgaactcctggcctcagtgatcctcctgtcttgtcctctcacagtgcagctgtgagacactgcccagcctctattgttcttaatggtcggaaagtattctgttctatggttgtacctctgtttagtcagactgcattaaaggacatttaagttcatatttttgctcttttaaacaatgctggtgcgtacttccttgcatgtatagttgtgttctgtgagtattggccataggatgtctatttataaggaaagtggctggttcaccaggtatatggatatttgaatatatgttgccatattgtcttccagaaaagtagcagtagtttatgctttcaccagcagtgtctgagagtgtatagtttctcaaatctcaccaacactgttgttaccttagatttttgtgaatgtaataggtgaataatgatgtctagttgtttggatttgcatttctttaattatgactgagtttgaacaccttaagttgtactataagatttttattttaaataacaaaataattcattcttcatcagatgtatgttatagttaaagtatttcctgggggccaggcatggtttctcacacctgtaatcccagcaatttgggaggccgaggtgggctgatcacctgaggttgggagtttgagacgaccctgaccgacatggagaaaccctgtctctactaaaaatacaaaatcagccgggtgtggtggtacatgcctgtaatcccagctactggggaggctgaggcaggagaattgcttgaacctgggaggcggacgtggtggtgagccggagatcacgccattgcactccagcctgggcaacaagagcgaaactccatctcgaaaaacaaaacaaaagtattttttgggttccctttatttcgttactctgttgattgaataactgatgttttgataaattgtaaatgcctacagaaaagggggctcttgttcttcttcaattgagtgaacatttgcatgtcctctgtatgagatatgagtcgtggtagaagcttttgattataaaagtgaataaggtttggttacatctgcttttaatgttgagataggtgtgtcaatacaggaaaacttgaacacagataagaccatggccgttaacagttagaggggttgacatgtggagagctagaagagcacaggaagtaagacaattatggggattcgagtgtgcattgtggagatgggactgggtctcgatcttgaagagtggatggatgggctttttatggtggaacctgaggacttgacagtctattggaggaagtcatgtgggcaatgggtggtggtgggaaatgaaggtgactttgaagaatgacagagtcatatccctggagcatcagatgagggagagagggagggagagtgagtttggtatgctcagggagtgaaggggacacttgtggacatgagagtggggttgagtcttaatattataaagatatgaatttggggcgattgagggtttttcagcagggattaggacagatctgtgggttggagggaggtgacactgtaagaaggagggtttggaaggcaggaccattctagatgtaatgtataggcatgagggaatacgaagaggtgaaaagtggaagacagatgggaaaaccttaaaaatattcttaattatactttaatttccaacagaccaaagtgagtatttctggattcaaacagcaacatggccaagtttttggagataggaaaaagagtattaagctttgttggcagtatactaaaaggttctaggaatgcagtgattaggttttagtgggacatggagaatatgtcctactgaggacctgaaggaactgttgaggaactgaagatagaattattattgtagttcagaccttacattagggacaggtggaaataatttgcagcaccattaaatatgagctaaaaaatagggcagtgggagagggcaatgtttgaagctgtgaatctgtaaaggaaaaggttgtatcataattcatggtttggaaaatggagagtagctgagcatgtgagcagtttcattttttctgagcatcttagtatttgcctgaaaaaaatctcatattctctttattttttcatgtatcctaattggaagactgg

SEQ ID NO: 102352 - DNA, 1022 bp, Homo sapiens
cgttttaagattcacgggagacagtttgtaggaaggctgtttgctgaataagacaaagatacagacatgcaaagtaaaggatgtgggcctatagggaaggtcaaagaataaggaaagttcacttgagtgagcagaaatggaagagggatttaagcaaatagatgaacaagaattgtctctcctaaaaaaaaaaaacctacacaattatttgatgatttattatgacttttggggtagagaccacgctagtcacaggatctgcaagccctgccacctggatgatctggctccagctggctcactgcctcttctcaccagtctctggatcatgtgactgtaccggctcctagtctttgcatatgctgcttccttggcttgggatcatcacttctatcagctcttctatcccttctatgcgctcttcgttttaaaaatctcatgtgtccttgtactcttccttcataacgcttattacagttgataattttttagtgcttatttgattaatgccctccagagatgaggaccagtagtgttttgctctctcttgcaatctcagtggttggcagggtgcttggcacatagtaaacactaaataaacatttgttgaatgaatcagtgaactacatgctttggtctttactagttggtctcaaggaccaaaaacctacagtaggaagatgtttgttggactaagagattagcaggaaatatgagagctttgaggaaaaaggaaaagatgaagttttttaaagataggattagaaagttctatgtagtcaggagaaagaaaattattcgtggaataattcaacaaatgcacatgaaatgcctactatgtattgagaattagatactggaaatgtggagtggaaagattctgtcttctgtattaaaggagtgtataattgtagtagtttactgaaatggggacagtccttagtggttgtttggagcaggtgtaagttgtggagagggatcagcctggatcaggatattcttcactcttctagccgacacag

SEQ ID NO: 102353 - DNA, 1037 bp, Homo sapiens
ctgacagaatagttcatttggattctttttggctttaacttcaagtttggacaacagaacaagaatgaggaaaagtttgtagtatggacaagttttcaaaagaatgagtcgtgtagttagaaaattgaagctgttgatcttgtcagctgaatgagctttcttaaagcttataaagggatatgtttgaatatagttttataacctttttcagtgactaatttctgtagtaaatatttggaaaagcaaatcatcacataattcctgcaggtctctttgtgcctggctccatgctaagctcttgggacataatagtgaatcagatggatattcatggttcctgccctcatgaagcttgctttctttttttttttaaaaaaaaaaattaaatttttttttatagtgatctcacttttacggggatctcactttgttgcccaggctggtccaaactcctgggctcaagtgatcctcctgcctcagcctcatgaagcgtaagccactgtgcctagcagttgaagctttcagttagtcagaactccctggagtgagtgtaaaggaaaacctggcttgtggattgggtgagcagttgtattgatttacttatttatttataatttcttgaacttagttttggtagcaccgttttaaactactttaaactacttgttgctttatttctggtaacatagggagtgtgggatcacacttactttaccaaggtaaaataaaaacttggatcttcaaccttttggcagattattttctaaaaaaggtattcttgtaaatctgagtttctcctcttaaaaagcaagctactatttagtaacagtaacaatagctactattaatcagttacctgcagcagaccagccactggcctactgaatgaataactatttattattagttattttaatatacctagaaagtgattggtattatccgtgtttacctccagataataaaaagcctaaacagttaagtgccgtaaagttgaacatttagagaaaaagaagagtttctgtaacccattaact

SEQ ID NO: 102354 - DNA, 2341 bp, Homo sapiens
tggaaagaatagctccatcttttgttctcattagttccttcctttcttattgtattatcatatatagcatttataaaattattatttgtatttgaggcatgtcttggtctgtttgtgctgctctaacaaaataccttggactgaataatttataaaaaatagaatttatttttcacagttctggaggctgagaagtccatatcaaggcaccagcggattcggtgtttgccgaaggcctgctttctgcttcatagatgatgcctcttgccgtgtcctcacatgatggaagggcagggcaacttcctttaacctcttttacaaggacatgaatcccacagttccccaaaggctccacctcttaatactgttagggcctaatgtagaaattctgtggggaacaccagtattcagactggtcatagtctgtgctgctgtaacaaaacacaggttaggtagtttacagaaaacaaaataatttcttacagttctggaggatgggaagtccaagataaaagtgttggcaggattgatgtctcgtgaggatccagtctttctgcttccaagatggcgtttcaaacgctgcaccctcttgaggggagaaatgctgtgtcctcacaaggcagaacgtgaaagagcagaagagaccaaacttcctctgttaagcccttttataatggcattaaccaatctgtgagggcaaagcccttatgacctgaacatcttccaaaatcctcatctcccagcactgttatgttgtggatgaagttttcaacaaatgaattttgggggacacattcagaccatagtagggcctttgatagattgagctgttttggtggggagctgtctctttctggtatccaggatgcttgccacatgatgtgtagtctcagtaagtgagtgcattgataaagaagtatccatgatgtgctttaccgacagcaggtagcagtactctctgttactcaagactgcctctttgtaagggtacaagtagtttcagaaactccactctctgtttagttgggaggatgtgctctcaaagaggttacctacaggcacatttttaccggagtttaataaactgtcttttttctgggtacatataggtctctggtctggaagatggggtcttgactccccaaccaccaatagtaaccatctggtaggagttttgaattatttgttaaagaagtatgctgatatgagatgtcacaatgtacaagcctcttttcaaatcaggagataaattatttcagaagaggtagaatgtttattttgaaacattttacaaacaggtttgttgtaattctttccttgtatttgttgtcatataacatgttgaggttatctgttgctgcttaacaaaccatggcgaaattcagtggcttaaaacaatattcatttctttgctcactgtgttccaatttgggcagggcctgtctccatcccacgtggcatctgctggcactgggcagtccaaggtgatggattcccttccatgcctggtgccctgggcatcttcctccaggtggcctttccacctggcacacttgggctttctcacagctgtgactggtttccccacaagtgcgcaaagttgaggctgccaggccttcttaagacttacaccttgaactggcagtgtcatctccactggattctgtaggccagaagcaagccacaggccagcccagattcagggggttcggggtggggtggggattgtacaaggtgtgaacactggcaagagtggtttattgggccaccaaggaacactaccacatgaaccaagtctctttctgaaagggaaaaagaaagataacttttttattctgtttgttttttattgtctaatcctactgaccgattcattttgtaatgcagtggtgtatttctttttttttaaacccttttttttttttctaatttttttaaattttattattattatgctttaagttttagggtacatgtgcacaacatgcaggtttgttacctgcagtggtgtatttctaacttttgctataactccattcaaatagcagtataaaattaatataatttttcaaattcagttgaactgtactcatcttgatacggatcataaatacagatttgggagtgaagaaagtagaacaatgaatactttatggcaggggtctccagccactgggccgtggaccggtactggtctgtggcctgttaggaattggactgcaccccatgaggtgagctttgggcaagcgatcatttctgcctgagctctgcctcctgtcagatcagtggcggcatttgattctcataggagcgcgaaccctgttgtgaactgcacatgtga

SEQ ID NO: 102355 - DNA, 5457 bp, Homo sapiens
tctgccttccagcctgggtgacagagtgagatcctgtctcttaaaaaaaaaaaaataaaagtgccgtaaaaatttttaggtggtattacaagttgtttggcaagattttgtgtacaacagccctgaaaggtaagtgctattatctccatttaggaataaactgggaaataataggtaaaaccctaggcttcttgattttgcgtaattaaacagactcagaaaaagttatctgtcctgtgtaactgccaatagcagaacaaactgaataatttatagatacttttgtttttacatagtttataaaataccaaatgacaacttgatgcctttggtgtcctatgtggaagactctgctttgtactttggcgatgtcaagttgaatgagacacattgtctgcccgtatggaagttacagtccagtagaggagagaagacttaaaaactattcattataatgtccttaagaatcattttctttttatgaatgagccctacaaccataacaggacaggttgtgaatatattgtacaagttcagaggaacggagaggccacgtgaggtgatccttttgtaaaaagcacagcttgagacaggaggagaaactttttttttttttttttttaaaccgcagagagaacagtgtcggttgctcagaggactcttctttctaccctggtgcatttactaggaccttgtaggcaaataaaatgatagagaaacttgcatagatgaaggatgtgtcccattccctgaagtcaagggaagcagagctaagattggttatgcagaccatgggctaggcactccctacaaagtcactttaatcattcccaacagtcttgtgagtagagagagcagagccctttagtggaaagagcatgagatttttaaaacctagaagtggttggcaatggtggggccaaatctggattgtgtgtggatattcaaataagtggattttccttttttataagacccataagactcttcctcctttttcagcacatttggtttgccttgattttgacaagagtgtgattgctgctaccccattatgaaattggggatagagatctgtggattcattgtcaaggtggaggatgcaggcagggaaagagtgcgggaaccattcctgcagagtttgtggtaggggacctttacaggaaatgtaaaggttaatttatttggcaaagattgtaccagatgtttggggtaaagtagtgaaaaaaagacaaatacagtttgtactttcatgttgttgacagttttggtgtggcattttaacatttactgttcttaatagaatatgtgacaactttctagacaggtactactgtttaggattgggtagctcagtgttgggtttcactgagcatgagaggcgtggagagtttacattacatgtcttccagtggttctgtctttctaaagcttgaaggtactcacgagaaagcagtgagactgtacatcattccaaatgagatgttgatgtagattaagcacagtttttcatcccagaatgcaaattaagaatacaaacacaggttgaagcatttttcataggtgacatttgtagaatgtatatattttaagaacatttggaaaactttttttaacctacttgtattagttccctgtggctcctgtaacaaatcacagatttagtgacttaaaacaacagaaatttattctcttacagttctggaggctagaagtccaaaatcagaatcattgagcctaaaccaaggtgttggcagggccagggctgtgctttaggaggctgtaggagagagccacttgctagtggctgccagtacttcttgacttgtggatgccagcattacttgacttgtggccacattacctcaatctctcctgcgatggttgtgttgtcttctttttgtgtcagattgccccctccctctctcaacatttgtgatggcatttagggcccaccttgatgatgaaggataatcccctcatctcaagattctcaacttaatcacacctgcaaagacctgtttttcccccaaatcataaaacatttataggtttcacagtgtaggatgtagatatcttttggtggaccattttccagcttatcacactcctataaattatttggaaaagtaggaaggttgcttttgaagtagcaacttgtagatatatcataagtatacttccagctataataagaattagtcatagttttataactttttagtgttaacttgatgatccaaatttgagatccaacctgggagacagctcccaaaattttaccacctaatctgttttttataacaatggttttgagcgacttttctctaaataatggaagttattgttcttttagggtcagtgtaagctgacagtggtaatttttatcaagtattaaaaatgagtctgagtttagggaaatgatatgaatgattggaatttattttagcatctaggaattttattgactgagaaagtgcagattgcagaagagtagccaaaaatatactatgattgtaccctttctaaagttgcttggttaaatcaaggttgaaaataggggccaggtgcagtggctcacgcctgtaatcccagcactttgggaggctgaggtgggcggatcacttgaggtcaggagttcaagacagcctggccaacatgatgagaccctgtctctactaaaaatacaaaaattgtccaggtgtggtggtgcacacttgtagtcccagctacttgggaggctgaggcgggagaattgcttgaagccgagaggtggaggttgtagtgagctgagatcgtgccactgcactccagcttgggcgacagaacgagattctgtctcaaaaaaaaaggaaagaaaataggttataattggactatatttttcttattgtgctatattaggtagttaattttggactggtctaatatagcccattgtgaataaaatataagcatatgtagtgtttaaaaaaaagatgttcacacttagaaaggtgccagtggaaagttttcatggtcatgagccaatcatgaacataaacgtgtgtattaattttaatatttgattttttttcttgaacctgcctgttttttaccttttacaaaatactttttatttctctacaccttaagatacgtattttgaagtttttcagatagtcttgttatttctagttcctttttttttttttttgggagacagagtttcgctcttgttgcccaggctggagtgcaatggtaccatctcggctcactgcaacctgcgcctcctgggttcaagcaattctcctttctcaccctcctgtgtagctggaattacaggcgtgccccaccacacctggctaatttttgtattattagtagagacagggtttcaccatgttggccaggctggtctcgaactcctgacctcaggtgatccacccaccttagcctcccaaagcactgggattacagatgtgagtcaccacgcccagccaattctagttcttttggtgtgaaatttggtttctcttttgtaatgaaaggttctttgtatctttcgcaattactgtgtataagctcttcttcacatgaactttggaaggtgttctacattttgagggatatacacattacatattttcaaatatttagagttaatattgttgcaactcctacttcacactgacaatttccacttcccacttcccattccccagttgccaaatgtagtagccataaagagcatcagattgatttatctgccatccctttgtgcaattgctgccatgtttttactcctacttatattatacattatgtacaattttattatttttgctttaagctgtattttaaacaactaaaatttatttttgtttaaaactctcagtttttaaatataagtatccaaaggaaaaatatttatgaaaactttgtttccatttggtatcagttttctgtcttaacactcttcggcatttcttgtgcagctctgctggcaaggacttctctcactttttttcccttcttacaaattttaatctctaaatgtctgtattcagtcttgagtttgaaggttttttcactgaatgtagaattctagattgatactttttgtcttttagcactttaatggtgttccattgtcttctggcttccattgtttgtgatgagatgtaagtggtaatgactatctttattccctcgatataccagtcttttcttctggctgctttcaagattttctatttctctgctttaagctgttttactctgctgtgcctgggtatggttatcatttgaaagattttaagctatggtttcttcagatatttatccctttttttttctgtgactttatttacttgcattatacaacttgatattgttccacaggtcactaagggtctgttcagttttctttagtcttttttctctctcttctttagacaattttctttccctttctctttccctttccttttcttttttgagacagagtcttactctgttgcccaggctggagtgcaatggtgccatctcggctcactgcaacctctgcctcccaggttcaagtgattctcatgccttagcctcccaagtagctgggatttacaggtatgcaccactatgcctgcctaatttttgtatttttagtagagatgggttttcaccatgttggacaggctggtcttgaactcttgacctcaggtgatctgccccccctcagcctcccaaagtgctgggattacaagcgtgagccactgtccctggcctagattagatagtttctattgatctgtcttccaagtttgctgattttttttccctaccatcttcaatatgctgtttaatttcatctagtaaattttgccctttggttattatgttattcatttttagagttttctttttgttcttttttttataatttttatttttctgctgagatcccctatctgttcacacattaaagaccatgtgttcctttaagattttgaaaataattctaattctttgaatgtataaaatagctgctttaaaatctttgctgctaaatttaacatctgttctaacatggggttggtgttttactgactcctttttcccccttattggatcacatttttctgtttctttgctgcctactaattatttttgtattaaaaaacaacaacagaggcaaggtcttgttctgtcacccagtctggagtgcagtggtgcagtggtgcagtggtgcagtcatagttcactgctacctcacactgctgggctcaagtggtcctcccacttcagcctcctgaataactgggactacaggtgtgccccactatgctcagctaattaaaaaaaaaaaaaaatatatatatatatatgtgtgtgtgtgtgtgtgtgtgtgtgtgtgtgtgtgttcaccaggctggtgttgaactccttgcctcaagccatcctgccttagcctcccaaacc

SEQ ID NO: 102356 - DNA, 1440 bp, Homo sapiens
aaaaaacaagctgagtggtggagacagttttcttttacattttagctgttcctctgattatatttcatggggtaggtagatacttaaatgattttttagtgatgtcggcctttgggtgaagatgaggcccactgagaggactctagagcagttgaaccccgcttcccacctagggttggaatcatggcccaggcagatgctgtgggtcccaagctctgcaggaatgactgggggctgccattcataaagcagctgtcccattattggatgtttttgttcttttatctattttctgcctagtctcctgcatccttttcctaattcttggctttagttctgttttcttcaactatagggagcgagtcaagtcatcccacctctgtgagacttgcttgattatttgcaggcatctatgcatgactccttccgtctttcattgtcttgactgcacagccttagtacctccagatccccacccacctattactttctcaggagttttgaactttctcactaacttttttaatgtggatctaggattgaaaagaatcgtgagcttaggaagcgttacagatacaaagactacaaattcaggtctcacttgtcaaatatcagaaaggttatttctgacagtcctccttccccaaatctaaatgtttccctcttttagcaatctttccctccctcataactttagcatggtgtatggtgtgtgcgtagtcatacattagtgtgatttttgtctgttttgaacactatactgtgaagtccacgaggtagaggcacagtgacagcaagcctcactctacatcttcagtgctggacgtcatccagtgtcatggcatcatgtgatttttagggtactattcatgtgtgttcagttatgtaaacttgtttctcagttgtatcaataggcgtaaataagttctcattgttgatgttattgaagtgtatccataagtatgtatggtcattcctctttttttttttaaggatgatacatatatttatttcttaaaaatttcaggggacgtcccagtgttagccacttcttgtcccttctgtggctacatccagttgtaattgttcagtacaacacatcaggtgtttgaaatgcctcaaatgtcaagaaacactaacttatctctggcataccgtactttttaaagcagaagtattttctgtaatggttactacagagtgtttactggttaatttttagttaaccagaagcatacattccatagctattccagttaactgaggtttatatccataaagacattaccagagatagaaaaatttcccttttcttcagctagagaccccaggcaccaacacaccctcaccaccttcttgaaaatataaagtgatgggacagggtgcggtggctcaagtctgtaatcctagtgctttgggaggctgaggcagatggatcac

SEQ ID NO: 102357 - DNA, 2264 bp, Homo sapiens
acccatcatatgagttcaggtgtggagtttttcactggtggcatcatgtctgtgctcaatagatttaaaattttggagcattttggagttttgtattacagatgctcaacctgcacttctgtaacagagtagtttgaatgcttaattaaaatggcagttgaatattatgttaactttggttttatgattaaaccttttcaaagtttttgttactttcagatactcataagtaaggcatataacctctctagacctcactttccacatttgataaaggaacgatttgaattaaatgaaattgaaaatctcttagctctaagtataacaaattatgtgttaaattgtataattcatctcttagatatcatgaagaatgtgttgtttataatatgaaaaagtatgaagataaaaatcaaatatgactttgggtagcaagaagagattttgggggaagttgctaatgtgtacagttttttcccctaagagcggcgagagaatggcagctgatcagactggtggtggaatctgtctctattgcccagcttggcactatgaagtttgacctgtgtcgatcactcaaaactagctgatgacatctgaaagggagttttaccccggctccctgaagtttcacattacagctctacatttgtgttaacacaatgaatgcttcaaaaaaaaaaagttatagaaatcaaagcttacataggcaaatctttgttagtgacttagttaaaaacatttcatgaataatagttgctcaagctattttaacccttttccctttcccagaagagaaacaagaaaatcccacacattttgctcagtcatggtatgtttgtaagctctcttgtcagaaagtgtcactgattctttaaatttcttttagttagctgcttttgtccagtagctcacttattttgtggtttgaagatgactgtacttctgacacttttctcacatactcctgctttaatttttcgaaaaactcaatggcaagaaactgaaaacatatacagaagtggagagaatactagaatgagctctcacgtccctagcctcttggcttcagcagtactcagtgttttgcccatcagattttctaatgcttttagtgtaagtaatgccacatttaaaaatactccttttagaaaagagacttagtatttaaaaggaaataaaccagagtcattcccaagatttatctgattaaactgtagagtttataattatataaattttttttagcacatagaacagtcattctctatagcaaaagtactagcttttgtgccctttgcattggattgagttatagagctaaaccacagcaaactcatttgttccactcttaggttgcaagtatcacttaactgtgcttacttatctcatcttcaatatttacaaattttaactcacatttgtttcagtaaagcaacccaaagtagatgttttaggagatgagttggtttgatggttatgattttcttttactcctgtattgacagtcagctgtagttgagactattagccttctggagggtgaggtgaacagggctttttccacttcaggggctagaggctgacatgcatgcagttacctgcagttcagggcagagtggggttagggtggtaatggtggcataaatactgttgtgccagggtcatgtctataggtgtgtggtgggaagctctgggggagacagcactggcattgggtttggacgtggcatttacgggcagaggtggataaagaagacccatggagtagccttagcaaaagagtggtatttgggtagtaggactttgttcatgtggctggagtgtagatgtgtactaggagatagagtgaaaaggtggaggtaatagtaatttaaaatataacagtaaaaagaagcagctgtgtattgatcacttactgtgcactgttttaaatggtttacaggtgccacatctttgataatacagcaattctgtgggtgcaataagtgatggagccaggagttcacctggggcaggctggctccggagcatcactggtgccttagggcctcaaataccagattcagcaacgctaagcacttttttgggtcttatttttggatggtgatagttagcaggatattaactgatttttaaaaacaaatatatttgtccattgtcatgaactttttaactctgttggagtttaaaaaattggaagtacttagtggttactcattgtggcccctagttacagttcatgaaagggattttttaatgtt

SEQ ID NO: 102358 - DNA, 1016 bp, Homo sapiens
aaatgctttcttcgagtgttttctatgtatttattctactcttctaaaactgtgctttgggaagggctttgagtcctttctaatataatggtataacttcccccctcatgcagtgaagctttcagaagaattcaagtgatcacacaacatcatatctgtgttaccttttgtgttgaacatttattatttataacatttaatttttaatgataaacttttgtatatacattttgtatattctgttatgaaacggatttctaaaattagagattgaacatgaagcagaatggcctacaaaaggaacatgaatctgtgctacagatataaaaactattttgaaggctataggaacaaccacatttgccaggactcatgcttaaatagactgtgtacggctgtggagatcataaattgagaaagcatgatatttgagcaagaaaaatttactgaggtttgttaagatttgagaagagagatggaaaatcttcctgttcagttggagaagaagctgaggaataagtctttgtgcatatgaagagtgttttgtaggctgtgtataggtattttctgtttcttcagaatgtagcaaaaaacagtgtgaacttaagttggtatagaggaatttaggagataatttatgactagggattggaagctattgaaatagtttatcatgacaattctttgaaatggatgagttttcattatatttaggattttattctccttaaggagaggaggggttaagatggtgtcttacaggtatttctagaactttattcccaagatttatttatttacttagagacactttcactttgtcacccaggctgaagtgcagtggcacgatcataggtggtcactacagtctcagattcctgggcttaagcagtcttcccacctcagcctccccagtagctgggattacaggtaagtgccaccatactcggctcattttgatgttaattccagttttctcacctattgcacgtctcctggacttacacagaaaatag

SEQ ID NO: 102359 - DNA, 1970 bp, Homo sapiens
gagaggaatggaaaggcatgaggcacttcgaaaatggataggatttagtaagaccatttagataaagtcagcagcttctaatgaaattactgaaagaatggtggtgcgggaatagagatgggaagttcaagtggataacatgtggtgcaggaatgtgatgaggagttgtaggcatagagaatggaggcagggatgtggcactgtaggcagccacccaacagcttgttagactagatattgagtgaaaagtttgagtggagaagagagtttgaagtattagtttggagtaaaccattgaaaatacttcttttgcagggaaagatgtatagagaaatgagtgaagcggtcaggggatagaaccagaggtcacatctgaggttagggctaaatgtgaaagagacatggattatttggaggatagctagtgttgtgaaatacaagaacatacattttaagaatttttaagggggtagcatttctctgtaaactccacagaagtgtgggaggggaagtaagtaaaactgaactcactttactgcttttagtaatagactcattggaagaaaatgtaagctattcatgcagtgtgtgtttttgattatttctgggccttgttatttttctgtgtttctgagatgcaaggattatttaaaggcaatggtttataaaatgatatataattacatacgtataaaagtacatataaccaactaagtatatgtatgcatgcactcatgcaaatcaattatatatttacattttatatataaattatatatgtgtgtatatattgtattatagaacatcctgtgtggaaaagttggtgctgtcagaagggagagagagcaaggcagttttccagtgcatttcttataagctagttatgagaagggcttgcaggttactgattgaacatattctttctaaatgtcttctgtctgatagatactcctttgttagggaatatatacataaatgagattaccctagatgttcaggttagtgagggaaacgttacaatagatagcactaagcgctggatctcagctttgattcccagagcacctagagcgtcattgggccacctcttctaagttcctcttaagatctagaattgatttgaataatagaaattttgagtacattttgtgtaggtgacataaaagaacatccttaagcaagcatatcagttaaaggacttgtcttcatggctcttggtgttttcttcataccactttgctcttagttcctgttagcagaggggaagaagcaggctctaagatttaaaattcatgctagtgaaaattagaaacaagccacataccctcaataggtgtttgcttaaaatgcatttacgtctttgcagtggagtactgtgcacctggtaaaatgatgatgcaaatataaattgttgatataaagatatatatgtatatatacatatatttaaggagcagagattccaacaccaaattttgggtggtggaattttattaggttggtgcaaaggtaatacagtttttgcccttgggagattgggctgatggtgacacccgttacccaagactgagaatacagaaaggagaagtggattttttctctgtttttcctccctttttgagtaggggaaatggtagattcagtttaatatggccaaaagcagtggcttagtagtcagtttgcttggatttgaatatctctctaccattagtcgtgtgtgatttgggatggtttcacttcacctctctgtgccttagttttctcacctggacaatgggaatgatagtggtacttactttttgtaattatggggtttagtggtttaaagtagaaaatttataccagggcccattaaagataagtcatctcatgcagtgaaacataactgggactttcgagctcagttcactgaggtcttctgggcctggaacaagcccgccttataaaagttggctttacatactacatac

SEQ ID NO: 102360 - DNA, 1448 bp, Homo sapiens
atgcttctagcctctttaacacaaatttcagctattccacttccaaaatgccattggagtagtataatccagcacccatgtttataatcccacatgttctttgaccttgaccaaggttttaatgcaaaattgactcatctgctattggtttttaccttcctttcagtttgtctcctttaatatatatatgttttttttctttttgagacaggatctcaccctgttgcccaggctggagtgcagtggcatgatcagggctcactgcagccttgacttcctggaatcaggtgatcctcccacgttagcctccttattagctgggactacaggctgcaccaccacacccaaccaagttttttattttttggggtagagatggggttttgccatgttgcccaggctggtctccaactcctggtctcaagcgatctacctccctctgcctcccaaagttctgggattacaggcatgagctgctgtgcctggcctaaaatgtttttggtaaagggaaaatatagcaatctgttatatgctggaatcaaaatttttctactagatgaacttttggggaaatttagtattctgttctaaattaaatgcctttttcaagtaattactgctaatgagctcttgttttttcatgtttagggtggttgatgcagagtagtgcatataggggctaaaatcagacttagacacttgggggttcttgcatctctgtattttctcacaactatttcagtgattcttaatgagtggcatcttggcatagtgaactttaatgtgggaccatagttcacaaactgtgaccttaggccagttaatccttctgacccttgctttccctgttgatgaaatggaagtaacactacctactcgtagggctgtcaggaggtcaaatgtgtcaacgtctataaaatgccttagccaagtggttggcacatagatagtaagtgttccacaaatgttcatttccctgtagttttactaaccattttggtgcaatattatattctttataaagtcttgtgttttggccttttttttttttttttttttaaagactgtgactgttttctagggttttgaggggagtgataaatgttctgggtttttaggatttcacttgaaatcctcctatataactgctttttctctgtaatgctgcttgatcatcttattggaaataagagattttttttcttgtgtgttaggcatcaaaactgtgatacttctattttccctttgactcctttggctattataattctagaaaattatttctaaaattgctatatggaaaaagtactttcttctgtcacttctttaattcgttagtgtaaatgagccaaagtttataagagaatgttagttaactgtataaattttagataatgacataagtttaatttatgtaatctaattttagatctagtttttcttgattt

SEQ ID NO: 102361 - DNA, 4584 bp, Homo sapiens
ttattgtcatataaaaactctgaccttgtattaacatttttgtttttgaaaagtggctagcctgaaggaaggatatatggaataatcactagagtccttatttaaagtaatccaaggtgaagatttctggagtttattgttacttagcatatgatggtttggttgctgtataagtcagcagaaaattatgtaactcagagatactttaggtggcctttcatatgagtaatgattaatggataatgtttcaaaaaggtgtcagaaattttgatgtgtcttacctttagatttttaaaatagtaatgaaatctaatttctaacaatttttaataaagaatactgataattgattctactgtcttacaaagaacttttgtgtcagtaatatctacttctatcgaaactggcgaggtgtaagtagcattgtaacattttctgggtgaagaatatgatgttgagagcctaaaggatttgattatatagttcatagctagagattgaatttatgttttctttccccatagttcatgtcataattttaaagactgaccattttaggggaaaaattattagaaaatgatgtcctttgagtaaagataatcttgattcaattatttttacaaataaaactattctgatgcagcactctagtgttcatccatctagtcatacaccccccacaatatgataccagctagttgtaggtctagtgtttaatgtaataccgtaacaggcatttgaattggaatggtagttcttcaggaatggaatctggaatataggcaaagatttcagagacaattcctaatttaaaaataactcatattgtctctgaggttcttttccagtgaagtgtttagtattgctgctatttggagtacaaagttggagcttttaaagaacctgggagttcaaaagtataaggagaaataaatgaaaagcagaaatattttgaggcaataagtatagactcaaatctatattatgacccacttgtagcaccacttggaattctaccaataagagatttatttgggcaaactataatggttgttggaaattgcaaatcttagtgtgaattattttagtccagttggtttctttctttctcttacctgaaatgaactatactgaggcaataggagctttgtatagtaatttaggagtgtaaaacaacttagggaaaaggattattaagcaggatgattgggatgacatcatgtgaaatttaggaattggaggcattgggaattgagagggtgctaacaaaggaaaacagcttattttagaatttgtctggaggatgtagaattgaagaagttttggtatttcttctgcagcggccccagtgcccttgaccaggaacatctcttggagtcagtagttttcatgaggctgacctaggaacttggccaacatatgcaacattgttctatttaaaatattccttgaattaaattcgatagtatcaatttaaaacataaagttttcactcaactcctttagaagttagattttagcttgtacttgtctttacctcttctgctgattatcagttgacaacactgagattactttcattttcctgtaagtcattatgaatttttctggtcaaccatgagttatcagtggaagcaataagtaggaagtactgtaaaagaattacaataaaataagagaaaccacttggagagcaagagggcttgtggacttgggggagcggttgtgagaaatgtctcagaacttaatttacaaataacattggtagattgacatgttgtctttcctataaagtaactttacctctgtcttaatagtaaactactatgaaagtgaattcgtgttcctcttgatttgtgaactgatgaaaattacaaaatgtggagttttttccccagataaagtaaatggtggaatattcaggtttatttgatacctagaaaatacctgaaattttccgtggtaataggcacattttgaaactgttttttttttctctgacaattgaatatattttatatatagttgattttgattattgaagactaaggaaaatttaagtttgaatgttagaaaatgaattttgcaaatttgaagtaattttattctttatgttttgggattgtagttatgttagatattcctcagttggggtaattgtcttgcatcattatctcttatcataatctgtttttcttcacacagtgttatagttttgccgctggactcttccctcccttcccccaccccatcaggatgatatgagacttgaaagaagacgatgcatacaggtgactcaagttttgaaatacagtaaaactctggctaagagaatgtgggaatcgatggtctattttgaatgggggaggtttctgataaatagcagttagtggggggaattgtagatcagtaaatgcaaaggtagttgggctatttgttaaacttacttttgaactcagattgataatcagtgatttatagtggtgttattacaaatacagcatagtaaatgctagcacttaggcttttcaagagctaatattttggtgggaattggaataattctgttaatgtaaataacacagtcacctttatggttgaatgcatgtctcccccagaactctattagaatatggcagatcttttatgggagtagatgttagtaggatatcatcaaaaagactgacaagttaaggatattatacccatacatacggtttcttaaaaagatatgctctgggattttgtttattttttccttgttcccaatatccctgcctcccatttcctttcttcccaccctccccctcttatccttttgtcatttgtatttttatacagaagaagcagtgtgaaggcatttttgaaagaatattttttgattgctctataattaattgaggtgatcttttacatgggaaactggaggctattccacacatggctatgttcaaatttctgaaaatgtagtgcagctaatgtataaagtgttaataacttttgaacttaaatgttcttaaattaggcatattataaggcattttgttgaactaagtgacttaacatttgaaactctgtcagagagccttatttgattatatttataaactgtttgaaaatgtgattgctaactggaaaagaaatatttatataaattttgaattgatacctaacagatgcctaattatatcattggtgtagtttttgtgattggtttttatttttggcgatctgggttttgtctaggggaaaaatcatcattttatgattttaagattttaaaaaattgtttcggtgtactattttgtatgaagaaatgtgcttgaatatatttataaattaaattagagagtatataatacttcacgttcatgtagaagtcaccattttaagaccgatgttaattcttgtttacgtcaaaggtgattgagcaatcatctctgttacgcatctatcatgcatgcacacaggcttgcacatgtatgtttgcctgtacatattagaagtatgccaggtacacattctggctgagttgctcgctgattgttaaaagcaacgtgatgctgaagctgaatatcaccatcatagaaaaacaaataggcatatttacagaaacatttttagaattttatgcacatttttttgttgtcagattttataagtttgaccttttggtgcaggaactatttctcagcattgtcagctcctggattgctccttgggcgctatactgcacattggctataccaagtagatgctcactttcgactgaggtcagtagaggaacaaagtatttttggggtatctcatagatttatctatgaatattactgattttggagattttctctcgtgaaattttggagttacaaagtttctatttatcctcacaagacatggagggtttccaaatagctctttttcttgaaaggcttatggtctcaatggaatgaaataactaatgagtaaatacagtttatagttatctagttaattttatgaatgctagaacacaagaaaattctacagattagatttatgataaaatccaatctcttattcagccttgtattctttaaaaattgtcagcatttattggcttacagaggaaaaaacccaggaaagaagatctagctgtctaataaatatattagctgttggtgtattccctttctaatagtttgaaagttaacaattgtttttgaacataaaattaacagctttcagaatcatcattaattaatgtagcagtttggtcttgtattactatgcacacatttattcgactgatagaatttcaacacattaaaactaatgagtagatgttcaccgaaagttgtttctagagaatgcttcctgacatttgaaagcaagtggtctgctttctctgggccttgtttttaccctctggcattgttcatggtactggctttgttctgttggttagatgtggtaacttactctcatcttttccttgatgaggcacaggttcagggatgctggaaaggacactgaagtaggccttggctgatgggcctttcagaagtgaacacttaagagtaggttttcagagtaactttgtga

SEQ ID NO: 102362 - DNA, 1058 bp, Homo sapiens
tttaagactcacctattgaattcaaggcatgcagagagaaagtagagagcactgtctgggtaatgacattgacagtaatggctttacctgtaggcagaggttaccaaaatctctgcatcccattcttctcttccgagctccacactcaggtaactgctttctggatgcctctcccgcatattccctcctcctcccccattcagtcctcttagtaatgagtgacaccattctaccctaacacaacatcatttggggaacctagcaaccactctttgcccttttgaatcacaagtaaccaaattcagtttatttaaggtgtagaatgacttctcagattagatttggaaaaagtactgcctcagagattaccatgtatatgaacataaagacttttatataaagaaacctgtgtaaaccagcatttcttcagtttatttgattaagggacctcccctcccttttatttttgatttatacctattaataacatcctgtggaccatgatttgggaaaatcatgttggaaatagaaggggctgccattctttgttttgttgaaatgaacttctttaacaactaaaattttttaaacaatagtgatatactagtcacttttaaatgtggaatagttccaaagcatacagagctatcactttttgaggatgaataaacatggaaatttatttttaaatgtgctgatttgttcatattgtctatgtcataattcttatgcatacactatatatatactcatatatatgaatttaagtacttaaaaccgtttgtggcagagttttaattttggattctcttaactcattttaaaatgtgaattttgtaggacaaaattttcatatttccagtgatcacaaatggggtgtattcattatacaagagttagaaatcagatctgtaaattacaaaaccccaacttttaaaatcccatcatatgtggggtacactaggagaatgaaagggcatgtagattgtaatatttaggaagctgtcaccagtttgcctccccttggaattgttgtcgtggtcgtgtgtgtctgatct

SEQ ID NO: 102363 - DNA, 1047 bp, Homo sapiens
gaacatgtgttcttaaacaagcaaataggagttgtgaagaatgtatttattgataatgatttgaattgtagattcaaagtgaaatgaaataatttcactctaggaataatttgatgggatttgttttttgtatttttagaaaattatagatttggccattgtttaaaaagttttgaataaattttggcttagtgtaagaagattctttgataggaaaactaaaactatttgatataaaaagttatcattgcttaagatttggatagtgtagatcatctcctcaaaaggtgaaatttaagattttacttttctcgaattcctgacctcaggttatcctgctgccttgggctcccaaagtgctgggattacaggtatgagccaccgtgcccgaccaagattttacttttctttaagcactctttctcctcttctctctggtggtgaataccaggctacttaatggtgccttcttagtttggcctctgtattccttagtcttttaaaaaagtgtagagatccatattgctaatggatatacattagagagaaacacaaataagttaattttaatttttataaaccatccacaaaatatactccatggaatcagatactcaaaaagataccgagatgtaaatatttatgttgttaacgcaaatccaggtctgctttgtagaaggttaccaaagcttaaaaaccattgttgagtgcttgctgtttttgtaacctactggttgcagccagctctttcctctcctactggtggtagtagtattcttcaggccatttgtattagtctgttcttgcactgctataaaggaaacctaagactgggtcatttatgaagaaaagagttttaattggtacacggttccacaggttatacatgaagcatggctagggaggcctcaggaaacttagagtcatggtagagagtgaaggggaagcaggcatgtcttacatagccccagcaggaggaaaagagagaagtgggagtgctacacacttctagacaaccagatctcgcgagaacgtactcaccatcgt

SEQ ID NO: 102364 - DNA, 1120 bp, Homo sapiens
tctgccacttctgctctggttcctagatctttttgacattccttaaattattggtattatcccagttgccttttcttgcagaaaactgacaaaatctttggttcactggtatgtctccatcccatgctttattttatttagtgatctttcactgcttgtttctatggatgatatagaggaatatagaggataagaacaatatgtttactctatccagtgttctagattttcttgttagaagcaccctccttcccagcttgggaaaactgagctgctggggtggctgttggctccttcgcttgctgttagttttaaaggattgttttcagtcacacttgaattgtagctatccttggttctctttttaccaatgaattctggtagtatgttttaagagctgggtggccttcctggcctttgtaaacatttcctgcaatgcctagctttagtgagctgcgaagttgcccattggagatgaggctctattgaaagtcagcacctgtacttcactccctgccttttgtgactttgggtttcgaccgggtgtttggaagcactgtttcttctgtccttgaccttgttccacatgttttacccattacctcctgtgagcaggcacagggcctttccttgtcacctgggcttcagctgctttgaggatgactacttaccccttgcagtagcttcccaccaaggttcttgaaagggaagttttcataatgttcatttttttaaaaagttagaccagctataccccctaaacttaagtctgcttgttttcatatgacgtagaaattgatacaaaaatactttatgtagtttgtatagatgtagttgcttaagaaagatgacacttactgtactattttgttgtcttgataagtacagtacaaaaaccagtttttaaaccctaaagttaatttgcaagaaattgatacaaaaatactttatgtagtttgtatagatgaagttgctaagaaaggtgacacttactgtactattttgttgtctggataagtacagtacaaaaaccagtttttaaaccctaaagttaatttgcaagaatctttttgttttgacaatatactattataacttttagctgaataaaatcttaagt

SEQ ID NO: 102365 - DNA, 2927 bp, Homo sapiens
tttcatgatacctaaatgagggagcaaaagtatatttagtatatgacagtatactgtcatatactactgaattttcataaggttctaggagcctttttttttgttctgggaaagggagggaggaagaggatggcactgttacccaaatgtgagttagttgattcagaagagtaaagaatagtccaatagtccagtagttaaaaatttatgtctgtaatccagatttaaataccagtttatcttctagctttataaacagtcttaatgagaagtaggggacaaaaaagaagcaggattgcccttaggttagagaatagaaatatctacttggcttaacgtttttatgaaagatgtccagcaaaactgtggtggcagcctcactttagagaatgaggtattaaaaacttgaccaaggtagtcatgccagacttttgaatatttttccaaataagatggcttcaaattgaaaaattttatccacttgatatttttcaaaactataaagctgtgttctatttctacctaaaatataaaattgttagtatggtatgatttgtcatttgagatgatcttggctaatacattactgggcataataatggctattacacattgagaggatagaggctgtttccgtgtctcaagcatcattaactgcagataaaaaaaagttaacagttattctaaaaatatttcttataggggagaaaatgtaatcagtatattgtatgttttagtctggtgtggtggtgcaagcttgtaatcccagctactcaggaggctgaggcaggagaatagcttgaacccaggaggcggaagttgcagtgagccgagatcgcgccattgcactccagcctgggcaaaagagcaaaactccatctaaaaaaaaaaaaaaaagttaatgattaattgtatacttagaaaacttactttctttactaggaattctaaatatatatatatatatatatatgtaatgaagattttagtttagtaagttaactattttaaaacatgtttaatgtttaatttctgattctaaaagtagtactttttggtactttcctaaactccataatttaagtaactttaaaaagaactgatgctaagctaaacatttaaattgaggattatcccagagcatctgtcactaggcagatgatgtttccttatgtctctagtccccaaaggaaagtaggagtgccaagtttttaatatttgtccctttcaagaaggggaaagttttgtgatacaaaaaatgtttaagaggtggaccaggaaacagtcccttgacatggaaaatgcccaggctgagttaggattgctttatctatatggagggaataagaacctgggagaacaaaccaaaatattaaagattcatgagtaagagtatgaatgaaattggctttaaaatctttcccttttatttctctcttacctttatccttcggaattaaaggaggctaatgcaggttccaagtagttcaaaaatgtaccaaaagttgtgaagtttaaagggctgagattgagtctttcagggaatggattaaatactttggtttcgacagtgattttcaaacctgtcttaagccttgactcgtagtgtgtagatgatagtatcgtgaatgatcctgagctaatctcatgaaagcttacatttaaacaaattttcatatggacaagaaaccaagagacattgatgtgtgactaaaatattgattattcatggattctgcgagagctttgctttttatctgtgggatcttacgcattatgtttctaaaaatatagtttctttgtttctaggatgggggggttaatattagattatttttaagtttccttctagttttagagttattgatcctttttctgacttttagaacctgacttttccagtcttggtttcattggactttaacgggttccagaattcctgagtagagagaacatgggaagaaattaagggacaggtgtgggtgatgggtgcttagagatggtggaaaagtggcttcaggagaagagaaattgtagtgttagggataggaccagcatgctcttctcttggaatctgatgcttgaaatctactctgtcttaatgaaatatactttacaaatgctagacgtctttctggagacgtttatagacactctatggaaaaatatctaaaaatcatgaaatttttcatgatgtggaatgaatctgtactctatttaggaggagataattgctaggctaggtgggacaagttgatctattttaaaataaaattgtatcttttataaggcacaaatgggaactgtgtctccttgacatgtttcaaagcatttctctgaatatgtgagattaaagaaactctcaaccactcagaattgtcagaacactgatgttctttaaaactatctttgtagctgttagtatgtactgacacagttgaagtttttaatgttttattcattattagacattttgcatatgaatgtaatgtcttttatttacagttacatcttaactgaacttggttcccagatatgagtattatttacttggtctcagtcttcatattttaagctctataggttaatacttaattgggttttattttaaaattatttttgaagctatatattaaagtttgtcgtaataaaccaaatgttagttttcctccacctgggaatacttgagacttcagtgagccacgctttctgttatgcccacctctttagtctttccattatagaataaacatgctttgtgtgatttctctaaaatgtaatgtttgagaatctattttaatgtatagaaagacatttacataatgcttttgagtaggtggggaaaaaagttgaaatgttgatggcagcatctgttagaaaaactcacatgtctatatagtaaaaagttaaaattacaacaaatgcac

SEQ ID NO: 102366 - DNA, 1693 bp, Homo sapiens
acagcaagttgaaaatgtgacaaagctcaatttcatttcttgtttattgcttgttttcctattggacaattggaagtagctttgccctggcaactaaaataggctatttgcataacctagtttgattggctagcatcctgactaacagttccaatcatatggtgtcggtttagtggtaggctatgctaattagccgctgttgctggggttcagggatggtttctgtgtgctgttctgctgcattgtgttgcctggtgagagacattgataaatgagcgtttaatgatctgcagcagttcccactcactgcgggcaggcggattttagaacagaagtggaaataaggctttaattgctctgttaaataactgtaaccaaaatatgtgtattacattttagaaattaagttgtatgaaatcttaaatacttcataacacaaaaggaaaatactttagctttgtctcttaaaatataactcaggtagcagcactatgcacaggtttcctaaaactgtgaaactgatcatttttttcagatcagaaacagtacccttgtagtaagtagcatgcttgatttttcttatgactttgaccttttataaagatacacgtttgtatttaataaaatgttgcaagcttttgggcagaatttatcttgtactgcctgtgtagtctagcaaataagagcataaacttgaattccctgttcttcttctgttgaatttgaagatcaggttgttattcactacctcctgctattacttttctaattgaagtcagatgttttaactgttgcttgtaccgttatgttggtgtatgtgaagtctttattggtactgtcagatggtaggttctgcagaaaaaaaaatcagttctttgtttaaggaacatgaggtgaagaataaatacatgtgacgttagattaaaaattcaagatgaccatatggaaaagtgctgtaaggatttatctggaagggtataggggaaaaaattctaggcctttttatgatagggacatgggaaatggattgagagtctgggaaagggttaaagaggaagcccatagaatttgtgttaaggttttaaatatcacttaggtttcaaacagctagagagtaataagaagaaagagcattttagggtgaggaataggtgagcaaaagtaatgtttctggtattcagttgtcaaatgtaagtggtcacagtgatcaaggactccggggccttaggtgtgtcagtgccccagcttccaggcaggcttgtgtcattcccttgaaataagacctggtgtcttactgttccagctagcaccatttctggctttttgtcacttggttttgttggaagcagggctgtccactttttgtgtctgatggttaaagcataggactcttttgccttcttttgtccctcccattggccctaaagcattgaaacacggatgccaaaaataattcatgtgaatttagatgtttgtattaaattttctgtaaagtgtatccctttaattgttctggcctttatttaagagcatagtaaaattagacaagctaactggacaatcttacagactagtaaagaatgaaaaccaacattaaaccataacatttgattcttaatcacacgtccccaggcatatatactgaacatgtattctaaaataaatttacagaaatgctttattcaaccagtca

SEQ ID NO: 102367 - DNA, 1864 bp, Homo sapiens
tatgaaaatgtggtattgagtaatttcaaggggtttttgagttgccatcatctaaaacgagatatgttgtaggagaagcagatttttttgtggagtggagggaagggattgattgtacttagagtcaggttttgaatgggttaaaagtttttaaaacagctttattgtgttataattggcctacagtaaacttcacataattgaaagtatacaatttgatggattttgacaagtattacttgtgaaacttttaccacaagtcagataatgaagatttattacttcacttgttccagaattttatataaacaggattatatgtgttctttttgcctggttttagttcttttgagagtcatatgtgttgtgatacctatcagtagttcactgtttttattgctgagtagtatttcattgtgtgtatatactttggtttatccacttacctgttgaagcacatttgggttgtttccagtttttgtctattacaaataaagatgctatgaatattgttgtacaactttttgtatggacatatgtttttatttctctttatttcctaacattggagtgactcaatcatgtggtgggtatatgcctaacttttaaagaaactgctaaatggttttacaaagtagttgtaccgttttacattttcaccagcagttcaggagagtttcagttgcttcacattttgccatatttggtggtcagcctttttaattttagccattctaatacttgggtagtgatatctcattgtgtttctctgtgattaatgttgttgagcatctttgtatgtacttttttgccccctgtatgtcgtgtttggtgaagtgtttgttcaaatcttttgtcattcttttttcggttattgagcttttagagtttcttatacatttgatacaaatcctttatcaaatacatgatttgctaagcttttctcctagtccatggcttgtctttttattctctttaaaagtgtcttgaagatctgatgttttcaatttttatgaagcctaatttattcatttgttcttttatgaaagctgcttttggaaagtttttgcataattgtcccatgatcaaaaacgtttttgcctatgtttgttgttgtttttttccccactagattttacagttttaggttttatatttaagtctgtggtccatttggagttaatgtttgttaatagtgtgctgcaaagtatagatcaaagatcacttttttttgcaaatggatattcatttattgtagaaccatttgtcaaaaggactgtcctttctccactgaattgcctttgcacctttgtcaaaaatcagtcttccatatatgtgtgggtctgtttgtggattttccattctgttccattaatctatttgtcctgataccaataccatattgtgttgaccttctgtggccttaataataattaatgcaatcaggtagtcttaattctacaactttcctcttattcaaagtttttataactactctaggtcttttgcattttcatatgaattttcaaatcagttcgctaatttcttcaataaagtttgctaggatgttgattggggttgtgttgaatatatagataatttcagaagaattgatactttaactgtattgatttttggacccgtgcacatatatctatttagccctttctctcatttttctaattttcagtatgcagttttttcatgtattttgtcaggtttatgcctaagtatttcatatttttgtcactattttaaatggcttttaaatttcagtttctgatatatagttacagtactagcacatagaaatacaattgatataaatatatccttgtattctgtgaccttgctaaaatcactt

SEQ ID NO: 102368 - DNA, 1159 bp, Homo sapiens
tttggtttaaatctgtcatcctgctatttatttcctatttgtgttgtctgtttttcccctttcctctttttctcctaccgtcttttattctgcttttggattgattgaaatttttaaatgatttgattttcttccttttattggtttattcattttaaccttgttttttaaatttagtggtttctctttatcttatcacagtctacttccaaaggatattagatcacttcacgtatagtgtattgaccataccatagtattcttctatttctctactactgtcctttttactgactttaaaatagattttgtttgtgcatatgttattaaccttacactacattactattattgtttaaacacttagatttaaataagaattcctgtattcttatccatttcgttatcttttctggtcttcattcctttgtataggtccatatttccatctagtttcattttccttcatcctgagtatttctattaacattttttgtagtgcgtatttactaatgatgtattctttcaccttttaggtatctgaaaatgcctttattttgctgttttttttttttttgacagatattttcagtgggtatggaactctaaatgacacttttttctttcagtaatttaaaaatgttgctgcaccatctgctctctcgcattgtttcttacagaaaatcttctttattcatttgtatataatatgtctctttttctggccgtttttaagatttttctgtttatcattggtttttagcagtttgataattacgtaccttagtttagttttctttgtgtttcttgtgcttgtggtttgttgaacttttagatctatgggtttgtagtttttatcagatttggaagatttttgaccattagtttttcaaaatttttgggttctcctctctgtcaggaactttagttacatgtatattattagggtgcttgagattgtcccagaactcagtgaatgtctgttaactttttaaaatctcttctgttttgacatccaatttcagttgttgagtactcatttggaattctgaggtagtttttattgctgtgtcttcaaggtcactagtccttttttctgtactatctaaccttttattagttttaccctttgtgttttttatcattcacattgtagttt

SEQ ID NO: 102369 - DNA, 1026 bp, Homo sapiens
atatattttatgatactaatatataagtgtacatatatatacacatttttatatgtgaacatacattaaaaaaacataatttcagaatgcctcacacgaatcttgctgccactcaagcctttaagacctaaagtctgcttacctctttttgtaaataaagttttattggaatatagccctactcattggtttatgtattatatctgtggctgcttttgtgctacatgggaagagttttgattaattgcaacagaagcttcatcttccgcaaagcctaaaacattcacactctggccccttaagagaaagcttgctgacccctgctcaggatgtagcaagcattgtactcacggcattatactcacggccatggtgcagctgcagacttagaaaagaaggcttgagttggcgagctgatggacatggcaggtgggtggaacttagcagtggagtgggtagtttctagcctctaggtgtgggatcactgtgctaagtcaggaagtgtggctaatctttgcttagaggtggggaacttgtgcttttaagaaagcacttggtgttttctagtaaatgtgaattgtggcgattaaaaaaattgtatattaaaattcggaattaacaagtttatgtaaattagaaagtgagagttgccgctgtcccctcaattcccactcttcaaggtgttaagagctgttaagagatggagtttttccccctctgagtattaacttctacttagtaatttaaaaatctgctatattttagaccatctttttttacattgtgaccctgaggttcacttgattcccaaaatgtagtcgggattgttcagttgagtgtttgttacatagaagattaacgtgtaaaatatttcagaagagattttaatagacatctccctgtcagttgatgagttgacattgtttttctaaatagttttagaattaggctttttatgacaagtattaaagcactttgtactgtattactggtattttaaatttttacaattttttttaaaaactc

SEQ ID NO: 102370 - DNA, 1004 bp, Homo sapiens
aaatatatataaaacaagtatttaaaattttttttgtttgtttttgaggcagagtcttactctgttgccaggctgtcaggctggagtgcagtggcacaattacggagcactgcagcctcaacctcctgggcctaagtgatcctcccatctcagcctcctaagtagctgggactataggcacatgccaccatgcctggctaatttaaaaatttttttgtggagatgaggtttcgctatgttgtccaggctggtcttgaactcctgagccgaagcaatctgcctgccttagcctcccaaaatgttgggattacaggtgtgagccaccatgcgtggacctaggaattacgtaatttgatttgaagagtcatatcatttttcccctgctttacttttgtacctcttctccaagaaaaaagtctactctctcaaaaaccgaaaacacatttcttaacttctgggaggtagttttgtttgtattagttcaagtccatactggaatacgtttgaccagtgttttcaagctgagaaatgacatttaattatttgttatcatttctaggtagatagtaatttctgtatttactaaggtaagctaactggtttaacgaacacacctaatatttcagtggtttaaatcagtagaatttcttgccatataatagtccaatgactgttagtacaatgggataacagctctgctctgcagttattcaggctctgaactatgggcatttttcctattttaaatttaatagtgtccaaaggtcatcctaggttttggcatttgttgaatgggggaagagcatggaggttttcacacgcaatttttatgggtcagacgtggtagtggcacacatcacttctgttgacatttcattggcttggtcttagtcacgtggccatgctaactgcaagggaggctggaaatgtagtctagttgactcagggaaaaaaatgcctttggttatcaattagcagtctctttcgtgtggtcaaggtaaaca

SEQ ID NO: 102371 - DNA, 1203 bp, Homo sapiens
aaagctggaaactatgctggaaaaataagtaggggccaaagcaggtggcagcagaggacacagccagggtcgcagcagaagaccagtctgcttcggatcccacacctggcacttgtgcaatgcattgctatgtgagcctcaactttcctgcctccactgtggatagtctcttactgtccctacatcttgcaggagtgacccatcaagactccagagtctgaacaggagcatgtgattgtcaaaactttggtcactagcaaagccctggttaccagggaggtaaggtaggagatttgttagtttggtttttatacttggtggcatggcttttttgccttccatgattctcatgaactgtgaagagtgttcagataccaaatggcctaaaaatgacaaatacctatgtgggaacctttttcatcaggagaaataagttgtggtataagatgggaggctgtgttccaatcttgatttttatcacgttgttaagcctctgggttgcagccgccccctctgtaaagtgaggtgggggaactagatgtctgacagtgtctgttcatttactcactcattgaataaatatttagtaagtgccttttatgtgccaacacaaaagaattatcacacccttgccttcctatatttgggtgagtcagcagagaagtcattctgatacagttagggtgaagtgctcagatactctagccttgggcaggggtttaggagctcgtgagagttcccaggccagcctgggcagagagtgttggagtaggggattcagggaccacactccgcttctttcactcattcgtttagtgtttcctttaagcctttgccttgttgttatgagaatacaaaaataaataagaccagtacttccctccaaagcactaattgtgagagcatgctgatggctttagcaggcagcatgcttgctgtgttgagataagagcagaatacagtcatgcaccaaataacatttcagtgttggactgcatatacgacagtattcccctaagactgtaatgaagctacaaaaatcctatcacctagtgatgtcttgcgatccttacccaaggaggtcttggcttacgtgtatgtgtatcttaatttttgagaaaaatgtttaaaaagtaaaaagttaaaaaaatgaaagcttacagaataagaatgtaaagaaagaaaacatttttgtacagttgt

SEQ ID NO: 102372 - DNA, 2199 bp, Homo sapiens
gtgtatatattttgaagaggtcttaactacacagtgattctacccctgtgtgtgagggcctgggctctttggacagatgacatgttttttccagtgttatggagttaaccttagagctgggaccagaaccctggacttgctccttgtgccagttttaattttctcagccacacccttttctttccttttattttgtacccttttttcttactattttcaatagaattttaaatgtcatatgtttaataagatggaaactgctgatataaatcaagaagcagtctttaaattttaaataatggtacatttatggagacattatcaactaatttaatttctttttctgactttttaagtcacctcttttttccaagtcaccatggcttggaaccgctgagtcattcttgaatccagctgtctcttatctgtcgtccgtattgaaacaggttttgaagtcctgtcagtctgctctcagagtgtctcttcatgcatctccttcctttcttttgctgacaattccctccttaagggctctcaccgtcccgtgcttgggctggtgcagtaagcaactgatagatctctatttgtggttcctcctggttccagtccaccttacacattcgttctatcatttagcatttgccatttgccaggtaccattttaaacattaactctttactgttcttagtaccttgaggtttaagtactgttataaacccattctgcagatggaaagggaggtatggatttaattgatttgcccaaagcgacacagaagttggtagctagctagtaaatggcaaaattgaatccagactccttatggtgttaattgctatagctaaagatgaaactggagttgtgccactccttgcacacttttatctgtcaccctcttaggctgttttagaaaatcccatgttttagcttgccattctgttgacccagcctgcctttctagccttaacttacccctctgtctatattctattttccagccaaatatgaggtgacgtttaagctgctacttgaaagagaagtgggagttaggcagagcagtaggggaatcatgtttggggaagagtgaagagtgtacttgagagagtgtggaggtgccttggaggagctggagcccagaggtgccccatgagaacaacacaggaggctgcaggtggaggtgggtgcctgattgtagaatgctttctagttgtcttccacaggacatttttgggagctattcacaagattcatggctaccgtgctctaaaatttgatgtgaagttcatttttcctggacttcttacttaattcctctgtcttttggcccagccacccctttgccagtttacacgggtgatgagcaggctgtttggaaagaacgtcctcgagcagggtgctgtttcctaaccctgcgtctttttcccctctgagatcagtttatctttattcacttgcaggtgttcaacaatcttgtcttttatggggaatttctaatgtgtcttgagcactttcccaccctcctatcttggaggcatggttcagagtggaaaagggcgcgggcccacctacctctggccttcccacctcagccaccatgcttagggccgtggtggagtgcttgacctctttgtgtgtacaatgcaatacatgctggaataatgccaccttatgcatagggcttttgtgggtgtaagggcataccggaacaagttggcatagaataagagttcagtgaatgttgtcactactttttattactttttaattgtgaaaaactcacagattctgtaataaagggtcatagaaacctgctttatccatactatcattactgagaatactttctggtttggaaaatttgcttgagaggtaaaaagaaaatttacttacttacttacttacttacttatttatttatttatttatttatttatttatttatttatttatttagtagagacagaatctcgctctgttgctcaggctggagtgcagtagcacgatcctggctcactgcaaactgactcctgggttcaggtgactcttgtctcagactccggagtagctgggactacaaatgcatgccaccacacctggctaatttttgtatcccccccgcaagacagagtctcactctgttgcccagactggagtgcaggggcacggactcggctcactgcaacctccacctcccgggt

SEQ ID NO: 102373 - DNA, 1083 bp, Homo sapiens
atacagaatgaatgaaaagcacacatctgcatattagtcttaaagttttaagatgattatttttgattttcaaatataggtagtatttcattttatttaagttatacatttatttaaattatctaagttataataaaatggcaaaaccacaactacttttacaccaaccgaatacttacatttatttctcctgtcctttgtgctgtgattgttttatttatatgtaataaactccacaatgttatttttgctttgaacagtcagttggctttcaaaaatattaagaaaaaatgtcttttatatttatctacatacatatttacatttctggtgctctttattcctttgtgtgaatctcagtttctgtctggaatcattttccttctgtgaacttgtgtgaacattttttgagggcggatctactgttgacaaattctttcactttcatgggtctgaaaaagtattttgccttcgtttttgaagggtgttctcaccggatatagatttgtaggttaaaggtcttttttattttcatcatttaaagatgttttattttcttctggcggtgcacatggtttctggtgagaaagtggtgactcccctatatggaaacaggtgtttttgtctctggctgcttttacaatttttttcttcatcattggttttcagcagtttggttgagttgcctcagtgtgatttttgtgtgactttttccttttttttttttttttaaacttgttttcagtttggttaatttatattgctttgtttttccattcacttatcttttcttctgcggtgtctgaactgctattaggtccgttcagtgaatttttcatttgagttattttgtttctcatttttagaatttccatttagttccttttcgtagattctatttctctattaagattcactattcccttattttgtccatgttttcctttatattttaaaacattcataatagtggttttggtctgctaacttcactctttctgtcatttctgagtcttaaatggattttttcctcccgaatacagaccacattttcttgcttcttgctgtgcctagtgaattggg

SEQ ID NO: 102374 - DNA, 1034 bp, Homo sapiens
cgtcctggcaggctgttaattcacttgcagaccatcttgatcctttgaggtttgtttcagtctctgttagaacaggggccagcctttactgtagggctggattagccctagccctaaatgtggattttctggggtctctgttgaatgtctgtgggtttctccactgtagcctgtttgaacactcaatgtcttacagtcttgtgtgaattttagtagttattcagttcacagttccctggtagttgttctgtgcctggcttcatggtccttctcccagtgcttgtgcagcttagcatttggccaaagagtcaaggagaaccctatgtacggattgatggagctccttctctttttgttacctgctgcacaaattccagccaattcagtggccttgaactcttccttctgtctctgcagcacagtgagattgctgtgttctgtttgggctcccccttcctatattgtaccctggaaagtgcctctagataggaaaccagggggattgtagggctcaccaagagtgatttcttttttcagtcatcacgattctgcactgcctgttgtccagtgtttgaaaacggttatttcgtatgttttgactagttctttagttgtttatgatgaatgagggagtctggtaccaggtactctacaaaggtcataagtggaaatctgataatacaaattcctaagggtaacatgtttttatccataacccattgttactaacaattttaatatatagattcagttaatctttcatgctgaaaaacctgagattttatttacgtcttatatgagcaatttcattgtgtttctagataattgagtatgctcttttggctagtgggttgacaagcttgtgtgtgcatgtgtgtgtgtgtgtgtttaatgttggcacgtgtgtgtgtgtgtgtgtgtgtgtgtgtgtatcctgtagtaacacatattggccactagagggtaataagaaagcagttcatttgttcttattggctcactgttactaaatagtccttatcattagacttttt

SEQ ID NO: 102375 - DNA, 1526 bp, Homo sapiens
tccttacctcccgtgcagtcccctccctccctctctcaatgatttcttcacagtctaaatattcctgatggattcagttcattcctttattgcacagatatttattgaatgcaggccatgtgccaggcactgttcttggtgctgatgataaaatcgtgaacaaagcttactcatggactttcgttcacttaccctcttaatcatgtgcctttatttccggccatcattagaggtgcaattcattttggatgtgccttgttgctagggacctcgtgggtttttgcccacataagcttggttgccctcctcatttcttagtggattctgtcttagaacctcagcctcataagtttccacatttagatgctatagttttaattaaattattttcatttactttttgttctttaatattgttctttgatttaactgtttctctttaaaatctactatcaattaatactgtcacaggaatggtcccctgttaacacattactaacaaagaaattcaggttaggtaagaataacattcagatctacaagtagagctacgtgtgggttatgtatcagagatgatggcttctgatacttgttatttttacttttttgtttttaaacttagggtcttttctcatgctttttgtatttgctgtttcctctgtgtttaccactatctttttgaatcttatgtcccagtctttgagatgtgttgtttatgaaatatttctctgtagaatcagtgctgatccatactggtaatatggtctctagttattatagttccttgctagaacatagtaacgtggctgaagtaagaaagctgcttcatttttcttttagtaaaatattgaatttttcccaagtttagcaaagttacagaaacatgctcatggtaaaaatgatccatacagttcagaagcacgtaaagacagaactccacatgcatgattttctccaacatgctttccatactgtttgacagcagttgaaaatactttggaactgcactccaaatgatgattttagatagctttgaattatttgttaagttcatcattaaattataacattatctgatgttaaaacatgtattgtgatacattcttaagctaagatattattatactgagttgaataaagattatataatacggtagatagtaggttgaaccatatgaaattactgtttttgtaagccaagggtagtcagaaatctatcagcagtttcatatggttccgcataatactttatatgatcatccctgttacaggatgaactgagtcattttttccattaacatttgcattaaaattttaggaagatagaaacttaagagtaaaaacatgggtaatttgcttaattatgaaatcaggttaactagaaatacgcatattagttttgtccccttggaatcttatcataggaaaggaatgaatgaatggataacttaaatactttttggtgttgcaggaggaaattaaacttaggtttattctgaatttcatacacagcagtcgagttaaga

SEQ ID NO: 102376 - DNA, 1766 bp, Homo sapiens
atatccaacctttgattgcctgtgtcagtggagagcaccataaggtttcacctggtttggggaatgctggcgatgttgtttgccgtaaacctggcagcaggtgcaaaatagcatctcagaaatgttcctttgagttggtttgtgaggagctggtctgttggagaagtccctcaataattaaaagattacttatttaacttgtattatggttcttaatttatgaaaatctcgtaggtgaaagtaagtcttaaaggttgttgctgttgctttacaaaaagattttctgaagattttctcaatacaagtttatattcattttaatcactatggatcttctataccattaaaaacataactgttgtgttgagtaacatatacctgtttgtagttagaaaagttttttaatattgaatatcctaaagttcttatttaaggaaccattagatatgtcaaatgatacaaacattaggatatgaatatttcctttaaacctcacttatcttcttgtaggaggagagacttcagcatgcaaaccttcatctgttcggcttgcaccgtcattttcattccatgctgctggccttcagatggctggacagatgccccattcacatcagtacagtgaccgtcgccagccaaacataagtgaccaacaggtttctgccttatcatattctgaccagattcagcaacctctaactaaccaggtaagttcatggagtatcagaaatgactattggaatggcagtttattccttaaaaatgttggaatactaagtaggcaaaatgctttaatggctttcagttttacatgcaacgtgggattatggattgggaaaacatgttaagaagtttgcattaaattttttttttttaatttttacttgtatttcacttaaacactcataaacataaccacagtctctcattctgtaatagaaaggggaaaagttatttctgaagaatattaaaggatcttgaagaaaaagcttatttttatggaaaggtggctaagttaaaaccgttacaggaaagcaagtcagattccattacagcaaacttacagaaccaattttgtgttattttaaactacctttctacacatttgtaaaaataaatacaaaactccctaaaattcaaaagagatgtatgcaaattaaccgtgctatttattctaatattcagacaggctattcaccatttttctatgaagtgaatggtgtaaatagaatacatgctgaactcttggtactcacacacacatacacatgcatatatatgtatgtgtatgtatttttaatatctttctaaattaactgcaccgtctacgttgagttttggtttgggagacttaacagctgtagttgtgtgaaagtttcttgccccacggatatttgatgtgtgatgagcactgaaaatggctgcttttccatggacttagaaatttggtttgccattcttttgtttaggtcttttaatatattgtgtgaggataaaagagttgggagatttaaaagtatgtcttttcctggtgtcttgtttatattaaaacgtgtttgtaataaaattttgctagtaggctgacataatgtttaaaatatacaacatgttaacattcacagttaaatcgttacaataagatgaatttggcaggacttaagattttatgtagtgaattgatttcagtttagttgcgtgtttgagaattgggacagttgttcagaatgtccaagtttaggaagtgtttaattgtgtaccagaagaaa

SEQ ID NO: 102377 - DNA, 1061 bp, Homo sapiens
ttcccacttgttcaaaagcagcctgtcaggcagagtgctgtttttaatgtgtttcacagctgaaaggactgcgctcccatttgtgacttttccgtgtgtgagcaggagactgtggggtccagcctgggcttccttcttcttagatacagtgctctttcaggtctaacctctggtgtctacagcgggctaggaaaacttccagtcctttaaagtcatttttatcattatattattttagtaaataatttaattaacaaagcacctatttttatatccaactaacgtcttatgtgtatttggatcatataaaataagagatatttcacttactatttctgttttaagctatgaaatacttttaaagatttgtgtgatgtaaaaagactatctttaaagtaataatactcagccaaatatttctgccaaaatccaaaaatttctgggcctaataagggagtcatattagaggatccctttcctgtaactaaagtgtaggctgcgtattaagtggcatagtctagtcataggacctggcttcaaggtcttggccggctcatgatctggttgtaggatttgagttaggttatttgtacccttcatatctgttccttgggtgtcaaattggcacctccgactagaacccccaacacatacaaagtaccttttagctgtaaacttactgtaatttcattatttaattttcattgtttcttgttaatcatcctatcagatgtcttttaaaagagaaatagagcgaaagtaggtgtagaagaggaagactgatgtttggaatgctggctctctgggctattctagttttcacaatatcttccatagttcttaaattctagtaccctggatatgtgttatagatgctattcagctttattaatgctctcaaaataacaagaaaggcagaatacagtgtttctgattcttcattatataggaaaacaggaggtaaatataaataaaatgaaataggtattataatggaaaacagtttttgaaaggagtcctagagcttatactaaagaatcttttcaggacaaaagttaatt

SEQ ID NO: 102378 - DNA, 1043 bp, Homo sapiens
cccttttttggtgccagctgggtcctgaaatcctatgttaaggaagctgaaagttgcctctgagggctgggtttatctttgtctgctagttgtgaacctggtcaggttttaggaataattcagaaaaaaattttctttgggctaattgtgtggtagagaagccctcgtgggcaacatcctgtgtgtctcctagattggcgtatgtctgcatttctaccactttaaatttggcggaataggatcaaagcctcaggcagctgggcatattatcctctaatttcattgatttgttctagtggttgtctttattggaatccacatgaaagggaactttgagagagaatgtataatcatctaatgtgtagctgtctttaaaaaagtagatacatgcaggttacagaagagggaatttatatcttatagttaaagtgctagtcttttctgtctatttaaggtgatgcctgatattgtcatgttacagaggcggatgccccaaaccttccgtgacccagcaactgctcccctgagaaaactttctgttgacttgatcaaaacatacaagcatattaatgaggtaagacttgatttgttataataacatctatcttgcagtatgtcattgagaaaaaaagtgtgacctatttaccctaaacttttttttcattcctagtagttgtcatattgatgattattatgaagactaatgatttagaaataatattacaattatgtaaaagatatattaacaaggactgcagagtataaagataattgtggataacttgatttttttaaggttgtatttaatatactgttatttctttttttaatttttattttttgttttttatttcatttgagttctgtaataacttattcaaaacaagaaaggggaataaggactctaaaagtatatatgtgttagaatttttgctagaatttttatatatttgtttctgcttttgccatgggtgtcaggaagctctgaaatatgtttaatacctagttacaggcatttggcctagtttatttgatctatctat

SEQ ID NO: 102379 - DNA, 1071 bp, Homo sapiens
acagaagagggaatttatatcaataaattccctttatatcccaaatataaagttgggattgactggaagggggcatgagagaacttgaacttgagggacatgaaaatgttacttggctgtttggcatttggtaacttttgtcaaaattcctcatgttgaactcttaagatctgtgccacctcactgtatataaattatacttcaatttaacaaataaatataaaccaggtccttttacttttcttgaatggcatactttggacaagtcacttaacattttttgtttacaaagtctataaacagtataactataatgaatttcactgtataaattttttcattggttagatcagtattattttctaactcaaatgtcaactgtagaaaataggtgtgtgtcaatatactctgataatgcccttcctcacagtgatttaaattttacagttaacactatgtattctcatttcaggtttactatgcaaaaaagaagcgaagacaccaacagggccagggagacgattctagtcataagaaggaacggaaggtttacaatgatggttatgatgatgataactatgattatattgtaaaaaacggagaaaagtggatggatcgttacgaaattgactccttgataggcaaaggttcctttggacaggtaatttaatggaaaatgctgaatttcattagttagaaagaacttcttagtgaatcttgttgttaacagcccttcctcaagagtgtacttttaatatttgcaaatagagctcagcaatggatatgcaagtatttggatgaccataattctttaaaggtagtgatactgcatcagtaatataaactccttagacttctaaaaacttttatggctaccaagtgctcattttactaatgactggtgaattttaatcacttaatagatagtattgcctctttgttatgggccttgtatagtctgtagatgattgttaattacatatgctagaggtatttaccttcttgtccgatagaccacttcaaagagaaaagaattaccatgttcaggtggtgcagtgggagtccactcac

SEQ ID NO: 102380 - DNA, 1074 bp, Homo sapiens
tcatgaacgctgtgctttccttagcagtaattctcattttaaaactatcataatcccccaattatggcgtttgtggcattgtggaactttactggtaatttgtgtttgatttttttttagtctaaaccaatttttcttttatatacttaggtttttatgtatgaaaatctaattgaaagttagaaagttatctgaagccttctgctgataaacttttaaatatttcatacatattcttagggttcaggtatctctcattaaaagaatagttcgatgagttgttttatagtgttatttagtaagaaagataaaaaaacctaagcatttgtcaagagtcataatttatttctgaaggaggaaaatagttaatttaattttattaagaaaattatctattttgtggatatttagaaatattgtacaaatgcaaaaagaaattcaatttaaaagattgatttaaagttactgtgtaataagtggatatatattgaatagaaatagatggcatctcttctacttaggaaggtcagaaaaataattataaaaacatataattgagaattaggtaaatgttataattaaggtgaattataaattattgtgaaatttttgcaattaatgaaatagagaattattcatcttctcttttaggttgtaaaggcatatgatcgtgtggagcaagaatgggttgccattaaaataataaagaacaagaaggcttttctgaatcaagcacagatagaagtgcgacttcttgagctcatgaacaaacatgacactgaaatgaaatactacataggtaaacaaacaggcaaacagcgcagtgtgccccaacccacaccaaaactttgagttaatggttcttttctatcaaaatattttgattttattttaaagtggctgattaaaaatttgtttatttctgttggacagcaagatttatataagtgacttgatctggtagtaatagtctaaatcttggggaatgtgccttccatgtagcataccatgtagaaacaaatgagaatagtgtgtgtgtgttttttatttgcaacttactggtaccatttgttt

SEQ ID NO: 102381 - DNA, 1149 bp, Homo sapiens
ttacgtattatgcatttcacagtcagattaaccaatccctcaaaatgtttagttctttaagccgtattcgtagtctaatgttgaagttaatcaatggaaccctaattcaggaattagccaattcttttctgttaatatcagatcaatgtttttaatccaatgctgactgcagttttaagcaattgaagtaatactattttgaaatatatttcagatataccagtatattcagagtcgcttttatcggtctccagaggtgctactgggaatgccttatgaccttgccattgatatgtggtccctcgggtgtattttggttgaaatgcacactggagaacctctgttcagtggtgccaatgaggtaaatgatgtattgctttacaaattctgttttcataatttctttttgtctttcatctgtgacagtgtaatttaaaagttgtttttaggcaaagatgtctacttaatcattcaaatgtgaggtcagtttgaatatacctatttttcatatttgtcagttgtcatgtaagtttagaattatgagataggagtaggatattttaatctactcatgaaggagaacagttagaaagtgttaagtattttggcatacattttacaggttttaaatacaatacagaaagcttaaagatgataaagaatgaaggccatcctgaagagtgatacaaacatcactctaaattttgagattatgatttggagttgaagagtaatgatcagtaggactgatggatactcagtctgaataatgtagagtaaacgagattatagacttgtagggctacagagactgtgtgcagttctgaagtctacaggttttcagtctgtgttctggaagatttttcaaggtcagaggcagtgaatgggagggcagggacaggccttaacttccctgcagtcagagaaattagactttcattgttttaaaaactacacctgtggggttttgtttgttttttaaaagaaaaattgacaatttgcacgtcttgatcagtctatttataaatgagaagagaaaggccaaaggcattaatgacttgtaccggattacacagctgttaataggtggtgtcagaaacttgtttcttccatccttccttttaattcttctttttttttttttttttt

SEQ ID NO: 102382 - DNA, 1113 bp, Homo sapiens
agacggagtctcgctctgttgccaggctggagtgcagtggtgtgatctcggctcactgcaacttccgcctcccagggtcaagcaactctcctgcctcaacctcccaagtagctgggactacaggcacccaccaccacacccagctaatttttgtatttttagtagagacggggtttcaccatatgaccaggatggtcttgatctcttaacctcgtgacccacctgccttgtcctcccaaagtgctggggttacaggcatgagccaccacacccggccactttttatatgttttaacagtcattctgaaatgtttctaacttgtgatttcttctttaacctgtcattagaattttgttacataatttcaaaatatttgaggattttctagatgtcttattgagttctagtttagtagcagtttggtcacagaacgtgattttagtcctttaaaatcgagacttgttttatggcctagcatctaatgtgtctttgtgaatgttttatgtgtgcttgataagaattgtattttgtgtttgtttggcgtagtggtctccagctatcaatgtagatcaaattgtttgatatttttcttcatatcttttatatctttgtgtgtatttgtgtatattctgtcagtaattgagagaagagtcttcattgataagtttggatttgtcttagactccctttgtaacattgctttatggtttttgaagctttgttaataggtatatgcatgtttgatattgttacgacttattgataaattgacccttttatcatcctgaaatgtccctctttgtctctagtcatgtttgtctttaagtctgctttgtccgatatcactatagtcttaccagtgttcttattcttgatattttcatggtgtgtgtgtgtagatatgaaagatatgaagaaaaatatgcaacatgtgtagacacacacacacacacttttacccttttactgtaaacctgtgcctacctttatatttaaagaattatttttgtgttgtgtgcaacatatgatcaagtcgtttttttaatctagtctgttagtggttaacccattattcagagttttgggtttaagacttgtcttatttgtgttct

SEQ ID NO: 102383 - DNA, 1019 bp, Homo sapiens
tatccttatatttgctcttttctggtgttattcattcctttttgcaattcctagcttccatctggtattatttcttcagcctcaagaccttcctttaacttttattttgtaatgaataagctatcccgataaattctctcagcaggtgttgatctgaaaatacttgtttacctttattttttggaagatattttcagtgaatatagaattatagattaacttctttctttcagtgaaagaaaaagatgttacgatatagcttaaagatgtattgactttttttctggattacactgtttcggtagagaagtcagtggttattcttagcattgttcccctgcatataatattttccccctcttccctctggctgattttaatattttctctttgtttgatttccgcagtttgactatttacctaggtatgattttctttgtattttttctcctgggagttcactgagtttcttggatctgtgggttgatctctatcatcagtttttgaaaatcctcagatacagtcttgccaaatatttgttctgctttcgtctttcttctagttctccagtgatgtgtatgttacagtgctgaatattatcccagaggtctctgtctggtttattcattctgttttctgtttgtgtttttaatttggataatttctttttctgtcttcttgttcactgatttcttttttttccttgtgctgagtccagtctgttgttgaatccattaaatggattcatgtgatgttattgttatttttgagacaggttctcactctgtcacccaggctagagtgcaatggtgtgatcatggctgattacagccttgacttccttggctcaagcagttcttctacctcagcctcccaagaagctcggactacaggagtggtgcaaccaccatacccagctattaaaattttttgtaggaacggggtctggctatgttgccttggctggtcttgaactcctggactcaagcagtcttcccacctcaacctgggtgtagaga

SEQ ID NO: 102384 - DNA, 1040 bp, Homo sapiens
ttttctcttctgaaattctacatctattcatatgttgtccacttttgaactaaattgtttatcataatttatcagaagtaatttatcataattattttaaagttccagtctgctattttcaacatctgcaccatttatttatgtgtatcttctattgggtttttttctttcatgtgattgtggacgtcatttttaaaaaatgtttgtaatttttaaatgtgtgacaaattttctttgcttaagaacagttaaagatggaagtgagtcatattttccctcagaaagaggcctctcaactctgtcaggcccctcatgtggggctgagttgatctcttttgtagcttagctgactctgggctttgcttgtttgacttagattctactccccactgttttcatatgttttgagctgggatcaggacattcccttcagcagtgtttgtgtctttagaatcagggaaaatctagtggtctctatacattactgcccagtcagcagccccactcctaactctctgtgcctgggagatcgccttcctcctgctgtactgccccatccttctgtctgtccactcctggccgtcagaagttggttcagacttgggctggagtcttctcgctcatctgtggcttacttgcgccttctcccactgcaggtctcttccaggagaggcttttcattttgtagaattcaggagatttttgttccaactttggatcctcatacagctctctgatgggtctttaaaaggcagtgattttatgacttattagaggaggaacaatcatctcacacatttctgcattgtaacagaagtcaaagtctggtgatgctattcttaaattcaatatttatagagatcttgagggttatagtattatctgtcaaaaatgagttttcaggaaatctcaacacacgttagtttattattacatagattttctaaagggaagcatacataattttctctttttctaccatgagcaggtagggttaggccagtgcctttttatgtagaacatccttggtgtcattgcca

SEQ ID NO: 102385 - DNA, 1040 bp, Homo sapiens
tgggctgctgttgctgaaggaagtgtaacaggtgctgcgggtgcacagttaggtaggaaagaggctcccagccagggtgagcaggggcatgcatgttctctgtaaaagatgagagaaaatgcttttagccttgtggacctctgttgcatattttttgtttttggttgcttgtttttacaacctttgaaaacagaaaaaccatttgtagctggagctgtagaaaaccaggctctggatcaggccatagtttactgacccctgggctaaatgatctttatagccatttttggtctcagaattaatgttgaactgtaactaccatgcatttgggatagtaatgtgtgaaaaggcagaggatttaactatgaagtgtcctttttaataaaggcctcaacatatatatttaaacatatttgaaattcaattatgtgagtgtttacgtattccaccaaatttagagaaagcctttcatcttctctcttacaggagtacaaaccaccaggaacccgtaaacttcataacattcttggagtggaaacaggaggacctggtgggcgacgtgctggggagtcaggtcatacggtcgctgactacttgaagttcaaagacctcattttaaggatgcttgattatgaccccaaaactcgaattcaaccttattatgctctgcagcacagtttcttcaagaaaacagctgatgaaggtacaaatacaagtaatagtgtatctacaagccccgccatggagcagtctcagtcttcgggcaccacctccagtacatcgtcaagctcaggtctgtgctgctgcggttagattaggcttgggaatgttttgtgttttctttatgaagtgggattattttaaagtgttgattaaatttgttaatagagtggggagcagttactttacttaaatctgttctttgtagttagtagtaaattcatctcccccaaagctccaatatttagttacgcatgtaataaaatctgcttggcagttggaaatctgtttactaaccagcattttaaattacttcttaa

SEQ ID NO: 102386 - DNA, 1070 bp, Homo sapiens
gttgattaagagtgctctccattcttgtgactagggcagctgaatggtgctggagaaaatcccacatgcagctgtttgtcagcactgttaatactcaccaacctctgctgggcagtcttacatgttttccaagttgtcccatcctctcctattctctttaataatagtttcaaacttttctactcttagaaacctttgccctccccttctctgttcttacccactctttgctttgtaaggaaaagagtcttcagacaggaactctctccactttgtaacattgaatacatgatcctgcctatgtgtgcactgtccacttctcctctaccccttttttgttagaagcagtgtgtttctttctgcctaaggccaagcccactcattgccctgatcccctctctcctgccatcatgggggctttgccctttggtctccctcagctccggtgtcttcactctctcctcttttggctttttctgttgatcagcatttcctcatcctcaggcctctcccatcttaagcagcacctttgcgtgtccccctttctttccctatacttctgctacctgtggtctttgtctctttaccctgaagacctctttgcttgttccacttaggtcctgccctccaactctcctgccggtgtcagcggtgacctttattcatgggtccagtggacaccctaatgctgtctttctgcattctacaacttcatttggcagtgttgacttttccccactctttgaaacactcactgctggtttccttggcaggatgttcttctttccctccccccaccccttttctttgccctttccttcactgtctgtttcgttttttttcttctacccagcactgaaacctgggtgttcctcgaggcatgacctgtgtcccttccctactccgcttaatgtttcctggatgatttcagccacacctgccagggcctgcagtcaccatcctcatgctagttgctcctaagtcttgacttctgacttagacttcacttctgaacccctggggcctttctaattgtttactataaatgtcaccttgaaagtctcaacaat

SEQ ID NO: 102387 - DNA, 4547 bp, Homo sapiens
ttggaatctgtttcacaggtagactcataagttcttgctcatgggttggacagaggcattgttgagcagctaggtagatagtagtcctttattgaaagaagaaagatggagagaggaaggacatgagggaaaagtaaagacttccttttggacctgcccagaatactgtccagcccttttcaggaaatatttgctgacccctggcataaacagggctcccaaggaaggacagtggctagtgaaatagatgaacctatttaaggatataacttcctaaaaattgcagctttcatgatgaaattttttgcccttgaatgtatttgggattttgtgttataaaactgtcttaacacattaaaagtttcaaaaaccgtttccccctgattaatatgatgctagtttgttagtgtcatggcttttgatggaagattaaagcttggaaacagtcctctgaaaaatccttttaaaaatctgttctttcaggtgcgtcagcaatttcctgctcctcttggttggtcaggcactgaagctcctacacaggtcactgttgaaactcatcctgttcaagaaacaacctttcatgtagcccctcaacagaatgcattgcatcatcaccatggtaacagttcccatcaccatcaccaccaccaccaccatcaccaccaccatggacaacaagccttgggtaaccggaccaggccaagggtctacaattctccaacgaatagctcctctacccaagattctatggaggttggccacagtcaccactccatgacatccctgtcttcctcaacgacttcttcctcgacatcttcctcctctactggtaaccaaggcaatcaggcctaccagaatcgcccagtggctgctaataccttggactttggacagaatggagctatggacgttaatttgaccgtctactccaatccccgccaagagactggcatagctggacatccaacataccaattttctgctaatacaggtcctgcacattacatgactgaaggacatctgacaatgaggcaaggggctgatagagaagagtcccccatgacaggagtttgtgtgcaacagagtcctgtagctagctcgtgactacattgaaacttgagtttgtttcttgtgtgtttttatagaagtggtgttttttttccaaaaacaaagtgcaaagctgcttgaatcaggaggagattaacacactgaaccgctacaagagggcaaagctgattttttttttaacttgaaaagattgcaaagggacattgaagtgtttaaaagagccatgtccaaacccatcttcatggatagctcagaggtatcctctttttgctcccccattttaacttgccacatcccagtcacagtggggtttttttgtctttctattcagcaaaagttaatattcagatgttggtcttggtcatttgccaactaattttaaagtaaaaggcactgcacataatttgcataaagggccccatgagggtgttttttttttttctttttgtcccccccatccccctttttttttgttttgttctgttttgttttgggtgggagggtgggaaatttgggtttttaagtcctctaaacacacttgggcacggaaatgcagtactgtaaggaagagggacctccagcttccacaaacaccatcttcagctgtatgaaagggacggttgtggtgaagtttgtcaggcacagtaagcatgctgagtggcggggatcagaactctcctatctgaacctactgaggagcaaagcagcaattacatgggatcctgtggctctcccgttgcagaggccacaggaagataggatggaacgtgactggtctcctaaccaaggtgcactgagaagcaatcaacgggtcggtcgtggccagtcctggggaggtctgagtggtggtctttgggataacctttggccttatggatttggactcgaaattagaagagcctaccatttcagatgcaatcacttttggacatgcttttgcagacagtccttaatgctgaaaacacagagaatgggtaattcaagaggcctttcttttaaaatagacttttgtgacccactaattgtaaggtattgcaaggtcactttgcgtgtgtcataaagttgacttccttattggttgaaggtcacagaagtagtggtttgctttgatggaaatagctacagctgtgtcccttcctgctttttactttttcttttgctttttctcggcacgtggtatctccaccatttcttctgcacaaagatgtcttctgttcatcctgaacatttttaaaaaatgcagaattttatgtgactgcttttttgcctcacaattatgctgtgaattttacaaaaatttattttcttttttgataatttattgtaccaaagctgtttttatagcacatagatgtctgtaaccaataatgtagcagttctgcactttgacacaaggtgtaactagaccatttttaaatgtcagttgaaaattatggctgtactattgcttaaacaaaactggaactgttgttgaatccatagccaatacatttacagcaatctgtgtactgaacatagtagattgacatctaattcaagattacaacatctgttacattctaagtgtgttcaggcttctgaaggtaaagggacactggatccagaagctatggaaccagcagttgattcttgtattcctgattaacctacttgtaaacttgaaagcaagaccttgattgcaccaacaggtccagagtatgagtgcaagcaaagcagaactctcatgcgtgacctgagcagacaggctggtatttaacaggtgcctcgtgttgagattacgctgccttaatgtaacacagtctggcagttgctaaatttgtgttcccattttaaattgaccaattttggggtgtgacacttttgagcggttgaattgggagaatgaagataagtaatttacctgtccaggatcaaaagaagcctagaaaagaagcagtaatctacctctgccgataacctgtttaagatgactcagcagaacaccgcgtttcattctattggtcaattccatgtggctgactaggtcaattttttttctgaacaaaagcaggtttttatatgtaaacagtgagaaaagaaaggctaaacactatgtaaatgtgaatggaaacttggaaatactcgtttttataaactacaaaaactttttgttgtttatcaggaaatccatatttattttgtaattaactgtcaagcctgtggatgatttttttgaacttggtagttcataaaggtttacagtgaataaaaggatatcatcttgagtatagcaatatcaaaaggaattcagtagttactgctgtttaggaatataaggttaagatatcatatgggtcaggtcattttttttttctgtgctggttgccacatcttagcaagcaccaaaaaactaaagcagtttttaaaccgatatttacgtaaagaaaatcataaaatccaatgcttctgcatactgtgttatgttacagtccagttttgtgtgctttactacacagtttggttacaggacttctgtgcattgtaaacataaacagcatggaaaaggttaaatacctgtgttcagattgtaagatctagtccggacttgctgtgtatattgtaacgttaaatgaaaaaagaacccccctttgtattatagtcatgcggtcttatgtatgataaacagttgaataatttgtcctcagactctttactatgcttttttaaaaattaatttaagaaaaatgtaaacatagtaaaaatcttcctatgcaattaaactggtccaggtctggtaggtatagtatcaaagttgagttaaatgtgtaaaaaggaaactatttgagatacattgacataggcatcagcaatctctgaaagtaaaaattggaggtttaacagatcattttgatttttcacattgatttttttatttgaatgtttacataattttgtgattcaaaatgctcatattttagttggtagcatttcgactggatgtgagggtctgatggttttctctgatatgctttgacgtgcttggatgaaggaaggaatacgaatactcattcttccttccctaactcctcgtacggggccatatcagaattctagaattcttgccactgtgattcaattgctaacctaaagtcttctctttttacaaattcacctgcttcagtatatattaaggtggctttcgagaggcaagatgcttatttaaaagttaagcgtgaatctgtaaaattaaggttggttgcgtaaagttgaagttaaccacatgtaagaaaggaaaacttccattagttttcttcttagggtgtgagaattttacctaggcacatggatattgggctgaaaaaaaaaaaccgacatttttatttaaaactacatgtaaaaaatcatgaaagattcagtaattatgttaggctcacaagtgaccattgagtttgcccctgtactgcttcccagcttttgtggtgttgaacttttctgttctt

SEQ ID NO: 102388 - DNA, 1033 bp, Homo sapiens
accatgccctgctaatttttgtatttttggtagagatggggtttcaccatgttggccaggctggtcttgaacttccgacctcaggtgagccacccttcttagcctcccaaagtgctaggattacaggtgtgagccaccgctcccagccataaattttgatctttataactgctatagtgtcttacacctaaagattgataacatattttacaaaataaaatggagtgcaaatgaatgatcatagccaaaggcattctgcacaccagcacctggccaccatttgtcccaaattgccactcccttctgcctaccatttccaccctccgctagctttccttttaagcctgtccattcttacctcatcttccacacaaatggtgtttattctctgcccaaatctggggtcctggctaccatcttcagaaaattgcttgcagacaccaggcaaccttcatttacttttaagaaatcacgagatagccccaaatcaaatctcaaactgcaggaaacttcttcaaattctcccattctatatttgtatcttcctcctccaacagtaagaatctgaattctcaacaacctgtatatgtaggctctctcctacaaaacatacaaaacactttcggaacggtcacatccttaactctactgaggaattgcttatgcaagactcagacctcacagctaaggaccagcaattcctccagttgaaaaagaaaatcccatgtcaccttatttagcctgagggctcccaataatgtaccagtaggtgatggaccaatcacaaactgcccaatgcacttgaaagccaatcagaaagcttccctacttccaaaaattctacctaatagaacactcaccaagcaaagattatttgtcttaagacttccttcttttactctataaaacccaccctcctttgatttttcactaggaggaaagtgatggtagcagtcttccttgtatgatctcaataaatagccttttgttaattctacagatgcactttgcccttttgataccaacaactaca

SEQ ID NO: 102389 - DNA, 1118 bp, Homo sapiens
caatgtgcatatttatatataataaacacacctatgcatgcacactttttgatgggagacactaattttaggcagtataggtcaatttctaacttctgagctggggcatggggtcattttcaggtgacaggtggggtaacagccacaggtatgcaaacttccttctagctggtctcgagggcatctttgctcagagggggcagaaggaagtagcactggcatcacttcgaggaagccgggtgtttgcccgtagcacagcctgaagcaactgtgcttgggacataggtgagtagagaataaagtacgcgtgggcaaggccaggcaagcaccagcacagcctgaagacacaccctccgctcgtggacagaatggggcaccatgcagggagccccatagggactgctcaatgaatccacctggactggatttgtcactagatggtgtgagatgcaacttgtattgcacccatacctggagcccggctgtcattctctgccatggagacaaagtgcctatgttgtggctgtcccagaccctttccaagaggatttagactgcagtgtaaagggggcttcatgttgaggcacattatccatttgtggttaaaaattttagcaaggagctaggaaagttatgtttggggtcatgatccaaaggaacttctaccctattagcttaaggattgaatctaaaagatattggaggttgaaaaacggtctcaggaaagtcctctaacttaacacagggacataatctattgaggctgaatggaaagaaggacaaggtgttgcttttggagccaaagtgccagggttcaagacattcgtcaaagggcagtaatcatacctatgcagcctgccttgcaccgtcgccaagaaagctccaagccagtgcaaaccaactatctgcaaaacatctaatgagaggtcagagctgggctaaaaagtcacagacctgaacctttatctgcaggataaaacatttggattaaaggcatttaaaaaaaaatgcttgctgcttttttggtagcagagcataaagccacatcaaaagaagacatttatgcagccaacaaacatatgaaaaaaagctcatcatcactggtcattagagaaatg

SEQ ID NO: 102390 - DNA, 1087 bp, Homo sapiens
atttttgttgttgttgtgatctgtaattagcaccttcctgatatgtgtggcttactcttatttccatataaatatatataaatataccagtagttttctaaggaaaagaagtttcctcttattcttactcattttaaaataaataaataaaattgaacataaatgagaaaaaagaatttttaaaatcttatgcctacaggaaactttagattgagcaaaaacaagggcatgtgatgtgaataatcccaagattccagaactattcactttaaagacaatgatctatggatgtgaggcagcttttgtctttcccccaaaatgttctcctgggtagccagggaggctggctggaggctgtgcttgtggaaggcagctggtcagaaatcccacgtggatggggatctaccccaagatgaagatccctggcttcaggaattgactgaatgtgttcccacccctttcagatcctacgctatggagtacagaccatgtgcggcagtggctggagtgggcggtgaaagaatatggccttccagacgtcaacatcttgttattccagaacatcgatgggaaggaactgtgcaagatgaccaaggacgacttccagaggctcacccccagctacaacgccgacatccttctctcacatctccactacctcagagagagtaagctcccccttcctccaaggatagatggctgtggctatggttcttatgacctgagcttcagagggttcaaccaggtgtgtcgacagcatcctcctgccctcgcccagttcccactggggatccgagggagccacatgcttggtatgtgatgacttaggggagcaacaccctggccacatcacctgatgagaagtagtcagcgctctcaggagaagccaaaattcacttcaacactcagctgcctcctccagggtcctgcgaccaagaagatggaatgtcaaaggggaaaggaagcgttaactggtcacacattagttaagtctccatgataccccgaatcgaaatagaatcattaaggcttctctttcgtaggaattagggggattattctccctaaagctacatgaagccccact

SEQ ID NO: 102391 - DNA, 1061 bp, Homo sapiens
acgaggagaagaagtgagccaagggtgaagcccttgtgttgggtctgagcccctggaagggattacctctgtgttccaccttctgccagtcctgctggtttgtggatagcagggattgcttccctccaaggcagttatggtgagagcacatgggaagtgatgagggctcttttaatctaaaacttcttttctcctctgtgtgaaacactttcttcctctttttcaatctcccctcaagcctattcttgttgtccttggccagtgcggtgaagcagttccttgcattgtgtgtaggacctcgccaaggacagagagagacacagcgtgggttggtgttgcattgcattagaggtggccaagatgcacagtccagcccatgtggtcacaggaaggaggggtattactccgtaggtttcctttctcacaccacagcacagaatgattgctcagatcaaacattcattgtctttaagcactggtacaattgcagttcaatctcccctgcttcagtctacactgagttttcattgagactttgaggaattcaagcccctcttgctaaacacacacacacacacacacacacgcgcgtgcgcgcacgtggactactagtatcaggtttactaatgaaagagctgaatgcagagaagtggatggatttgggcccagttgatctgtggaagagggagactgagtctgggctctttactttcttggatggtgaatgttgccgtttgcatagaagcccgcatggcagtgaactaacagtaaccttgaagatgtgtttcatccaccacccttgaacccattatggctcaagcttgggtattgcttttaggaatctagcattgtttcaggaaaacattttagttcttattgttttctgggaagccttactttgcacaagggcagtggaagaaaccgaagtgcatattaagtgccatccattacttgctgtgtgtttgaatagtgatcgcagcgttgctatgttaaattgcaaagaacctgtgaacctgaatctccctccatccttcccttgtggcctctcatctctcgccact

SEQ ID NO: 102392 - DNA, 1146 bp, Homo sapiens
ttctcaaaggagcgagcatgtcgtggacacacacagactatttttagattttcttttgccttttgcaaccaggaacagcaaatgcaaaaactctttgagagggtaggagggtgggaaggaaacaaccatgtcatttcagaagttagtttgtatatattattataatcttataattgttctcagaatcccttaacagttgtatttaacagaaattgtatattgtaatttaaaataattatataactgtatttgaaataagaattcagacatctgaggttttatttcatttttcaatagcacatatggaattttgcaaagatttaatctgccaagggccgactaagagaagttgtaaagtatgtattatttacatttaatagacttacagggataaggcctgtggggggtaatccctgctttttgtgtttttttgtttgtttgtttgtttgtttttggggggttttcttgccttggttgtctggcaaggactttgtacatttgggagtttttatgagaaacttaaatgttattatctgggcttatatctggcctctgctttctcctttaattgtaaagtaaaagctataaagcagtatttttcttgacaaatggcatatgttttccacttctttgcatgcgtttaagtcagtttatacacaaaatggattttattttttagtttaactgtgtttctccgacagctcacctctctctgaccacccagccatttccttcctgtgctccacgttcttctgtgtgattaaaataagaatattatttttggaaatatgcaactccttttcagagatcaggagggatttatgtagcagctatttttactgcaaaagtaattcactggaaaaaaaatgtaatttgtaagaaagctttatttttatctcagctctatgtaaagttaaagttactgtacagagctgaaggacggggggcggtaggggtcttgatgaaacctcttgaacgaagcacagtttgtcccatctttgttcactcgtgtgtctcaaccatcttaatagcatgctgctcctttttgctcagtgtccacagcaagatgacgtgattcttattttcttggacacagactattctgaggcacagagcggggacttaagatgggaaagagaaagcatc

SEQ ID NO: 102393 - DNA, 2059 bp, Homo sapiens
aacagggtggtgctaggccattcatgagggatctacccccatatccagtcacctcccaccaagtccggcctccaacattgggaatcacattttaacatgagatttggaggggacaggcatctaaactatatcaccttagttcactaatgaggagagtgacttggaaaaattgcccacctagaaagcagaaccaagatcaaacccaggttgtgacagcaggtgtgttctgtttctccaaggcacactcccacccctgctaggcatgctattattgtctgtggtgttaggtgaatacctagaggaatgtttccattctgtaacaaaattatatgttttttttaatttgaaataaattttatgttaggtttttggctcttgtccaaggaagaacatgcagataactattctcacatgtcgacatgttaccgattataaaacctcagaatccaccggcagccttccttctcctttcctgagagccctaaaaacacagaatttcaaagactcggcgtgttgtccattgctagaacaaccgaatatagtacacgaccttcctgcagcaggtggtattaaaatttgtaacatttacattctatcttattgctttattgatactacttttcaccattagaggtctttttgaggtagtttattaatgatgattgataccaatatattgctgttagtcctcaatatctgtagttacaagtgcagtatatttagtttgagttttcagattttccagacacagttatttgaggagctcatgtttcttaactgttgggcttcagacatgctgtgtttctttttggtctttgattattcagaatgcaagccagtgttaaatataaattattggtgcatcaaaagttgataaagtacattttaattatcaaaacagaagttttgaatattgaatcttgatagttgctttaatttttttattaccatcacacacatctgccatcatatgacaaagagactgccatttacttttcagtgggtaatatattacataattgttatttattatatgaactgtattaaaatagggtttggttggggtttctttttgctttcaatgtttactagaatgagaagtggctaaatatttcactttatgcattttgtacttatttgttatttatatgctttattatagtcagtagaattttaatctttcagctacttaaatcatctcagctgtattttcaggaaatataaaattaatatttgcaaaagaagagattattaggaaaataaattgactttgaaagaaaatcttcattataattggttcaaaattgcagtaaataccttgattgaaagaggcagctgagataactacttttaacaacagcctttattatttaaaggtgtttaatttaaaagtaacataatagaaaacttacatcgtttttttttcttgtgtattcatagttctaagctactgtcaagtatggaaaatcccagcaattctgtacttgtgttatactgatgtgatgaaattagacctaatcacagtggaagcttttaagcctatactttctaccagaagcttgaagggtttggttaaggtaaggttttaactcatttaaattaatagctgcattgttataatcagcttagtaacaaacataaatgtatactgtcattttaaaccctaagcaatgcttggagatccattcttctcaaagcgaagctttctagtctggcagtttgaatttgattgtcatcatctcttctgtatacgtctgtaacttgacgaatgctttgttcttgtatgatagattaatgcagtgcaattaaatcccaaatgtctatgtggacagatggttttactgttcaataagcttctataactactttgcaaggttttttaaaaaatttttatttaatttttgagacggttatttttgagtatagtgtggatcaaattattataatatttatttacccaattttacagagaactgtatatgtgaagatgagagaattacataatgaacctcttccttacccttggtttatacctttggtctcattttctaaaaaaatt

SEQ ID NO: 102394 - DNA, 1069 bp, Homo sapiens
acccctacacaaccgggtaaattcaacaggaagattttgccacgtttattttctctcccgccactcctaagcgaattccagtcatcatggcctttcacctctacatttttcagaatacatctcaaacgttttagggattttcttacatatgctattatcacccctaacaacactaatactaattttccagtatcattttgtagtccatgctcactcacgtttacctagttttttcaaacatgacattttacagtggtctgcgtgaatgagaatcctaacagggtccacaggttacatttagacgtgtcacttcatttagagcaacctcctcttacccctcctaagagacaggactgattgtcttgtccagtgcccccacactctgaatttgtctgatagcttcgttgtggtgtcacttaacgtttgtatcacctgcatgtcctgtaaaatgaatgttcatttggaggcttggtcagattctcattcaaagttttgtcggcaagaatgcttctactaagtggtgctttctgtttcttattgcaggctatccccagctgtctcacttttagggatgctaagattggttcttgggtcaggtggacagcctgatcactattttagagttctccgtaaacacgtatgcaatagttttatctgttggttatcattgtccgagtccatcgttttctgaggatattagttatattctttataaaactaacgtgcattttatttattgtaaatcatacatatagtgcccttttgccatgatactgtttatattgaagttgctttagtttcatcttgtttcttgtgttagggaagtgcggctccttcgaagacaaacaaaaacatctttggaagtttctttgctagaaaaatatccgtgctccaagtttataattgctataggaaataatgcagtaggtaagtgaaaatgcagaagacttagtcattttgttgaaagaatgaaatatacttattttcttccatcataaaagatttaaaatgtttagtactttaaaaagccacagtagagtgattgtatttctgagtaaaatctctctcc

SEQ ID NO: 102395 - DNA, 1017 bp, Homo sapiens
ctggcgcccgcagggctcaagctgcgaatgaaagcctttgggggccggacgcggtggctgaggcctgtaatccaagcactttgggaggtctaaggaggacgatcgctagagtcctggagttcgagaccagtctgggcaacatagcgagaccccctcccccaatctgtaatttaaaaacaaaaaagctgcggggactgctggcccagggcatgacagcgcgggcgggcggtgtagagggcgtggccgcgagctcagggtgtgcctgggagcgagccctgtgcggggcgggacgtagcgcccgcgcggtgggggtgtggccgcgagcttgggctgtgcgcggagggcgtggcctgtgcggggcgggacttattgcccgcgcggtgagggagcgtggtctcgcgcaagccggcgtgcggtcccgcggcgctgcagttgtgtccagccggtcacggggcggctatggcggccacgttcttcggagaggtggtgaaggcgccgtgccgagctgggactgaggacgaagaggaggaggaggaggggcggagggagacgcccgaggacagggaggtgcgtctgcagctggcgcggaagaggtgaggcaccgggataagggcagcgcgctcaccgcagctggaaggtgcgcgggcctggcagccgcgacggcgcctaaggccggggctccgcggtcttccgagtggcccccgcggttgccgccgctccttggctctgcttgggccctgggtctccgtgaagccgcggcgtccagcggcgccagccccaggtgtgtgtggttctcgcgtggatctgctggcgtttcgtggagtccagggtgaagccgctgtgggagggctgggttcaaatccgttctttaaaggctttctggagcgtttctggagcatttctggaggcttggtgtcttgcggactcgtgatcttcccgcttgtcacactgtcttgggccgcagcgctcccgcgggccccaccacgtttgtcgtggattgttcacggacacaccaat

SEQ ID NO: 102396 - DNA, 1026 bp, Homo sapiens
caaagtttttttttttttttttttttttttttagcaatttcagtgtaatgaaagaatttaagctttgaatttataatttgctgtggtggggttaatttctgtcagtatttgagattgtattatcagtcttgcataatgaaatccttttttggctaagtatttaattcgaacatatttgcctttttaaaaagtgcttggcctaaacttattgtaactgcatgaaataagcatttgcttaaaacttaacattgtaaaattgttctctctgaaatgtgtgcagaatttaaatcatggccaaatgtattactattaccctatttacagtaatttgctttgcagaaaatatttcttcatcatggaactgtgaaatcaaattgaagatcttactggtaaaaatgacaaattaacaaaaggactaagacaagtggtgcccaaacaacctttttattctgcagttccatcatcataatagaccagttaacccaggagtcctaatgttttaaaacatcattgtggtgatcttgtttattctatctcactaaggatatccagtttcctaagctcttactggctagcaatttcgtcttaattttattgctaaatgttcaaattttgcttccaaactcactttatttttgcagatgtgtacatctgctaagtactaattttatgtaaatgattttgttgattatctttccacatcttaaaatgtttctaacagctttgagattttatctcaacaggctctctctgaccccaaagtagtacttaccttcgtgactactgacaaagtcacaaaatgcaggcgatgtcatgtatttcggtacaactaaatctaggaaacggttttttcattgcattactgcatattttcattttcatttaaattatgtcccctttttctcttgcttgaaacagtgctcctcgaactttgtcttccagcacattttaaagagaaccaattaaagaacaatcacacattctgcttattaaaggctatttaaaaagaaacattttgtattagaa

SEQ ID NO: 102397 - DNA, 1040 bp, Homo sapiens
ccattgatgtcattttgtttataatattgcagttcatactgaatgaccacttgatatgactaattcagggaatatatatttttctatgaaagctatgaatgttactatcacggcttttccttatttttacttgtatgtagcagcatttacagaaatgccaaaaatgtgcctcattaagaggcaggtcttaatcagttagataaaaataaaatgtatagcttaagatcaaaacagtcatatttttagatacagtgaaatcttttatgtttctctacagcaccttaaaaattagaacttgaatactttgagtaaacttactacaatctcatcccaacaaactttaatggtagcatgtttggcctatttcattgtggcctgtactaggattagaaaatttggtcgtggtataacaaagaagtgtatttacaataggatttaatttgttgttaatatgtatttgttgaaattaaaattgccagattaaatgaatatactgtcgcatctttttaacatagtaacgtgttactggaaaaattaagttgttgaaagtaagttgttttcccatttaaaaatatctgaatatatgatttgcatgtgtaaatctgaaaaactaaactacagaaacctagggttttctatttcttttttaagtcaaatgcatttttttttttttgttatacagatgaaccaagtgtctaaaatacttgagaaatttgtggttgcatgtctgttttaaaaaaaaggctttttgttttttagcataagccagaatattctaacctactaagtctgtgtcctttgctccttttgtagtatactttcatctaaattactgatccccaatatgttgatacacaggtgagaaagggaagaattcctaataaactgctattacttttaggtgcatggggtttgatttttgagctctaatgaaatgcttaaacttctttccagttcaaattttacacttaatttataatatttattgagtatattatgtcctcaacaagtaactataaaatgaaatacttaactcggtg

SEQ ID NO: 102398 - DNA, 4939 bp, Homo sapiens
gaggattactcgaagatgtgcagctacggctgccaataagatcaagctcatgagtgatgtagaagatgtcagtttagaaaatgtgcacactagaagcaaaaatggaaggaaaaaacctctccatcttgcttgtactacagctaagaagaaattgagtgattgtgaaggaagtgtacattgtgaagtaccaagtgaacagtatgcctgtgaaggcaagccacctgatcctgactccgaaggtagtacaaaagtgcttagtcaggctctaaatggagactcagactctgaagatatgttgaattcagaacacaagcacaggcataccaatattcacaaaatagatgcaccttctaaaagaaaaagttcctctgttacatcttcaggagaagattcaaaaagtcatattccagggagtgagactgataggacattttcttcagagtcaaccttggcacaaaaagctactgcagagaataattttgaagtggaactgaattatgggctgcgcaggtggaatggcagaagactcaggacctatggaaaggctccttttagtaagacaaaagtgattcatgattcacaggaaacagcagagaaggaagtaaaaaggaagagatcgcatcctgaattggaaaatgtgaaaatctctgaaacaactgggaattcaaagtttagacctgatactagttccaaatcatcagatttgggatctgtaactgaatcagatattgactgtactgataatacaaaaaccaaaaggaggaaaacgaaaggaaaagcaaaagtagttagaaaaggtaaaacttttacagctaacatatctaaaactgtgagacgtcaaagacaaagcaaacgccctaggttaagtgtggatgataatgactgggaggatttggactatgcaaaatctaaaagagttcttcgacgttcaaaaataaaaacgagaaatcagggtagaaggactgtgagataccatgatggggatgatgacagaagtttagaaaatgtgttagatttcaatggttgcaccttatgaccttgagggaaagccagttcatttaagaggaaatggactggcatttatggtgaaagctggctgttaaaattatttttttgtcttacaattcagggaatatatttatatttttctatgaaaagttatgaatgtgactaaatcatgactgttatttttatttgcacttgctggtctttgtagcagcattcagcacaggtgccaaaatatgcttcattttgggggcagatctattttgacagtatttgactacatatagcaagagtttgaaatatgttaaacactagacatcctggttatcaaaaccaatgagcattactttcatggcagcaagtgtcatgcagttattttctgaatttgtcaaagaggcagtagtttctaacccctgttctatagtagttacaacaatttcacaacctatgtttacagattcttcataaatacatgcatactgacactataatcatgggaggtgtaaccatgattagtaggcgaggtacctaccacttttttttttttcttcccctggctacttgagtagaatgcattataccagatctggtcactttcattgaaatggtttctaattttcttcccaagtgctgttgggtttttttcttcttaaggaaaacgttgtcacttttatgttataaacttgaatttataaagtgctggtaaattatttttaatgatttgagtgcatgttttaaacctctaggaccagagcatagtcagagcattttcttttaaattgtgcactaacaaaatgctatataatctgtcttctgtccaagatctcctggtttccattgtaagggatttaaccaaaatcttgctcttccataatcttactctgtgaaatagaggaattcgtgtgccttagatttagaagtgtgttctttaatagagtgtacagggctaaaagagtatttaagttaatatgtaggtttcccccatctgtattccaattgtagaggtgagttttgttaagagtacaattgcaaatcttatctatataggaaaatagctaaatgtcattctccatctctttgttttagtttactgcttccatgtgcaatcctaagcattctttgctggggcaactaaatgtatctttattagtgacttctagtccaaatataagaaactgtcatgttttgtgggaaaataattttataatccatttaaagtgaaagtttatcacacaaatagtacacttattttctaaccaaatacttgataggttatgctactccagtgtagatggccattcctaacttgtttgtgcctgaagatggacttgattcaaatggtttacatatttagtgggtaagggatatgttacagtaccccacctgtaagttatttattagccctaattgtgtttgatttcagacaaaattaacccttttctcctgtgtatctttgaagtggcagataaggtgaagcatcagactggtatcaatattagacaatgttatttattagccctaattgtgtttggtttcagacaaaaccttttctcctgtgtatctttgaagtggcagacaaggcgaagcatcagactggtattaatgttagagaatgttctgaagtgttcctattttgtagttatctattccatttgacatagtagaaggtacattttctttctactctgatgcatggggaaggatgtttttggacattatcaactgagataggtgggaaacctcctctcatttgtggcttagagagctatcaccatttcagaactatgatgcttttcttctcagaacttgtgttaagtagatagtaaacagattgattcatgataattgtccttgactaagactgaaaagactaatgggatgccttttactttgctaattttaaaaactggtgatagatgtcaaatccattaatttatttaaactcttcttaaccttctcttttataatctgttctcaggttttaactccatgtttaccatcatttgcaaaaaggtaccaaaaaaatccataaataaatatggaatacattcataagtacatacattcttttggtataaaacaatattttgacagtttaggcttcattaatagaactattctgattatttggactgcattaattggtcattgactggccatccaattaccattttttctttcagtccaaaatagttagacccttgcatacagaagtggtattttggtttttaatcagatttggtttcatcagaagcagcaagaatggacctgatgtctttaaaagcatagccgacaatggtagcttctcaagttatgaaataaaactgagagataatggagaaaataatttttatgggtttttttggttatggtgctattcctaaggttaactttgaatatgtgacacacacactcctaagtacctttaaggaaaattaataaatcattaatagttaaaatgtttacattgagcactagaacatgtttggccttttttttctacgttatgcaaaatgcccagggatttaatgcacaggtgtactttaatgtttagggtcagtttgtagtattcttgagaaaaagataaagggttataatttgaatgtgaactgatccagaaataagtgctgtacctttccactgcacttgaagttcaacttaatggtgtatgtgaaaaacaaaaactactttggttgtgtatgtccaaagtcctatggttttattcatttatggttttacaggctttgaagtactcagatttgatttttgctttcttggaaagactcactttaccaagcatataaaggaaaaatgatttcaaacattgacaagatagatgagtgttaacaaagctttcttttttcgtgtcctccttatttaaaaaggtatacttacaatgtgaagtaacttatgaataaaaggaaaagtttatcccatattcaaataattcctaaggtcagcctccctttttgtaagtggcaaatatctgattaaatcatttctcagtttattaatccttggaaacaatgatatagcagttactcacagcttgtaaattacaacagaaaggttcctttcaaatagtagagctgcacctaaagaggaaattgggtttataagaaaatggaggcaaagaacttaagttttaagaaaaagcacttcaaaacagaagggcaaatggaaaaggggaatataaaacaaaccaataaaaataccatctgagggtgttactgtccaaaagtaaagaataagatgcatcactaagccctttgcactcgttatgacctcgtaagtaaaaattatcacttagaataaggggtgcacactacattccctctgtcttctagacttttttttttgtagaagaatcagaaaacaatttactaacctccctgtttgatattaaaaataggaagaattttaatattttctgttagtacaagttgaacttgattgtgccaactgaaaccccagaggtttgtatatcagtagaatgcaagaacattgttaaaggtgcttacgatcttttttgttttcctttccactccattgtatcaattttttgagtaacttttaaatggctagaaaatggtctttttgctttgcccttttaaagctgaaataaccagctccattcttttcatgaatagtaagttgatatatttatttatcaggtatcttgcagttgtcaccaaatactgtagttttcttatgttgtatggaaattatagttcaattattttaatgtgatagagtgcaacaagtcattgtagaacttttcacctgttaatgttgaagttatacctctgaatttctgctgtggatatcaaggaaataataaagcagaaaccccaagaaatttgcaacttaacagtttgagactgtctcttatcctagtatttgggaagagaaggaataaatttgtcaaaactag
